United States Patent Application Publication US 2003/0109690 A1 - sequence listing, part 2

SEQ ID NO: 2147 - DNA, 522 bp, Homo sapiens
  misc_feature (2)..(2): n equals a,t,g, or c
  misc_feature (4)..(4): n equals a,t,g, or c
  misc_feature (50)..(50): n equals a,t,g, or c
  misc_feature (52)..(52): n equals a,t,g, or c
anantaaccctcactaaagggaacaaaagctggagctccaccgcggtgcngnccgctctagaactagtggatcccccgggctgcaggaattcggcacgaggaggaatcgtgtgtctgctgttgatgaacttgcaatggctacagaacgactaagagtgcgtgatcctagggagccaaagcctaatccgcctgttcttcatatcattgaaccacatgaggtagaacaaaaccgaataaaactactaaatgataaagctgttgctacatcacagcttcagaaaaaacttgggcagcttctttacctaactaatttggagaagtctcaagataaaacatcgggaggtgttaatccagaaccttgcccaatctgtgctcgacagctaggaaaacagtgggcggtactgacctgtggtcactgtttctgtaatgaatgcatttctataattattgaacaatacagcgtgggatctcacagaagctccattaagtgtgcaatctgccgccagaccacatctcacaaag

SEQ ID NO: 2148 - DNA, 508 bp, Homo sapiens
  misc_feature (4)..(4): n equals a,t,g, or c
  misc_feature (7)..(7): n equals a,t,g, or c
tganacnaaccctcactaaagggaacaaaagctggagctccaccgcggtgacggccgctctagaactagtggatcccccgggctgcaggaattcggcacgagctacaactggagaatccatccatcaggtgactgagttcctccaaaggggacactactaatgtgtctcagacactaactaaggtgagaaggaatgcactgttgagggggcagcacatccttaagaagctcaatggtggctgtcccctgcaggctggaataatgctagggatgttttatagaactggatcccccagtagtgagtaaaatgatagagttccagaataacaggggccaagtggcagcatttaactgtgaggacaagataaagtaatttccgtaaggggcatcaacgttagagtgacaactgggaggcctgacctgtaggtgtccatgaagatggctcttaggacatgctgttcctctaggcaagacacatattgctttagacatataatcaaaagaggat

SEQ ID NO: 2149 - DNA, 546 bp, Homo sapiens
  misc_feature (11)..(11): n equals a,t,g, or c
  misc_feature (21)..(21): n equals a,t,g, or c
  misc_feature (24)..(24): n equals a,t,g, or c
  misc_feature (26)..(26): n equals a,t,g, or c
  misc_feature (41)..(41): n equals a,t,g, or c
ccctcactaanggaacaaagnctngngctccaccgcggtgncggccgctctagaactagtggatcccccgggctgcaggaattcggcacgagcggttttattttcaataatgaacagctggctcagatgaatgaacagctggctcaggtgaatgaactaaagaaaatgacccttcaaactggctttgaacaaggtgacagagaaaatgtactgtgtaataaaaaggagaaaagaataacaaatgagcaagaggaaacatactctttatcccaaagttcaggtaaatttcaccaggagagtaaatttgataagggtcagaattccctaacttgtaataaaagtaaagcttctagacagacatttgtgattcacaaattagaaaaagataacttactcccaaaccaaaaggataaagtaaccatttatgaaaacctagacgtcacaaatgaatttcacacagccaatctttccaccaaagatatggaaatttatgtgattatgggacccacaatatattggatttgaaaagtatgtcactgatattca

SEQ ID NO: 2150 - DNA, 537 bp, Homo sapiens
  misc_feature (2)..(2): n equals a,t,g, or c
gnacaccctcactaaagggaacaaaagctggagctccaccgcggtggcggccgctctagaactagtggatcccccgggctgcaggaattcggcacgagggagattgatgatgactttttcccaagttctggggaagaagctgaagctgcttctgtaggagaaggaggaggaggaggtcggaaagtgggaagataccgagatgatggagatgaagattattataagcagcggttaaggtcggtctgtggggattataaatacattgtactgtttgctttatcttaggtgacaggtttattaatatgtaagcattctagatccagcttaatatattagacccccccgattatacagaggttggatttctgcagccttaacctgctagaagcagtggggcccctgagtccttaatgatgctggccccaaatgcatgtacttctaggtctttagttggatttggaggcaagtctaagatgaaaaacttaagggaaggctggggcaagaggcatacagagggctgagtgtgagctgtgtcgc

SEQ ID NO: 2151 - DNA, 480 bp, Homo sapiens
  misc_feature (31)..(31): n equals a,t,g, or c
tcaaccctcattaaagggaccaaaagctggngctccaccgcggtggcggccgctctagaactagtggatcccccgggctgcaggaattcggcacgagatgatattgagacctctgtcatttaatattgggacaaaattgtatttctaactcacaacaaacagaaaaactacattagatgtactatcactttagatttgaaaacaattctttaaaacttttacaagaaaatcaaaataagactctactgcctttaatttgaggaagcacatgtcattaaggaaaagactgatgagttcacatttgctgataaaaataatataatctgtccatcctaagttaggtgtccaacaaatagttacatgtctatcctctcacctttcatgtcctccaacacttctctttaaagagtggcatagataacatcatgaaagaatgaggaaactccagtgcaccaaaaaattatagagtttataaatatc

SEQ ID NO: 2152 - DNA, 500 bp, Homo sapiens
  misc_feature (3)..(3): n equals a,t,g, or c
  misc_feature (6)..(7): n equals a,t,g, or c
  misc_feature (51)..(51): n equals a,t,g, or c
ggnganntcaacctcactaaagggaacaaaagctggagctccaccgcggtngcggccgctctagaactagtggatcccccgggctgcaggaattcggcacgaggtctgatttcttcacacttgtaaacaattgtattatatatgcatactgtatattttgtagttataagaagaaaaataccagaatttaaaatgcagtcacaatgtgttatgttttcagatgacttacgtatgtttttgttcatcagtattttaaaaaataatcacctgtttgtgaaaataatggttttgaaaacagcattatgatgagagggaacttcgtaatttcatgagaatgtagatggtgactgtttaagtgggagctcacataggcattaacatcaccctccttttgcacagtccttttaagtctcctgttaaacatcttttattgtgtgtatttaaaggcacacagatgctttttcctgtattcatcttacaaatttacctacatattcagc

SEQ ID NO: 2153 - DNA, 433 bp, Homo sapiens
  misc_feature (3)..(3): n equals a,t,g, or c
  misc_feature (7)..(7): n equals a,t,g, or c
  misc_feature (9)..(9): n equals a,t,g, or c
gangtcnancctcactaaagggaacaaaagctggagctccaccgcggtggcggccgctctagaactagtggatcccccgggctgcaggaattcggcacgagcttttggcttctagttgattactttttttttccctgcaaatttgggttttgattacttgagcatagtgatcaaaaaagatcactgggcatccatataccgtttcattaatgattaatggactacaatattgacttgtctcatgttatcaaagttataatctgctttatatagcaagttcactttgctttaaacagcttttaatttatattattgttcttgaaaaggtgagtaaatatgcaaattgaataattttaaaatccaagggcaggttttgtaagaaacttagagggcagagaggaatttttgtaaaggggaaaaattattttatttt

SEQ ID NO: 2154 - DNA, 129 bp, Homo sapiens
  misc_feature (113)..(113): n equals a,t,g, or c
  misc_feature (115)..(115): n equals a,t,g, or c
  misc_feature (118)..(118): n equals a,t,g, or c
  misc_feature (124)..(124): n equals a,t,g, or c
  misc_feature (129)..(129): n equals a,t,g, or c
gaaaaatcacaagccttctgtacttttaggctttgatatgtctgaacttaaaaatgtgaaacatagattgaactttgaatatgaaccataaaacttgcaaaaaaaaaaaaaangnacntttaangtagn

SEQ ID NO: 2155 - DNA, 423 bp, Homo sapiens
  misc_feature (22)..(22): n equals a,t,g, or c
  misc_feature (26)..(26): n equals a,t,g, or c
  misc_feature (29)..(29): n equals a,t,g, or c
  misc_feature (35)..(35): n equals a,t,g, or c
  misc_feature (265)..(265): n equals a,t,g, or c
  misc_feature (312)..(312): n equals a,t,g, or c
  misc_feature (314)..(314): n equals a,t,g, or c
  misc_feature (347)..(347): n equals a,t,g, or c
  misc_feature (357)..(357): n equals a,t,g, or c
  misc_feature (367)..(367): n equals a,t,g, or c
  misc_feature (391)..(391): n equals a,t,g, or c
  misc_feature (404)..(404): n equals a,t,g, or c
cgggcccgagatgtctcgctcntttnccntagctntgctcgcgctactctctctttctggcctgtaggctatccagcgtactccaaagattcaggtttactcacgtcatccagcagagaatggaaagtcaaatttcctgaattgctatgtgtctgggtttcatccatccgacattgaagttgacttactgaagaatggagagagaattgaaaaagtggagcattcagacttgtctttcagcaaggactggctttctatctcttgnactacactgaattcacccccactgaaaaagatgagtatgcctgccgngngaaccatgtgactttgtcacagcccaagatagntaagtgggancgagacatgnaagcagcatcatggaggtttgaanatgcccgcaattnggaatggatgaattccaaa

SEQ ID NO: 2156 - DNA, 519 bp, Homo sapiens
  misc_feature (309)..(309): n equals a,t,g, or c
  misc_feature (371)..(371): n equals a,t,g, or c
  misc_feature (458)..(458): n equals a,t,g, or c
  misc_feature (477)..(477): n equals a,t,g, or c
  misc_feature (510)..(510): n equals a,t,g, or c
  misc_feature (514)..(514): n equals a,t,g, or c
  misc_feature (517)..(517): n equals a,t,g, or c
gccacagtctaaggtgctgtacattacctcaaatccgatgagtctctgtcaagcaagcagacatcagccaaatgtgaatgatctcttggttcatggaatgcctctacagccaagaaatctctccctaatggacaagctcctagatcttgatgacaagctacttatgaggcctgggtccagtaccatcctttcaactcgaaattggccaaatcgagctgtggagtttagtacatcatctctgtcatacacagtgcagtccaccaggagacgcaatccaccaccacgaactcttcatccgatcagcacganccattcatgtgctgaaacaccaggatctgtggaagaaattctcagaggagcccgagtcccantggcacccgactcgctctccttctccctcaccgacgcccctgagttgaaattaatctgctaccacctattgggcacagctgaagtgnaaacatgtgatcactgtgngggtcacagagacaagatgaatccccaatgganactntantc

SEQ ID NO: 2157 - DNA, 499 bp, Homo sapiens
  misc_feature (218)..(218): n equals a,t,g, or c
  misc_feature (313)..(313): n equals a,t,g, or c
  misc_feature (317)..(317): n equals a,t,g, or c
  misc_feature (328)..(328): n equals a,t,g, or c
  misc_feature (337)..(337): n equals a,t,g, or c
  misc_feature (362)..(362): n equals a,t,g, or c
  misc_feature (372)..(372): n equals a,t,g, or c
  misc_feature (382)..(382): n equals a,t,g, or c
  misc_feature (408)..(408): n equals a,t,g, or c
  misc_feature (430)..(430): n equals a,t,g, or c
  misc_feature (433)..(433): n equals a,t,g, or c
  misc_feature (443)..(443): n equals a,t,g, or c
  misc_feature (447)..(447): n equals a,t,g, or c
  misc_feature (451)..(451): n equals a,t,g, or c
  misc_feature (462)..(462): n equals a,t,g, or c
  misc_feature (474)..(474): n equals a,t,g, or c
  misc_feature (484)..(484): n equals a,t,g, or c
aattcggcacgagcattgaggtgcggaattacagcagattgaaacctgggtaccgatgggaacggcagctggtgttcaggagtaagctgactatgcacacagcctttaatcgaaaggacaatgcacacccagctgaggtcactgccttgggcatctccaaggatcacagtaggatcctcgttggtgacagtcgaggccgagttttcagctggtctgtnagtgaccagccaggccgttctgctgctgatcactgggtgaaggatgaaggtggtgacagctgctcaggctgctcggtgaggttttcactcacagnaagncgacaccattncaggaactntgggtcagctcttctgccagaagtncatcgctttnaatctgaatnaaacgtttgaaatttcatcccggtgngtgtttgtcagacttgttattntanttccagcttngggnggtnagaggttggcncgaattttgagntcaccagttngtgggcctggttgcc

SEQ ID NO: 2158 - DNA, 471 bp, Homo sapiens
  misc_feature (396)..(396): n equals a,t,g, or c
gatgaattgagtgaagctctcctacttataaaggctcaaaaagaacaaaaaaatggagacctttcctttttagtgaaagtagatagtgaaattaataaagatctagaacgctctatgagagagctgcaagcaactcatgcagaaacggtgcaagagctggaaaagacaagaaacatgctaattatgcaacacaaaattaataaagattatcagatggaggttgaggcagtgacccgtaagatggaaaatttgcagcaagattatgaactcaaagtggaacagtatgttcatcttcttgatatcagggctgcacgtatccataaactagaagaagctgtaagtttggggagcatataagtgttcttcagctgttggagttttgcatattctccatanccaaaattttcacagaaaagcaaggcagatattcacgttggtgatatttggttggcctctgtatataacggtgaa

SEQ ID NO: 2159 - DNA, 345 bp, Homo sapiens
  misc_feature (10)..(10): n equals a,t,g, or c
  misc_feature (15)..(15): n equals a,t,g, or c
  misc_feature (45)..(45): n equals a,t,g, or c
  misc_feature (73)..(73): n equals a,t,g, or c
  misc_feature (85)..(85): n equals a,t,g, or c
  misc_feature (115)..(115): n equals a,t,g, or c
  misc_feature (139)..(139): n equals a,t,g, or c
  misc_feature (142)..(142): n equals a,t,g, or c
  misc_feature (149)..(149): n equals a,t,g, or c
  misc_feature (153)..(153): n equals a,t,g, or c
  misc_feature (169)..(169): n equals a,t,g, or c
  misc_feature (196)..(196): n equals a,t,g, or c
  misc_feature (207)..(207): n equals a,t,g, or c
  misc_feature (223)..(223): n equals a,t,g, or c
  misc_feature (238)..(238): n equals a,t,g, or c
  misc_feature (245)..(245): n equals a,t,g, or c
  misc_feature (313)..(314): n equals a,t,g, or c
  misc_feature (318)..(318): n equals a,t,g, or c
  misc_feature (326)..(326): n equals a,t,g, or c
  misc_feature (342)..(342): n equals a,t,g, or c
ggaacggggnggaantgtgaacctcttaaagttggtcccctgccngtaccggtccggaattcccgggtcgacncacgcgtccgtncaagatggtgccaccggtgcaggtctctcngctcatcaagctcggccgatactncgncctgttnctcnatagtggcctacgganccacgcgctacaattacctaaaacctngggcagaagangagaggaggatagcancagaagagaaagaanaaagcangatgaactgaaacggattgccagaaaaatggcaagaaagatgcagcattattaaaagtgaagttgaannatgnggaaccanttcttttggaaccaancat

SEQ ID NO: 2160 - DNA, 346 bp, Homo sapiens
  misc_feature (22)..(22): n equals a,t,g, or c
  misc_feature (102)..(102): n equals a,t,g, or c
  misc_feature (108)..(108): n equals a,t,g, or c
  misc_feature (259)..(259): n equals a,t,g, or c
  misc_feature (290)..(290): n equals a,t,g, or c
  misc_feature (325)..(325): n equals a,t,g, or c
agtcgctctcctagcccttctntgtgcctcagcctctggcaatgccattcaggccaggtcttcctcctatagtggagagtatggaggtggtggtggaaagcnattctntcattctggcaaccagttggacggccccatcaccgccctccgggtccgagtcaacacatactacatcgtaggtcttcaggtgcgctatggcaaggtgtggagcgactatgtgggtggtcgcaacggagacctggaggagatctttctgcancctggggaatcagtgatccaggtttctgggnagtacaagtggtacctgaaggaagctggtattttntgacagacaagggccgtatct

SEQ ID NO: 2161 - DNA, 330 bp, Homo sapiens
  misc_feature (133)..(133): n equals a,t,g, or c
  misc_feature (203)..(203): n equals a,t,g, or c
  misc_feature (221)..(221): n equals a,t,g, or c
  misc_feature (223)..(223): n equals a,t,g, or c
  misc_feature (251)..(251): n equals a,t,g, or c
  misc_feature (258)..(258): n equals a,t,g, or c
  misc_feature (268)..(268): n equals a,t,g, or c
  misc_feature (298)..(298): n equals a,t,g, or c
  misc_feature (330)..(330): n equals a,t,g, or c
gcagggggctgctttgcatctgaaactgtcagccccagaatgttgacagtcgctctcctagcccttctctgtgcctcagcctctggcaatgccattcaggccaggtcttcctcctatagtggagagtatggangtggtggtggaaacgattctctcattctggcaaccagttggacggcccatcaccgccctccgggtccgantcaacacatactacatcntnggtcttcaggttgcctatgggcaaggtnttgaacnaactattttngtttgttccccaaccggaaaacctggaagnaaaatcttttcttgccccccttggggaaatcn

SEQ ID NO: 2162 - DNA, 544 bp, Homo sapiens
  misc_feature (39)..(39): n equals a,t,g, or c
  misc_feature (395)..(395): n equals a,t,g, or c
  misc_feature (493)..(493): n equals a,t,g, or c
  misc_feature (528)..(528): n equals a,t,g, or c
  misc_feature (533)..(533): n equals a,t,g, or c
  misc_feature (542)..(542): n equals a,t,g, or c
  misc_feature (544)..(544): n equals a,t,g, or c
tttttttagcatcatgtttacgcccttggacagatacantgatagaaatatgcaaattaatagacatcaatactgtgcgttaaaggctatgtctgctgtactgtgttgtggccctgttgcagataatgtaggactttcatcagatggctatttgtacaaatggttggataacattttggattctctggacaaaaaggttcaccagctgggctgtgaagcagttacgttgttactggagctgaaccctgatcagagcaacctgatgtactgggctgtggaccgctgctacacgggctccgggagggtggcggccggctgctttaaagccattgctaatgttttccagaacagggattatcaatgtgacacagtgatgcttctaaatctgatactgnttaaagcagctgattcttctagaagtatctatgaagttgctatgcaacttttacagattctggaaccgaagatgtttcgctatgctcacaaattggangttcagagaacagaatggaggactcacccagtggntcctntacacaatntn

SEQ ID NO: 2163 - DNA, 236 bp, Homo sapiens
  misc_feature (12)..(12): n equals a,t,g, or c
gcggacgcgtgnttggacgcgtgggtggagcagtcttccaaatttatattatcaaggacctggagaagctactcatgatagcaggagaagagcgggcactgtgtcttgtggacgtgaagaaagtgaaacagtccctggcccagtcccacctgcctgcccagcccgacatctcacccaacatttttgaagctgtcaagggctgccacttgtttggggcaggccaagaattgagaacc

SEQ ID NO: 2164 - DNA, 402 bp, Homo sapiens
  misc_feature (44)..(44): n equals a,t,g, or c
  misc_feature (52)..(52): n equals a,t,g, or c
  misc_feature (65)..(65): n equals a,t,g, or c
  misc_feature (97)..(97): n equals a,t,g, or c
  misc_feature (108)..(108): n equals a,t,g, or c
  misc_feature (114)..(114): n equals a,t,g, or c
  misc_feature (120)..(120): n equals a,t,g, or c
  misc_feature (140)..(140): n equals a,t,g, or c
  misc_feature (148)..(148): n equals a,t,g, or c
  misc_feature (150)..(150): n equals a,t,g, or c
  misc_feature (152)..(152): n equals a,t,g, or c
  misc_feature (158)..(159): n equals a,t,g, or c
  misc_feature (161)..(161): n equals a,t,g, or c
  misc_feature (164)..(164): n equals a,t,g, or c
  misc_feature (188)..(188): n equals a,t,g, or c
  misc_feature (195)..(195): n equals a,t,g, or c
  misc_feature (211)..(211): n equals a,t,g, or c
  misc_feature (214)..(214): n equals a,t,g, or c
  misc_feature (223)..(223): n equals a,t,g, or c
  misc_feature (277)..(277): n equals a,t,g, or c
  misc_feature (288)..(288): n equals a,t,g, or c
  misc_feature (299)..(299): n equals a,t,g, or c
  misc_feature (324)..(324): n equals a,t,g, or c
  misc_feature (359)..(359): n equals a,t,g, or c
  misc_feature (380)..(380): n equals a,t,g, or c
  misc_feature (400)..(400): n equals a,t,g, or c
  misc_feature (402)..(402): n equals a,t,g, or c
ggcgccgtgtgcggttagggcttctgccgctcctccacgcttgngcagcatnaccgggtccacantggcgagcggccttacaagtgcgatgactgcngaaaggccttntcccanagctcngacctcattcgccaccaacngacccacncngnagaccnncnctnacctggggccccagcatgggtggnaggtgtnggcagaagataatggnccngggagctanaggaacctttagggatgatagtgtagaagccgtaggagaatggaatgagctgangatgctggaanaagagaaccantggtggaggaagtgacatgccctgnagacttgtgggaagtggtttgtagggaggccatgncggtatacgggaggccttganagaaatggagagaggtcaantn

SEQ ID NO: 2165 - DNA, 502 bp, Homo sapiens
  misc_feature (304)..(304): n equals a,t,g, or c
  misc_feature (366)..(366): n equals a,t,g, or c
  misc_feature (456)..(456): n equals a,t,g, or c
gtgaacttcggtgttccttacagttagcggaaacggaaagggaaggaggattttctccacacatttctcctttcactgctgtcaatgacctgggacatctgcttgggagagctggctttaatactctgactgtggacactgatgaaattcaagttaactatcctggaatgtttgaattgatggaagatttacaagaacaaaagtccagaatgttgacctaattttacaaaacaagctgcatatcagctgatgaatgcatgagaaattttcaaggctttcacagtggtcttaaggtatgggtganagtaactgtgcttggaatagaaaagccctgctgcatcgagacacaatgctggcagctgcggnagtgtacagagaaatgtacagaaatgaagatggttcagtacctgctacataccagatctattacatgataggatggaaatatcatgagtnacatgcaagaccaacttgaaagaagtttccgaactgtggcattttg

SEQ ID NO: 2166 - DNA, 464 bp, Homo sapiens
  misc_feature (4)..(4): n equals a,t,g, or c
  misc_feature (8)..(8): n equals a,t,g, or c
  misc_feature (17)..(18): n equals a,t,g, or c
  misc_feature (44)..(44): n equals a,t,g, or c
  misc_feature (402)..(402): n equals a,t,g, or c
  misc_feature (408)..(408): n equals a,t,g, or c
  misc_feature (430)..(430): n equals a,t,g, or c
  misc_feature (454)..(454): n equals a,t,g, or c
  misc_feature (459)..(459): n equals a,t,g, or c
cccntagnaaactcccnntggaaggaccgttgggacgcctgtangtaccggtccggaattcccgggtcgacccacgcgtccgcccacgcgtccgcccacgcgtccgggagttccggaaagccaaggccagctccacaggcagcttcacagcacctgatcccggcctgaagcgcaagtcccctcctgaggccctgtcagggtccttacccccagccaccacctgccccgcctcgtccacgcctgcgcccactatcatccctgctccagctgcccccgggaagccagcctccgcagccaccgtgaagaggaagcggaagagccggtgggggcctgaagaggataaggtagagctcccacctgctgaactggtgcagagggacgtggatgcctctccctcgcctntgcagntcaggacctcaaggggctcggntatgagaaggggaagcctgtgggnctaangggcg

SEQ ID NO: 2167 - DNA, 316 bp, Homo sapiens
  misc_feature (7)..(7): n equals a,t,g, or c
  misc_feature (212)..(212): n equals a,t,g, or c
  misc_feature (268)..(268): n equals a,t,g, or c
  misc_feature (276)..(276): n equals a,t,g, or c
  misc_feature (283)..(284): n equals a,t,g, or c
  misc_feature (311)..(311): n equals a,t,g, or c
tggactnctcccggtaccggtccggaattcccgggtcgacccacgcgtccgcggacgcgtgtttcgccttttatgcctatcactaccgcttcaatgggcagtatagcagcctggccctggtcacctactggctcttcatccaggtgaggcctgggcggcaagcagggggcaggccagccgtgcctttccaggcaggagaggctgcagccggngaggatgccctgtggggtcggcccaagcgggcagaggtagcgtggatggtcccggntgggctgncctctgnnagcagcggctgggtggtcaagggcggncccgt

SEQ ID NO: 2168 - DNA, 362 bp, Homo sapiens
  misc_feature (66)..(66): n equals a,t,g, or c
  misc_feature (247)..(247): n equals a,t,g, or c
  misc_feature (256)..(256): n equals a,t,g, or c
  misc_feature (294)..(294): n equals a,t,g, or c
  misc_feature (312)..(312): n equals a,t,g, or c
  misc_feature (315)..(315): n equals a,t,g, or c
  misc_feature (341)..(341): n equals a,t,g, or c
  misc_feature (360)..(360): n equals a,t,g, or c
ggcacgagcgcttgtggagctggtggcggcgctcccaggggctcggctgttttccgcgcggcaggnctcgatggcgcactgggtaaagctctcaaggagcagaagtacgaccggcagctgaggttgtggggtgatcatgggcaagaggctttagaatctgctcatgtttgcctaataaatgcaacagccacaggaactgaaattcttaaaaacttggtactaccaggtattggttcgtttacaattnattgatggnaatcaggtcagcggagaagatggctggaaaacaatttncttccttcaaagaagcanttntcgggcaaaaaccgagctggaaagcngaccatgggaatttcttanca

SEQ ID NO: 2169 - DNA, 79 bp, Homo sapiens
  misc_feature (73)..(73): n equals a,t,g, or c
gacctcgtccgccaaggatgtgccagccggcagcttgcgcactgccctcaatgagctcaagagactgatacanagcatt

SEQ ID NO: 2170 - DNA, 446 bp, Homo sapiens
  misc_feature (331)..(331): n equals a,t,g, or c
  misc_feature (363)..(363): n equals a,t,g, or c
  misc_feature (417)..(417): n equals a,t,g, or c
  misc_feature (419)..(419): n equals a,t,g, or c
  misc_feature (429)..(429): n equals a,t,g, or c
  misc_feature (439)..(439): n equals a,t,g, or c
gggtatgcagtaacatttcagaatgttttgtgtgcgtgtgaagggtgcacaggtgcgtggggatggggagccaggctcagaggtggacgctggctgcctgggccacctcctttcccgagccccatctggtcgagcagagagcagagggagagggagttgcccggtgcccaggctcccagagtgctgtcctctgcccggttcgtcaagtccaggtagtggatcccagtggagcttcggtgctggaggcgtctctgcctcgtttccggctccatgttacgctcttagaaacggagttgattgtggttgaggcggaaggaagggttccccgcanacgtcctctctcttctacaaagtgtgggcaanagccagggccagtgagggctgctgtgcatgagtggcctgagacaaagcgctgtncnccgttgaganatgggctccnaagaaac

SEQ ID NO: 2171 - DNA, 450 bp, Homo sapiens
  misc_feature (341)..(341): n equals a,t,g, or c
  misc_feature (361)..(361): n equals a,t,g, or c
  misc_feature (386)..(386): n equals a,t,g, or c
  misc_feature (400)..(400): n equals a,t,g, or c
  misc_feature (415)..(415): n equals a,t,g, or c
  misc_feature (448)..(448): n equals a,t,g, or c
gggcctgtccacgtccccctctgtccttaactccaggagaccttggctcacgtggacagcaatggagttgggggaagggccctgaaggcagccccaggcctgactgtgggcctccagctacaggcatttgtgtttgggcaccagctaccccacatcccagccggtcatctctgggcataaacccccaccccccagaaaggaggcttcctgtccctcttgggcaccagctcagccaaaagccagaaagctgctctggagcataacctgacccccccacggcgaggcagggcagtcttctctggctggcactgctctgggcatagaattgatccttcatcaanctttaccccaaaaaagaagngtcttcctgggtgaaggacaaagtnggggaaggcaacanggctggggcttaaangcccttcaccagccattcaagggttgccttttnaa

SEQ ID NO: 2172 - DNA, 405 bp, Homo sapiens
  misc_feature (24)..(24): n equals a,t,g, or c
  misc_feature (357)..(357): n equals a,t,g, or c
  misc_feature (385)..(385): n equals a,t,g, or c
  misc_feature (394)..(396): n equals a,t,g, or c
agcttcctctgggaaacgccccantatagggatagctggtacgcctgcaggtaccggtccggaattcccgggtcgacccacgcgtccgggacccaacttctctcaccgccatggagttcgacctgggagcagccctggagcccacctcccagaagcccggtgtgggggcgggccacgggggagatcccaagctcagtccccacaaagttcagggccggtcggaggcaggggcaggtccgggtccaaagcaaggacaccacagctcttccgactccaagcagcagctccagcgattcggacacggatgtgaaggtaaggggctctcgcagcgtcccaagcacgtgccctgcaccccanagaggcgtccccgactggggctggcggngagggtgcnnngagtggtcc

SEQ ID NO: 2173 - DNA, 280 bp, Homo sapiens
  misc_feature (254)..(254): n equals a,t,g, or c
  misc_feature (266)..(266): n equals a,t,g, or c
  misc_feature (272)..(272): n equals a,t,g, or c
  misc_feature (275)..(275): n equals a,t,g, or c
  misc_feature (280)..(280): n equals a,t,g, or c
gggggcttggcctcaagcatctctggaagcctgctgtggaggcctatggagagtttctctgcatgtttgaggaaaattatcccgaaacactgaagcgtctttttgttgttaaagcccccaaactgtttcctgtggcctataacctcatcaaacccttcctgagtgaggacactcgtaagaagatcatggtcctgggaggtggcagtttatgtcagatggagcggatgttggttttgggattttcctgaagaccnagatgggagaanaggcancgngcagn

SEQ ID NO: 2174 - DNA, 488 bp, Homo sapiens
  misc_feature (17)..(17): n equals a,t,g, or c
  misc_feature (53)..(54): n equals a,t,g, or c
  misc_feature (66)..(66): n equals a,t,g, or c
  misc_feature (73)..(73): n equals a,t,g, or c
tggcgacactggatcgnaaagtgcccagtccggaggcgtttctgggcaaaccnnggtcctcctggntcgacgncgccaaattacactgctccgacaatgtagatttagaagaggctggaaaagagggtggaaaaagcagggaggttatgaggcttaataaagaagatatgcacttatttggccattacccagcacatgacgacttctatctcgtagtgtgcagtgcctgtaaccaggtcgtcaagccacaggttttccagtcgcactgcgccgggcctgcaactgttccaccttctggatcctccttcagcttctctgactcctgggccaggtgtgtgcatttagctccatgctgaagagctgcagcttctgcaggacatttgtaccatcgaggtcaaaggcaacaagaagtgacatgagtttcagtccatcttcatgaggttccagttaaggcctgtgaattcgcaattgttcttcccgactgcctg

SEQ ID NO: 2175 - DNA, 502 bp, Homo sapiens
  misc_feature (14)..(14): n equals a,t,g, or c
  misc_feature (25)..(25): n equals a,t,g, or c
  misc_feature (44)..(44): n equals a,t,g, or c
  misc_feature (47)..(47): n equals a,t,g, or c
  misc_feature (61)..(61): n equals a,t,g, or c
  misc_feature (72)..(72): n equals a,t,g, or c
  misc_feature (75)..(75): n equals a,t,g, or c
  misc_feature (89)..(89): n equals a,t,g, or c
  misc_feature (98)..(98): n equals a,t,g, or c
  misc_feature (126)..(126): n equals a,t,g, or c
  misc_feature (146)..(146): n equals a,t,g, or c
  misc_feature (149)..(149): n equals a,t,g, or c
  misc_feature (151)..(151): n equals a,t,g, or c
  misc_feature (157)..(157): n equals a,t,g, or c
  misc_feature (169)..(169): n equals a,t,g, or c
  misc_feature (176)..(176): n equals a,t,g, or c
  misc_feature (180)..(180): n equals a,t,g, or c
  misc_feature (186)..(186): n equals a,t,g, or c
  misc_feature (190)..(190): n equals a,t,g, or c
  misc_feature (194)..(194): n equals a,t,g, or c
  misc_feature (211)..(211): n equals a,t,g, or c
  misc_feature (224)..(224): n equals a,t,g, or c
  misc_feature (231)..(231): n equals a,t,g, or c
  misc_feature (235)..(235): n equals a,t,g, or c
  misc_feature (246)..(247): n equals a,t,g, or c
  misc_feature (262)..(262): n equals a,t,g, or c
  misc_feature (273)..(273): n equals a,t,g, or c
  misc_feature (315)..(315): n equals a,t,g, or c
  misc_feature (334)..(334): n equals a,t,g, or c
  misc_feature (339)..(339): n equals a,t,g, or c
  misc_feature (362)..(362): n equals a,t,g, or c
  misc_feature (375)..(376): n equals a,t,g, or c
  misc_feature (446)..(446): n equals a,t,g, or c
  misc_feature (454)..(454): n equals a,t,g, or c
  misc_feature (477)..(477): n equals a,t,g, or c
  misc_feature (484)..(484): n equals a,t,g, or c
  misc_feature (497)..(497): n equals a,t,g, or c
ggttaaaagtggantgtatgttgtnatagaagttaaagttgcanctnattatggaataganataacctgtcnaanttatctgatgacanattaccaangtgctcccccatccccacagtatagaangattatttgcatgggtgcanaananaatggnttgccgctggantatcaanagangttaanagcnttanaaccaaatgactatacntgaaaggtctcanaagaaantgangacatcatcannaagggggaaacacanactctttagancataacagaatatatctaagggtattctatgtgctaatatanaatattattaacacttganaacanggatctgggggatctccacgttngatccattttcannagtgctctgagaggagtatcttacttggggtgactccttgtttttagactatactcagaaactgggatanggagttanaccatttaaaacgggtgtatganggcctgnaatatgtgacaantgaat

SEQ ID NO: 2176 - DNA, 455 bp, Homo sapiens
  misc_feature (36)..(36): n equals a,t,g, or c
  misc_feature (83)..(83): n equals a,t,g, or c
  misc_feature (85)..(85): n equals a,t,g, or c
  misc_feature (91)..(91): n equals a,t,g, or c
  misc_feature (168)..(168): n equals a,t,g, or c
  misc_feature (195)..(195): n equals a,t,g, or c
  misc_feature (208)..(208): n equals a,t,g, or c
  misc_feature (218)..(219): n equals a,t,g, or c
  misc_feature (221)..(221): n equals a,t,g, or c
  misc_feature (230)..(230): n equals a,t,g, or c
  misc_feature (279)..(279): n equals a,t,g, or c
  misc_feature (291)..(291): n equals a,t,g, or c
  misc_feature (293)..(293): n equals a,t,g, or c
  misc_feature (317)..(317): n equals a,t,g, or c
  misc_feature (320)..(320): n equals a,t,g, or c
  misc_feature (327)..(327): n equals a,t,g, or c
  misc_feature (405)..(405): n equals a,t,g, or c
  misc_feature (412)..(412): n equals a,t,g, or c
  misc_feature (441)..(441): n equals a,t,g, or c
  misc_feature (444)..(444): n equals a,t,g, or c
  misc_feature (454)..(454): n equals a,t,g, or c
gcgggtgccgagcactgcctccgggcttcccccaangaccacgcttagcggtggcttcttcgttgctgtaattgaacgggtcnanatgccnacgtgagtgagtgggggcatgcttgggaagcgcaggatggtactggcacatctaacatctacacttctctagctcancctcacaggccaaagcatcagcaccanaacgcacacccancccatccccnnanagaaagaangaaacagccaagaccccacccggtgcttgcacaccgcctttgcacatancaaaagctccangnttactccttcctggttgggaaaanaanatgcctntcctctccctggaaagacctgggccctccccgcaggcaacaatttgcattttgaaaagttattgggttccttcctccnggctgtnttcttgcttgttaaccaaaatttttcctnccnaaattaaatnc

SEQ ID NO: 2177 - DNA, 436 bp, Homo sapiens
  misc_feature (432)..(436): n equals a,t,g, or c
gaaagagttggaattgtacaaagaggaacttcagacaaaacctgcactcttggcagttaataaaatggacttgccagatgcccaagataagttccatgaattgatgagccagctccagaatcctaaagattttctgcatttatttgaaaaaaacatgattccagagaggactgtagagttccaacatatcatccccatatctgcagttactggagaaggaatcgaagaattaaagaattgtataagaaagtcactggatgaacaggccaaccaggaaaatgatgcacttcataagaaacagttgcttaatttgtggatttctgatacaatgtcttctactgagccaccatcaaagcatgctgttactacttccaaaatggatataatttaaatatattaaaaatggtattgatggaacagtaaaaaaaaaannnnn

SEQ ID NO: 2178 - DNA, 542 bp, Homo sapiens
  misc_feature (54)..(54): n equals a,t,g, or c
  misc_feature (57)..(58): n equals a,t,g, or c
  misc_feature (91)..(91): n equals a,t,g, or c
  misc_feature (171)..(171): n equals a,t,g, or c
  misc_feature (213)..(213): n equals a,t,g, or c
  misc_feature (217)..(217): n equals a,t,g, or c
  misc_feature (219)..(219): n equals a,t,g, or c
  misc_feature (226)..(226): n equals a,t,g, or c
  misc_feature (228)..(228): n equals a,t,g, or c
  misc_feature (230)..(230): n equals a,t,g, or c
  misc_feature (285)..(285): n equals a,t,g, or c
  misc_feature (314)..(314): n equals a,t,g, or c
  misc_feature (327)..(327): n equals a,t,g, or c
  misc_feature (373)..(373): n equals a,t,g, or c
  misc_feature (375)..(375): n equals a,t,g, or c
  misc_feature (398)..(399): n equals a,t,g, or c
  misc_feature (412)..(412): n equals a,t,g, or c
  misc_feature (444)..(444): n equals a,t,g, or c
  misc_feature (482)..(483): n equals a,t,g, or c
  misc_feature (525)..(526): n equals a,t,g, or c
aggaaacagctatgaccatgattacgccaagctctaatacgactcactatattnganngctggtacgcctgcaggtaccgggccggaattnccggatcgacccacgcgtccgctggagagagacctttcgaatgtattgaatgtggaaaggcctttagtaatggttcattncttgctcagcatcagagaattcatacaggagagaaaccttangtgngnaatgtgngngngaaagcctttagccatcgtggatacctaattgtacatcagagaattcatactggngagagaccctacgaatgtaaggaatgtangaaagccttcagncagtatgcacaccttgctcaacatcagagagttcatactggagaananccttatgaatgtaaagtattgtnngaaagccttcagncaaattgcataccttgatcaacatcagagggntcatactggagagaaaccctatgaaggtattggaatgnnggaaggcctttagcaatagttcatcacttgcacaacatcagnngaagcatactggagaa

SEQ ID NO: 2179 - DNA, 429 bp, Homo sapiens
  misc_feature (46)..(46): n equals a,t,g, or c
  misc_feature (63)..(63): n equals a,t,g, or c
  misc_feature (67)..(67): n equals a,t,g, or c
  misc_feature (69)..(69): n equals a,t,g, or c
  misc_feature (216)..(216): n equals a,t,g, or c
  misc_feature (220)..(220): n equals a,t,g, or c
  misc_feature (262)..(262): n equals a,t,g, or c
  misc_feature (281)..(281): n equals a,t,g, or c
  misc_feature (284)..(284): n equals a,t,g, or c
  misc_feature (294)..(294): n equals a,t,g, or c
  misc_feature (299)..(299): n equals a,t,g, or c
  misc_feature (310)..(310): n equals a,t,g, or c
  misc_feature (315)..(315): n equals a,t,g, or c
  misc_feature (318)..(319): n equals a,t,g, or c
  misc_feature (326)..(326): n equals a,t,g, or c
  misc_feature (328)..(328): n equals a,t,g, or c
  misc_feature (337)..(337): n equals a,t,g, or c
  misc_feature (339)..(339): n equals a,t,g, or c
  misc_feature (343)..(344): n equals a,t,g, or c
  misc_feature (346)..(346): n equals a,t,g, or c
  misc_feature (352)..(352): n equals a,t,g, or c
  misc_feature (354)..(354): n equals a,t,g, or c
  misc_feature (359)..(360): n equals a,t,g, or c
  misc_feature (362)..(362): n equals a,t,g, or c
  misc_feature (366)..(366): n equals a,t,g, or c
  misc_feature (368)..(370): n equals a,t,g, or c
  misc_feature (372)..(372): n equals a,t,g, or c
  misc_feature (375)..(376): n equals a,t,g, or c
  misc_feature (379)..(379): n equals a,t,g, or c
  misc_feature (388)..(388): n equals a,t,g, or c
  misc_feature (392)..(392): n equals a,t,g, or c
  misc_feature (394)..(394): n equals a,t,g, or c
  misc_feature (402)..(403): n equals a,t,g, or c
  misc_feature (428)..(428): n equals a,t,g, or c
ataatcgggatcaggtgcgcgttctcgctgataaacggctgaagtnaccagacggtgccaagncttntnctttatgcagtccctgaactaccaggaagataaacaccaccatgatggagatttgcaccagtacaaacagggtattgaagttagcgaccaggttgacgctcttcagattcgcggcggttaaaatggcgacgaggttaccacccacanccanggggggcactttccggggaagagggcggggagatagattttnggccaacaagacgttaatnatngggcaaaaanggggntaattccagcnagggntgnnccaggcngntccataaantnccgnngngggggntnaaatnngntttntnnngnggnnggntattagggncccnanccgtttannggggaatttggggggaagccatttng

SEQ ID NO: 2180 - DNA, 591 bp, Homo sapiens
  misc_feature (423)..(423): n equals a,t,g, or c
  misc_feature (486)..(486): n equals a,t,g, or c
  misc_feature (490)..(490): n equals a,t,g, or c
  misc_feature (543)..(543): n equals a,t,g, or c
  misc_feature (566)..(566): n equals a,t,g, or c
  misc_feature (569)..(569): n equals a,t,g, or c
  misc_feature (577)..(577): n equals a,t,g, or c
  misc_feature (581)..(581): n equals a,t,g, or c
gcggacgcgtgggttctagtcgttttcaaagcgcctcgcgctgattctcacgggcccggctgccggcccccgctctgccctggattggtagcttatgtcgatcttgatgaaagagcaattgatgctctcagggaatttaatgaagaaggagctctgtctgtactacagcagttcaaggaaagtgacttatcacatgttcagaacaaaagtgcatttttatgtggagttatgaagacctacaggcagagagagaaacaggggagcaaggtgcaagagtccacaaagggacctgatgaagcgaagatcaaggccttgcttgagagaactggttatactctggatgtaaccacaggacagaggaagtatggtggtccttcaccagacagtgtgtactctggcgtgcaacctggaattggaacggangtatttgtaggcaaaataccaagggatttatatgaggatgaattggtgcccctttttgagaangccngacccatttgggatctacgtcttatgatggatccactgtccggcagaataganggtatgcatttatcaccttctgnggnaaaggaanctgncaggaagccc

SEQ ID NO: 2181 - DNA, 536 bp, Homo sapiens
  misc_feature (135)..(135): n equals a,t,g, or c
cgcgagccgaccaaaggaaccataactgatttaatgagctaatacatgccgacgggcgctgacccccttcgcgggggggatgcgtgcatttatcagatcaaaaccaacccggtcagcccctctccggccccggcnggggggcgggcgccggcggctttggtgactctagataacctcgggccgatcgcacgccccccgtggcggcgacgacccattcgaacgtctgccctatcaactttcgatggtagtcgccgtgcctaccatggtgaccacgggtgacggggaatcagggttcgattccggagagggagcctgagaaacggctaccacatccaaggaaggcagcaggcgcgcaaattacccactcccgacccggggaggtagtgacgaaaaataacaatacaggactctttcgaggccctgtaattggaatgagtccactttaaatcctttaacgaggatccattggagggcaagtctggtgccagcagccgcggtaattccagctccaatagcgtatattaaagttgctgttg

SEQ ID NO: 2182 - DNA, 252 bp, Homo sapiens
  misc_feature (28)..(28): n equals a,t,g, or c
  misc_feature (30)..(30): n equals a,t,g, or c
  misc_feature (66)..(66): n equals a,t,g, or c
  misc_feature (68)..(68): n equals a,t,g, or c
  misc_feature (75)..(75): n equals a,t,g, or c
  misc_feature (106)..(106): n equals a,t,g, or c
  misc_feature (130)..(130): n equals a,t,g, or c
  misc_feature (140)..(140): n equals a,t,g, or c
  misc_feature (178)..(178): n equals a,t,g, or c
  misc_feature (185)..(185): n equals a,t,g, or c
  misc_feature (222)..(222): n equals a,t,g, or c
  misc_feature (241)..(241): n equals a,t,g, or c
  misc_feature (248)..(248): n equals a,t,g, or c
tctagaactaagtggatcccccgggctntntgaatttggcacgaggcaacgcctacggggggaggntnaatggcncggacatggaagcccacgctggtcatcctgnggatcaaacgggctggccgatgcntgcgctgggnccccaacgagaacaaggttgctgtgggcaacggatctngggaganctccatctggtatttccagcaaggagaatgactaggngggtttagcaaagcacatnaagaagnccat

SEQ ID NO: 2183 - DNA, 480 bp, Homo sapiens
  misc_feature (7)..(7): n equals a,t,g, or c
  misc_feature (334)..(334): n equals a,t,g, or c
  misc_feature (448)..(448): n equals a,t,g, or c
  misc_feature (451)..(451): n equals a,t,g, or c
  misc_feature (472)..(472): n equals a,t,g, or c
  misc_feature (476)..(477): n equals a,t,g, or c
gattttnaccaaatgttacaagaaattcaagaagtgaaaactcctgaagaactagagacctttatgcttaaacatggagaaaatattattgatactttaggagctgaagtagatagacttgagaaggaactgaaagtaagatgtattcataaaaataacataatgataatggcagctatttttttgagtacttactctacagcagacactaagtgcatccatcacatgcatgctttaacccactcataactccacagtgtgtaggtatttataagcaagaaaatgactgggttagataagttgaataatttacccaaggaaatagggaaattgngatttgaaccagattctttactttttaaacactatttatgcagcctgcttagtttctaaaatagtcaaagggggtttttttggttggtaataaataacattttgaaagtcctanaanaaagatgaaaaggaactttanactnnggg

SEQ ID NO: 2184 - DNA, 571 bp, Homo sapiens
  misc_feature (53)..(53): n equals a,t,g, or c
  misc_feature (80)..(80): n equals a,t,g, or c
  misc_feature (110)..(110): n equals a,t,g, or c
  misc_feature (143)..(143): n equals a,t,g, or c
  misc_feature (219)..(219): n equals a,t,g, or c
  misc_feature (230)..(230): n equals a,t,g, or c
  misc_feature (269)..(269): n equals a,t,g, or c
  misc_feature (272)..(272): n equals a,t,g, or c
  misc_feature (314)..(314): n equals a,t,g, or c
  misc_feature (353)..(353): n equals a,t,g, or c
  misc_feature (398)..(398): n equals a,t,g, or c
  misc_feature (407)..(407): n equals a,t,g, or c
  misc_feature (447)..(447): n equals a,t,g, or c
  misc_feature (550)..(550): n equals a,t,g, or c
gtggaagtgctgtgccatgggcagcttcgacttggagatagagaactcagaanacagattcccagggggagtgagataancacaccatctctacagggcttacagcttcnccatgggctgctggcccaagaatggacttctanacatgaacaagggcctcagcctgcaacacataggccggccccacaccggcattgacgactgcaagaaacattgccnacatcatgaanacactcgcctatcgaggcttcatcttcaagcagacatcnaanccgttctgattggcccaagacaagatggggcacgacaaggtnactgtttggcccacccaaaatcctcctctccctcaccanaagggaaaaaggaaaatggcatactctgtgtccagaatgtcccanctgcctgtnggctctgcccttggcgttggcttttcccttgcaagggctntgcccttgggccttctggaacaaaacttttttccccccatcccaccctcatctcacccagtatcacccctcccttgcgggctgggctaggggaaccaggatcncccctctccctgttcacaggc

SEQ ID NO: 2185 - DNA, 446 bp, Homo sapiens
  misc_feature (245)..(245): n equals a,t,g, or c
cacaggcggctgtgcctaaacaggaggaggccattcacgcctcgcctgagttgtgtccaaggtgtgcgtgtggccaggggtccatccgcttccctctagcccagcccctgaacacagctgcagtgcacggccccactcctcagctctgctccccatcccaactcgaagacgctgccctggccctgtgtgtgcagctcatgtggactgggagggcagggcaggtgcaggtcttggggcaagagctngagctgtcttttccttcctgcacagccgcagagcaggtggatggggctgcttccctgcaaggccccagggccaggccccctggggatttattcgtggcttagaagggtggggccagaagcaggcgtagtggggattagggactcagcacccccagctctcagtccagcagacagacccaccccaggctgactacagaggct

SEQ ID NO: 2186 - DNA, 452 bp, Homo sapiens
  misc_feature (255)..(255): n equals a,t,g, or c
  misc_feature (260)..(260): n equals a,t,g, or c
  misc_feature (288)..(288): n equals a,t,g, or c
  misc_feature (297)..(298): n equals a,t,g, or c
  misc_feature (308)..(308): n equals a,t,g, or c
  misc_feature (324)..(324): n equals a,t,g, or c
  misc_feature (329)..(329): n equals a,t,g, or c
  misc_feature (374)..(374): n equals a,t,g, or c
  misc_feature (381)..(382): n equals a,t,g, or c
  misc_feature (396)..(396): n equals a,t,g, or c
  misc_feature (404)..(404): n equals a,t,g, or c
gagggaaaaggccttgaagggccattagacctgataaattatatagacgttgcccagcaagatggaaagttgccttttgttcctccggaggaagaatttattatgggagtttccaagtatggcataaaagtatcaacatcagatcaatatgatgttttgcacaggcatgctctctacttaataatccggatggtgtgttacgatgacggtctgggggcgggaaaaagcttactggctctgaagaccacagatgcnagcantgaggaatacagactgtgggtttatcangtgcaacannctggaacaancacaagccatttgcanggctntatacaccgcttttgactctgtattaacatctgagaaacccttgnatccttnnaattaagtagaagnctaacttnatctgaaaagttcatctgttttcaaactgcaatgctgaaatgttattg

SEQ ID NO: 2187 - DNA, 368 bp, Homo sapiens
  misc_feature (231)..(231): n equals a,t,g, or c
  misc_feature (258)..(258): n equals a,t,g, or c
  misc_feature (306)..(306): n equals a,t,g, or c
  misc_feature (320)..(320): n equals a,t,g, or c
  misc_feature (323)..(323): n equals a,t,g, or c
  misc_feature (326)..(327): n equals a,t,g, or c
ccgccgcggtacacggccgtatattactgtgcgagagatcccacggagagatggctgtcacagaaatccgtactactttgactactggggccagggaaaccctggtcaccgtctcctcagcctccaccaagggcccatcggtcttccccctgggcaccctcctccaagagcacctctgggggcacacgggccctgggctgcctggtcaaggactacttccccgaaccggtnaggtttcttggaaactcaggcgccctnaccagcggggtttcacaccttcccgggtgttcctacagtcctcaggantctactccctcagnagnttnnttaaccgtgccctcccagaagcttggggaccaaaaactact

SEQ ID NO: 2188 - DNA, 359 bp, Homo sapiens
  misc_feature (73)..(73): n equals a,t,g, or c
  misc_feature (274)..(274): n equals a,t,g, or c
  misc_feature (332)..(332): n equals a,t,g, or c
  misc_feature (338)..(338): n equals a,t,g, or c
  misc_feature (344)..(344): n equals a,t,g, or c
  misc_feature (358)..(358): n equals a,t,g, or c
gcaccattccggggccccaaggaccgggcccgcaagttggccgaggtgggcagccacgagaaggtggggcagnacccatgctgcgtgcggctggagcaggcctgggaggagggcggcatcctgtacctgcagacggagctgtgcgggcccagcctgcagcaacactgtgaggcctggggtgccagcctgcctgaggcccaggtctggggctacctgcgggacacgctgcttgccctggcccatctgcacagccagggcctggtgcaccttgatngtcaagcctgccaacatcttcctggggccccggggccgctgcaagctggttgacttcngactgntggtanacttgggtacagcna

SEQ ID NO: 2189 - DNA, 411 bp, Homo sapiens
  misc_feature (51)..(51): n equals a,t,g, or c
  misc_feature (71)..(71): n equals a,t,g, or c
  misc_feature (162)..(163): n equals a,t,g, or c
  misc_feature (194)..(194): n equals a,t,g, or c
  misc_feature (239)..(239): n equals a,t,g, or c
  misc_feature (242)..(242): n equals a,t,g, or c
  misc_feature (254)..(255): n equals a,t,g, or c
  misc_feature (272)..(272): n equals a,t,g, or c
  misc_feature (278)..(278): n equals a,t,g, or c
  misc_feature (280)..(280): n equals a,t,g, or c
  misc_feature (288)..(288): n equals a,t,g, or c
  misc_feature (290)..(290): n equals a,t,g, or c
  misc_feature (296)..(297): n equals a,t,g, or c
  misc_feature (323)..(323): n equals a,t,g, or c
  misc_feature (346)..(346): n equals a,t,g, or c
  misc_feature (361)..(361): n equals a,t,g, or c
  misc_feature (363)..(363): n equals a,t,g, or c
  misc_feature (407)..(407): n equals a,t,g, or c
gcggcacgagcaatcatataccaaatctctccctcactaaacgtaagcctnctcctcactctctcaatctnatccatcatagcaggcagttgaggtggattaaaccaaacccagctacgcaaaatcttagcatactcctcaattacccacataggatgaatnntagcagttctaccgtacaaccctaacataancattcttaatttaactatttatattatcctaactactaccggatnccnactactcaactnngggtccagcaccacgancctacnantatctcgnanctgaannaatctaacatgactaacacccttaantccatccaccctcctctccctangaagcctgcccccgntnaccggctttgagcccagatgggccattgtccaaaaaaacacctnaaac

SEQ ID NO: 2190 - DNA, 610 bp, Homo sapiens
  misc_feature (540)..(540): n equals a,t,g, or c
gctcgcgccgaggggctgcgagagtgaccgcggctgctccagcgctgacgccgagccatggcggacgaggagcttgaggcgctgaggagacagaggctggccgagctgcaggccaaacacggggatcctggtgatgcggcccaacaggaagcaaagcacagggaagcagaaatgagaaacagtatcttagcccaagttctggatcagtcggcccgggccaggttaagtaacttagcacttgtaaagcctgaaaaaactaaagcagtagagaattaccttatacagatggcaagatatggacaactaagtgagaaggtatcagaacaaggtttaatagaaatccttaaaaaagtaagccaacaaacagaaaagacaacaacagtgaaagtaagtgtccccagatgcttgtggcaaatgaaaagatggatactttaaagattaatgttgagtatacatctaccacacatatttttcagcccagagacatttttccttttgtcaaacacgtgaaagtttggggagaaaggctgaatctgttgngggagggttctaattttttataggctctttgactccattcccacccttttaagttcacgcttaagttggt

SEQ ID NO: 2191 - DNA, 504 bp, Homo sapiens
  misc_feature (354)..(354): n equals a,t,g, or c
gaggtaaccacgtttcagctcgctgtattgtttgcatggaaccaaagacccagagagaaaatcagctttgaaaatcttaagcttgcaactgaactccctgatgctgaacttaggaggactttatggtctttagtagctttcccaaaactcaaacggcaagttttgttgtatgaacctcaagtcaactcacccaaagactttacagaaggtaccctcttctcagtgaaccaggagttcagtttaataaaaaatgcaaaggttcagaaaaggggtaaaatcaacttgattggacgtttgcagctcactacagaaaggatgagagaagaagagaatgaaggaatagttcaactacgnatactaagaacccaggaagctatcatacaaataatgaaaatgagaaagaaaattagtaatgctcagctgcagactgaattagtagaaattttgaaaaacatgttcttgccacaaaaggaaatgataaaagtgcaatagagtggctaatag

SEQ ID NO: 2192 - DNA, 527 bp, Homo sapiens
  misc_feature (442)..(442): n equals a,t,g, or c
  misc_feature (492)..(492): n equals a,t,g, or c
  misc_feature (499)..(499): n equals a,t,g, or c
  misc_feature (506)..(506): n equals a,t,g, or c
  misc_feature (527)..(527): n equals a,t,g, or c
gatgaccggctgcgggaagagcgggcgcacgcgctcaagaccaaggaaaagctggcacagaccgccacggcctcatcagcagctgtgggctcaggcccccctcccgaggcggagcaggcgtggccgcagagcagcggggaggaggagctgcagctccagctggccctggccatgagcaaggaggaggccgaccagcccccgtcctgcggccccgaggacgacgcccagctccagctggcccttagtttgagccgagaagagcatgataaggaggagcggatccgtcgcggggatgacctgcggctgcagatggcaatcgaggagagcaagagggagactgggggcaaggaggagtcgtccctcatggaccttgctgacgtcttcacgggcccagcttctgcccgaccacagacccctgggggggcccacacccatgggttgntgccgtcccacgggttgcccaacttggacccctggggcgggccccctgtnccttcanctgctgnatcccctggggaaggttcaan

SEQ ID NO: 2193 - DNA, 333 bp, Homo sapiens
  misc_feature (4)..(4): n equals a,t,g, or c
  misc_feature (6)..(6): n equals a,t,g, or c
  misc_feature (277)..(277): n equals a,t,g, or c
  misc_feature (287)..(287): n equals a,t,g, or c
  misc_feature (295)..(295): n equals a,t,g, or c
  misc_feature (321)..(321): n equals a,t,g, or c
  misc_feature (328)..(328): n equals a,t,g, or c
gccntngcgtccgatttaaatgacatctatgaggaagagccatttaattttcaaatggtctataatgagtttcagaagtttgttcaaaggaaagcacattccgtttataattttgaaaaacctgttgtcatgaaggcttttgaacacttgcagcaattagaattaataaagcccatggaaagaacttcaggaaattcacagagagagtccagctgatgaaactgcttttggataatactcaaattatgaatgctctgcagaaaatatcccaactggnctacagatgngaagccangggccacatcctacttaacctgggtntggaatntaacc

SEQ ID NO: 2194 - DNA, 230 bp, Homo sapiens
  misc_feature (194)..(195): n equals a,t,g, or c
  misc_feature (198)..(198): n equals a,t,g, or c
  misc_feature (221)..(221): n equals a,t,g, or c
  misc_feature (226)..(226): n equals a,t,g, or c
gctcgtgccgaattcggcacgagtttggaccaatccacaaataaaattgtctctgactgagaaagatgaggggcaggaggagtgtagtttccttgtagccctgatgcagaaagatagaaggaaactcaagagatttggtgccaatgtgctgacaatcggctatgccatttataattgccctaacaaaaacaaannctnaaacaaaaatcctccaaatcccncctcnctcg

SEQ ID NO: 2195 - DNA, 418 bp, Homo sapiens
  misc_feature (2)..(3): n equals a,t,g, or c
  misc_feature (8)..(8): n equals a,t,g, or c
  misc_feature (12)..(12): n equals a,t,g, or c
  misc_feature (17)..(17): n equals a,t,g, or c
  misc_feature (325)..(325): n equals a,t,g, or c
  misc_feature (345)..(345): n equals a,t,g, or c
  misc_feature (402)..(402): n equals a,t,g, or c
  misc_feature (407)..(407): n equals a,t,g, or c
  misc_feature (415)..(415): n equals a,t,g, or c
tnnccacnactnctatngggaaagctggtacgcctgcaggtaccggtccggaattcccgggtcgacccacgcgtccgaaggctttgaagagaggctccctgctgggctgcttcattgataccagaagtgctgcagaatctgaggcccggacgccgtttggtcttattaagggtcatgcctacagtgtaacgggaattgaccaggtaagcttccgaggccagagaatcgagctcatccgaatccggaacccttggggccaggttgagtggaacgggtcgtggagcgacagttctccggagtggcgttctgttgtccaactgagcanaagcgtctgtgtcacactgntctggatgatggggaattctggatggcatttaaggacttaaggcccctttgataaantgganatctgcancct

SEQ ID NO: 2196 - DNA, 512 bp, Homo sapiens
  misc_feature (401)..(401): n equals a,t,g, or c
  misc_feature (438)..(438): n equals a,t,g, or c
  misc_feature (451)..(451): n equals a,t,g, or c
  misc_feature (477)..(477): n equals a,t,g, or c
  misc_feature (499)..(499): n equals a,t,g, or c
  misc_feature (511)..(511): n equals a,t,g, or c
ggtgctgactctgcagggggatgccctcagccaggcggatgtgaacctgaagatgccccggaacaaccagctgctgcacttcgccttccgggaggacaagcagtggaagctgcagcagatccaggatgccagaaaccatgtgagccaagccatttacctgcttaccagccgggaccagagctaccagttcaagacaggcgctgaggtcctcaagctgatggacgcagtgatgctgcagctgaccagagcccgaaaccggctcaccacccccgccaccctcaccctccccgagatcgccgccagcggcctcacgcggatgttcgcccctgccctgccgtccgacctgctggtcaacgtctacatcaacctcaacaagctctgcctcacggtgtaccagctgnatgccctgcagcccaacttcaccaagaacttcgccanctgggggcgcggngctgcataaccctggggccatgttcnaatggggctttaacgcctggangtgaaccacgtnc

SEQ ID NO: 2197 - DNA, 458 bp, Homo sapiens
  misc_feature (19)..(19): n equals a,t,g, or c
  misc_feature (37)..(37): n equals a,t,g, or c
  misc_feature (79)..(79): n equals a,t,g, or c
  misc_feature (87)..(87): n equals a,t,g, or c
  misc_feature (90)..(90): n equals a,t,g, or c
  misc_feature (98)..(98): n equals a,t,g, or c
  misc_feature (131)..(131): n equals a,t,g, or c
  misc_feature (152)..(152): n equals a,t,g, or c
  misc_feature (202)..(202): n equals a,t,g, or c
  misc_feature (231)..(231): n equals a,t,g, or c
  misc_feature (246)..(246): n equals a,t,g, or c
  misc_feature (284)..(284): n equals a,t,g, or c
  misc_feature (302)..(302): n equals a,t,g, or c
  misc_feature (310)..(310): n equals a,t,g, or c
  misc_feature (332)..(332): n equals a,t,g, or c
  misc_feature (350)..(350): n equals a,t,g, or c
  misc_feature (418)..(418): n equals a,t,g, or c
  misc_feature (420)..(422): n equals a,t,g, or c
  misc_feature (453)..(453): n equals a,t,g, or c
aaggtgatccagacgcaanatggctgtcctctctaangaatatggttttgtgcttctaactggtgctgccagctttatnatggtggnccncctagccntcaatgtttccaaggcccgcaagaagtacaaantggagtggacacttccattangattctcacacactcaatttctgttcttctattaagggaaatcttaaaangatgtggtatttgatgactcttaagaagntctatatccctacantatctttgtgatgcatctgaaatccccattgatgcttnacgtcaatgaaaagcacngaattggngcaaagctgcctctttcccttntgcaactacagcgcaaanatacatccttattcctggatatttaataaaaacattgactctgcttctgaaaattgaaaaccttgtcncnnnaatttttaaccaaaattgaatggtctcttcnagggt

SEQ ID NO: 2198 - DNA, 337 bp, Homo sapiens
  misc_feature (13)..(13): n equals a,t,g, or c
  misc_feature (44)..(44): n equals a,t,g, or c
  misc_feature (62)..(62): n equals a,t,g, or c
  misc_feature (105)..(105): n equals a,t,g, or c
  misc_feature (153)..(153): n equals a,t,g, or c
  misc_feature (160)..(160): n equals a,t,g, or c
  misc_feature (171)..(171): n equals a,t,g, or c
  misc_feature (178)..(178): n equals a,t,g, or c
  misc_feature (196)..(196): n equals a,t,g, or c
  misc_feature (221)..(221): n equals a,t,g, or c
  misc_feature (225)..(225): n equals a,t,g, or c
  misc_feature (229)..(229): n equals a,t,g, or c
  misc_feature (269)..(269): n equals a,t,g, or c
  misc_feature (277)..(277): n equals a,t,g, or c
  misc_feature (287)..(287): n equals a,t,g, or c
  misc_feature (294)..(294): n equals a,t,g, or c
  misc_feature (327)..(327): n equals a,t,g, or c
gcccacgcgtccncgctgcccagcctccggcccgaggccgctgnccagctcctgcgctcggngcccaaggtctgcgtcaccgtcctgccccccgacgagagcggncggccccgcaggagtttttcggagctgtacacgctgtcgctgcaggancctagcnggcggggggcnccagatnctgtgcaggatgaggtcnagggggtgaccctgctgtccaccanaaancagntgctgcacctgtgcctgcaagatggtggtaagtcctccanggcctggngatctggccnaggagangactgagttcctgcacagtcagaactcgctgtnactacgcaag

SEQ ID NO: 2199 - DNA, 526 bp, Homo sapiens
  misc_feature (11)..(11): n equals a,t,g, or c
  misc_feature (327)..(327): n equals a,t,g, or c
  misc_feature (449)..(449): n equals a,t,g, or c
  misc_feature (481)..(482): n equals a,t,g, or c
  misc_feature (494)..(494): n equals a,t,g, or c
  misc_feature (524)..(524): n equals a,t,g, or c
gcccacgcgtncggagccacagaaagtatcgacattagggaaaagcaacgtgatagtaacgggagcaaactttacccgggcatcgaacatcacaatgatcctgaaaggaaccagtacctgtgataaggatgtgtgagtcgaaatactaataatttatcctcggtaacgtaacgctcaaacctgtgccaaaggaatatcagtgtgattataaccttaatatagtcaaattattgccatgccccaaagcaggccaattagtcagagtatttgacataatataattccaacacgtaaaataattttcacaacagatctgaagttcattgngagagaatctgttctgtgttattccccaaaaatctcaagtatatagtcatttcaagatgttgcctggttggggtcttgattcattttcagtaacaaaatcaagtatatggagtacaaacatnattctttaaggtgatgcactttggaaaaaaanntgagtcccttgnaatttgatgaaggaattttttgggagcaantt

SEQ ID NO: 2200 - DNA, 553 bp, Homo sapiens
  misc_feature (3)..(3): n equals a,t,g, or c
  misc_feature (5)..(5): n equals a,t,g, or c
  misc_feature (10)..(10): n equals a,t,g, or c
  misc_feature (24)..(24): n equals a,t,g, or c
  misc_feature (34)..(34): n equals a,t,g, or c
  misc_feature (235)..(235): n equals a,t,g, or c
  misc_feature (285)..(285): n equals a,t,g, or c
  misc_feature (344)..(344): n equals a,t,g, or c
  misc_feature (364)..(364): n equals a,t,g, or c
  misc_feature (394)..(394): n equals a,t,g, or c
  misc_feature (451)..(451): n equals a,t,g, or c
  misc_feature (477)..(477): n equals a,t,g, or c
  misc_feature (480)..(480): n equals a,t,g, or c
  misc_feature (489)..(489): n equals a,t,g, or c
  misc_feature (519)..(519): n equals a,t,g, or c
  misc_feature (523)..(523): n equals a,t,g, or c
atngncacgngaccctttgagganctactacgantcactatagggaaagctggtacgcctgcaggtaccggtccggaattcccgggtcgacccacgcgtccgcggacgcgtgggtgggcatgcagctggacagagcaagcagctctctgtatgttgcgttctctacctgtgtgataaaggttccccttggccggtgtgaacgacatgggaagtgtaaaaaaacctgtattgcctncagagacccatattgtggatggataaaggaaggtggtgcctgcagccatntatcacccaacagcagactgacttttgagcaggacatagagcatggcaatacagatggnctgggggactgtcacaattnctttgtggcactgaatgggcattccagttncctcttgcccagcacaaccacatcagattcgacggctcaagaggggtatgagactangggaggaatgctggactggaagcatntgnttgactcanctgacagcacagaccctttgggggcaaggncttnccataatcaccaaagacaagaagggagtga

SEQ ID NO: 2201 - DNA, 627 bp, Homo sapiens
  misc_feature (525)..(525): n equals a,t,g, or c
  misc_feature (597)..(597): n equals a,t,g, or c
  misc_feature (606)..(606): n equals a,t,g, or c
  misc_feature (610)..(612): n equals a,t,g, or c
gcatgggagctgttcagcagtttaacttagatgtcatacagtgtgaattgtttgccagctctgagcctgtgccaggattccagggggataccctgcagctagcattcattgacctcagacaactccttgacctgtttatggtttgggattggtctacttacctagctgattatgggcagccagcttctaagtaccttcgggtgaatccaaacacagcccttactcttttggagaagatgaaggatactagcaaaaagaacaatatatttgctcagttcaggaagaatgatcgagacaaatagaagttgatagagacagtcgtgaaacagctgagaagtttggtgaatggtatgtcccagcacatgtagacctcacatggcttgcactcagtgacaccaaatccatgattcaatgttgatcttgagcaagtattggtcatgatacagtaatttgtttacagaatccaaaaatacaatagagaagatacatgagggcttaaacaagaaatagtaataaatatcattngtattggatttttaaataatcgatctattttatatatggaaaaaaaatgaccattttttcacttttaggggnaaaattgcnaaannngtaatacttaaattg

SEQ ID NO: 2202 - DNA, 343 bp, Homo sapiens
  misc_feature (11)..(11): n equals a,t,g, or c
  misc_feature (269)..(269): n equals a,t,g, or c
  misc_feature (308)..(308): n equals a,t,g, or c
  misc_feature (315)..(315): n equals a,t,g, or c
  misc_feature (321)..(321): n equals a,t,g, or c
  misc_feature (334)..(334): n equals a,t,g, or c
ggggaccactntcttcttggtacttctcagatttttttttctttataacccgtatgaatggtaggatcattcctttttttgttccatttagagaaataacgtatgcagtgggacccaaattctttttcactcattgcattattttgctctaaatacaggtaagtgtgttaacagaccaggtggaggctcagggagagaagattcgagatttggagttttgcttgaagagcacagagagaagttgaatgccacagaagaaatgctggaanaggtatgtcaaaggccagaaccaagatgggattccctgntgaactntgtganatgctgcattctntgttgggtt

SEQ ID NO: 2203 - DNA, 642 bp, Homo sapiens
  misc_feature (522)..(522): n equals a,t,g, or c
  misc_feature (568)..(568): n equals a,t,g, or c
  misc_feature (609)..(609): n equals a,t,g, or c
  misc_feature (611)..(611): n equals a,t,g, or c
  misc_feature (624)..(624): n equals a,t,g, or c
  misc_feature (639)..(639): n equals a,t,g, or c
gctgcgagaagacgacagaagggtacggctgcgagaagacgacagaagggtacggctgcgagaagacgacagaaggggttttcgcaacgggtttgccgccagaacacaggtgtcgtgaaaactacccctaaaagccaaaatgggaaaggaaaagactcatatcaacattgtcgtcattggacacgtagattcgggcaagtccaccactactggccatctgatctataaatgcggtggcatcgacaaaagaaccattgaaaaatttgagaaggaggctgctgagatgggaaagggctccttcaagtatgcctgggtcttggataaactgaaagctgagcgtgaacgtggtatcaccattgatatctccttgtggaaatttgagaccagcaagtactatgtgactatcattgatgccccaggacacagagactttatcaaaaacatgattacagggacatctcaagcttgactgtgcttgtcctgattggttgcttgctggtgttggtgaatttggaagctggnatcttccaagaatgggcaagaccccgagagcattgccctttctggnttacaccacttgggtggggaaacaacttaaatggcgggggntnaacaaaaatgganttccacttgggcccnccc

SEQ ID NO: 2204 - DNA, 239 bp, Homo sapiens
  misc_feature (194)..(195): n equals a,t,g, or c
  misc_feature (212)..(212): n equals a,t,g, or c
  misc_feature (237)..(238): n equals a,t,g, or c
gtgaaaaaccatatggcatagttgaaaagaagtccagaatattccctggtgatacaattctggagactggagaagtaattccaccaatgaaagaatttcctgatcaacatcattaaagattatgtaaaaagttaaaaggcttatgagcctaagtttgttcctatattaccatatttactgaattttctggaaanntaacttttaaataaaantttaatctcagaaatttgtcattgnnc

SEQ ID NO: 2205 - DNA, 290 bp, Homo sapiens
  misc_feature (188)..(188): n equals a,t,g, or c
  misc_feature (209)..(209): n equals a,t,g, or c
  misc_feature (221)..(221): n equals a,t,g, or c
  misc_feature (235)..(235): n equals a,t,g, or c
  misc_feature (243)..(243): n equals a,t,g, or c
  misc_feature (287)..(287): n equals a,t,g, or c
gcgggcgcagacggcggcagtgcggcttgctcttggaagttcaggctcggttgtcttttgggagccatggagagtgacttttatctgcgttactacgtggggcacaagggcaagttcggccacgagttcctggagtttgagtttcgaccggacgggaagttaagatatgccaactcagctgctgctgnttccatgtgttctgggttcanaggtcatggctncaccggtcagagcnctgagtgnctcagggtttggcaatggaatttttaatgtaataaatctttatngaa

SEQ ID NO: 2206 - DNA, 377 bp, Homo sapiens
  misc_feature (5)..(5): n equals a,t,g, or c
  misc_feature (271)..(271): n equals a,t,g, or c
  misc_feature (313)..(313): n equals a,t,g, or c
  misc_feature (315)..(315): n equals a,t,g, or c
  misc_feature (349)..(349): n equals a,t,g, or c
  misc_feature (365)..(365): n equals a,t,g, or c
  misc_feature (376)..(376): n equals a,t,g, or c
ggcanagcagagagcagtgtacgatgagcagggaacagtggacgaggactctcctgtgctcacccaagaccgagactgggaggcgtattggcggctactctttaaaaagatatctttagaggacattcaagcttttgaaaagacatataaaggttcggaagaagagctggctgatattaagcaggcctatctggacttcaagggtgacatggatcagatcatggagtctgtgctttgcgtgcagtacacagaggaacccaggatgaaggantatcattcagcaagctattgacgccggagaggtcccatcctntnaatgcctttgttcaaagattcgaaacaaaggtgnatgcaagggaaaaggngggctcaggang

SEQ ID NO: 2207 - DNA, 541 bp, Homo sapiens
  misc_feature (92)..(92): n equals a,t,g, or c
  misc_feature (166)..(166): n equals a,t,g, or c
  misc_feature (168)..(168): n equals a,t,g, or c
  misc_feature (205)..(206): n equals a,t,g, or c
  misc_feature (231)..(231): n equals a,t,g, or c
  misc_feature (263)..(263): n equals a,t,g, or c
  misc_feature (265)..(265): n equals a,t,g, or c
  misc_feature (284)..(284): n equals a,t,g, or c
  misc_feature (302)..(302): n equals a,t,g, or c
  misc_feature (304)..(304): n equals a,t,g, or c
  misc_feature (310)..(310): n equals a,t,g, or c
  misc_feature (318)..(318): n equals a,t,g, or c
  misc_feature (330)..(330): n equals a,t,g, or c
  misc_feature (334)..(334): n equals a,t,g, or c
  misc_feature (347)..(348): n equals a,t,g, or c
  misc_feature (360)..(360): n equals a,t,g, or c
  misc_feature (371)..(371): n equals a,t,g, or c
  misc_feature (373)..(373): n equals a,t,g, or c
  misc_feature (386)..(386): n equals a,t,g, or c
  misc_feature (389)..(389): n equals a,t,g, or c
  misc_feature (415)..(415): n equals a,t,g, or c
  misc_feature (422)..(422): n equals a,t,g, or c
  misc_feature (446)..(446): n equals a,t,g, or c
  misc_feature (473)..(473): n equals a,t,g, or c
  misc_feature (485)..(485): n equals a,t,g, or c
  misc_feature (489)..(489): n equals a,t,g, or c
  misc_feature (499)..(499): n equals a,t,g, or c
  misc_feature (523)..(523): n equals a,t,g, or c
caaagagtctaccctgcacctggtgctccgtctcagaggtgggatgcagatcttcgtgaagaccctgactggtaagaccatcaccctcgaantggagccgagtgacaccattgagaatgtcgaggcaaagatccaagacaaggaaggcatccctcctgaccagcanangttgatctttgccggaaaacagctggaaaatggtcgnnccctgtctgactaccacatccaaanagatccaccctgcacctggtgctccgtctcanangtgggatgcaaatcttccngaagacctgactggtaanancatcantctcgaantggaccaaatgncacnttgacaatatcgnngctagatcccanacaaagaaagngnccctcctgaacancanaagttgatcttttggtggggaaacanttggaanatggacccccctgtcttgactacnacatcccgaaagatttccccccttgcnccttgggtgctncccncctttataangtgggggatgcaaaatcttccctntcaaaaaaccccgaattg

SEQ ID NO: 2208 - DNA, 282 bp, Homo sapiens
  misc_feature (9)..(9): n equals a,t,g, or c
  misc_feature (22)..(22): n equals a,t,g, or c
  misc_feature (30)..(30): n equals a,t,g, or c
  misc_feature (67)..(67): n equals a,t,g, or c
  misc_feature (169)..(169): n equals a,t,g, or c
  misc_feature (189)..(189): n equals a,t,g, or c
  misc_feature (195)..(195): n equals a,t,g, or c
  misc_feature (214)..(214): n equals a,t,g, or c
  misc_feature (244)..(244): n equals a,t,g, or c
  misc_feature (268)..(268): n equals a,t,g, or c
agggggatntcaatcggaaacnctaacaantttacccaggaaaccgctatgaccatgattacgccangctctaatacgactcactatagggaaagctggtacgcctgcaggtaccgggccggaattcccgggtcgacccacgcgtccggggttcagagctttctggagngatatcttcagcttgtgatnaagagncaaatatggaacgaagagngatcacgatttctaaatcagaatattctgngcactcatctttggcatccaaagntgatgttgagcagg

SEQ ID NO: 2209 - DNA, 507 bp, Homo sapiens
  misc_feature (79)..(79): n equals a,t,g, or c
  misc_feature (97)..(97): n equals a,t,g, or c
  misc_feature (188)..(188): n equals a,t,g, or c
  misc_feature (202)..(202): n equals a,t,g, or c
  misc_feature (225)..(225): n equals a,t,g, or c
  misc_feature (229)..(229): n equals a,t,g, or c
  misc_feature (300)..(300): n equals a,t,g, or c
  misc_feature (312)..(312): n equals a,t,g, or c
  misc_feature (322)..(322): n equals a,t,g, or c
  misc_feature (404)..(404): n equals a,t,g, or c
  misc_feature (418)..(418): n equals a,t,g, or c
  misc_feature (474)..(474): n equals a,t,g, or c
  misc_feature (480)..(480): n equals a,t,g, or c
  misc_feature (484)..(484): n equals a,t,g, or c
  misc_feature (507)..(507): n equals a,t,g, or c
ggcgttcttggcgtcgggaccctacctgacccatcagcaaaaggtgttgcggctttataagcgggcgctacgccacctngagtcgtggtgcgtccanagagacaaataccgatactttgcttgtttgatgagagcccggtttgaagaacataagaatgaaaaggatatggcgaaggccacccagctgntgaatgaagcccanggaaagaattctggtaccgcagnattnacagccatacatcttccctgactctcctgggggcacctcctatgagagatacgattgctacaaggtcccanaatggtgcttanatgacttggnatccttctgagaaggcaatgtatcctgattactttgccaagagagaacagtggaagaaactgcggagggaaagctgggaacnagaggttaagcagnttgcaggaggaaacgccacctggaggtcctttaactgaaagcttttgccccctgcncgaaangaangtgattttgcccccacttgtggn

SEQ ID NO: 2210 - DNA, 331 bp, Homo sapiens
  misc_feature (243)..(243): n equals a,t,g, or c
  misc_feature (295)..(295): n equals a,t,g, or c
  misc_feature (314)..(314): n equals a,t,g, or c
  misc_feature (330)..(331): n equals a,t,g, or c
gcgctgttgcttgggaaaaagggcatcgagaagaacctgggcatcggcaaagtctcctcttttgaggagaagatgatctcggatgccatccccgagctgaaggcctccatcaagaagggggaagatttcgtgaagaccctgaagtgagccgctgtgacgggtggccagtttccttaatttatgaaggcatcatgtcactgcaaagccgttgcagataaactttggattttaaattgctttggngatgattactggattgacatcatcatgccttccaaattgggggtggctctgnggccccttaataaagccgncttgattttaaaaaann

SEQ ID NO: 2211 - DNA, 476 bp, Homo sapiens
  misc_feature (137)..(137): n equals a,t,g, or c
  misc_feature (325)..(325): n equals a,t,g, or c
  misc_feature (450)..(450): n equals a,t,g, or c
ctcgtgttcttgctgatattaccaagtcattgactaatcctacgccaatacaacagcaactgagacgcttcactgaacataactccagtccaaatgtcagtggaagcctctcctctgggctgcagaaaatatttgangaccccactgacagtgatttgcataaactaaaatctccaagccaggacaacacagacagctacttcagagggaaaacattattgctggttcagcaagcctcctctcagagcatgacttattctgaaaaggatgaaagggaaagtagccttcctaatggtcggagcgtctccctcatggacctccaggncactcatgctgctcaagtggagcatgcatctgtcatgcttgatgtgcctatacgcttgaccggaagccagctttccataacccaggtggccagcatcaaacagctgcgggaaacccagagcactncccaaagtgcaccccaagtgagaagg

SEQ ID NO: 2212 - DNA, 209 bp, Homo sapiens
  misc_feature (7)..(7): n equals a,t,g, or c
  misc_feature (9)..(9): n equals a,t,g, or c
  misc_feature (18)..(18): n equals a,t,g, or c
  misc_feature (27)..(27): n equals a,t,g, or c
  misc_feature (30)..(30): n equals a,t,g, or c
  misc_feature (66)..(66): n equals a,t,g, or c
  misc_feature (88)..(88): n equals a,t,g, or c
  misc_feature (96)..(96): n equals a,t,g, or c
  misc_feature (102)..(102): n equals a,t,g, or c
  misc_feature (121)..(121): n equals a,t,g, or c
  misc_feature (161)..(161): n equals a,t,g, or c
  misc_feature (184)..(185): n equals a,t,g, or c
  misc_feature (188)..(188): n equals a,t,g, or c
gactagntntttatcgcnagcgttcgntcnagaggatccaggcttacgtacgcgtgcatgcgacgncatacactcttctatagtagcnacctacantcaatncactggccgtcgttcaacnacgagcacgactgggaaaaccctggagctacccaacttantacgccttgcagcacatgccccnntcntcagctggcgtaataagggaa

SEQ ID NO: 2213 - DNA, 311 bp, Homo sapiens
  misc_feature (186)..(186): n equals a,t,g, or c
  misc_feature (243)..(243): n equals a,t,g, or c
  misc_feature (258)..(258): n equals a,t,g, or c
  misc_feature (270)..(270): n equals a,t,g, or c
  misc_feature (296)..(296): n equals a,t,g, or c
  misc_feature (307)..(307): n equals a,t,g, or c
gcagcggccacagcaattatatggtggactggtaccaacagagaccagggaagggcccccggtttgtgatgcgagtgggcactagtggagttgtgggacccaggggggatggcatccctgatcgcttctcagtcttggcctcaggcctgagtcgggacctgaccatcacgaacatccaggaaagangatgagagtgactactactgtgggacagatcatggcagtgggaacaacttcctgtcngtttttccgcggaanggaaccaaactnaaccgtcctactttcagccccaaggntgccccccccngttc

SEQ ID NO: 2214 - DNA, 377 bp, Homo sapiens
  misc_feature (55)..(55): n equals a,t,g, or c
  misc_feature (93)..(93): n equals a,t,g, or c
  misc_feature (214)..(214): n equals a,t,g, or c
  misc_feature (268)..(268): n equals a,t,g, or c
  misc_feature (292)..(292): n equals a,t,g, or c
  misc_feature (308)..(308): n equals a,t,g, or c
  misc_feature (323)..(323): n equals a,t,g, or c
  misc_feature (351)..(351): n equals a,t,g, or c
  misc_feature (366)..(366): n equals a,t,g, or c
ggacctttggagttccagcttaagggtatcagcctccctggctgatgtaagtcanaggcctcttatacccactttgatgaggaaggactgtanagttgatgccaggcagaaacaggcacatatgtgtgtcttctgcctctccccagatcctgtacttcaccaatggccatctgtatccaactggttctaaatcaaacgggtcagcctgcttcanaacccccccacagtggggggtggcacactgaaactgactgacgtccaccctcanatactggaacctacctctgccaantcaacaacccacccanatttctaccccaatnggtttggggctaatccaaccttactgtncttgttccccccccnttatcccctta

SEQ ID NO: 2215 - DNA, 465 bp, Homo sapiens
accgcccctgcctgcagttgaacgagtaaagcctagaatcaaaaagaaaacaaaacccatagtcaagccacagacaagcccagaatatggccaggggatcaatccgattagccgactggcccagatccagcaggcaaagaaggagaaggtggccaagcgcaatgcagccgagaacatgctggagatccttggtttcaaagtcccgcaggcgcagccaccaaacccgcactcaagtcagaggagaagacacccataaagaaaccaggggatggaagaaaagtaaccttttttgaacctggctctggggatgaaaatgggactagtaataaagaggatgagttcaggatgccttatctaagtcatcagcagctgcctgctggaattcttcccatggtgcccgaggtcgcccaggctgtaggagttagtcaaggacatcacaccaaagattttaccagggcagctccg

SEQ ID NO: 2216 - DNA, 332 bp, Homo sapiens
  misc_feature (16)..(16): n equals a,t,g, or c
  misc_feature (29)..(29): n equals a,t,g, or c
  misc_feature (43)..(43): n equals a,t,g, or c
  misc_feature (48)..(48): n equals a,t,g, or c
  misc_feature (52)..(52): n equals a,t,g, or c
  misc_feature (103)..(104): n equals a,t,g, or c
  misc_feature (106)..(106): n equals a,t,g, or c
  misc_feature (110)..(110): n equals a,t,g, or c
  misc_feature (124)..(124): n equals a,t,g, or c
  misc_feature (143)..(143): n equals a,t,g, or c
  misc_feature (145)..(145): n equals a,t,g, or c
  misc_feature (187)..(187): n equals a,t,g, or c
  misc_feature (190)..(190): n equals a,t,g, or c
  misc_feature (207)..(207): n equals a,t,g, or c
  misc_feature (224)..(224): n equals a,t,g, or c
  misc_feature (262)..(262): n equals a,t,g, or c
  misc_feature (273)..(273): n equals a,t,g, or c
  misc_feature (298)..(298): n equals a,t,g, or c
  misc_feature (300)..(300): n equals a,t,g, or c
  misc_feature (332)..(332): n equals a,t,g, or c
ggggtgcaagagaccnccaatgggtagcncgccctactttgantgaanggancgcccgcaggtacccggtccggaattcccgggtcgacccacgcgccctttnntngccngggtgcagccctgntggcagggggcatttgggngncaatcgatggggcatcctttctgaagatcttcgggccactgncgnccagtgccatgcagttngtcaacgtgggctactncctcatcgcagccggcgtagtggtctttgctcttggantcctgggctgntatggtgctaagactgagagcaagngngccctcgtgacgtacttctacatcctcctccn

SEQ ID NO: 2217 - DNA, 452 bp, Homo sapiens
  misc_feature (158)..(158): n equals a,t,g, or c
  misc_feature (340)..(340): n equals a,t,g, or c
  misc_feature (346)..(346): n equals a,t,g, or c
  misc_feature (405)..(405): n equals a,t,g, or c
  misc_feature (420)..(420): n equals a,t,g, or c
  misc_feature (433)..(433): n equals a,t,g, or c
  misc_feature (437)..(437): n equals a,t,g, or c
  misc_feature (452)..(452): n equals a,t,g, or c
ggccagcattgcttctaccagctggcggcacttcgcggaggtggcttacattgtggaaggggactttactggtgttctccttccagaactagtagtttctatagtgcttctgctcagtaaaaatgctggtctcatgcaagaggctggagctgtacctntgctgggtggcctgttggaacatctggatcggttcaaccatctggcaccaggaaaggaacgggatgatcatgaagagttagcctgcctggcataatggagtcattttttacaggtcagaactgtagaaataatgaggaagtgacacttatacgcaaagctgatttggagaaccataataaanatggangcttctggactgtgattgacgggaaggtgtatgatataaagggactttcagacacagtnggtaacaggaaatantattctgcttaanttgnaagggaaagaaccan

SEQ ID NO: 2218 - DNA, 295 bp, Homo sapiens
  misc_feature (12)..(14): n equals a,t,g, or c
  misc_feature (60)..(60): n equals a,t,g, or c
  misc_feature (109)..(109): n equals a,t,g, or c
  misc_feature (222)..(222): n equals a,t,g, or c
  misc_feature (248)..(248): n equals a,t,g, or c
  misc_feature (278)..(278): n equals a,t,g, or c
  misc_feature (280)..(280): n equals a,t,g, or c
  misc_feature (283)..(283): n equals a,t,g, or c
gatttaattatnnnctagattgtctgggcaacggcagaacggagtgccactgtggagcanataactgcagtggttttctaggagtgcggccaaagtcggcatgtgcgtnaacaaatgaagagaaggcaaaaaatgctaagttaaaacagaagagacgaaagatcaaaacagaaccaaagcatatgcatgaagattactgttttcaatgtggagatggtgganagctggtcatgtgtgacaaaaaagantgtccaaagtataccaccttcctattgccntnaanctgacttaagcc

SEQ ID NO: 2219 - DNA, 400 bp, Homo sapiens
  misc_feature (69)..(69): n equals a,t,g, or c
  misc_feature (332)..(332): n equals a,t,g, or c
  misc_feature (345)..(345): n equals a,t,g, or c
  misc_feature (381)..(381): n equals a,t,g, or c
  misc_feature (396)..(396): n equals a,t,g, or c
  misc_feature (399)..(399): n equals a,t,g, or c
ggaaagcgccgagatgacgggctttctgctgccgcccgcaagcagagggactcggagatcatgcagcanaagcagaaaaaggcaaacgagaagaaggaggaacccaagtagctttgtggcttcgtgtccaaccctcttgcccttcgcctgtgtgcctggagccagtcccaccacgctcgcgtttcctcctgtagtgctcacaggtcccagcaccgatggcattccctttgccctgagtctgcagcgggtcccttttgtgcttccttcccctcaggtagcctctctccccctgggccactcccgggggtgagggggttacccctttccagtgntttttattcctgnggggcttaccccaaaagtattaaaaagtagctttgnaattcaaaaaaaatntant

SEQ ID NO: 2220 - DNA, 381 bp, Homo sapiens
  misc_feature (4)..(4): n equals a,t,g, or c
  misc_feature (164)..(164): n equals a,t,g, or c
  misc_feature (265)..(265): n equals a,t,g, or c
  misc_feature (304)..(304): n equals a,t,g, or c
  misc_feature (341)..(341): n equals a,t,g, or c
  misc_feature (350)..(350): n equals a,t,g, or c
  misc_feature (368)..(368): n equals a,t,g, or c
  misc_feature (377)..(377): n equals a,t,g, or c
gtgnaacgtccgacagaacgaggggacgtaacggaggcaggttggagccgctgccgtcgccatgacccgcggtaaccagcgtgagctcacccgccagaagaatatgaaaaagcagagcgactcggttaagggaaagcgccgagatgacgggctttctgctgctncccgcaagcagagggactcggagatcatgcagcagaagcagaaaaaggcaaacgagaagaaggaggaacccaagtagctttgtggcttcgtgtcaaccctnttgcccttcgcctgtgtgcctggaaccaagtcccaccangctcgcgtttcctccttgtagtgctcacaggtccagnaccgatggnattccctttgcccttgantctgcaacngggg

SEQ ID NO: 2221 - DNA, 457 bp, Homo sapiens
  misc_feature (3)..(3): n equals a,t,g, or c
  misc_feature (7)..(7): n equals a,t,g, or c
  misc_feature (9)..(9): n equals a,t,g, or c
  misc_feature (20)..(20): n equals a,t,g, or c
  misc_feature (58)..(58): n equals a,t,g, or c
  misc_feature (447)..(447): n equals a,t,g, or c
ggncagngnaaaaagtgtgncctccatatccccaagaaatgagtgctttagcgaaagnacctaattcagcgtcttttgatgaaagatcccaagaagagattgggatgtggtccacgtgatgcagatgaaatcaaagaacatctcttctttcagaaaataaattgggatgatttagccgccaaaaaagtgcctgcaccatttaagccagtcattcgagatgaattagatgtgagtaactttgcagaagagttcacagaaatggatcccacttattctcccgcagccctgccccagagttctgaggaagctgtttcagggctattctttgttgctccttccatcctattcaaacgtaatgcagctgtcatagaccctcttcagtttcacatgggagttgaacgtctggagtgacaaatgttgccaggagtgcaatgatgaaggactctncattctatca

SEQ ID NO: 2222 - DNA, 384 bp, Homo sapiens
tgaaaaggactcttggaaagtgaaaactttagatgaaattcttcaggaaaagaaacgaaggaaggaacaagaggagaaagcagagataaaacgcttaaaaaataacaacgcttcttcggtgaagttcttttgtacttccaaatgtcgcagtctgatgaccgggattccaagcgggattcccttgaggagggggagctgagagatcaccgcatggagatcacaataaggaactccccgtatagaagagaagactctatggaagacatctccccacaactgccactgctcaccaggacaagctgcccttcctgtctccacctctcagtccccctagaatggatggctgggggagaggtggaggctgacagctgagacgtagtgtca

SEQ ID NO: 2223 - DNA, 460 bp, Homo sapiens
  misc_feature (136)..(136): n equals a,t,g, or c
gaactgtcttcagtagttagttcaagtggaacagagggtgcttccagtttggagaaaaaggaggttccaggagtagattttagcataactcaattcgtaaggaatcttggacttgagcacctaatggatatatttnagagagaacagatcactttggatgtattagttgagatggggcacaaggagctgaaggagattggaatcaatgcttatggacataggcacaaactaattaaaggagtcgagagacttatctccggacaacaaggtcttaacccatatttaactttgaacacctctggtagtggaacaattcttatagatctgtctcctgatgataaagagtttcagtctgtggaggaagagatgcaaagtacagttcgagagcacagagatggaggtcatgcaggtggaatcttcaacagatacaatattctcaagattcagaaggtttgtaaca

SEQ ID NO: 2224 - DNA, 388 bp, Homo sapiens
  misc_feature (21)..(21): n equals a,t,g, or c
  misc_feature (27)..(27): n equals a,t,g, or c
  misc_feature (336)..(336): n equals a,t,g, or c
  misc_feature (340)..(340): n equals a,t,g, or c
  misc_feature (348)..(348): n equals a,t,g, or c
  misc_feature (358)..(358): n equals a,t,g, or c
  misc_feature (362)..(362): n equals a,t,g, or c
ggtacagtccggagctgaggngaaggngtccggggagtctctgagcatctcctgtcaggtgtctggatacaccctcaccagttattggatcaactgggtgcgccagatgcccgggaaaggcctggagtggatgggcaggcttgatccttctgactcttttatcaattacaatccgtccttcgaaggccacatctccatctcagctgacaagttcatcagcaccgcctatttaaagtggaacaccttggaggcctcggacaccgccatgtattactgtgccctttccgggcgacaacaactcgtccccgtctactggggccagggaacccaggtcanccgncttcttancaatcccgancagncccaaaggctttccgctgaacctttg

SEQ ID NO: 2225 - DNA, 384 bp, Homo sapiens
  misc_feature (1)..(1): n equals a,t,g, or c
  misc_feature (11)..(11): n equals a,t,g, or c
  misc_feature (73)..(73): n equals a,t,g, or c
  misc_feature (76)..(76): n equals a,t,g, or c
  misc_feature (151)..(151): n equals a,t,g, or c
  misc_feature (155)..(155): n equals a,t,g, or c
  misc_feature (189)..(189): n equals a,t,g, or c
  misc_feature (197)..(197): n equals a,t,g, or c
  misc_feature (232)..(232): n equals a,t,g, or c
  misc_feature (235)..(235): n equals a,t,g, or c
  misc_feature (260)..(260): n equals a,t,g, or c
  misc_feature (262)..(262): n equals a,t,g, or c
  misc_feature (268)..(268): n equals a,t,g, or c
  misc_feature (272)..(273): n equals a,t,g, or c
  misc_feature (289)..(289): n equals a,t,g, or c
  misc_feature (295)..(295): n equals a,t,g, or c
  misc_feature (297)..(297): n equals a,t,g, or c
  misc_feature (299)..(299): n equals a,t,g, or c
  misc_feature (302)..(304): n equals a,t,g, or c
  misc_feature (306)..(306): n equals a,t,g, or c
  misc_feature (314)..(314): n equals a,t,g, or c
  misc_feature (316)..(316): n equals a,t,g, or c
  misc_feature (322)..(322): n equals a,t,g, or c
  misc_feature (333)..(333): n equals a,t,g, or c
  misc_feature (335)..(335): n equals a,t,g, or c
  misc_feature (379)..(379): n equals a,t,g, or c
naattcggcanagccaaaatgtaccggggtgtgctggatgccacgcagaggcagcttacagtcaccgtgactnagnaagttctcagtgaggttcaaggagaacagtgtggctgtcaaggtcgtccagggccctgcaggtggtgacaacagnaagntacgttacaaaaaaaaggggagtcattgcttggnggtgactntgcagttaggagggggcaccatgcagagatggcanttncttcctcctgaaccagcactaatcncnctttgncctnncttttttggggggttntttaancncnttnnntngggggggnangggttnggggtttaaantncccttttggggggaaaaaaaaaaaaaaaattttggggggggggnccccg

SEQ ID NO: 2226 - DNA, 289 bp, Homo sapiens
  misc_feature (151)..(151): n equals a,t,g, or c
  misc_feature (181)..(181): n equals a,t,g, or c
  misc_feature (211)..(211): n equals a,t,g, or c
  misc_feature (220)..(220): n equals a,t,g, or c
  misc_feature (240)..(240): n equals a,t,g, or c
  misc_feature (260)..(260): n equals a,t,g, or c
  misc_feature (267)..(267): n equals a,t,g, or c
gattgaacagaagtatgccatatagtacaattacagctatgttacaggatcaaaattaatttcaaaccttccaaccaaccctataagccgtctcatcagtctctaatagactcattttcagctattagatatggatgatatatgatgattncattatcatatttttcaaggacttacttantggctgattatcagtggtaaatcctccaangagaaaatngatgatctgaagaaactggngttagtgagtgccaagattngaccaantgggcatatgccttgtggaatt

SEQ ID NO: 2227 - DNA, 408 bp, Homo sapiens
ctgggagcgcctgccttctcttgccttgaaagcctcctctttggacctagccaccgctgccctcacggtaatgttggactcggtgacacacagcaccttcctgcctaatgcatccttctgcgatcccctgatgtcgtggactgatctgttcagcaatgaagagtactaccctgcctttgagcatcagacagcctgtgactcatactggacatcagtccaccctgaatactggactaagcgccatgtgtgggagtggctccagttctgctgcgaccagtacaagttggacaccaattgcatctccttctgcaacttcaacatcagtggcctgcagctgtgcagcatgacacaggaggagttcgtcgaggcagctggcctctgcggcgagtacctgtactttcaattcct

SEQ ID NO: 2228 - DNA, 614 bp, Homo sapiens
  misc_feature (46)..(46): n equals a,t,g, or c
  misc_feature (322)..(322): n equals a,t,g, or c
  misc_feature (427)..(427): n equals a,t,g, or c
  misc_feature (553)..(553): n equals a,t,g, or c
ccaaccctcactaaagggaacaaaagctggagctccaccgcggtgncggccgctctagaactagtggatcccccgggctgcaggaattcggcacgaggaaaattgaacaagatggacgggtccaggaaagaggaggaggaagacagcacattcaccaacatttctcttgcagatgacatagaccattcctcaagaattttgtatccaaggcccaaaagtttgttacccaagatgatgaatgctgacatggatgatctctctgcaagagtagatgcagttaaggaagaaaatctgaagctaaaatcagaaaaccaagttcttngacaatatatagaaaatctcatgtcagcttctagtgtttttcaaacaactgacacaaaaagcaaaagaaagtaagggattgacacccttctgttttatggaattnctgctgatcattttttctttaaaacttggatagattccaaaagttacagtacctttgtggcttcattgaatatttatgaagataatgtcagatgtagacaaaaataacacaataacaggagacttncataagtttgtgtattatgttagtctatgaaaacgtgcaaatgtattgtagagactttatg

SEQ ID NO: 2229 - DNA, 651 bp, Homo sapiens
  misc_feature (442)..(442): n equals a,t,g, or c
  misc_feature (470)..(470): n equals a,t,g, or c
  misc_feature (472)..(472): n equals a,t,g, or c
  misc_feature (475)..(475): n equals a,t,g, or c
  misc_feature (485)..(485): n equals a,t,g, or c
  misc_feature (562)..(562): n equals a,t,g, or c
  misc_feature (608)..(608): n equals a,t,g, or c
  misc_feature (620)..(620): n equals a,t,g, or c
  misc_feature (628)..(629): n equals a,t,g, or c
  misc_feature (651)..(651): n equals a,t,g, or c
gaaaagaaaaaaaatctctccccgttgaacaaaagatgcaaagcgattgagagggtccaaagttattttattgatcaactgaataaatatacataaatgttactttctttttctttactttatttttttttccccattccagatcctgggtgtttggctgacctacagatacaggaaccagaaagacccccgcgcgaatcctagtgcattcctttgatgagaaaacaaggaagatttcctttcgtattatgatcttgttcactttctgtaattttctgttaagctccatttgccagtttaaggaaggaaacactatctggaaaagtaccttattgatagtggaattatatatttttactctatgtttctctacatgtttttttctttccgttgctgaaaaatatttgaaacttgtggtctctgaagctcggtggcacctggnaattaatgggattcaatggccggcactngnccnttgggccttnttaagcatttttacctggcaaaaaaactttggttgggacccctggggttgggttaatatggggaaatctgaacgtanaattttaactgggaataaataatatgaaccctgggctggggaaaanggtcctactggnaaaaaganngggaaattattaaaatcagaan

SEQ ID NO: 2230 - DNA, 569 bp, Homo sapiens
  misc_feature (5)..(5): n equals a,t,g, or c
  misc_feature (27)..(27): n equals a,t,g, or c
  misc_feature (30)..(30): n equals a,t,g, or c
  misc_feature (46)..(46): n equals a,t,g, or c
  misc_feature (49)..(49): n equals a,t,g, or c
  misc_feature (157)..(157): n equals a,t,g, or c
  misc_feature (166)..(166): n equals a,t,g, or c
  misc_feature (198)..(198): n equals a,t,g, or c
  misc_feature (239)..(239): n equals a,t,g, or c
  misc_feature (247)..(247): n equals a,t,g, or c
  misc_feature (265)..(265): n equals a,t,g, or c
  misc_feature (277)..(277): n equals a,t,g, or c
  misc_feature (291)..(291): n equals a,t,g, or c
  misc_feature (314)..(314): n equals a,t,g, or c
  misc_feature (331)..(331): n equals a,t,g, or c
  misc_feature (335)..(335): n equals a,t,g, or c
  misc_feature (337)..(337): n equals a,t,g, or c
  misc_feature (356)..(356): n equals a,t,g, or c
  misc_feature (384)..(384): n equals a,t,g, or c
  misc_feature (392)..(392): n equals a,t,g, or c
  misc_feature (394)..(395): n equals a,t,g, or c
  misc_feature (408)..(408): n equals a,t,g, or c
  misc_feature (436)..(436): n equals a,t,g, or c
  misc_feature (512)..(512): n equals a,t,g, or c
  misc_feature (520)..(520): n equals a,t,g, or c
  misc_feature (529)..(529): n equals a,t,g, or c
  misc_feature (531)..(531): n equals a,t,g, or c
  misc_feature (537)..(537): n equals a,t,g, or c
tgganggaaagtggactccccgccgtngcngccactctaaaactantgnatcccccgggctgcatgaattcggcacgagggctgttgcgcaccctgcacggggcgcgtcacatggtccgggacgcaccggaaattccgcaaggtggcagtccagccncctgctcangattccggcctaacccggagctgacggaggcnctgaccaccagcttcgtgcggaggctgttctggggtagccngggcgcgngaactccgctcgctgaanctttgagaactnccagcgcatcctcnagcgatcctgtctcagcgcctgngagcctgaccgctgaanagcncngacaaccttcttcgtaccncgggacccccaggtttttgcgaatcccngaataaancnngggagtcgtcacnggctcctcgcgcctcaaggtggaaatcntggcctgtgcctcccaaaacaaagtggggaacccagtctcggtcacctgggaacatggtgaacatgtgaatgcaanatctgggnatcggaagncngaattncaaatgtgactccacctcttgtgaagccgtga

SEQ ID NO: 2231 - DNA, 414 bp, Homo sapiens
  misc_feature (379)..(379): n equals a,t,g, or c
  misc_feature (398)..(398): n equals a,t,g, or c
  misc_feature (400)..(400): n equals a,t,g, or c
  misc_feature (407)..(407): n equals a,t,g, or c
  misc_feature (412)..(412): n equals a,t,g, or c
gcccacgcgtccgggaggatgagcaattccccagcataccggctctggttcacagttatatgacaggcaggcgcccactgtcccaggccacaggggctgtggtctccaggcctgtgacttggcaggggcctctgcgacgcagctttagcgaggacaccctgatggatggcccagctcggatagagcctatcagggcaaggaagtggagcaacagtcagcctgcagatttggcacatatggggcagtcaagagaagaccccgctgggatggaagcctccaccatgcccatatctgccttgccccgaacgagcagttgaccccggtgttgctgaaggcccctgctccctgggaacttgttgccgacaagtctcagggcctncgatgggcaacttaagccnangcaccancgaancc

SEQ ID NO: 2232 - DNA, 571 bp, Homo sapiens
  misc_feature (169)..(169): n equals a,t,g, or c
  misc_feature (360)..(360): n equals a,t,g, or c
  misc_feature (367)..(367): n equals a,t,g, or c
  misc_feature (521)..(521): n equals a,t,g, or c
  misc_feature (542)..(542): n equals a,t,g, or c
  misc_feature (554)..(554): n equals a,t,g, or c
  misc_feature (558)..(558): n equals a,t,g, or c
  misc_feature (560)..(560): n equals a,t,g, or c
gcctccgggacttggaacgccccggctgggtggtgtccgggcgtcctttccccgcttcttcccacctcggctggtcccgtttcctcctgcgcccagtgcggacctgtctcggcgcccgctgccctctcaccgccccacgcaggatcccggcctggtcaccgggcagtgngatgcttcccgactgccgcggggacagcgaggcacacacagggcttgggccgcgccggaggccacacggcctggctgagttgctcctggtctcccgcctctcccaggcgacccggaggtagcatttcccaggaggcacggtcccccccagggggatgggcacagccacgccagatggacgagaagaccaanaaagcanaggaaatggccctgagcctcacccgagcagtggcgggcggggatgaacaggtggcaatgaagtgtgccatctggctggcagagcaacgggtgcccctgagtgtgcaactgaagcctgaggtctccccaacgcaggacatcagattcctcatggngcaaaatggccattccagctncatccagccatnacantnacagggaggaa

SEQ ID NO: 2233 - DNA, 262 bp, Homo sapiens
  misc_feature (3)..(3): n equals a,t,g, or c
  misc_feature (28)..(28): n equals a,t,g, or c
  misc_feature (102)..(102): n equals a,t,g, or c
  misc_feature (109)..(109): n equals a,t,g, or c
  misc_feature (148)..(148): n equals a,t,g, or c
  misc_feature (160)..(160): n equals a,t,g, or c
  misc_feature (203)..(203): n equals a,t,g, or c
  misc_feature (207)..(207): n equals a,t,g, or c
  misc_feature (218)..(218): n equals a,t,g, or c
  misc_feature (224)..(224): n equals a,t,g, or c
  misc_feature (261)..(261): n equals a,t,g, or c
atntaattcccatcctaaacccctttgnaatacgcctcactatagggaaagctggtacgcctgcaggtaccggtccggaattcccgggtcgacccacgcgtncggccantaagcaagctggacaaaagaagaaacaaggacatgaccnaaaggctgctgncaaagctgccttaatatatacctgcactgtctgtaggacacanatgncagaccctaanaccttnaagcagcactttgagagcaagcatcctaagactccant

SEQ ID NO: 2234 - DNA, 319 bp, Homo sapiens
  misc_feature (305)..(305): n equals a,t,g, or c
gtaaataacagatgcgggtgaaagatccaactaaagctttacctgagaaagccaaaagaagtaaaaggcctactgtacctcatgatgaagactcttcagatgatattgctgtaggtttaacttgccaacatgtaagtcatgctatcagcgtgaatcatgtaaagagagcaatagctgagaatctgtggtcagtttgctcagaatgtttaaaagaaagaggattctatgatgggcagctagtacttacttctgatatttggttgtgcctcaagtgtggcttccagggatgtggtaaaaactcaganagccaacattcatt

SEQ ID NO: 2235 - DNA, 462 bp, Homo sapiens
  misc_feature (333)..(333): n equals a,t,g, or c
  misc_feature (412)..(412): n equals a,t,g, or c
  misc_feature (426)..(426): n equals a,t,g, or c
  misc_feature (428)..(429): n equals a,t,g, or c
  misc_feature (461)..(461): n equals a,t,g, or c
atattgaaagttggggcgcctgcaggtaccggtccggaattcccggggatttcaactcctagcttttcatcctactataaaggaggatttgaacagaaaatgagtaggcgagaagctggtcttattttaggtgtaagcccatctgctggcaaggctaagattagaacagctcataggagagtcatgattttgaatcacccagataaaggtggatctccttacgtagcagccaaaataaatgaagcaaaagacttgctagaaacaaccaccaaacattgatgcttaaggaccacactgaaggaaaaaaaaagaggggacttcgaaaaaaaaaanaaaagggcggccgctctagaggatccaagcttacgtacgcgtgcatgcgacgtcatagctcttctatagcggcacctanattaattcactgcncnncgttttacaacgtccgactggaaaaacccctng

SEQ ID NO: 2236 - DNA, 493 bp, Homo sapiens
  misc_feature (4)..(4): n equals a,t,g, or c
  misc_feature (7)..(7): n equals a,t,g, or c
  misc_feature (18)..(18): n equals a,t,g, or c
  misc_feature (33)..(33): n equals a,t,g, or c
  misc_feature (457)..(457): n equals a,t,g, or c
taanggnacaaagctggngctccaccgcggtgncggccgctctagaactagtggatcccccgggctgcaggaattcggcacgaggaggagagcatgaatgagagtcatcctcgcaagtgtgcagagtcttttgagatgtgggatgatcgtgactcccactgtaggcgccctaagtttgaagggcatccccctgagtcttggaagtggatccttgcaccggtcattctttatatctgtgaaaggatcctccggttttaccgctcccagcagaaggttgtgattaccaaggttgttatgcacccatccaaagttttggaattgcagatgaacaagcgtggcttcagcatggaagtggggcagtatatctttgttaattgcccctcaatctctctcctgggaatggcatccttttactttgacctctgctccagaggaagatttcttcttcattcatatncgagcagcaggggacttgacagaaaatctataaggg

SEQ ID NO: 2237 - DNA, 520 bp, Homo sapiens
  misc_feature (4)..(5): n equals a,t,g, or c
  misc_feature (7)..(7): n equals a,t,g, or c
  misc_feature (17)..(17): n equals a,t,g, or c
  misc_feature (22)..(22): n equals a,t,g, or c
gtcnncngacagtgacngtacngtattcccgggtcgacccacgcgtccggtaaaattctgggctctggtatcagttcctcttcagtattgcatggcatggtttttaagaaggaaaccgaagtgatgtaacatctgtcaaagatgcaaaaatagcagtgtactcttgtccttttgatggcatgataacagaaactaagggaacagtgttgataaagactgctgaagaattgatgaattttagtaagggagaagaaaacctcatggatgcacaagtcaaagctattgctgatactggtgcaaatgtcgtagtaacaggtggcaaagtggcagacatggctcttcattatgcaaataaatataatatcatgttagtgaggctaaactcaaaatgggatctccgaagactttgtaaaactgttggtgctacagctcttcctagattgacacctcctgtccttgaagaaatgggacactgtgacagtgtttactctccagaagtttggagatactcaggtggttg

SEQ ID NO: 2238 - DNA, 538 bp, Homo sapiens
  misc_feature (12)..(12): n equals a,t,g, or c
  misc_feature (16)..(18): n equals a,t,g, or c
  misc_feature (91)..(91): n equals a,t,g, or c
  misc_feature (126)..(126): n equals a,t,g, or c
  misc_feature (130)..(130): n equals a,t,g, or c
  misc_feature (144)..(144): n equals a,t,g, or c
  misc_feature (170)..(170): n equals a,t,g, or c
  misc_feature (183)..(183): n equals a,t,g, or c
  misc_feature (298)..(298): n equals a,t,g, or c
  misc_feature (325)..(325): n equals a,t,g, or c
  misc_feature (386)..(386): n equals a,t,g, or c
  misc_feature (475)..(475): n equals a,t,g, or c
  misc_feature (477)..(477): n equals a,t,g, or c
  misc_feature (489)..(489): n equals a,t,g, or c
  misc_feature (537)..(538): n equals a,t,g, or c
tttacaacttcnttcnnnggggggaaaaaaaaggcccttggggtttaacccggccccctttggcccaaaggggtttaacccccgggggttncccccggggaaaaatttttcccccggggggggttnccgnaacccccaaacggncccgtttccccggggcccgggggggnaaccggaaaccgnttttggaaaaaagcccccaattgggggcccccgggctttacccgtttcccaaagggaaactttttccccaacccccaaaagaacttggttttgggggttcttgaacccgggcttnccaaccaaaacaagggtttgccccaangcttagtcacaagttacccgcgttgtacttacaattgccgggccccaaggatgaagaccangactacatctggaccactcattgcatctacctgtaacctgacggctttacggatactacggcgacaatcgctacagattaacatgtcgngnacatgcggttcnatgctgcttaccactgatctgcccatattaacggctggttaaaaaaann

SEQ ID NO: 2239 - DNA, 554 bp, Homo sapiens
  misc_feature (251)..(251): n equals a,t,g, or c
  misc_feature (549)..(549): n equals a,t,g, or c
gcgcgcggttcgcactttccaggtttcttccccagggaacagagcttgagcggggggccacccccccgtcctaccggagttctgaggtgcggtcaggcgcggagagcggacgcccagcgccagattctgtgggctccggagttcaggcccactgagccgcagctgagcacaggcggggcaggaaaaaggatgaggtgagggaaggcgctgggttcctggaaccccaagggagcactgagctgagtaagttngttcctgtcaattgggaaccccctcaaccacttccattccccaaatacctgcgctgctaccgatgcctcttggagaccaaggagttagggtgccttctgggatctgacatctgcctcaccccagctggcagcagctgcatcactctccacaaaaagaacagcagcggttctgacgtcatggtgagtgactgccgaagtaaggagcagatgagtgattgttcaaatacccgaacttctccggtgtctggcttctggatattctctcaatactgcttcctggatttctgcaatgaccctnaaaac

SEQ ID NO: 2240 - DNA, 266 bp, Homo sapiens
  misc_feature (170)..(170): n equals a,t,g, or c
  misc_feature (185)..(185): n equals a,t,g, or c
  misc_feature (216)..(216): n equals a,t,g, or c
  misc_feature (233)..(233): n equals a,t,g, or c
  misc_feature (254)..(254): n equals a,t,g, or c
gcagctgtacaatgccatcttcaatcattactctgaaaaatggaattcagaacatgctgcagttttatattccggaggtagaaggcgtagaacaggttatggatgatgaatcagatgaaaaagaagcaaactcaccttaaaataatctggattttctttgggcataacanacagacttgttgatnatatatatcaagtttttattattaatatgcntgaggaacttgaagatnaataaaatatgctcttcatanaatgatatttct

SEQ ID NO: 2241 - DNA, 295 bp, Homo sapiens
  misc_feature (39)..(39): n equals a,t,g, or c
  misc_feature (189)..(189): n equals a,t,g, or c
  misc_feature (235)..(235): n equals a,t,g, or c
  misc_feature (243)..(243): n equals a,t,g, or c
  misc_feature (245)..(245): n equals a,t,g, or c
  misc_feature (277)..(277): n equals a,t,g, or c
  misc_feature (295)..(295): n equals a,t,g, or c
gttcagctccaaaagcccctgccacacctggggcacagntggcacctgatgtgagactgctctatgtgctagccattgccgcgcttggtggcctctgcctcatcctggcctcctccctcctctatgtggcctgtctgcgggaaggcagacgagggcgccgacggaaatactcactgggtcgggccaacncgggcaggaggatctgcggtgcaactgcatgacagtcttaagccantgtcctgnanaggaagatgagggtgatgatgaagggggcttnggggccttgaagggcaan

SEQ ID NO: 2242 - DNA, 484 bp, Homo sapiens
  misc_feature (14)..(14): n equals a,t,g, or c
  misc_feature (396)..(396): n equals a,t,g, or c
  misc_feature (457)..(457): n equals a,t,g, or c
  misc_feature (464)..(464): n equals a,t,g, or c
  misc_feature (473)..(473): n equals a,t,g, or c
  misc_feature (483)..(483): n equals a,t,g, or c
gtcgggtgtgagtnttttcagcaacccggtccagtactgggagatacagccatccaccttcagatgtgtctacgtgcgctctgccattcaactcggaaactataagtaattctcaagaaagccctcatttttataacctggcaaaatcttgttaatgtcattgctaaaaaataaataaaagctagatactggaaacctaactgcaatgtggatgttttacccacatgacttattatgcataaagccaaatttccagtttaagtaattgcctacaataaaaagaaattttgcctgccattttcagaatcatcttttgaagctttctgttgatgttaactgagctactagagatattcttatttcactaaatgtaaaatttggagtaaatatatatgncaatatttagtaaagcttttcttttttaatttccaggaaaaaaataaaagagtattgaagncttctgnaattcattnagcaagtagnt

SEQ ID NO: 2243 - DNA, 508 bp, Homo sapiens
  misc_feature (36)..(36): n equals a,t,g, or c
  misc_feature (57)..(57): n equals a,t,g, or c
  misc_feature (118)..(118): n equals a,t,g, or c
  misc_feature (209)..(209): n equals a,t,g, or c
  misc_feature (214)..(214): n equals a,t,g, or c
  misc_feature (230)..(230): n equals a,t,g, or c
  misc_feature (233)..(233): n equals a,t,g, or c
  misc_feature (297)..(297): n equals a,t,g, or c
  misc_feature (306)..(306): n equals a,t,g, or c
  misc_feature (327)..(327): n equals a,t,g, or c
  misc_feature (374)..(374): n equals a,t,g, or c
  misc_feature (377)..(377): n equals a,t,g, or c
  misc_feature (380)..(382): n equals a,t,g, or c
  misc_feature (385)..(385): n equals a,t,g, or c
  misc_feature (387)..(388): n equals a,t,g, or c
  misc_feature (397)..(400): n equals a,t,g, or c
  misc_feature (402)..(402): n equals a,t,g, or c
  misc_feature (404)..(404): n equals a,t,g, or c
  misc_feature (408)..(408): n equals a,t,g, or c
  misc_feature (411)..(412): n equals a,t,g, or c
  misc_feature (416)..(416): n equals a,t,g, or c
  misc_feature (422)..(422): n equals a,t,g, or c
  misc_feature (425)..(425): n equals a,t,g, or c
  misc_feature (427)..(427): n equals a,t,g, or c
  misc_feature (432)..(432): n equals a,t,g, or c
  misc_feature (435)..(435): n equals a,t,g, or c
  misc_feature (441)..(441): n equals a,t,g, or c
  misc_feature (450)..(451): n equals a,t,g, or c
  misc_feature (453)..(453): n equals a,t,g, or c
  misc_feature (458)..(458): n equals a,t,g, or c
  misc_feature (461)..(461): n equals a,t,g, or c
  misc_feature (464)..(464): n equals a,t,g, or c
  misc_feature (474)..(474): n equals a,t,g, or c
  misc_feature (476)..(477): n equals a,t,g, or c
  misc_feature (486)..(486): n equals a,t,g, or c
  misc_feature (490)..(490): n equals a,t,g, or c
  misc_feature (493)..(493): n equals a,t,g, or c
  misc_feature (496)..(496): n equals a,t,g, or c
  misc_feature (499)..(500): n equals a,t,g, or c
  misc_feature (505)..(505): n equals a,t,g, or c
aattcggcacgagcaagtgccttgaaacagtatttnaggagtcttccagagcctctnatgacctatgagttacatggagatttcattgttccagccaaaagcggcagcccagaatctngtgttaatgcgatccatttcttggtacacaaactgccagagaagaataaagagatgttggatattttggtgaaacacttaacaaatgtttnaaatnactccaagcagaaccngangactgtggcaaacttaggagtggtgtttggaccaactctgatgaggccacaggaagaaactgtngctgccctnatggactttgaagtttcagantattgttgtgggaaatcttaattggaaaaccaggaaaaggttttttnggncgnnnccngnnattaaattnnnngngnccanctnncttntaaagnatnancccgnaantggggncagcaaggnnanttggnggngtnaagggccagngnnccagggggnccgnggncgnttnnaaatnttt

SEQ ID NO: 2244 - DNA, 467 bp, Homo sapiens
  misc_feature (387)..(387): n equals a,t,g, or c
  misc_feature (433)..(433): n equals a,t,g, or c
gggcgtggcggcgctgtgcgcgtgcacaaaagagagctgaggggcgggggcgctgcggcacagctggtttgagcaactgaactggaaacaagatgcaggaccccaacgcagacactgaatggaatgacatcttacgcaaaaagggtatcttaccccccaaggaaagtctgaaagaattggaagaggaggcagaagaggagcagcgcatcctccagcagtcagtggtgaaaacatatgaagatatgactttggaagagctggaggatcatgaagacgagtttaatgaggaggatgaacgtgctattgaaatgtacagacggcggagactggctgagtggaaagcaactaaactgaagaataaattcggagaagttttggagatctcanggaaggattatgttcaagaagttaccaaagctggcgagggcttgtnggtcatcttgcacctttacaaccaaggaattccc

SEQ ID NO: 2245 - DNA, 476 bp, Homo sapiens
  misc_feature (325)..(325): n equals a,t,g, or c
  misc_feature (340)..(340): n equals a,t,g, or c
  misc_feature (426)..(426): n equals a,t,g, or c
  misc_feature (429)..(429): n equals a,t,g, or c
  misc_feature (434)..(434): n equals a,t,g, or c
  misc_feature (442)..(442): n equals a,t,g, or c
  misc_feature (460)..(460): n equals a,t,g, or c
ggcttctaagtattctttctagtcatgtgaataggtaatttgagaaatacatgctcactgttcaatacttttccattatttttcctcttttttatagagctaatgtcaaaccccgaaattccacaccacctagtttggcaagaaatcctgccccaggtgtgcttacaaacaaaagaaaaacatatactgagagctacatagccaggccagatggggactgtgcatcttcccttaatggtggaaatattaaaggcattgaaggacattcacctggaaacttaccaaaattctgccatgagtgtgggactaaataccctgtagaatnggccaaattttgctntgaatgtggcattcgaagaatgattctatgaatagaatctcaaaaaaaaaaaaaaaaaaccaagttcaaaagtttatgattattgntgnttggncaagctanaacacatccttaattaantttgggctaaaaatct

SEQ ID NO: 2246 - DNA, 527 bp, Homo sapiens
  misc_feature (408)..(408): n equals a,t,g, or c
  misc_feature (413)..(413): n equals a,t,g, or c
  misc_feature (420)..(420): n equals a,t,g, or c
  misc_feature (425)..(426): n equals a,t,g, or c
  misc_feature (454)..(454): n equals a,t,g, or c
  misc_feature (475)..(475): n equals a,t,g, or c
  misc_feature (478)..(478): n equals a,t,g, or c
  misc_feature (512)..(513): n equals a,t,g, or c
tcgacccacgcgtccgcagtttttccaggcgtgacagacatggcggcggcttttcggaaggcggctaagtcccggcagcgggaacaccgagagcgaaccagcctggctttcgaaaacatctgggcctgttggagaaaaagaaagattacaaacttcgtgcagatgactaccgaaaaaaacaggaatacctcagagctctccggaagaaggctcttgaaaaaaatccagatgaattctactacaaaatgactcgggttaaactccaggatggattccacgttattgaaggagactgaagggaggaagtgaactgccagaacaactggaaactgatgagaacccagggtgtccaaatatgatgagaaatggaaaagggtttgccgggaactgaaggaaaattggaaagangaaantccgagntcccnnctggctgggattttcccgggggaagccngccggatgaagccatgtggtnttntttttggaccacccaaaaagggaagttggagccnnttggatgttggcca

SEQ ID NO: 2247 - DNA, 342 bp, Homo sapiens
  misc_feature (58)..(58): n equals a,t,g, or c
  misc_feature (89)..(89): n equals a,t,g, or c
  misc_feature (102)..(102): n equals a,t,g, or c
  misc_feature (106)..(106): n equals a,t,g, or c
  misc_feature (116)..(116): n equals a,t,g, or c
  misc_feature (158)..(158): n equals a,t,g, or c
  misc_feature (181)..(181): n equals a,t,g, or c
  misc_feature (302)..(302): n equals a,t,g, or c
  misc_feature (308)..(308): n equals a,t,g, or c
  misc_feature (310)..(310): n equals a,t,g, or c
  misc_feature (317)..(317): n equals a,t,g, or c
  misc_feature (338)..(338): n equals a,t,g, or c
gaatgactttatgggaatcacgctcgcttctagccaggctgtcagcaacgccaggaanctggagtggccactgacggaagttgcataangtgtttttgaaancgangccccgggangatataagttctatttgcaaaatcgcagtctgcctcagtcanatcctgtattaaaagttactctngcagtgtctgatcttcaaaaatccttgaactactggtgttatctactgggaatgaaaatttatgaaaaatattataaaagctatcgggcttgcttgggctttctgaaaaacccttgttaanctggancnacaggcntcaagggtggggtgaaacatncccc

SEQ ID NO: 2248 - DNA, 429 bp, Homo sapiens
  misc_feature (5)..(5): n equals a,t,g, or c
  misc_feature (33)..(34): n equals a,t,g, or c
  misc_feature (39)..(39): n equals a,t,g, or c
  misc_feature (41)..(41): n equals a,t,g, or c
  misc_feature (280)..(280): n equals a,t,g, or c
  misc_feature (292)..(292): n equals a,t,g, or c
  misc_feature (346)..(346): n equals a,t,g, or c
  misc_feature (358)..(358): n equals a,t,g, or c
  misc_feature (397)..(397): n equals a,t,g, or c
  misc_feature (416)..(416): n equals a,t,g, or c
  misc_feature (423)..(423): n equals a,t,g, or c
gttgngacgcgcttccacactgatagtatactnnatttncnacccagttaaagctggtacccctgcaggtaccggtccggaattcccgggtcgacccacgcgtccgtggagctgaatgagttgctcctggacaaaaaccaggagccccagtggcgggagacagctcgctggatcaaatttgaagaagacgtggatgaagatgcccatgattcagaggccaaagtggcgagcctgagaggaatggagttacaggggtgcgccagcactcaggttgaatcanaaaataaccaanaagaacagaaacaggtgcgcttaccagaaagccgtctgacaccatgggaggtgnggtttattggcntagaaaaagaagaacgtgaccggctgcatctgaaagctntagaggaattaaatcaacnctagaanaaagaa

SEQ ID NO: 2249 - DNA, 205 bp, Homo sapiens
  misc_feature (46)..(46): n equals a,t,g, or c
  misc_feature (65)..(65): n equals a,t,g, or c
  misc_feature (130)..(130): n equals a,t,g, or c
  misc_feature (157)..(157): n equals a,t,g, or c
  misc_feature (173)..(173): n equals a,t,g, or c
  misc_feature (175)..(175): n equals a,t,g, or c
  misc_feature (196)..(196): n equals a,t,g, or c
gcccacgcgtccgcccacgcgttcgggaaaatgagtaccaggcgtncagcgttcccccgacccgnctgctaataaaggagccttccaagcgtgtggggcattttcgtggactacagaattggaaagcatnttcttttacaatgtgaaaagcaagatnccacatttatacattngncagatggttttttttttgggnccctttaaa

SEQ ID NO: 2250 - DNA, 265 bp, Homo sapiens
  misc_feature (249)..(249): n equals a,t,g, or c
  misc_feature (255)..(255): n equals a,t,g, or c
  misc_feature (257)..(259): n equals a,t,g, or c
aattcaatgaagcgcgggtaaacgggggggagtaactatgactctcttaaggtagccaaatgcctcgtcatctaattagtgacgcgcatgaatggatgaacgagattcccactgtccctacctactatccagcgaaaccacagccaagggaacgggcttggcggaatcagcggggaaagaagaccctgttgagcttgactctagtctggcacggtgaagagacatgagaaggtgtaaataaagtgggangccccncnnncccccc

SEQ ID NO: 2251 - DNA, 483 bp, Homo sapiens
  misc_feature (1)..(1): n equals a,t,g, or c
naccaccctcactaagggaacaaaagctggagctccaccgcggtgacgaccgctctagaactagtggatcccccgggctgcaggaattcggcagagcaaaaccaatggtaggaaatgtttttagggaattgggctaattgatagcaatgcagtgataggatcttaaaataacagtgacaaggtcgtagtgtttaactgtcagataaatggcaaggtcaaagtggcagtcaggaggagttacttgaggagatcagtggagttggttaatagaaaataatattcttaagggcaagatagatgggcagctaacaaggctatatcttgaacaatataatggaaagaaattattaaaaaacggttgattaagaggcaaagtgcaactacacaaattaaaaaagcgttatcccttgactagtttctgatcctgagccagtgcttaggcctagaacccattgatcaaaaaaagaggttgaatgtacagga

SEQ ID NO: 2252 - DNA, 552 bp, Homo sapiens
  misc_feature (4)..(4): n equals a,t,g, or c
  misc_feature (6)..(6): n equals a,t,g, or c
  misc_feature (9)..(9): n equals a,t,g, or c
  misc_feature (238)..(238): n equals a,t,g, or c
ggcngnacnaaccctcactaaagggaacaaaagctggagctccaccgcggtgacggccgctctagaactagtggatcccccgggctgcaggaattcggcacgagggtatacaggaaatggataatactgtaacaatctgcagctgtctcatatgttatataaagaatgaactcataacagtgagaaaagggtatgtagtgcctttatgaatactaaaaaaataggtcaaattcctggnatatgtatgacttggttttattataattatgaaaccctttaacctattattcttttaaatacaagcagaaatacaagacattgccattaccagttagctttaatagactcaagaaacaaaatagtctcttaagttttatgtaagtgataaaataaactaagagttcctcatagatataatacttgaaaaatggtttctagttagtgacggtggaataaaatcattttcttactctcttctcttgaatgccaatgaaaagaaaatcaaacaaaagatagaaaatgtcaatttcaaagacacaaacaatcaaacaa

SEQ ID NO: 2253 - DNA, 530 bp, Homo sapiens
  misc_feature (2)..(2): n equals a,t,g, or c
  misc_feature (4)..(4): n equals a,t,g, or c
  misc_feature (7)..(7): n equals a,t,g, or c
  misc_feature (12)..(12): n equals a,t,g, or c
  misc_feature (57)..(57): n equals a,t,g, or c
ancntgncaccnaaccctcactaaagggaacaaaagctggagctccaccgcggtgcngtccgctctagaactagtggatcccccgggctgcaggaattcggcacgttcggcacgagcaaaagatacaaacttagtatttccaggcattgaacagcaggctttccaggactgtcatccttgagaaaatggagatacatgaggtgagccccacgtttctcccacctttctgctcagctttctgcgacagagcacgttcccgttgcagcacaagtggagctgcagtatcagaacctaaggaggcagagagtggaattctgggttgctggcatgactggaatatttgctagagaggaggaactgctccaagaagttctagaagtctctggacattcaaactaggtcctgagaactgtatattttaaatgcttgcattggaactgttttaaaccaatgatctcaagtctttgtcttaagttagaaaaagaagggcaaattaaacgccaagttaatagaaggaataaaatagcaca

SEQ ID NO: 2254 - DNA, 200 bp, Homo sapiens
  misc_feature (4)..(4): n equals a,t,g, or c
  misc_feature (9)..(11): n equals a,t,g, or c
  misc_feature (13)..(13): n equals a,t,g, or c
  misc_feature (124)..(124): n equals a,t,g, or c
  misc_feature (140)..(140): n equals a,t,g, or c
  misc_feature (155)..(155): n equals a,t,g, or c
  misc_feature (170)..(170): n equals a,t,g, or c
  misc_feature (195)..(195): n equals a,t,g, or c
tggnttttnnntnctaactcgaattaccctcactaaagggaacaaaagctggagctccaccgcggtggcggccgctctagaactagtggatcccccgggctgcaggaattcggcacgagcgctnagccgtcccttctcgncatgtcccagagcangcaccgcgccgaggncccgccgctggaacgcgaggacagngggac

SEQ ID NO: 2255 - DNA, 127 bp, Homo sapiens
  misc_feature (79)..(79): n equals a,t,g, or c
  misc_feature (99)..(99): n equals a,t,g, or c
  misc_feature (105)..(105): n equals a,t,g, or c
  misc_feature (116)..(116): n equals a,t,g, or c
  misc_feature (119)..(119): n equals a,t,g, or c
acggcacgagggggggcccggtacccaattcgccctataatgagtcgtattacaattcactggccgtcgttttacaacntcgtgactgggaaaacccanacaccnctccttctttntanggccccct

SEQ ID NO: 2256 - DNA, 229 bp, Homo sapiens
  misc_feature (10)..(10): n equals a,t,g, or c
  misc_feature (13)..(13): n equals a,t,g, or c
  misc_feature (29)..(29): n equals a,t,g, or c
  misc_feature (45)..(46): n equals a,t,g, or c
  misc_feature (191)..(191): n equals a,t,g, or c
  misc_feature (218)..(218): n equals a,t,g, or c
  misc_feature (221)..(221): n equals a,t,g, or c
  misc_feature (223)..(223): n equals a,t,g, or c
  misc_feature (226)..(226): n equals a,t,g, or c
tgggggaggnggntcctctacttaaaggnaacaaaagctggcccnncccccgcaagtggcggctgctctagaactagtggatcccccgggctgcaggaattcggcacgagcggcacgagcggcacgagggggggcccggtacccaattcgccctatagtgagtcgtattacaattcactggccgtcgtttnacaacgtcgtgactgggaaaacccaangantnganatt

SEQ ID NO: 2257 - DNA, 111 bp, Homo sapiens
  misc_feature (41)..(41): n equals a,t,g, or c
  misc_feature (102)..(104): n equals a,t,g, or c
  misc_feature (107)..(107): n equals a,t,g, or c
gctcgtgccgaaggggggcccggtacccaattcgccctatngtgagtcgtattacaattcactggccgtcgttttacaacgtcgtgactgggaaaaacccannnccntctc

SEQ ID NO: 2258 - DNA, 99 bp, Homo sapiens
  misc_feature (91)..(91): n equals a,t,g, or c
  misc_feature (96)..(99): n equals a,t,g, or c
gcggcacgaggggggcccggtaccaattcgccctatagtgagtcgtattacaattcactggccgtcgttttaaacgtcgtgactgggcccnaaaannnn

SEQ ID NO: 2259 - DNA, 165 bp, Homo sapiens
  misc_feature (155)..(155): n equals a,t,g, or c
  misc_feature (158)..(159): n equals a,t,g, or c
  misc_feature (162)..(162): n equals a,t,g, or c
  misc_feature (164)..(164): n equals a,t,g, or c
attaaccctcactaaagggaacaaaagctggagctccaccgcggtggcggccgctctagaactagtgggggcccggtacccaattcgccctatagtgagtcgtattacaattcactggccgtcgttttacaacgtcgtgactgggaaaacccaantcnnttntnc

SEQ ID NO: 2260 - DNA, 573 bp, Homo sapiens
  misc_feature (10)..(10): n equals a,t,g, or c
  misc_feature (66)..(66): n equals a,t,g, or c
  misc_feature (76)..(76): n equals a,t,g, or c
  misc_feature (127)..(127): n equals a,t,g, or c
  misc_feature (173)..(174): n equals a,t,g, or c
  misc_feature (179)..(180): n equals a,t,g, or c
  misc_feature (183)..(183): n equals a,t,g, or c
  misc_feature (189)..(189): n equals a,t,g, or c
  misc_feature (195)..(196): n equals a,t,g, or c
  misc_feature (202)..(202): n equals a,t,g, or c
  misc_feature (228)..(228): n equals a,t,g, or c
  misc_feature (230)..(230): n equals a,t,g, or c
  misc_feature (234)..(234): n equals a,t,g, or c
  misc_feature (245)..(245): n equals a,t,g, or c
  misc_feature (253)..(253): n equals a,t,g, or c
  misc_feature (270)..(270): n equals a,t,g, or c
  misc_feature (284)..(284): n equals a,t,g, or c
  misc_feature (299)..(299): n equals a,t,g, or c
  misc_feature (325)..(325): n equals a,t,g, or c
  misc_feature (354)..(354): n equals a,t,g, or c
  misc_feature (360)..(360): n equals a,t,g, or c
  misc_feature (393)..(393): n equals a,t,g, or c
  misc_feature (443)..(443): n equals a,t,g, or c
  misc_feature (445)..(445): n equals a,t,g, or c
  misc_feature (461)..(461): n equals a,t,g, or c
  misc_feature (463)..(463): n equals a,t,g, or c
  misc_feature (466)..(466): n equals a,t,g, or c
  misc_feature (525)..(525): n equals a,t,g, or c
  misc_feature (545)..(545): n equals a,t,g, or c
  misc_feature (550)..(550): n equals a,t,g, or c
  misc_feature (558)..(558): n equals a,t,g, or c
  misc_feature (568)..(568): n equals a,t,g, or c
tgattctccncttcgaaaggtcccttcactaaaagggaacaaaagcggcagctccaccgcggtggnggtcgttctncaactagtggatcccccgggctgcaggaattcggtacgagccagagaccancccatgaagagtggtgggtggtttattcactggaaatgttgcgttnntgctnnccnaaaacncacgtnnacttcngaggaatgatgggcaaatctggtctncntggntgaaacccttnttttcccntagatgctttaaccttngttggtttcggctntagggttcatagtcncttctgttcccttctccattctgganaaggacttcccctacatacaccctgattncttgtngctgtggggattggacgtaacattcaaagatcntatgtgctttcctcacttcggatataaacactctgggttttacagcaatnanctgcctaaccttcatngnganaaataaaacatctctcttctactcctgctgtttcatgcgccactcctttggggtctttntcaatttgttgaactcctancttcnttccctanaaatttccangtacc

SEQ ID NO: 2261 - DNA, 112 bp, Homo sapiens
  misc_feature (49)..(49): n equals a,t,g, or c
  misc_feature (91)..(91): n equals a,t,g, or c
  misc_feature (106)..(106): n equals a,t,g, or c
  misc_feature (111)..(112): n equals a,t,g, or c
gcggcacgagcggcacgagggggggcccggtacccaattcgccctatantgagtcgtattacaattcactggccgtcgttttacaacgtcntgactgggaaacccnaaaann

SEQ ID NO: 2262 - DNA, 247 bp, Homo sapiens
  misc_feature (48)..(48): n equals a,t,g, or c
  misc_feature (236)..(236): n equals a,t,g, or c
  misc_feature (243)..(244): n equals a,t,g, or c
  misc_feature (247)..(247): n equals a,t,g, or c
gggggggggggttggttaattatttccctcttcaaaattaaccctccnctaaaaggaacaaaagctggagctccaccgcggtggcggccgctctagaactagtggatcccccgggctgcaggaattcggcacgagcggcacgagcggcacgagggggggcccggtacccaattcgccctatagtgagtcgtattacaattcactggccgtcgttttacaacgtcgtgatacccccnaaaaaannttn

SEQ ID NO: 2263 - DNA, 103 bp, Homo sapiens
  misc_feature (39)..(39): n equals a,t,g, or c
  misc_feature (96)..(97): n equals a,t,g, or c
  misc_feature (102)..(103): n equals a,t,g, or c
gcggcacgagggggggcccggtacccaattcgccctatngtgagtcgtattacaattcactggccgtcgttttacaacgtcgtgactgggaaaacnnaaatnn

SEQ ID NO: 2264 - DNA, 111 bp, Homo sapiens
  misc_feature (14)..(14): n equals a,t,g, or c
  misc_feature (48)..(48): n equals a,t,g, or c
  misc_feature (60)..(60): n equals a,t,g, or c
  misc_feature (109)..(109): n equals a,t,g, or c
  misc_feature (111)..(111): n equals a,t,g, or c
gcggcacgagcggnacgagggggggcccggtacccaattcgccctatngtgagtcgtatnacaattcactggccgtcgttttacaacgtcgtgactgggaaaacccaantn

SEQ ID NO: 2265 - DNA, 187 bp, Homo sapiens
  misc_feature (9)..(9): n equals a,t,g, or c
  misc_feature (16)..(16): n equals a,t,g, or c
  misc_feature (20)..(20): n equals a,t,g, or c
  misc_feature (81)..(81): n equals a,t,g, or c
  misc_feature (93)..(93): n equals a,t,g, or c
  misc_feature (116)..(116): n equals a,t,g, or c
  misc_feature (137)..(137): n equals a,t,g, or c
  misc_feature (152)..(152): n equals a,t,g, or c
  misc_feature (187)..(187): n equals a,t,g, or c
taagggaanatttggngccnctccaccaaaaagtggcggtttgctctagaactagtggatcccccgggctgcaggaatccngcacgagcgganacgagggggggcccggtacccanttcgccctatagtgagtcgtnttacaattcactggncgtcgttttacaacgtcgtgactgggaaaacccan

SEQ ID NO: 2266 - DNA, 155 bp, Homo sapiens
  misc_feature (16)..(16): n equals a,t,g, or c
  misc_feature (22)..(22): n equals a,t,g, or c
  misc_feature (24)..(24): n equals a,t,g, or c
  misc_feature (38)..(38): n equals a,t,g, or c
  misc_feature (54)..(54): n equals a,t,g, or c
  misc_feature (108)..(108): n equals a,t,g, or c
  misc_feature (116)..(116): n equals a,t,g, or c
  misc_feature (119)..(120): n equals a,t,g, or c
  misc_feature (154)..(154): n equals a,t,g, or c
ctgctaatctaaggtntcctcntnaataaagggaacanaaggcccagctccacnaaaggtggcgttcgctctagaactagtggatcccccgggctgcaggaatccggnacgagcgnaannagggggggcccggttcccaattcggcctatattna

SEQ ID NO: 2267 - DNA, 125 bp, Homo sapiens
  misc_feature (40)..(40): n equals a,t,g, or c
  misc_feature (102)..(103): n equals a,t,g, or c
  misc_feature (110)..(110): n equals a,t,g, or c
  misc_feature (116)..(116): n equals a,t,g, or c
  misc_feature (120)..(120): n equals a,t,g, or c
  misc_feature (123)..(123): n equals a,t,g, or c
gcggcacgagggggggcccggtacccaattcgccctatantgagtcgtattacaattcactggccgtcgttttacaacgtcttgactgggaaaacccaaatnnttttctntgtttnttcnttncc

SEQ ID NO: 2268 - DNA, 112 bp, Homo sapiens
  misc_feature (8)..(8): n equals a,t,g, or c
  misc_feature (17)..(17): n equals a,t,g, or c
  misc_feature (49)..(49): n equals a,t,g, or c
  misc_feature (107)..(107): n equals a,t,g, or c
  misc_feature (111)..(112): n equals a,t,g, or c
gcggcacnagcggcacnagggggggcccggtacccaattcgccctatantgagtcgtattacaattcactggccgtcgttttacaacgtcgtgactgggaaaacccnaaann

SEQ ID NO: 2269 - DNA, 120 bp, Homo sapiens
  misc_feature (2)..(2): n equals a,t,g, or c
  misc_feature (11)..(11): n equals a,t,g, or c
  misc_feature (50)..(50): n equals a,t,g, or c
  misc_feature (111)..(113): n equals a,t,g, or c
  misc_feature (120)..(120): n equals a,t,g, or c
ancggcacgancggcacgagggggggcccggtacccaattcgccctatantgagtcgtattacaattcactggccgtcgttttacaacgtcgtgactgggaaaacccaaannnttttccn

SEQ ID NO: 2270 - DNA, 197 bp, Homo sapiens
  misc_feature (2)..(2): n equals a,t,g, or c
  misc_feature (6)..(6): n equals a,t,g, or c
  misc_feature (22)..(22): n equals a,t,g, or c
  misc_feature (38)..(38): n equals a,t,g, or c
  misc_feature (96)..(96): n equals a,t,g, or c
  misc_feature (120)..(121): n equals a,t,g, or c
  misc_feature (123)..(123): n equals a,t,g, or c
  misc_feature (147)..(147): n equals a,t,g, or c
  misc_feature (173)..(173): n equals a,t,g, or c
tncttntaattaaaggcccctngaggcacccgcggtgnaagacgctctatttctagtggatcccccgggctgcaggaattcggcacgagtggcccnagggggggcccggtaccctcttcnncntttagtgagtcgtattacaattcnctggccgtcgttttacaacgtcgtgnctgggaaaacccatgtttgttgac

SEQ ID NO: 2271 - DNA, 242 bp, Homo sapiens
  misc_feature (9)..(9): n equals a,t,g, or c
  misc_feature (20)..(20): n equals a,t,g, or c
  misc_feature (28)..(28): n equals a,t,g, or c
  misc_feature (46)..(46): n equals a,t,g, or c
  misc_feature (91)..(91): n equals a,t,g, or c
  misc_feature (229)..(229): n equals a,t,g, or c
  misc_feature (231)..(232): n equals a,t,g, or c
  misc_feature (236)..(236): n equals a,t,g, or c
  misc_feature (238)..(238): n equals a,t,g, or c
tgcggcggngaggagagagntgctcgcncattaaccctcaaataantgggaaaaaaatctggagctccaccgcggtggcggacgctctagnactagtggatcccccgggctgcaggaattcggcacgagcggcacgagggggggcccggtacccaattcgccctatagtgagtcgtattacaattcactggccgtcgttttacaacgtcgtgactgggaaaacccagcnannaganangggc

SEQ ID NO: 2272 - DNA, 145 bp, Homo sapiens
  misc_feature (1)..(1): n equals a,t,g, or c
  misc_feature (8)..(9): n equals a,t,g, or c
  misc_feature (31)..(31): n equals a,t,g, or c
  misc_feature (47)..(47): n equals a,t,g, or c
  misc_feature (137)..(137): n equals a,t,g, or c
  misc_feature (140)..(141): n equals a,t,g, or c
  misc_feature (143)..(143): n equals a,t,g, or c
ngtggagnngaagggtatattcgcttagctngccaattaaccctcantaatgggaacaagacctggagctccaccgcggtggcggccgctctagaactagtggatcccccgggctgcaggaattcggcacgagggtnatnnantc

SEQ ID NO: 2273 - DNA, 373 bp, Homo sapiens
  misc_feature (4)..(4): n equals a,t,g, or c
  misc_feature (19)..(19): n equals a,t,g, or c
  misc_feature (31)..(31): n equals a,t,g, or c
  misc_feature (40)..(40): n equals a,t,g, or c
  misc_feature (86)..(86): n equals a,t,g, or c
  misc_feature (226)..(226): n equals a,t,g, or c
  misc_feature (320)..(320): n equals a,t,g, or c
  misc_feature (334)..(335): n equals a,t,g, or c
  misc_feature (340)..(340): n equals a,t,g, or c
  misc_feature (342)..(342): n equals a,t,g, or c
tggngctttaccgcgtcgncggtcgctttanattagtttntctccccgggctgcaggaattcgatatcaagcttatcgataccgtngacctcgagggggggcccggtacccaattcgccctatagtgagtcgtattacaattcactggccgtcgttttacaacgtcgtgactgggaaaaccctggcgttacccaacttaatcgccttgcagcacaatccccctttngccagcttggagtaataagcgaagaggcccgcaccgatcgcccttcccaacagttgcgcagcctgaatggcgaatgggacgcgccctgtagcgntgcattaagcgcgnnggtgngntggttacccgcagtgtgaccgctacacttgc

SEQ ID NO: 2274 - DNA, 434 bp, Homo sapiens
  misc_feature (1)..(1): n equals a,t,g, or c
  misc_feature (3)..(3): n equals a,t,g, or c
  misc_feature (11)..(11): n equals a,t,g, or c
ngnaaggtganagcaacccgcactaaagggaacaaaagctggagctccaccgcggtggcggccgctctagaactagtggatcccccgggctgcaggaattcggcacgagatttccaggtagatttctcagccagctctaaaacagattgctttttcagtggccttactctttgtgggtttttttttttttctctgaacttgatataaagattttatttgtcccttgaaaaagtaacaaatgtgcatagatcaatttgtactactttggtcattggatatttctgatccttattgcattgtacctaaaggagagtaactaatggtaacctttttaatagagtatgtgaaaggtagtggctgatgaatccttaacgttcatagggtctttttgctgttacggttgtatatagaggtctggaaggatttttaaaatg

SEQ ID NO: 2275 - DNA, 375 bp, Homo sapiens
  misc_feature (10)..(10): n equals a,t,g, or c
  misc_feature (24)..(24): n equals a,t,g, or c
  misc_feature (35)..(35): n equals a,t,g, or c
  misc_feature (63)..(63): n equals a,t,g, or c
  misc_feature (77)..(77): n equals a,t,g, or c
  misc_feature (160)..(160): n equals a,t,g, or c
  misc_feature (167)..(167): n equals a,t,g, or c
  misc_feature (199)..(199): n equals a,t,g, or c
  misc_feature (222)..(222): n equals a,t,g, or c
  misc_feature (238)..(238): n equals a,t,g, or c
  misc_feature (240)..(240): n equals a,t,g, or c
  misc_feature (243)..(243): n equals a,t,g, or c
  misc_feature (261)..(261): n equals a,t,g, or c
  misc_feature (265)..(265): n equals a,t,g, or c
  misc_feature (289)..(289): n equals a,t,g, or c
  misc_feature (295)..(295): n equals a,t,g, or c
  misc_feature (309)..(309): n equals a,t,g, or c
  misc_feature (349)..(349): n equals a,t,g, or c
  misc_feature (373)..(373): n equals a,t,g, or c
gttggaacancccgcagtaagggnaacagggagcnggtgctagaccgcggcggcggccgctcnagaactaggggatnccccgggctgcaggaattcgatatcaagcttatcgataccgtcgacctcgagggggggcccggtacccaattcgccctatagngagtcgnattacaattcactggccgtcggtttacaacgncgagactgggaaaaccctggcgntacccaacttaatcgncntgnaggacatccccctttcgncagntggcgtaatagcgaagaggcccgnaccgancgccttccaacagntgcgcagcctgaatggcgaatgggacgcgccctgtacggngcattaagccgcggcgggtgtggngg

SEQ ID NO: 2276 - DNA, 499 bp, Homo sapiens
  misc_feature (15)..(15): n equals a,t,g, or c
  misc_feature (258)..(258): n equals a,t,g, or c
  misc_feature (290)..(290): n equals a,t,g, or c
  misc_feature (308)..(308): n equals a,t,g, or c
  misc_feature (346)..(346): n equals a,t,g, or c
  misc_feature (386)..(386): n equals a,t,g, or c
  misc_feature (416)..(416): n equals a,t,g, or c
  misc_feature (419)..(419): n equals a,t,g, or c
  misc_feature (428)..(428): n equals a,t,g, or c
  misc_feature (431)..(431): n equals a,t,g, or c
  misc_feature (434)..(434): n equals a,t,g, or c
  misc_feature (439)..(439): n equals a,t,g, or c
  misc_feature (445)..(445): n equals a,t,g, or c
  misc_feature (457)..(457): n equals a,t,g, or c
  misc_feature (461)..(461): n equals a,t,g, or c
  misc_feature (463)..(463): n equals a,t,g, or c
  misc_feature (473)..(473): n equals a,t,g, or c
  misc_feature (494)..(494): n equals a,t,g, or c
aattcggcacgaggnttcagtggcagcgggtctgggacagagttcactctcaccatcagcagcctgcaggctgaagatgtggcagcttattcctgtcagcaatattatagttttcctttcactttcggccctgggaccaaagtggatatcaaacgaactgtggctgcaccatctgtcttcatcttcccgccatctgatgagcagttgaaatctggaactgcctctgttgtgtgcctgctgaataacttctatcccagngaggccaaagtacagtggaaggtggataacgncctccaatcgggtaactnccaggagagtgtcacagagcaggacagcaaggacaganctacagcctcagcagcacctgacggtgagcaaagcagatncggggaacacaagtttaggcttcgagtcanccntcagggctnagntgnccgtnaaaagngtttaacagggnggtntngaggggagtncccactgttcttattcagctnaccct

SEQ ID NO: 2277 - DNA, 504 bp, Homo sapiens
  misc_feature (159)..(159): n equals a,t,g, or c
  misc_feature (456)..(456): n equals a,t,g, or c
  misc_feature (483)..(483): n equals a,t,g, or c
gtgaaaatcaccagagtggaggctgaggatgttggggtttattattactgcatgcaagctctacaaactccattcactttcggccctgggaccaaagtggatatcaaacgaactgtggctgcaccatctgtcttcatcttcccgccatctgatgagcanttgaaatctggaactgcctctgttgtgtgcctgctgaataacttctatcccagagaggccaaagtacagtggaaggtggataacgccctccaatcgggtaactcccaggagagtgtcacagagcaggacagcaaggacagcacctacagcctcagcagcaccctgacgctgagcaaagcagactacgagaaacacaaagtctacgcctgcgaagtcacccatcagggcctgagctcgcccgtcacaaagagcttcaacaggggagagtgttagagggagaagtggccccacctgctnctcagtttcagcctgaccccttccatnctttggcctctgacctttttc

SEQ ID NO: 2278 - DNA, 695 bp, Homo sapiens
  misc_feature (84)..(84): n equals a,t,g, or c
  misc_feature (114)..(114): n equals a,t,g, or c
  misc_feature (163)..(163): n equals a,t,g, or c
  misc_feature (213)..(213): n equals a,t,g, or c
  misc_feature (220)..(220): n equals a,t,g, or c
  misc_feature (236)..(236): n equals a,t,g, or c
  misc_feature (306)..(306): n equals a,t,g, or c
  misc_feature (326)..(326): n equals a,t,g, or c
  misc_feature (346)..(346): n equals a,t,g, or c
  misc_feature (351)..(352): n equals a,t,g, or c
  misc_feature (354)..(354): n equals a,t,g, or c
  misc_feature (361)..(361): n equals a,t,g, or c
  misc_feature (401)..(401): n equals a,t,g, or c
  misc_feature (404)..(404): n equals a,t,g, or c
  misc_feature (417)..(417): n equals a,t,g, or c
  misc_feature (423)..(423): n equals a,t,g, or c
  misc_feature (436)..(436): n equals a,t,g, or c
  misc_feature (450)..(450): n equals a,t,g, or c
  misc_feature (464)..(464): n equals a,t,g, or c
  misc_feature (502)..(502): n equals a,t,g, or c
  misc_feature (504)..(504): n equals a,t,g, or c
  misc_feature (514)..(514): n equals a,t,g, or c
  misc_feature (527)..(529): n equals a,t,g, or c
  misc_feature (532)..(532): n equals a,t,g, or c
  misc_feature (581)..(581): n equals a,t,g, or c
  misc_feature (586)..(586): n equals a,t,g, or c
  misc_feature (588)..(588): n equals a,t,g, or c
  misc_feature (609)..(609): n equals a,t,g, or c
  misc_feature (615)..(615): n equals a,t,g, or c
  misc_feature (627)..(627): n equals a,t,g, or c
  misc_feature (665)..(665): n equals a,t,g, or c
  misc_feature (677)..(677): n equals a,t,g, or c
gctcgtgccgaattcggcacgaggttttacgaggccctctgctaggccacacggatgcagtctggggtttggcttatagtgcancacatcagcgtttgttgtcctgttcagcanatggcactctgcgtttatggaatacaactgaagttgctccagcactaantgtatttaatgatactaaagaactgggaatccctgcctctgtggatctantgagcantgacccgagccatatngtatcatcattcagcaagggatatacaaacatttttaacatggaaacacaacaacgcattctcactttanaatccaatgtaatacaacanccaactcttcctgccaaatnaattnnantcatcantctcctactcttccgatcaacatcctgctccttaaaaaangcnatccaattctatnataacnattccggcaaatnatccctccatggtnccccccttaaactntttcaattttaaccttttaaccccagggccttaccttnanattttggccncccaaaaatttcnnnacnttttttggaaccccaaaattttaaaattttttccccaaaaatccccccnccccncnaaaaattttttaaaaaaacancccccnattttttttttnccccccccccaaatttttttttccccttttttggaacnaaaccccggggnaatttttttttttttaac

SEQ ID NO: 2279 - DNA, 583 bp, Homo sapiens
  misc_feature (1)..(1): n equals a,t,g, or c
  misc_feature (445)..(445): n equals a,t,g, or c
  misc_feature (460)..(460): n equals a,t,g, or c
  misc_feature (462)..(462): n equals a,t,g, or c
  misc_feature (500)..(500): n equals a,t,g, or c
  misc_feature (517)..(517): n equals a,t,g, or c
  misc_feature (523)..(524): n equals a,t,g, or c
  misc_feature (582)..(582): n equals a,t,g, or c
nggagcgagcagcccgggaagggctggccggcttcgcagcgccccgccgtggctgcggccggaagcggtctcgttggccctgcggcgctggagccttgacgcacggagctcgagagcgagaacgggagagaaaggggtagaaatggcggctccgctcggctcccgctgaggagggcgaagccggcggagtgtctgtgctgccggtctgcagcaccgcccccgcttcccgcacgccgcctgctcacgccgacttcccttcctctgcccggctctctcttgtgctcgtctgcgctccgcacgctccgggccggctcgtctctcattgcccggctcggctccgctggccctgactgaccggccggcgggccggccttgctcggtcttccgggcgcggcgtggactccgtcccctggctggaccatggtgaacacccggaagaactctnttcgcttctcgggtncnagtcttctggtcccggcctggcctggggcccggaacanaacctggggcgaccgangcacanncatttatctctttggacccgtctcaaaaccggccgcagtgcccgcgccaaaccggggna

SEQ ID NO: 2280 - DNA, 518 bp, Homo sapiens
  misc_feature (17)..(17): n equals a,t,g, or c
  misc_feature (20)..(20): n equals a,t,g, or c
  misc_feature (28)..(28): n equals a,t,g, or c
  misc_feature (48)..(48): n equals a,t,g, or c
  misc_feature (74)..(74): n equals a,t,g, or c
  misc_feature (102)..(102): n equals a,t,g, or c
  misc_feature (106)..(106): n equals a,t,g, or c
  misc_feature (112)..(112): n equals a,t,g, or c
  misc_feature (117)..(117): n equals a,t,g, or c
  misc_feature (203)..(203): n equals a,t,g, or c
  misc_feature (212)..(212): n equals a,t,g, or c
  misc_feature (215)..(215): n equals a,t,g, or c
  misc_feature (225)..(225): n equals a,t,g, or c
  misc_feature (233)..(233): n equals a,t,g, or c
  misc_feature (250)..(250): n equals a,t,g, or c
  misc_feature (280)..(280): n equals a,t,g, or c
  misc_feature (285)..(285): n equals a,t,g, or c
  misc_feature (295)..(295): n equals a,t,g, or c
  misc_feature (298)..(298): n equals a,t,g, or c
  misc_feature (301)..(301): n equals a,t,g, or c
  misc_feature (313)..(313): n equals a,t,g, or c
  misc_feature (324)..(324): n equals a,t,g, or c
  misc_feature (326)..(326): n equals a,t,g, or c
  misc_feature (331)..(331): n equals a,t,g, or c
  misc_feature (337)..(337): n equals a,t,g, or c
  misc_feature (352)..(352): n equals a,t,g, or c
  misc_feature (362)..(363): n equals a,t,g, or c
  misc_feature (376)..(376): n equals a,t,g, or c
  misc_feature (385)..(385): n equals a,t,g, or c
  misc_feature (395)..(395): n equals a,t,g, or c
  misc_feature (401)..(401): n equals a,t,g, or c
  misc_feature (406)..(406): n equals a,t,g, or c
  misc_feature (455)..(455): n equals a,t,g, or c
  misc_feature (475)..(475): n equals a,t,g, or c
  misc_feature (489)..(489): n equals a,t,g, or c
  misc_feature (496)..(496): n equals a,t,g, or c
  misc_feature (499)..(499): n equals a,t,g, or c
gcctgagggctgacaanganaagctgcnccatcaagagcgaacacaanccctgcgccaagcacctgtgggccanggctacttccacctgctggatcacaaangccnggctcnctgcnaagctgacttccggggccactgggtgctgatattctttggcttcactcactgccctgacatctgcccacaacaactggaaaaactngtgcaagtngtncgagagctgnaaacaaanctggttttcctccagtncacctgtcttcatcactgttgaccccaacnggatnactttaaccntgnccnctacttcaaganttccaccccanantgttnggtctnaccggctccccaaanatgttgcccnngctaatcccattnccgcttttnttcaattccnggcccncgatnaaggaacatgaatactcttgaacatcctttgctctactctcacccttanggctcttcccgattatacgnccgaacaatcggtnaacaatnttnactttttcgggggaaatgg

SEQ ID NO: 2281 - DNA, 184 bp, Homo sapiens
  misc_feature (7)..(7): n equals a,t,g, or c
  misc_feature (9)..(9): n equals a,t,g, or c
  misc_feature (14)..(14): n equals a,t,g, or c
  misc_feature (25)..(25): n equals a,t,g, or c
  misc_feature (35)..(35): n equals a,t,g, or c
  misc_feature (101)..(101): n equals a,t,g, or c
  misc_feature (142)..(142): n equals a,t,g, or c
  misc_feature (159)..(159): n equals a,t,g, or c
  misc_feature (175)..(176): n equals a,t,g, or c
ggacttnanttctntggaatgcatngaatggcagngacgcattggccctgcccttggcctgcattgatgacgagatggactgtgagcctcagggccccgcncctggcccagctctccgatgtggccatgcacagcctgggtntggctttcatctatgancagactgacgacatcnnggatgttc

SEQ ID NO: 2282 - DNA, 681 bp, Homo sapiens
  misc_feature (82)..(82): n equals a,t,g, or c
  misc_feature (95)..(95): n equals a,t,g, or c
  misc_feature (99)..(99): n equals a,t,g, or c
  misc_feature (106)..(106): n equals a,t,g, or c
  misc_feature (123)..(123): n equals a,t,g, or c
  misc_feature (125)..(125): n equals a,t,g, or c
  misc_feature (147)..(147): n equals a,t,g, or c
  misc_feature (152)..(152): n equals a,t,g, or c
  misc_feature (155)..(156): n equals a,t,g, or c
  misc_feature (172)..(172): n equals a,t,g, or c
  misc_feature (254)..(254): n equals a,t,g, or c
  misc_feature (279)..(279): n equals a,t,g, or c
  misc_feature (289)..(289): n equals a,t,g, or c
  misc_feature (307)..(307): n equals a,t,g, or c
  misc_feature (310)..(310): n equals a,t,g, or c
  misc_feature (319)..(319): n equals a,t,g, or c
  misc_feature (353)..(353): n equals a,t,g, or c
  misc_feature (356)..(356): n equals a,t,g, or c
  misc_feature (374)..(374): n equals a,t,g, or c
  misc_feature (390)..(390): n equals a,t,g, or c
  misc_feature (406)..(406): n equals a,t,g, or c
  misc_feature (426)..(427): n equals a,t,g, or c
  misc_feature (440)..(442): n equals a,t,g, or c
  misc_feature (450)..(450): n equals a,t,g, or c
  misc_feature (466)..(466): n equals a,t,g, or c
  misc_feature (478)..(478): n equals a,t,g, or c
  misc_feature (486)..(487): n equals a,t,g, or c
  misc_feature (492)..(492): n equals a,t,g, or c
  misc_feature (500)..(500): n equals a,t,g, or c
  misc_feature (506)..(506): n equals a,t,g, or c
  misc_feature (509)..(509): n equals a,t,g, or c
  misc_feature (516)..(516): n equals a,t,g, or c
  misc_feature (527)..(527): n equals a,t,g, or c
  misc_feature (579)..(579): n equals a,t,g, or c
  misc_feature (609)..(609): n equals a,t,g, or c
  misc_feature (636)..(636): n equals a,t,g, or c
  misc_feature (650)..(650): n equals a,t,g, or c
  misc_feature (663)..(663): n equals a,t,g, or c
  misc_feature (669)..(669): n equals a,t,g, or c
cgtggggctggagctccaccgcggtggggggccgctctataactaatggatcccccgggctggatgaatgcggcccgaggtnatgtctcacaaanagtnctccgcncccagacatgggtcccncngcttcctgcctcggaagcgcancaccnggnntcgtgggaaggtgaanatcttccctaaggatgacccatccaagccggtccacctcacatccttcctgggatacaaggctggcatgactcacatcgtgngggaagtcgacaggccgggatccanggtgaacaanaaggaggtggtggaggcngtnaccattgtngagacaccacccatggtggttgtgggcattgtgngcnacatgaaaacccctcgangcctccggaccttcantactgtctttgctgancacatcagtgatgaatgcannaggcgtttctatnnnaattggcnttcatctaataacaangcctttaccatntactgcannaaatngcaggatnaggatngcnagaagcngctgggagaangacttcagcagcatgaaaaaatatgcccagtcatccgtgtcattgcccacanccaggattcgcctgcttcctctgcgccagnaaaaaaggccacctgatggaacatccnggtgaaccgaaggnggtggtggccganaaactnggacttggggcc

SEQ ID NO: 2283 - DNA, 355 bp, Homo sapiens
  misc_feature (8)..(8): n equals a,t,g, or c
  misc_feature (272)..(272): n equals a,t,g, or c
  misc_feature (292)..(292): n equals a,t,g, or c
  misc_feature (309)..(309): n equals a,t,g, or c
  misc_feature (333)..(333): n equals a,t,g, or c
  misc_feature (344)..(344): n equals a,t,g, or c
ggcagagncagatatccatgtgtggaagctctgagtcactgaatagcaaagaaaaatatgaaagcaagaggaattgctttcacatctagaaaatgttgcaagataatctgaaatcttctggtgctggtgaatgcatgaagaggttcacagtatcttttaaagtacttctggaaaagataaggagtttaaaaggtgggtgtgtacactgggcactgagctgcagtaggatttttccttgggatagtctggtctggagctgggacacagctgcnctttggggaaaggcccgctngcaagatgattggaagnaattctcccttattggtaggcctntgacggccctntttttcagcca

SEQ ID NO: 2284 - DNA, 100 bp, Homo sapiens
  misc_feature (44)..(44): n equals a,t,g, or c
  misc_feature (58)..(58): n equals a,t,g, or c
  misc_feature (73)..(73): n equals a,t,g, or c
  misc_feature (86)..(86): n equals a,t,g, or c
  misc_feature (94)..(94): n equals a,t,g, or c
gggattcccaaagctgacatcacgtgggagttaccggataaggngcatctgaaggcangggttcaggctcgtntgtatggaaacanatttcttnaccccc

SEQ ID NO: 2285 - DNA, 446 bp, Homo sapiens
  misc_feature (8)..(8): n equals a,t,g, or c
  misc_feature (10)..(10): n equals a,t,g, or c
  misc_feature (12)..(12): n equals a,t,g, or c
  misc_feature (38)..(38): n equals a,t,g, or c
  misc_feature (55)..(55): n equals a,t,g, or c
  misc_feature (153)..(153): n equals a,t,g, or c
  misc_feature (156)..(156): n equals a,t,g, or c
  misc_feature (202)..(202): n equals a,t,g, or c
  misc_feature (213)..(213): n equals a,t,g, or c
  misc_feature (223)..(223): n equals a,t,g, or c
  misc_feature (247)..(247): n equals a,t,g, or c
  misc_feature (253)..(253): n equals a,t,g, or c
  misc_feature (279)..(279): n equals a,t,g, or c
  misc_feature (293)..(293): n equals a,t,g, or c
  misc_feature (296)..(296): n equals a,t,g, or c
  misc_feature (304)..(305): n equals a,t,g, or c
  misc_feature (371)..(371): n equals a,t,g, or c
  misc_feature (380)..(380): n equals a,t,g, or c
  misc_feature (395)..(395): n equals a,t,g, or c
  misc_feature (411)..(411): n equals a,t,g, or c
  misc_feature (426)..(426): n equals a,t,g, or c
ggcaaagntntnaataccactatgcatggcttattgtncgccaccaaataaacantataccacagctatttaatatgtatttcaacactataccacacgctatataatgtgtatttcagcaaatataccacaactatttaatgtgtatttcancantataccacaactatgtgatgtgtatttcaacaatatgccacagctntttaatatgtntttcaaaatnacacgcagtccttgctttgcatantaatgntgaaaccataagaaatcaccatactnctgagactctacanaancagtgttnnatcatcagtgaaaggaaattattattctgtcacctttacatttttatgtaaaaatattgaaaactncaataatcnactataaaaggttcnaattaagaaaaaattnaagaatatatataangttcatattattcatacctc

SEQ ID NO: 2286 - DNA, 442 bp, Homo sapiens
  misc_feature (329)..(329): n equals a,t,g, or c
  misc_feature (420)..(420): n equals a,t,g, or c
  misc_feature (422)..(422): n equals a,t,g, or c
  misc_feature (428)..(428): n equals a,t,g, or c
tttttctgtcaagctgttctttatttcagggagagggcaggggaggggctcagtctttcttggcagcagctttcctcatggcggccagtacgttgctcagctcctcccgcttcctcttggcgcggatgtgcgtccccacccttttcttgataaatttgagggcccgtttgtccttggagaccttcagtaactccatggcgcgccgctcgtacggggcaaagccacacacctcccgaatcatgtcccgcacgaacttggtgtgtttggtcagacgcccgcggcgtcgggctgtgcctggggcttgctcaagttcttggtcactttgtggnccttgttgaaggcccacgggcataagggtagcgtaagggccaatggctgctgctctccaaaaaacggccggggggggccggtaaccaaatngncctaanagtgaagtcggatt

SEQ ID NO: 2287 - DNA, 255 bp, Homo sapiens
  misc_feature (13)..(13): n equals a,t,g, or c
  misc_feature (30)..(31): n equals a,t,g, or c
  misc_feature (46)..(46): n equals a,t,g, or c
  misc_feature (50)..(50): n equals a,t,g, or c
  misc_feature (72)..(72): n equals a,t,g, or c
  misc_feature (79)..(79): n equals a,t,g, or c
  misc_feature (105)..(105): n equals a,t,g, or c
  misc_feature (119)..(119): n equals a,t,g, or c
  misc_feature (124)..(124): n equals a,t,g, or c
  misc_feature (139)..(139): n equals a,t,g, or c
  misc_feature (143)..(143): n equals a,t,g, or c
  misc_feature (147)..(147): n equals a,t,g, or c
  misc_feature (185)..(185): n equals a,t,g, or c
  misc_feature (198)..(198): n equals a,t,g, or c
  misc_feature (220)..(220): n equals a,t,g, or c
  misc_feature (231)..(231): n equals a,t,g, or c
  misc_feature (241)..(241): n equals a,t,g, or c
aattcggcacagnctgaagcaggcgctctnngctcggcgcggcccnctgncaatccgtggaggaacgcgccnccgagcnaccatcatgcctgggcactttgaggnaggtttcggctgtntggtncaccaaccgattcgnccanttanttaacgacgtttcggaccccttcgagggtgctgaaggnagtcagagaacangtaaaaagaagccgggcggggntcggcgtttgngggccctggngtcaagttgcgcat

SEQ ID NO: 2288 - DNA, 335 bp, Homo sapiens
  misc_feature (8)..(8): n equals a,t,g, or c
ttttagancctggctcaggatgaacgctagctacaggcttaacacatgcaagtcgaggggcatcaggaagaaagcttgctttctttgctggcgaccggcgcacgggtgagtaacacgtatccaacctaccctttactcggggatagcctttcgaaagaaagattaatacccgatgggataatcattccgcatggtctgattattaaaggattccggtaaaggatggggatgcgttccattaggttgttggtgaggtaacggcccaccaagccttcgatggataggggttctgagaggaaggtcccccacattggaactgagacacggtccaaact

SEQ ID NO: 2289 - DNA, 577 bp, Homo sapiens
  misc_feature (12)..(13): n equals a,t,g, or c
  misc_feature (483)..(483): n equals a,t,g, or c
  misc_feature (538)..(538): n equals a,t,g, or c
  misc_feature (540)..(540): n equals a,t,g, or c
  misc_feature (543)..(543): n equals a,t,g, or c
  misc_feature (548)..(548): n equals a,t,g, or c
gtggagcacaannaaaagccatcttggtgcaaagaggctttaaattactatggactggcagtcaatcaaaatccaggaattgatgtctgatgatcagagagaagcaggtcggattccacgaacaatagaatgtgagcttgttcatgatcttgtggatagctgtgtcccgggagacacagtgactattactggaattgtcaaagtctcaaatgcggaagaaggttctcgaaataagaatgacaagtgtatgttccttttgtatattgaagcaaattctattagtaatagcaaaggacagaaaacaaagagttctgaggatgggtgtaagcatggaatgttgatggagttctcacttaaagacctttatgccatccaagagattcaagctgaagaaaacctgtttaaactcattgtcaactcgctttgccctgtcatttttggtcatgaagcagcgtgcaatgttgccccacgtggcgtgtatgnttgtggtaacaccacgaccacctttggtctgacggtaactctttcaaaagatagntnctntgganaatttgcttttggaacttggtgcccctgg

SEQ ID NO: 2290 - DNA, 372 bp, Homo sapiens
  misc_feature (19)..(19): n equals a,t,g, or c
  misc_feature (194)..(194): n equals a,t,g, or c
  misc_feature (224)..(224): n equals a,t,g, or c
  misc_feature (300)..(300): n equals a,t,g, or c
  misc_feature (338)..(338): n equals a,t,g, or c
  misc_feature (346)..(346): n equals a,t,g, or c
  misc_feature (355)..(355): n equals a,t,g, or c
  misc_feature (368)..(368): n equals a,t,g, or c
gttgacgcgtgggctgctnggggcttaagcggagggagtcgagccagcgtcgccgcgatggtgttgttggagagcgagcagttcctgacggagctgaccagacttttccagaagtgccggacgtcgggcagcgtctatatcaccttgaagaagtatgacggtcgaaccaaacccattccaaagaaaggtactgnggaaaggctttgagcccgcagacaacaagngtctgttaagagctaccgatgggaagaagaagatcagcactgtggtgagctccaaggaagtgaataagtttcaganggcttattcaaacctccttagagctaacatggatgggntgaagaanagagacaantagaacaaaactnagaa

SEQ ID NO: 2291 - DNA, 384 bp, Homo sapiens
  misc_feature (110)..(110): n equals a,t,g, or c
  misc_feature (116)..(116): n equals a,t,g, or c
  misc_feature (273)..(273): n equals a,t,g, or c
  misc_feature (300)..(300): n equals a,t,g, or c
  misc_feature (340)..(340): n equals a,t,g, or c
  misc_feature (344)..(344): n equals a,t,g, or c
  misc_feature (374)..(374): n equals a,t,g, or c
  misc_feature (378)..(378): n equals a,t,g, or c
ggcacgaaaacttctccagagttgtcctttattaagtttctttacagaaactttaattggtgccatgaattcttgtgggggaaagaatcataagagccatcaactttttncctttnattttagcatattccaagccctgccaagaaagtaccaagactccctgccacagcagcagaacctgaaagcagctgtcattagtaatggggaacattaagatactctgtgaaggtgcaagacttcagggtggggtgggcatggggtgggggtatgggnaacattggaggatgggatatctggggntaattttaaaggtttacctgttatgtaatttttaatgggnactnggcatggggcccgggttgcttttccgggtncttngggaaa

SEQ ID NO: 2292 - DNA, 536 bp, Homo sapiens
  misc_feature (436)..(436): n equals a,t,g, or c
  misc_feature (454)..(454): n equals a,t,g, or c
  misc_feature (519)..(520): n equals a,t,g, or c
  misc_feature (528)..(528): n equals a,t,g, or c
  misc_feature (533)..(533): n equals a,t,g, or c
ggtggaggctcatgtcgaggtttaatgcattcaaaaggactaataccatactgcaccatttgagaatgtccaagcacacagatgcagcagaagaggtgctattggaaaaaaaaggttgcgcgggagtcataacactaaacagaccaaagttcctcaatgcactgactcttaatatgattcggcagatttatccacagctaaagaagtgggaacaagatcctgaaactttcctgatcattataaagggagcaggaggaaaggctttctgtgccgggggtgatatcagagtgatctcggaagctgaaaaggcaaaacagaagatagctccagttttcttcagagaagaatatatgctgaataatgctgttggttcttgccagaaaccttatgttgcacttattcatggaattacaatgggtgggggagttggtctctnagtccatgggcaatttcnagtggctacagaaaaagtgtctttttgctatgccagaaactgcaataggactggtcccttgatgnngggtgganggttnttt

SEQ ID NO: 2293 - DNA, 302 bp, Homo sapiens
  misc_feature (143)..(143): n equals a,t,g, or c
  misc_feature (302)..(302): n equals a,t,g, or c
aattcggcagagctgatagtgagcggcagaatcaggagtaccagcggctcatggacatcaagtcgcggctggagcaggagattgccatctaccgcagcctgctcgagggacaggaagatcactcacaacaatttgtttgcctncaaggtcctctgaggcagcaggctctggggcttctgctgtcctttggagggtgtcttctgggtagagggatgggaaggaagggacccttacccccggctcttctcctgacctgccaataaaatttatggtccaagggaggaaggaaaaaaaaaaaaaan

SEQ ID NO: 2294 - DNA, 656 bp, Homo sapiens
  misc_feature (13)..(13): n equals a,t,g, or c
  misc_feature (17)..(17): n equals a,t,g, or c
  misc_feature (26)..(26): n equals a,t,g, or c
  misc_feature (66)..(66): n equals a,t,g, or c
  misc_feature (74)..(74): n equals a,t,g, or c
  misc_feature (611)..(611): n equals a,t,g, or c
  misc_feature (620)..(620): n equals a,t,g, or c
  misc_feature (635)..(635): n equals a,t,g, or c
  misc_feature (652)..(652): n equals a,t,g, or c
  misc_feature (654)..(654): n equals a,t,g, or c
cactcactatttnggcnaagctggtncgcctgcaggtaccggtccggaattcccgggtcgacccangcgtccgnccgagcagaaccggaaggatgctgaagcctggttcaccagccggactgaagaattgaaccgggaggtcgctggccacacggagcagctccagatgagcaggtccgaggttactgacctgcggcgcacccttcagggtcttgagattgagctgcagtcacagctgagcatgaaagctgccttggaagacacactggcagaaacggaggcgcgctttggagcccagctggcgcatatccaggcgctgatcagcggtattgaagcccagctgggcgatgtgcgagctgatagtgagcggcagaatcaggagtaccagcggctcatggacatcaagtcgcggctggagcaggagattgccacctaccgcagcctgctcgagggacaggaagatcactacaacaatttgtctgcctccaaggtcctctgaggcagcaggctctggggcttctgctgtcctttggagggtgtctttctgggtagagggatgggaaggaagggacccttacccccgggtcttctcctgacctggcaataaaaantttatggtncaaagggaaaaaaanaaaaaaagggcggccgntnta

SEQ ID NO: 2295 - DNA, 602 bp, Homo sapiens
  misc_feature (7)..(7): n equals a,t,g, or c
  misc_feature (244)..(244): n equals a,t,g, or c
  misc_feature (259)..(259): n equals a,t,g, or c
  misc_feature (265)..(265): n equals a,t,g, or c
  misc_feature (288)..(288): n equals a,t,g, or c
  misc_feature (546)..(546): n equals a,t,g, or c
  misc_feature (550)..(550): n equals a,t,g, or c
  misc_feature (563)..(563): n equals a,t,g, or c
  misc_feature (569)..(569): n equals a,t,g, or c
  misc_feature (601)..(601): n equals a,t,g, or c
gacaagntagaaacttggagagaggtgtatctccaggactcctttaaaccgcttgtctgcatttctcctaatgccagcttgtttgatgctgtctcttcattaattcggaacaagatccacaggctgccagttattgacccagaatcaggcaatactttgtacatcctcacccacaagcgcattctgaagttcctcaaattgtttatcactgagttccccaagccagagttcatgtccaagtctntggaaaaactaccanattggnacctatgccaatattgctatggntcgactaccacccccgtctatgtggctctggggatttttgtacagcatcgagtctcagccctgccagtggtggatgagaaggggcgtgtggtggacatctactccaagtttgatgttatcaatctggcagcagaaaagacctacaacaacctagatgtatctgtgactaaagccttgcaacatcgatcacattactttgagggtgttctcaagtgctacctgcatgagacttggagaccatcattaacaggctagtgnaaancagaaggttaacnacttgnaatggtggatgaaaatgatgtggtcaagggant

SEQ ID NO: 2296 - DNA, 466 bp, Homo sapiens
  misc_feature (10)..(10): n equals a,t,g, or c
  misc_feature (73)..(73): n equals a,t,g, or c
  misc_feature (91)..(91): n equals a,t,g, or c
  misc_feature (93)..(93): n equals a,t,g, or c
  misc_feature (117)..(117): n equals a,t,g, or c
  misc_feature (128)..(128): n equals a,t,g, or c
  misc_feature (134)..(134): n equals a,t,g, or c
  misc_feature (177)..(177): n equals a,t,g, or c
  misc_feature (233)..(233): n equals a,t,g, or c
  misc_feature (270)..(270): n equals a,t,g, or c
  misc_feature (337)..(338): n equals a,t,g, or c
  misc_feature (345)..(345): n equals a,t,g, or c
  misc_feature (357)..(357): n equals a,t,g, or c
  misc_feature (378)..(378): n equals a,t,g, or c
  misc_feature (388)..(388): n equals a,t,g, or c
  misc_feature (396)..(396): n equals a,t,g, or c
  misc_feature (420)..(420): n equals a,t,g, or c
  misc_feature (439)..(439): n equals a,t,g, or c
  misc_feature (442)..(442): n equals a,t,g, or c
  misc_feature (454)..(454): n equals a,t,g, or c
aattcggcanaggtggcccggaccatcggcatttctgtggatccgaggaggcggaacaagtccacggagtccntgcaggccaacgtgcagngnctgaaggagtaccgctccaaactnatcctcttcgncaggangccctcggcccccaagaagggagacagttctgctgaagaactnagaactgggccacccagctgaccggaccggtcatgcccgtccggaaacgtcttatnaagaaggaggaaagcttcgagtgcattcactttaggnaaggagaaaggaattttcaaaaggcctttcggttagttcttccgttattggccccgtgtcccaaagnncccgggntttttttggggnattaagggggcaaaaaaaggngcccaaaggnaaggccgnaagaaaccaggtttttttgaaaangggaaaaaaatttaaaggnccntttcttgggggnttttggggtatt

SEQ ID NO: 2297 - DNA, 389 bp, Homo sapiens
  misc_feature (2)..(2): n equals a,t,g, or c
  misc_feature (5)..(5): n equals a,t,g, or c
  misc_feature (7)..(7): n equals a,t,g, or c
  misc_feature (10)..(10): n equals a,t,g, or c
  misc_feature (20)..(20): n equals a,t,g, or c
  misc_feature (22)..(22): n equals a,t,g, or c
  misc_feature (26)..(28): n equals a,t,g, or c
  misc_feature (30)..(30): n equals a,t,g, or c
  misc_feature (47)..(47): n equals a,t,g, or c
  misc_feature (56)..(56): n equals a,t,g, or c
  misc_feature (80)..(80): n equals a,t,g, or c
  misc_feature (82)..(82): n equals a,t,g, or c
  misc_feature (91)..(92): n equals a,t,g, or c
  misc_feature (101)..(101): n equals a,t,g, or c
  misc_feature (106)..(106): n equals a,t,g, or c
  misc_feature (129)..(130): n equals a,t,g, or c
  misc_feature (134)..(134): n equals a,t,g, or c
  misc_feature (161)..(161): n equals a,t,g, or c
  misc_feature (172)..(172): n equals a,t,g, or c
  misc_feature (175)..(175): n equals a,t,g, or c
  misc_feature (188)..(188): n equals a,t,g, or c
  misc_feature (204)..(204): n equals a,t,g, or c
  misc_feature (208)..(208): n equals a,t,g, or c
  misc_feature (217)..(217): n equals a,t,g, or c
  misc_feature (230)..(230): n equals a,t,g, or c
  misc_feature (257)..(257): n equals a,t,g, or c
  misc_feature (260)..(260): n equals a,t,g, or c
  misc_feature (275)..(275): n equals a,t,g, or c
  misc_feature (289)..(289): n equals a,t,g, or c
  misc_feature (310)..(310): n equals a,t,g, or c
  misc_feature (331)..(332): n equals a,t,g, or c
  misc_feature (340)..(340): n equals a,t,g, or c
  misc_feature (359)..(359): n equals a,t,g, or c
  misc_feature (364)..(364): n equals a,t,g, or c
  misc_feature (388)..(388): n equals a,t,g, or c
anttngnaanaggaaggaangnagannntnttggcccgggccgagangaaggttgntggaaaaggggccgtcccaacganangaccacctnnccttcgagnagggngttaacaccgtaaccaccttggnngagnacacgggaaaatctcatctggtggtgnttcacacacgncgngtatccccatggngctggttgttttcttncctnccctgtgtngtaaaatgggggncccttactgcattatcaagggaaaggnaanattggcgacgtattngtccacaggaagcncctgcaccattgtgcgtcttnacacaggtgttctcgggacgnncaaaggtnttttttgattaagttggtnggtanttatgaggatccatttacattgtna

SEQ ID NO: 2298 - DNA, 501 bp, Homo sapiens
  misc_feature (244)..(244): n equals a,t,g, or c
  misc_feature (277)..(277): n equals a,t,g, or c
  misc_feature (447)..(447): n equals a,t,g, or c
  misc_feature (460)..(460): n equals a,t,g, or c
  misc_feature (477)..(477): n equals a,t,g, or c
  misc_feature (489)..(489): n equals a,t,g, or c
  misc_feature (492)..(492): n equals a,t,g, or c
ggtgacatcgtctttaaaccctgcgtggcaatccctgacgcaccgccgtgatgcccagggaagacagggcgacctggaagtccaactacttccttaagatcatccaactattggatgattatccgaaatgtttcattgtgggagcagacaatgtgggctccaagcagatgcagcagatcccgcatgtcccttcgcgggaaggcttgtggtgctgatgggcaagaacaccatgatgccgcaaggncatttcgagggcacctggaaaacaacccagctntggagaaactgctgcctcatatccgggggaatgtgggctttgtgttcaccaaggaggacctcacttgagatcagggacatgttgcttggccaataaggtgccagcttgctgccgtgctggtgccattgccccatgtgaaagtcactgtgccagccagaacactggtcttngggccccaaaaanacctcctttttcaaggntttaaggattcnccncttaaaatt

SEQ ID NO: 2299 - DNA, 326 bp, Homo sapiens
  misc_feature (61)..(61): n equals a,t,g, or c
  misc_feature (118)..(118): n equals a,t,g, or c
  misc_feature (143)..(143): n equals a,t,g, or c
  misc_feature (147)..(147): n equals a,t,g, or c
  misc_feature (158)..(158): n equals a,t,g, or c
  misc_feature (185)..(185): n equals a,t,g, or c
  misc_feature (198)..(198): n equals a,t,g, or c
  misc_feature (204)..(204): n equals a,t,g, or c
  misc_feature (209)..(209): n equals a,t,g, or c
  misc_feature (256)..(256): n equals a,t,g, or c
  misc_feature (259)..(259): n equals a,t,g, or c
  misc_feature (264)..(264): n equals a,t,g, or c
  misc_feature (271)..(271): n equals a,t,g, or c
  misc_feature (322)..(322): n equals a,t,g, or c
gaacacagtgctgtctggcggcaccaccatgtaccctggcattgccgacaggatgcagaangagatcactgccctggcacccagcacaatgaagatcaagatcattgctcctcctgancgcaagttctccgtgtgggatcggngggntccatcctggnctcgctgtccaccttccaacagatttngatcagcaagcangaattntgaanaaattccgggcccctcccatccgtccacccgcaaattgcttccttanggngggantaatganttaattttgcgtttacaacccttttcctttgaaaaaaaaccttaactttgncgcc

SEQ ID NO: 2300 - DNA, 284 bp, Homo sapiens
  misc_feature (2)..(2): n equals a,t,g, or c
  misc_feature (18)..(19): n equals a,t,g, or c
  misc_feature (34)..(34): n equals a,t,g, or c
  misc_feature (232)..(232): n equals a,t,g, or c
  misc_feature (254)..(254): n equals a,t,g, or c
  misc_feature (257)..(257): n equals a,t,g, or c
  misc_feature (270)..(270): n equals a,t,g, or c
  misc_feature (272)..(272): n equals a,t,g, or c
gngttccgctcggtgttnnaatactctcaagccnaggctttccctgactgtcaacccattcctgcttctcttgtccgctagtgtgaccccccagccaagggctgccagggcctctttcactatggactttgtgttctgccattcaggcacctgcggaactcgagtcatgcaggagcttttgtgatcgtgacggaagaagccattgccaaggggatccggaggaattgtggcntgtcacaagtgccgaggcccanaangggtgaaccaggntnaagcctgggatt

SEQ ID NO: 2301 - DNA, 336 bp, Homo sapiens
  misc_feature (6)..(6): n equals a,t,g, or c
  misc_feature (257)..(257): n equals a,t,g, or c
  misc_feature (318)..(318): n equals a,t,g, or c
  misc_feature (322)..(322): n equals a,t,g, or c
  misc_feature (328)..(328): n equals a,t,g, or c
  misc_feature (331)..(331): n equals a,t,g, or c
gccttnacaaaagggtgatactggagaaccaggactacctggaacaaaagggacaagaggacctccgggagcatctggctaccctggaaacccaggacttcccggaattcctggccaagacggcccgccaggccccccaggtattccaggatgcaatggcacaaagggggagagagggccgctcgggcctcctggcttgcctggtttcgctggaaatcccggaccaccaggcttaccagggatgaagggtgatccangtgagatacttggccatgtgcccgggatgctgttgaaaggtgaaagaagatttccggaatnccanggactncangccca

SEQ ID NO: 2302 - DNA, 271 bp, Homo sapiens
  misc_feature (239)..(240): n equals a,t,g, or c
  misc_feature (257)..(257): n equals a,t,g, or c
  misc_feature (266)..(266): n equals a,t,g, or c
  misc_feature (270)..(270): n equals a,t,g, or c
ggccagtggaaatgtaaagaaggccctgaagctgatggggtcaaatgaaggtgaattcaaggctgaaggaaatagcaaattcacctacacagttctggaggatggttgcacgaaacacactggggaatggagcaaaacagtctttgaatatcgaacacgcaaggctgtgagactacctattgtagatattgcaccctatgacattggtggtcctgatcaagaatttggtgtggacgttnnccctgattctctttatnaaccaaacnctanc

SEQ ID NO: 2303 - DNA, 237 bp, Homo sapiens
  misc_feature (7)..(7): n equals a,t,g, or c
  misc_feature (13)..(13): n equals a,t,g, or c
  misc_feature (32)..(32): n equals a,t,g, or c
  misc_feature (80)..(80): n equals a,t,g, or c
  misc_feature (128)..(128): n equals a,t,g, or c
  misc_feature (175)..(175): n equals a,t,g, or c
  misc_feature (195)..(195): n equals a,t,g, or c
  misc_feature (210)..(211): n equals a,t,g, or c
  misc_feature (216)..(216): n equals a,t,g, or c
ttgggcntacctnttccaggccgcgggcgccnagtatgtagttttgacgacaaagcatcacgaaggcttcacaaactggncgagtcctgtgtcttggaactggaactccaaagacgtggggcctcatngggatttggttggtgaattgggaacagctctccggaagaggaacatncgctatggactataccactnactcttagagtggtnncatcnactctatctacttgataagaa

SEQ ID NO: 2304 - DNA, 461 bp, Homo sapiens
  misc_feature (304)..(304): n equals a,t,g, or c
  misc_feature (311)..(311): n equals a,t,g, or c
  misc_feature (334)..(334): n equals a,t,g, or c
  misc_feature (363)..(363): n equals a,t,g, or c
  misc_feature (366)..(366): n equals a,t,g, or c
  misc_feature (386)..(387): n equals a,t,g, or c
  misc_feature (416)..(416): n equals a,t,g, or c
gacatgcggcctctgtccaacaaggctagcgccttagtcttcttcagctgcaggaccgatatgccttatcgctaccactcctcccttggccagctgaacttcaccgggtctgtgatatatgaggcccaggacgtctactcaggtgacatcatcagtggcctccgagatgaaaccaacttcacagtgatcatcaacccttcaggggtagtgatgtggtacctgtatcccatcaagaactggagatgtcccagcagtgaggaactgggacatgtgacaggctgtggtggcaccactgagcctagancatgganccttggcatgcccagggcaagtngggaagttctctgctccccaggctgctcngtnactgacccatcatcccaaanncatctcacggccagtctttccttccaacntaaacctcttgaaatctttgggcatttcctgtggctcctggctct

SEQ ID NO: 2305 - DNA, 539 bp, Homo sapiens
  misc_feature (22)..(22): n equals a,t,g, or c
  misc_feature (25)..(25): n equals a,t,g, or c
  misc_feature (41)..(41): n equals a,t,g, or c
  misc_feature (68)..(68): n equals a,t,g, or c
  misc_feature (96)..(96): n equals a,t,g, or c
  misc_feature (175)..(175): n equals a,t,g, or c
  misc_feature (177)..(177): n equals a,t,g, or c
  misc_feature (195)..(195): n equals a,t,g, or c
  misc_feature (199)..(199): n equals a,t,g, or c
  misc_feature (204)..(204): n equals a,t,g, or c
  misc_feature (272)..(272): n equals a,t,g, or c
  misc_feature (330)..(330): n equals a,t,g, or c
  misc_feature (369)..(369): n equals a,t,g, or c
  misc_feature (425)..(425): n equals a,t,g, or c
  misc_feature (427)..(427): n equals a,t,g, or c
  misc_feature (432)..(432): n equals a,t,g, or c
  misc_feature (435)..(435): n equals a,t,g, or c
  misc_feature (437)..(437): n equals a,t,g, or c
  misc_feature (479)..(479): n equals a,t,g, or c
  misc_feature (493)..(493): n equals a,t,g, or c
  misc_feature (496)..(496): n equals a,t,g, or c
  misc_feature (521)..(521): n equals a,t,g, or c
  misc_feature (537)..(537): n equals a,t,g, or c
gacaggatgtggggactcgganatnctactacggttttacngccttctccctgacccaatcactcctnatatcgggcaatcggggtttcaaaaaantgcctctcgggaattgacgtccgctatttgcacttcctggaaggaacccgggactatgactggctggaaccactgcttntnaatcagacggtgatgtcnatanacctnttctggttcaggcacagaccccaggaaagcttttcgggaagccctgctcatagacaggtacctgttgntgcacccagactttctccgatacatgaacaacaggttacttgatgtctaaacacctgnattgtgcccactggaatgatataccgccccaccactggngccctcctgctgctcactgaccttccactctttttaccaagttagttgctttttgntncatcnctnanggccatgagcgcttttcctgatcactactattatacatcatngaaaccgctgaatnttncataaaccatgacttccaacttganaaaaaaattcttgaancg

SEQ ID NO: 2306 - DNA, 302 bp, Homo sapiens
  misc_feature (78)..(78): n equals a,t,g, or c
  misc_feature (262)..(262): n equals a,t,g, or c
tctatatccagtcccactaccagctggaactgcagtgctgcatcgactggacccatgtcactgacccccttcataggnaccagaagctccaggaagaaaaacataaaagcataactgaggcacttaggagacaggagcagaatataaagagttttgaggagacctatgaccgaaagctcaagaatgaacttctaaacttccacaggctgcatggtgtctgcctggctttgggaatcctcatatgactttggcaggtgttggngtttggaggctcttcggcacaggagtgcttctatttcctt

SEQ ID NO: 2307 - DNA, 484 bp, Homo sapiens
  misc_feature (194)..(194): n equals a,t,g, or c
  misc_feature (198)..(198): n equals a,t,g, or c
  misc_feature (226)..(226): n equals a,t,g, or c
  misc_feature (288)..(288): n equals a,t,g, or c
  misc_feature (361)..(362): n equals a,t,g, or c
  misc_feature (414)..(414): n equals a,t,g, or c
  misc_feature (431)..(431): n equals a,t,g, or c
  misc_feature (440)..(440): n equals a,t,g, or c
  misc_feature (480)..(480): n equals a,t,g, or c
  misc_feature (484)..(484): n equals a,t,g, or c
gatatgcacttcgcagacacaaactaatgtctctgatccagaaggaagctcaagggcagagtgggacagaccagacagtgggtgtgctctccaaccctacatactacatgagcaacgatattccctatactttccaccaagacaacaatttcctgtacctatgtggattccaagagcctgatagcattcttgtncttnagagcctccctggcaaacaattaccatnacacaaagccatactttttgtgcctcggcgagatcccagtcgagaactttgggatggtccgngatctggcactgatggagcaataagctctaactggagtagacgaagcctatacgctagaagaatttcaacatnntgtaccaaaaatgaaagctgagacgaacatggtttggtattgactggatgangtcctcacatggcacangttttactnttgactatattgcagccccttgactgaggccaaagtcaanagcn

SEQ ID NO: 2308 - DNA, 438 bp, Homo sapiens
  misc_feature (301)..(301): n equals a,t,g, or c
  misc_feature (304)..(304): n equals a,t,g, or c
  misc_feature (368)..(368): n equals a,t,g, or c
  misc_feature (407)..(408): n equals a,t,g, or c
  misc_feature (427)..(427): n equals a,t,g, or c
  misc_feature (429)..(429): n equals a,t,g, or c
gggcaaattctgtgttcagtcggagaggcaggactccgctgctgtggggtttgattacaaggagaagctggccaagcacgagtcccagcaagactactccaaaggattcggcgggaagtatggggtgcagaaggatcggatggataagaatgcgtcaacctttgaggatgtcacccaggtgtcctctgcctaccagaagacagtacctgtcgaagctgtgaccagcaaaacaagtaacatcagagctaactttgaaaacctcgctaaggagaaagagcaggaggacaggcggaaggcggangcngagagagcccaacggatggccaaggaacggcaggaacaggaagaggccaggaagaaacttggangaacaagccagagccaaaacgcaaacgccccctgtgttnnccggaccttaagccaaccnanggaaaagct

SEQ ID NO: 2309 - DNA, 499 bp, Homo sapiens
  misc_feature (241)..(241): n equals a,t,g, or c
  misc_feature (324)..(324): n equals a,t,g, or c
  misc_feature (446)..(446): n equals a,t,g, or c
  misc_feature (453)..(454): n equals a,t,g, or c
  misc_feature (474)..(474): n equals a,t,g, or c
  misc_feature (478)..(478): n equals a,t,g, or c
ggccagtgctgccaggagctgcggacctcgctgaggaatgtgaccctgcactgcaccgacggctccagccgggccttcagctacaccgaggtggaagagtgcggctgcatgggccggcgctgccctgcgccgggcgacacccagcactcggaggaggcggaacccgagcccagccaggaggcagagagtgggagctgggagagaggcgtcccagtgtcccccatgcactgaccagcactgncgccctcctgacctccaaggagaacctcccatatgtcctctgagctcggcttcaaggccagtggaacttgtgcccctgtccangcggctgcaagctttgaacacactgtcacgcccgctttcttgtggaaggtgtgggctatgggtcacctggttgctggaagaaggggcccttacccaacccggcctggaagccacctttttangaaccanncccccggggcttggccgaancttncttttgggccattgcattcca

SEQ ID NO: 2310 - DNA, 361 bp, Homo sapiens
gctggatgactggggggagacatgcaaaggctgtgcagaaaagtctgactacatccggaagataaatgaactgatgcctaaatatgcccccaaggcagccagtgcacggaccgatttgtagtctgctcaatctctgttgcacctgagggggaaaaaacagttcaactgcttactcccaaaacagcctttttggaaattattttttaagtgggctcctgacaatactgtatcagatgtgaagcctggagctttcctgatgatgctggccctacagtacccccatgaggggattcccttccttctgttgctggtgtactctaggacttcaaagtgtgtctgggatttttttattaaagaaaaa

SEQ ID NO: 2311 - DNA, 452 bp, Homo sapiens
  misc_feature (15)..(15): n equals a,t,g, or c
  misc_feature (139)..(139): n equals a,t,g, or c
  misc_feature (237)..(237): n equals a,t,g, or c
  misc_feature (285)..(285): n equals a,t,g, or c
  misc_feature (328)..(328): n equals a,t,g, or c
  misc_feature (332)..(332): n equals a,t,g, or c
  misc_feature (364)..(364): n equals a,t,g, or c
  misc_feature (373)..(373): n equals a,t,g, or c
  misc_feature (383)..(383): n equals a,t,g, or c
  misc_feature (398)..(398): n equals a,t,g, or c
  misc_feature (400)..(400): n equals a,t,g, or c
  misc_feature (403)..(403): n equals a,t,g, or c
  misc_feature (412)..(413): n equals a,t,g, or c
  misc_feature (416)..(416): n equals a,t,g, or c
  misc_feature (418)..(418): n equals a,t,g, or c
  misc_feature (427)..(427): n equals a,t,g, or c
  misc_feature (430)..(431): n equals a,t,g, or c
  misc_feature (439)..(439): n equals a,t,g, or c
gaattcggcagaggnatcaacttggaaacacccagtatggtggctggaatggaatttataaaggtgggaagggcatgggaggatgggaaggtgggatccgcgtgcccgggaatcttccgctggcccggggtgctcccgnccggccgagtgattggcgagcccacggagtctgatggacgtgttccccaccgtggtccggctggcgggcggcgaggttgccccaggacagagtgattnacggccaagaccttcttgcccttgctccttgggacaacccaacatttnagaccaggatttcctgatgcattatttttgagagtttttttgnaggnacccagtgggaattaaaggggcaaagggacantttgggaangcccattttnggaggcttttttttncncancaaaggggnnccntntcttttttnggnnaaaatttnccccttttttggg

SEQ ID NO: 2312 - DNA, 435 bp, Homo sapiens
  misc_feature (11)..(11): n equals a,t,g, or c
  misc_feature (15)..(16): n equals a,t,g, or c
  misc_feature (43)..(43): n equals a,t,g, or c
  misc_feature (78)..(78): n equals a,t,g, or c
  misc_feature (173)..(173): n equals a,t,g, or c
  misc_feature (256)..(256): n equals a,t,g, or c
  misc_feature (274)..(274): n equals a,t,g, or c
  misc_feature (345)..(345): n equals a,t,g, or c
  misc_feature (357)..(357): n equals a,t,g, or c
  misc_feature (359)..(359): n equals a,t,g, or c
  misc_feature (361)..(361): n equals a,t,g, or c
  misc_feature (369)..(369): n equals a,t,g, or c
  misc_feature (372)..(372): n equals a,t,g, or c
  misc_feature (381)..(381): n equals a,t,g, or c
  misc_feature (384)..(384): n equals a,t,g, or c
  misc_feature (392)..(392): n equals a,t,g, or c
  misc_feature (397)..(397): n equals a,t,g, or c
  misc_feature (409)..(409): n equals a,t,g, or c
  misc_feature (411)..(411): n equals a,t,g, or c
  misc_feature (413)..(413): n equals a,t,g, or c
  misc_feature (420)..(420): n equals a,t,g, or c
ctggcgtccancgtnnatagctcaacaggctgcggcggctgtncaccacacctgccagcacaaactcaaagccggtangtgccgaaagcgtgctctgctcacgggcgaacagttccagccaacgggaaaccagtattgcccttaccgaacaataccaggccgatgcgtttttntgcgcggaagacggactgatgcagcccctgaatcaggctttcggtcgggccggtgcgcatactgccaccaggctgatgccgtncatcggacttgccaggtnaaattcggaccggctggcctttaagtttgctgccagaagcggtggcaatgcagcgggttaagggttgacgnctgcaacgaccntngncaacaggncanccttgaagnagngcatttgncagtnattccgtttgtngngnttttagngatttgggcatttta

SEQ ID NO: 2313 - DNA, 442 bp, Homo sapiens
  misc_feature (45)..(45): n equals a,t,g, or c
  misc_feature (87)..(87): n equals a,t,g, or c
  misc_feature (168)..(168): n equals a,t,g, or c
  misc_feature (172)..(172): n equals a,t,g, or c
  misc_feature (189)..(189): n equals a,t,g, or c
  misc_feature (213)..(213): n equals a,t,g, or c
  misc_feature (250)..(250): n equals a,t,g, or c
  misc_feature (264)..(264): n equals a,t,g, or c
  misc_feature (266)..(266): n equals a,t,g, or c
  misc_feature (296)..(296): n equals a,t,g, or c
  misc_feature (299)..(299): n equals a,t,g, or c
  misc_feature (315)..(315): n equals a,t,g, or c
  misc_feature (349)..(349): n equals a,t,g, or c
  misc_feature (386)..(386): n equals a,t,g, or c
  misc_feature (391)..(391): n equals a,t,g, or c
  misc_feature (405)..(405): n equals a,t,g, or c
  misc_feature (411)..(411): n equals a,t,g, or c
ggtccttctactctcaaaagcatgccaatttgggtgataaattanttgattgacttatgtcagacccaaaggacttatctcaatggnggaatccaggtcctgtgatgggcacttgggcaactttttgggggcaaggagtcctgatgagacaattttctgcaatgacancccncttcatctgcttcacangtggagtccggacatcataccagncctcgtctcctgccgcttcaccaaggagaccacccanaagaatttcaacantntctatggcaccaaaggtaactacacctccnggntctgggagtactcctncagcattcagaactctgacaatgacctgcccgtnttccaaggcatctcctccttctccctgaaaggctatncctancttatgcggagccnaagccncaaggcccagccccagacttggaaatctggc

SEQ ID NO: 2314 - DNA, 254 bp, Homo sapiens
  misc_feature (10)..(10): n equals a,t,g, or c
  misc_feature (12)..(12): n equals a,t,g, or c
  misc_feature (14)..(14): n equals a,t,g, or c
  misc_feature (36)..(36): n equals a,t,g, or c
  misc_feature (45)..(45): n equals a,t,g, or c
  misc_feature (193)..(193): n equals a,t,g, or c
  misc_feature (248)..(248): n equals a,t,g, or c
  misc_feature (250)..(251): n equals a,t,g, or c
  misc_feature (253)..(253): n equals a,t,g, or c
ttggcttttncncncatcaagctcggccgctactcnggcctgttncacggtgtggcctacggagccacgcgctacaattacctaaaacctcgggcagaagaggagaggaggatagcagcagaagagaagaagaagcaggatgaactgaaacggattgccagagaattggcagaagatgacagcatattaaagngagtgaccctgcgacccactccttggaccagcagcggatgaataaagcttcctgngnngng

SEQ ID NO: 2315 - DNA, 443 bp, Homo sapiens
  misc_feature (198)..(199): n equals a,t,g, or c
  misc_feature (252)..(252): n equals a,t,g, or c
  misc_feature (260)..(261): n equals a,t,g, or c
  misc_feature (335)..(335): n equals a,t,g, or c
  misc_feature (342)..(342): n equals a,t,g, or c
  misc_feature (363)..(363): n equals a,t,g, or c
  misc_feature (401)..(401): n equals a,t,g, or c
  misc_feature (411)..(411): n equals a,t,g, or c
  misc_feature (416)..(416): n equals a,t,g, or c
gccccagaaaattaaaacaaaccctgagaaccaaaatgaacgaaaatctgttcgcttcattcattgcccccacaatcctaggcctacccgccgcagtactgatcattctatttccccctctattgatccccacctccaaatatctcatcaacaaccgactaatcaccacccaacaatgactaatcaaactaacctcannacaaatgataaccatacacaacactaaaggacgaacctgatctcttatgctantatccttnntcatttttattgccacaactaacctcctcggactcctgcctcactcatttacaccaaccacccaactatctatnaacctanccatgggcatccccttatgancgggcgcaatgattataggctttcgctctaaaattaangatgccctcncccanttcttaccacaaggcacacctacaccc

SEQ ID NO: 2316 - DNA, 716 bp, Homo sapiens
  misc_feature (1)..(1): n equals a,t,g, or c
  misc_feature (16)..(16): n equals a,t,g, or c
  misc_feature (81)..(81): n equals a,t,g, or c
  misc_feature (84)..(84): n equals a,t,g, or c
  misc_feature (219)..(219): n equals a,t,g, or c
  misc_feature (225)..(225): n equals a,t,g, or c
  misc_feature (252)..(252): n equals a,t,g, or c
  misc_feature (440)..(440): n equals a,t,g, or c
  misc_feature (534)..(534): n equals a,t,g, or c
  misc_feature (562)..(562): n equals a,t,g, or c
  misc_feature (573)..(573): n equals a,t,g, or c
  misc_feature (688)..(689): n equals a,t,g, or c
  misc_feature (715)..(715): n equals a,t,g, or c
naaataaaaaattatnacaaaccctgagaaccaaaatgaacgaaaatctgttcgcttcattcattggccccacaatcctanggntacccgccgcagtactgatcattctatttccccctctattgatccccacctccaaatatctcatcaacaaccgactaatcaccacccaacaatgactaatcaaactaacctcaaaacaaatgataaccatacacnacactnaaggacgaacctgatctcttatactantatccttaatcatttttattgccacaactaacctcctcggactcctgcctcactcatttacaccaaccacccaactatctataaacctagccatggccatccccttatgagcgggcgcagtgattataggctttcgctctaagattaaaaatgccctagcccacttcttaccacaaggcacacctacnccccttatccccatactagttattatcgaaaccatcagcctactcattcaaccaatagccctggccgtacgcctaaccgcttacattactgcangccacctactcatgcaccttattggaancgccaccctancaatatcaaccattaaccttccctctacacttatcatcttcacaattctaattctactgactatcctagaaatcgctgtcgccttaatccaaagcctacgttttccacacttctnnttaagcctcttacctgcacaacaacnc

SEQ ID NO: 2317 - DNA, 421 bp, Homo sapiens
  misc_feature (384)..(384): n equals a,t,g, or c
  misc_feature (399)..(399): n equals a,t,g, or c
  misc_feature (402)..(402): n equals a,t,g, or c
  misc_feature (404)..(404): n equals a,t,g, or c
  misc_feature (411)..(411): n equals a,t,g, or c
gattggtgttacagcagtggcatttaataaggaacttgatcctatacagaaactctttgtggacaagattagagaatacaaatctaagcgacagacatctggaggacctgttgatgctagttcagagtatcagcaagagctggagagggagctttttaagctcaagcaaatgtttggtaatgcagacatgaatacatttcccaccttcaaatttgaagatcccaaatttgaagtcatcgaaaaaccccaggcctgaagaaataaagtaaaattaatctggtaatttgtcacggattagttgtacaactagttagaagtttcagaataaacatgcatttcataactgtcaaatgttcttttaattctgagtccaaataaattatntggtgatgttgaaanacncnttaagcnctaaaatggg

SEQ ID NO: 2318 - DNA, 502 bp, Homo sapiens
  misc_feature (41)..(41): n equals a,t,g, or c
  misc_feature (147)..(147): n equals a,t,g, or c
  misc_feature (165)..(165): n equals a,t,g, or c
  misc_feature (173)..(173): n equals a,t,g, or c
  misc_feature (186)..(186): n equals a,t,g, or c
  misc_feature (213)..(213): n equals a,t,g, or c
  misc_feature (253)..(253): n equals a,t,g, or c
  misc_feature (260)..(260): n equals a,t,g, or c
  misc_feature (270)..(270): n equals a,t,g, or c
  misc_feature (274)..(274): n equals a,t,g, or c
  misc_feature (293)..(293): n equals a,t,g, or c
  misc_feature (316)..(316): n equals a,t,g, or c
  misc_feature (324)..(324): n equals a,t,g, or c
  misc_feature (346)..(346): n equals a,t,g, or c
  misc_feature (423)..(423): n equals a,t,g, or c
  misc_feature (436)..(436): n equals a,t,g, or c
  misc_feature (462)..(462): n equals a,t,g, or c
  misc_feature (468)..(468): n equals a,t,g, or c
  misc_feature (488)..(488): n equals a,t,g, or c
gcaacactaaaggacgaacctgatctcttatactagtatcnttaatcatttttattgccacaactaacctcctcggactcctgcctcactcatttacaccaaccacccaactatctataatcctagccatggccatccccttatgancgggcgcagtgattatangctttcgntctaagattaaanatgccctagcccacttcttatcaaaangcacacctacaccccttatccccatactagttattatggnaaacatnatcctactcnttcnaccaatagccctgggcgtnagcctaatcgcttacattactgnagggcacntactcatgcacctcattggaancgtcccctacaatatcaatcattaaacttccctctacacttatctcttcacattctattctaacttaatatcctaanaaattccttttcnctttattccaagcccaactttttccnactttnttcttaaaccccttactttncgaaaaaccttttt

SEQ ID NO: 2319 - DNA, 283 bp, Homo sapiens
  misc_feature (229)..(229): n equals a,t,g, or c
gcgggaagccttccagagtgtggtgctgccggcctttgagaagagctgccaggccatgttccagcaaatcaatgatagcttccggctggggacacaggaatacttgcagcagctagaaagccacatgaagagccggaaggcacgggaacaggaggccagggagcctgtgctagcccagcaagcccatatcctgcagctgctgcagcagggccacctcaatcaggccttncagcaggcgctgacagctgctgacctgaacctggtgcttgtatgtgtgtgaaat

SEQ ID NO: 2320 - DNA, 514 bp, Homo sapiens
  misc_feature (241)..(241): n equals a,t,g, or c
  misc_feature (271)..(271): n equals a,t,g, or c
  misc_feature (274)..(275): n equals a,t,g, or c
  misc_feature (364)..(364): n equals a,t,g, or c
  misc_feature (367)..(367): n equals a,t,g, or c
  misc_feature (374)..(374): n equals a,t,g, or c
  misc_feature (468)..(468): n equals a,t,g, or c
  misc_feature (474)..(474): n equals a,t,g, or c
  misc_feature (477)..(477): n equals a,t,g, or c
  misc_feature (484)..(484): n equals a,t,g, or c
  misc_feature (512)..(512): n equals a,t,g, or c
gcagcattcgggccgagatgtctcgctccgtggcctgagctgttctcgcgctactctctctttctggcctggaggctatccagcgtactccaaagattcaggtttactcacgtcatccagcagagaatggaaagtcaaatttcctgaattgctatgtgtctgggtttcatccatccgacattgaagttgacttactgaagaatggagagagaattgaaaaaagtggagcattcagacttgnctttcagcaaggactggtctttctatctcntgnnctacactgaattcacccccactgaaaaaagaatgaagtattgcctggccgtgtgaaccatggtgactttttcacaagccaaagatagtnaantgggaancaagacatgttaagcagcatcatggaaggtttgaagaatccccatttgggaattggatgaattcccaaattcttgcttgcttggctttttaaanaatggnaancctattncactttaacacttttattgcccaaaaantg

SEQ ID NO: 2321 - DNA, 471 bp, Homo sapiens
  misc_feature (3)..(3): n equals a,t,g, or c
  misc_feature (24)..(24): n equals a,t,g, or c
  misc_feature (149)..(149): n equals a,t,g, or c
  misc_feature (161)..(161): n equals a,t,g, or c
  misc_feature (172)..(172): n equals a,t,g, or c
  misc_feature (332)..(332): n equals a,t,g, or c
  misc_feature (434)..(434): n equals a,t,g, or c
  misc_feature (439)..(439): n equals a,t,g, or c
ccntcactaagggacaaagctggngctccaccgcggtggcggccgctctagaactagtggatcccccgggctgcaggaattcggcacgagcgaagcgggggctgccccagtcactgcaggacgccgaccgcctgcgccgctccccactnctgcggggccgnccccgccaggnccacctgcctctgctgccgccctccaactcctactgggccggccacacccccgagcagcactagtcctgcctggtggccctgggagccaggatgggaccaaagtcaaggcctggggcatggctgagtaccccagacgtctggtccagggcagacacattnctctcagaagcccgtgtctcagtgcaggtggagccgtggggacagcgtgaaggtgtctccagccaggccccaggcactggaggccctgggtcttcccccagncacanccagtaggtgtggaggataaaggcttctgtgg

SEQ ID NO: 2322 - DNA, 387 bp, Homo sapiens
  misc_feature (4)..(4): n equals a,t,g, or c
ggtntgcatgtcatacgcgttccacacgccagacaagctcagcttcatcctggacctcatgaacggtggggacctgcactaccacctctcccagcacggggtcttctcagaggctgacatgcgcttctatgcggccgagatcatcctgggcctggagcacatgcacaaccgcttcgtggtctaccgggacctgaagccagccaacatccttctggacgagcatggccacgtgcggatctcggacctgggcctggcctgtgacttctcaagaagaagccccatgccagcgtgggcacccacgggtacatggctccggaggtcctgcagaagggcgtggcctacgacagcagtgccgactggttctctctggggtgcatgctcttcaag

SEQ ID NO: 2323 - DNA, 119 bp, Homo sapiens
  misc_feature (1)..(2): n equals a,t,g, or c
  misc_feature (30)..(30): n equals a,t,g, or c
  misc_feature (75)..(75): n equals a,t,g, or c
  misc_feature (79)..(79): n equals a,t,g, or c
  misc_feature (108)..(109): n equals a,t,g, or c
nnccctacgcccgttactttcggtttcttnccttccttttttgccacgttcgccggttttccccgtcaagctttnaatngggggctccctttagggttcccaattaanngctttacggg

SEQ ID NO: 2324 - DNA, 739 bp, Homo sapiens
  misc_feature (1)..(1): n equals a,t,g, or c
  misc_feature (69)..(69): n equals a,t,g, or c
  misc_feature (97)..(97): n equals a,t,g, or c
  misc_feature (666)..(666): n equals a,t,g, or c
  misc_feature (672)..(672): n equals a,t,g, or c
  misc_feature (677)..(677): n equals a,t,g, or c
  misc_feature (712)..(712): n equals a,t,g, or c
  misc_feature (732)..(732): n equals a,t,g, or c
nctactatcgggaaagctggtacgcctgcaggtaccggtccggaattcccgggggtggttacgcgcagngtgaccgctacacttgccagcgccctancgcccgctcctttcgctttcttcccttcctttctcgccacgttcgccggctttccccgtcaagctctaaatcgggggctccctttagggttccgatttagtgctttacggcacctcgaccccaaaaaacttgattagggtgatggttcacgtagtgggccatcgccctgatagacggtttttcgccctttgacgttggagtccacgttcttaatagtggactcttgttccaaactggaacaacactcaaccctatctcggtctattcttttgatttataagggattttgccgatttcggcctattggttaaaaaatgagctgatttaacaaaaatttaacgcgaattttaacaaaatattaacgcttacaatttaggtggcacttttcggggaaatgtgcgcggaacccctatttgtttatttttctaaatacattcaaatatgtatccgctcatgagacaataaccctgataaatgcttcaataatattgaaaaaggaagagtatgagtattcaacatttccgtgtcgcccttattccctttttttgcggcaattttgccttccctgntttttngcttnaccccagaaaacgctggtggaaaaggttaaaaagnattgccttgaaatatccaantttgggt

SEQ ID NO: 2325 - DNA, 153 bp, Homo sapiens
  misc_feature (130)..(130): n equals a,t,g, or c
  misc_feature (138)..(138): n equals a,t,g, or c
  misc_feature (143)..(143): n equals a,t,g, or c
  misc_feature (148)..(149): n equals a,t,g, or c
tctagatcgcgagcggccgctctagaggatccaagcttacgtacgcgtgcatgcgacgtcatagctcttctatagtgtcacctaaattcaattcactggccgtcgttttacaacgtcgtgactgggaaancccaaaanccgcncaacnngatg

SEQ ID NO: 2326 - DNA, 291 bp, Homo sapiens
  misc_feature (28)..(28): n equals a,t,g, or c
  misc_feature (190)..(190): n equals a,t,g, or c
  misc_feature (203)..(203): n equals a,t,g, or c
  misc_feature (243)..(243): n equals a,t,g, or c
  misc_feature (252)..(252): n equals a,t,g, or c
  misc_feature (274)..(275): n equals a,t,g, or c
ttactagttctagatcgcgagcggccgntctagaggatccaagcttacgtacgcgtgcatgcgacgtcatagctcttctatagtgtcacctaaattcaattcactggccgtcgttttacaacgtcgtgactgggaaaaccctggcgttacccaacttaatcgccttgcagcacatccccctttcgccagntggcgtaatagcnaagaggcccgcaccgatcgccttcccaacagttgcgcagnctgaatggngaatgggacgcgccctgtagcnngcgcattaaacgccgg

SEQ ID NO: 2327 - DNA, 363 bp, Homo sapiens
  misc_feature (1)..(1): n equals a,t,g, or c
  misc_feature (3)..(3): n equals a,t,g, or c
  misc_feature (10)..(10): n equals a,t,g, or c
  misc_feature (13)..(13): n equals a,t,g, or c
  misc_feature (24)..(24): n equals a,t,g, or c
  misc_feature (284)..(284): n equals a,t,g, or c
  misc_feature (298)..(298): n equals a,t,g, or c
  misc_feature (336)..(336): n equals a,t,g, or c
  misc_feature (341)..(341): n equals a,t,g, or c
  misc_feature (352)..(352): n equals a,t,g, or c
ntnctaaatnttnttgggaataancgactcactatagggaaagctggtacgcctgcaggtaccggtccggaattcccgggtcgacccacgcgtccgcccacgcgtccgggggttgagggacaaagtagtgaagaactgtaagatattcaatatagtgtattgatgaattagaattgtatggaaagataaaccgcagaaggtgagagtcctgtataagtaaatccttacacatataactttgctcccaagtaacatggaacacgaggaattctgtgtgaatcagngaggaccatatctnataaggctaaatactcttactaaccgatagcgcatagnaccgngagggaaaggngaaaagaaccc

SEQ ID NO: 2328 - DNA, 459 bp, Homo sapiens
  misc_feature (1)..(1): n equals a,t,g, or c
  misc_feature (18)..(18): n equals a,t,g, or c
  misc_feature (31)..(31): n equals a,t,g, or c
  misc_feature (41)..(41): n equals a,t,g, or c
  misc_feature (79)..(79): n equals a,t,g, or c
  misc_feature (145)..(145): n equals a,t,g, or c
  misc_feature (279)..(279): n equals a,t,g, or c
  misc_feature (286)..(286): n equals a,t,g, or c
  misc_feature (297)..(297): n equals a,t,g, or c
  misc_feature (300)..(300): n equals a,t,g, or c
  misc_feature (307)..(307): n equals a,t,g, or c
  misc_feature (375)..(375): n equals a,t,g, or c
  misc_feature (392)..(392): n equals a,t,g, or c
  misc_feature (439)..(439): n equals a,t,g, or c
  misc_feature (443)..(443): n equals a,t,g, or c
  misc_feature (458)..(458): n equals a,t,g, or c
naactcctttggaaaacncgctactatatgnaaagctggtncgcctgcaggtaccggtccggaattcccgggtcgattnacgcgtttttagatcgcgagcggccgctctagaggatccaagcttacgtacgcgtgcatgcgacgncatagctcttctatagtgtcacctaaattcaattcactggccgtcgttttacaacgtcgtgactgggaaaaccctggcgttacccaacttaatcgccttgcagcacatccccctttcgccagctggcgtaatancgaaaangcccggaaccnatngcccttncccaacaggttgcgcagccttgaatggcgaatgggacgcgccctgtaagcggcgcattaagcgcggcnggtgtggtggttacgcncagcgtgaccgctacacttgccagcgccctagcgcccgctcctttcnattncttcccttccttttnt

SEQ ID NO: 2329 - DNA, 566 bp, Homo sapiens
  misc_feature (13)..(13): n equals a,t,g, or c
  misc_feature (19)..(19): n equals a,t,g, or c
  misc_feature (421)..(421): n equals a,t,g, or c
  misc_feature (483)..(483): n equals a,t,g, or c
  misc_feature (540)..(540): n equals a,t,g, or c
  misc_feature (543)..(543): n equals a,t,g, or c
  misc_feature (560)..(560): n equals a,t,g, or c
  misc_feature (564)..(564): n equals a,t,g, or c
gagatctctctgnaaaacncgactcactatttgggaaagctggcacgcctgcaggtaccggtccggaattcccgggtcgacccacgctttcgcgccattcaaaggccatttctgttactatcgtttggaatacagtgtggccaaagccaaggcaactggtcactgtgactggaaattgtagccctggctgattgtggtatgagactgctaatatgaattctaaaatctcactttaatgcagcaaagcctatttcttgaagtggttggggagaaagtacagcacatgaaaatgatagagaattcacatttcagtgtatgtaaataaagacttactggagtgcagccacacttaaaaaaaaaaaaaaagggcggccgctctagaggatccaagcttacgtacgcgtgcatgccgacgtcatanctcttctatagtgtcacctaaattcaattcactgggccgtcgtttacacgtcgtgactgggnaaaaccctgcggtaccccaacttaatccgccttgcagaacatccccctttcgcaagntgngaataccaaaaggcccnaccnat

SEQ ID NO: 2330 - DNA, 253 bp, Homo sapiens
  misc_feature (1)..(1): n equals a,t,g, or c
  misc_feature (7)..(7): n equals a,t,g, or c
  misc_feature (16)..(16): n equals a,t,g, or c
  misc_feature (222)..(222): n equals a,t,g, or c
  misc_feature (232)..(233): n equals a,t,g, or c
  misc_feature (246)..(247): n equals a,t,g, or c
ntctggnacgacccantatagggaaagctggtacgcctgcaggtaccggtccggaattcccgggtcgacccacgcgtccgggctgtggtcccagtgctgaattctgccaagcagtgacttgattcatgaacactcactggatgctgactctgtttctcttctgagtgctggggtagaggagaggagaggtggagcacagatcttgcttttatgagcttatgntctaggaagnncaaacaagtattnnttcagg

SEQ ID NO: 2331 - DNA, 195 bp, Homo sapiens
  misc_feature (23)..(23): n equals a,t,g, or c
  misc_feature (26)..(26): n equals a,t,g, or c
  misc_feature (74)..(74): n equals a,t,g, or c
  misc_feature (126)..(126): n equals a,t,g, or c
  misc_feature (146)..(146): n equals a,t,g, or c
  misc_feature (184)..(184): n equals a,t,g, or c
  misc_feature (190)..(190): n equals a,t,g, or c
  misc_feature (194)..(194): n equals a,t,g, or c
gctagttctagatcgcgggcggncgntctagaggatccaagcttacgtacgcgtgcatgcagacgtcatagctnttctatagtgtcacctaaattcaattcactggccgtcgttttacaacgttgngactgggaaaaccctggcgntacccaacttaaacgacttgcagtacattccctctttngccagntggng

SEQ ID NO: 2332 - DNA, 455 bp, Homo sapiens
  misc_feature (8)..(8): n equals a,t,g, or c
  misc_feature (86)..(86): n equals a,t,g, or c
  misc_feature (93)..(93): n equals a,t,g, or c
  misc_feature (95)..(96): n equals a,t,g, or c
  misc_feature (99)..(99): n equals a,t,g, or c
  misc_feature (126)..(126): n equals a,t,g, or c
  misc_feature (148)..(148): n equals a,t,g, or c
  misc_feature (180)..(180): n equals a,t,g, or c
  misc_feature (225)..(225): n equals a,t,g, or c
  misc_feature (375)..(375): n equals a,t,g, or c
  misc_feature (387)..(387): n equals a,t,g, or c
  misc_feature (425)..(425): n equals a,t,g, or c
  misc_feature (438)..(438): n equals a,t,g, or c
  misc_feature (454)..(454): n equals a,t,g, or c
ggccttanggctaccacccctgcaggtaccggtccggaattcccgggtcgacccacgcgtccgtttcttactccttatgtttgaanagaaacntnnggngtgagatatacaaatatatttaattgngtcatattaaacttctgatttnacaaaaaaaaaaaaaaagggcggccgctctanaggatccaagcttacgtacgcgtgcatgcgacgtcatagctcttntatagtgtcacctaaattcaattcactggccgtcgttttacaacgtcgtgactgggaaaaccctggcgttacccaacttaatcgccttgcagcacatacccctttcgccagctggcgtaatagcgaagaggcccgcaccgatcgcccttnccaacagttgcncagcctgaatggcgaatgggacgcgccctgtagcggcncattaagcgcggngggtgtggtggttacnc

SEQ ID NO: 2333 - DNA, 211 bp, Homo sapiens
  misc_feature (2)..(2): n equals a,t,g, or c
  misc_feature (7)..(7): n equals a,t,g, or c
  misc_feature (23)..(23): n equals a,t,g, or c
  misc_feature (28)..(28): n equals a,t,g, or c
  misc_feature (37)..(37): n equals a,t,g, or c
  misc_feature (144)..(144): n equals a,t,g, or c
  misc_feature (160)..(160): n equals a,t,g, or c
  misc_feature (197)..(197): n equals a,t,g, or c
  misc_feature (208)..(208): n equals a,t,g, or c
  misc_feature (211)..(211): n equals a,t,g, or c
cngaaanccctttggaaaccccnttggnacgaccgantatagggaaagctggtacgcctgcaggtaccggtccggaattcccgggtcgacccacgcgtccgcggacgcgtgggcggacgcgtgggcggacgcgtgggtcaaagntggatacaagaagctntttgtactggatgatcgtgaggctcataatgaggtanaaccactttgnatn

SEQ ID NO: 2334 - DNA, 231 bp, Homo sapiens
  misc_feature (50)..(50): n equals a,t,g, or c
  misc_feature (52)..(53): n equals a,t,g, or c
  misc_feature (192)..(192): n equals a,t,g, or c
  misc_feature (214)..(214): n equals a,t,g, or c
  misc_feature (223)..(224): n equals a,t,g, or c
  misc_feature (229)..(229): n equals a,t,g, or c
gcggacgcgtgggctattttctaaataaacctttgtaatctaaaaaatanannggagggcggccgctctagaggatccaagcttacgtacgcgtgcatgcgacgtcatagctcttctatagtgtcacctaaattcaattcactggccgtcgttttacaacgtcgtgactgggaaaaccctggcgttacccancttaatcgccttgcagcacatncccctttcnntcagntg

SEQ ID NO: 2335 - DNA, 148 bp, Homo sapiens
  misc_feature (3)..(3): n equals a,t,g, or c
  misc_feature (6)..(7): n equals a,t,g, or c
  misc_feature (89)..(89): n equals a,t,g, or c
  misc_feature (92)..(92): n equals a,t,g, or c
  misc_feature (110)..(110): n equals a,t,g, or c
  misc_feature (112)..(112): n equals a,t,g, or c
  misc_feature (136)..(136): n equals a,t,g, or c
ctnganntcctctggaaaacccctcactataggttaagctggtacgcctgcaggtaccggtccggaattcccgggtcgacccacgcgtncgnaagctgacacagaccttnantacgtattctgacaaccaagaggnggagattatgaa

SEQ ID NO: 2336 - DNA, 142 bp, Homo sapiens
  misc_feature (3)..(4): n equals a,t,g, or c
  misc_feature (7)..(7): n equals a,t,g, or c
  misc_feature (10)..(10): n equals a,t,g, or c
  misc_feature (14)..(14): n equals a,t,g, or c
  misc_feature (102)..(102): n equals a,t,g, or c
  misc_feature (112)..(112): n equals a,t,g, or c
  misc_feature (118)..(118): n equals a,t,g, or c
  misc_feature (127)..(127): n equals a,t,g, or c
  misc_feature (129)..(129): n equals a,t,g, or c
atnntgnaanaccnctcactataggtaaagctggtacgcctgcaggtaccggtccggaattcccgggtcgacccacgcgtccggggagagttcacattattncttttccatnggaagnggtgctggngnattcaaatcgttc

SEQ ID NO: 2337 - DNA, 155 bp, Homo sapiens
  misc_feature (13)..(13): n equals a,t,g, or c
  misc_feature (17)..(17): n equals a,t,g, or c
  misc_feature (50)..(50): n equals a,t,g, or c
  misc_feature (128)..(128): n equals a,t,g, or c
  misc_feature (136)..(136): n equals a,t,g, or c
  misc_feature (144)..(144): n equals a,t,g, or c
  misc_feature (151)..(151): n equals a,t,g, or c
  misc_feature (153)..(153): n equals a,t,g, or c
cttctctggatangccngtagaactcctctggaaaccctcactatagggnaagctggtacgcctgcaggtaccggtccggaattcccgggtcgacccacgcgtccgcccacgcgtccgcccacgcgtncgaaaaanaaaggaanaaaaaananaa

SEQ ID NO: 2338 - DNA, 130 bp, Homo sapiens
  misc_feature (2)..(2): n equals a,t,g, or c
  misc_feature (6)..(6): n equals a,t,g, or c
  misc_feature (9)..(9): n equals a,t,g, or c
  misc_feature (21)..(22): n equals a,t,g, or c
  misc_feature (114)..(114): n equals a,t,g, or c
  misc_feature (119)..(119): n equals a,t,g, or c
  misc_feature (122)..(122): n equals a,t,g, or c
  misc_feature (124)..(124): n equals a,t,g, or c
  misc_feature (129)..(129): n equals a,t,g, or c
cnctcnccngcctcgtatccnnctcactatagggaaagctggtacgcctgcaggtaccggtccggaattcccgggtcgacccacgcgtccgcggacgcgtgggtcgacccgganatctnggngnggttnt

SEQ ID NO: 2339 - DNA, 191 bp, Homo sapiens
  misc_feature (69)..(69): n equals a,t,g, or c
  misc_feature (74)..(74): n equals a,t,g, or c
  misc_feature (76)..(76): n equals a,t,g, or c
  misc_feature (78)..(79): n equals a,t,g, or c
  misc_feature (124)..(124): n equals a,t,g, or c
  misc_feature (133)..(133): n equals a,t,g, or c
  misc_feature (156)..(156): n equals a,t,g, or c
  misc_feature (187)..(188): n equals a,t,g, or c
tactatagggaaagctggtacgcctgcaggtaccggtccggaattcccgggtcgacccacgcgtccggncaatntngnngcttcttgtggccaacttcagagcctgtcaccaggaaaggtaagnatgggaggnatgaagatccaacatatgaacanaatgtttatggtttataagagaactctcagnnccc

SEQ ID NO: 2340 - DNA, 216 bp, Homo sapiens
  misc_feature (9)..(9): n equals a,t,g, or c
  misc_feature (13)..(13): n equals a,t,g, or c
  misc_feature (93)..(93): n equals a,t,g, or c
  misc_feature (172)..(172): n equals a,t,g, or c
  misc_feature (197)..(197): n equals a,t,g, or c
  misc_feature (201)..(201): n equals a,t,g, or c
  misc_feature (206)..(206): n equals a,t,g, or c
  misc_feature (214)..(214): n equals a,t,g, or c
tccctatgnaacncctttgtaataccctcactatagggaaagctggtacgcctgcaggtaccggtccggaattcccgggtcgacccacgcgtncgcagaaagggagaccatttcatctcttcagggaacaatccctgggaatgtacttattcattatggcataaaagcagtngtataaatacattcccagggattgntccnagaangggagacnat

SEQ ID NO: 2341 - DNA, 309 bp, Homo sapiens
  misc_feature (6)..(6): n equals a,t,g, or c
  misc_feature (20)..(20): n equals a,t,g, or c
  misc_feature (118)..(118): n equals a,t,g, or c
  misc_feature (128)..(128): n equals a,t,g, or c
  misc_feature (171)..(171): n equals a,t,g, or c
  misc_feature (220)..(220): n equals a,t,g, or c
  misc_feature (222)..(222): n equals a,t,g, or c
  misc_feature (266)..(266): n equals a,t,g, or c
  misc_feature (278)..(278): n equals a,t,g, or c
  misc_feature (305)..(305): n equals a,t,g, or c
tccctngtaaactcctttgnaatacccctcactatagggaaagctggtacgcctgcaggtaccggtccggaattcccgggtcgacccacgcgtccgggcatttctgaagtgcactttnttgaaacatnattttgctaactctcagcagtgtctaattaaactgagcaatanttttgtgaattttaattaatctcagcaaaaccatgatgggagagagtcntntgatggaaatgtagtccctggattatgtgtaacctttttattgntcttagatgcanaggatagaaaagcattttttggtgcantggt

SEQ ID NO: 2342 - DNA, 158 bp, Homo sapiens
  misc_feature (113)..(113): n equals a,t,g, or c
  misc_feature (141)..(141): n equals a,t,g, or c
  misc_feature (145)..(146): n equals a,t,g, or c
  misc_feature (149)..(149): n equals a,t,g, or c
ggactagttctagatcgcgagcggccgctctagaagatccaagcttacgtacgcgtgcatgcgacgtcatagctcttctatattgtcacctaaattcaattcactggccgtcnttttacaacgtcgtgactgggaaaaccnaacnncangcccttcat

SEQ ID NO: 2343 - DNA, 219 bp, Homo sapiens
  misc_feature (1)..(1): n equals a,t,g, or c
  misc_feature (11)..(11): n equals a,t,g, or c
  misc_feature (16)..(16): n equals a,t,g, or c
  misc_feature (50)..(50): n equals a,t,g, or c
  misc_feature (53)..(53): n equals a,t,g, or c
nccaattctantacgntcctcataggttaaagctggtacgcctgcaggtnccngtccggaattcccgggtcgacccacgcgtccgactagttctagatcgcgagcggccgctctagaggatccaagcttacgtacgcgtgcatgcgacgtcatagctcttctatagtgtcacctaaattcaattcactggccgtcgttttacaacgtcgtgactgggaa

SEQ ID NO: 2344 - DNA, 160 bp, Homo sapiens
  misc_feature (84)..(84): n equals a,t,g, or c
  misc_feature (156)..(156): n equals a,t,g, or c
  misc_feature (158)..(160): n equals a,t,g, or c
gcccacgcgtccggactagttctagatcgcgagcggccgctctagaggatccaagcttacgtacgcgtgcatgcgacgtcatanctcttctatagtgtcacctaaattcaattcactggccgtcgttttacaacgtcgtgactgggaaaccaaaanannn

SEQ ID NO: 2345 - DNA, 154 bp, Homo sapiens
  misc_feature (145)..(145): n equals a,t,g, or c
  misc_feature (151)..(154): n equals a,t,g, or c
ggactagttctagatcgcgagcggccgctctagaggatccaagcttacgtacgcgtgcatgcgacgtcatagctcttctatagtgtcacctaaattcaattcactggccgtcgttttacaacgtcgtgactgggaaaacccaaanagaaannnn

SEQ ID NO: 2346 - DNA, 143 bp, Homo sapiens
  misc_feature (2)..(2): n equals a,t,g, or c
  misc_feature (11)..(11): n equals a,t,g, or c
  misc_feature (15)..(15): n equals a,t,g, or c
  misc_feature (23)..(23): n equals a,t,g, or c
  misc_feature (27)..(27): n equals a,t,g, or c
  misc_feature (29)..(29): n equals a,t,g, or c
  misc_feature (41)..(41): n equals a,t,g, or c
  misc_feature (46)..(46): n equals a,t,g, or c
  misc_feature (64)..(64): n equals a,t,g, or c
  misc_feature (75)..(75): n equals a,t,g, or c
  misc_feature (109)..(109): n equals a,t,g, or c
  misc_feature (112)..(112): n equals a,t,g, or c
gntagttctanatcncgagcggncgancnagaggatccaancttangtacgcgtgcatgcgacntcatagctctnctatcatgtcacctaaattcaattcactggccgncgntttacaacgtcgtgactgggaaaacgaatgt

SEQ ID NO: 2347 - DNA, 246 bp, Homo sapiens
  misc_feature (3)..(5): n equals a,t,g, or c
  misc_feature (8)..(8): n equals a,t,g, or c
  misc_feature (10)..(10): n equals a,t,g, or c
  misc_feature (241)..(245): n equals a,t,g, or c
ggnnnctnantacgctctctaaaatacgaggccctataaggaaagctggtacgcctgcaggtaccggtccggaattcccgggtcgacccacgcgtccggactagttctagatcgcgagcggccgctctagaggatccaagcttacgtacgcgtgcatgcgacgtcatagctcttctatagtgtcacctaaattcaattcactggccgtcgttttacaacgtcgtgactggaccccaaaaannnnna

SEQ ID NO: 2348 - DNA, 95 bp, Homo sapiens
  misc_feature (1)..(1): n equals a,t,g, or c
  misc_feature (10)..(12): n equals a,t,g, or c
  misc_feature (34)..(34): n equals a,t,g, or c
ntgattacgnnntctcaaatacgagtcactatanggaaagctggtacgcctgcaggtaccggtccggaattcccgggtcgacccacgcgtccgct

SEQ ID NO: 2349 - DNA, 110 bp, Homo sapiens
  misc_feature (35)..(35): n equals a,t,g, or c
  misc_feature (43)..(43): n equals a,t,g, or c
ggggggggggggtgggtaatgattacgccctctcnaatacgantcactatagggaaagctggtacgcctgcaggtaccggtccggaattcccgggtcgacccacgcgtcc

SEQ ID NO: 2350 - DNA, 151 bp, Homo sapiens
  misc_feature (1)..(1): n equals a,t,g, or c
  misc_feature (12)..(12): n equals a,t,g, or c
  misc_feature (27)..(27): n equals a,t,g, or c
  misc_feature (29)..(29): n equals a,t,g, or c
  misc_feature (38)..(38): n equals a,t,g, or c
  misc_feature (123)..(124): n equals a,t,g, or c
  misc_feature (127)..(127): n equals a,t,g, or c
  misc_feature (134)..(134): n equals a,t,g, or c
  misc_feature (150)..(150): n equals a,t,g, or c
ntgattacggcnctctcaaatacgacncnctatagggnaaagctggtacgcctgcaggtaccggtccggaattcccgggtcgacccacgcgtccggggttttagtcgtgattttttttttttnnccnggttgtngtcttttttaagcaana

SEQ ID NO: 2351 - DNA, 159 bp, Homo sapiens
  misc_feature (150)..(150): n equals a,t,g, or c
  misc_feature (156)..(159): n equals a,t,g, or c
gcggacgcgtgggactagttctagatcgcgagcggccgctctagaggatccaagcttacgtacgcgtgcatgcgacgtcatagctcttctatagtgtcacctaaattcaattcactggccgtcgttttacaacgtcgtgactgggacccnaaaaannnn

SEQ ID NO: 2352 - DNA, 138 bp, Homo sapiens
  misc_feature (21)..(21): n equals a,t,g, or c
  misc_feature (133)..(134): n equals a,t,g, or c
  misc_feature (136)..(138): n equals a,t,g, or c
gatcgcgagcggccgctctanaggatccaagcttacgtacgcgtgcatgcgacgtcatagctcttctatagtgtcacctaaattcaattcactggccgtcgttttacaacgtcgtgactgggaaacccaaaanntnnn

SEQ ID NO: 2353 - DNA, 175 bp, Homo sapiens
  misc_feature (31)..(31): n equals a,t,g, or c
  misc_feature (160)..(160): n equals a,t,g, or c
  misc_feature (165)..(165): n equals a,t,g, or c
  misc_feature (168)..(169): n equals a,t,g, or c
  misc_feature (174)..(174): n equals a,t,g, or c
gcagggtaggtacaaaaacctcccgtggtancaaaagggcggccgctctaaaagatccaagcttacgtacgcgtgcatgcggacgtcatagctcttctatagtgtcacctaaattcaattcactggccgtcgttttacaacgtcgtgactgggacccccnaaatnggnnggggnt

SEQ ID NO: 2354 - DNA, 584 bp, Homo sapiens
  misc_feature (61)..(61): n equals a,t,g, or c
  misc_feature (63)..(63): n equals a,t,g, or c
  misc_feature (548)..(548): n equals a,t,g, or c
  misc_feature (554)..(554): n equals a,t,g, or c
  misc_feature (572)..(572): n equals a,t,g, or c
  misc_feature (582)..(583): n equals a,t,g, or c
taagctggtacgcctgcaggtaccggtccggaattcccgggtcgacccacgcgtccgagtntnataaaaaaaaggttcagtattttctttttagtataacttacatcctttcaaataagtctttgccctcatgaagaatccctagaggaagataaggaaaataagtattttccagttttgcttgacagtttctaaacaaacaaaaataaactcaatgaaaggaaagatgtttctttttagctgagatgacagattgcttctctgtattaaatagtctagaagttaaggggatggtcacatttaccatgtattgtgttattagcagttaaattttatgaatatgtttgtaaaattgttgttttatatttcatgtcaaattgaaaagtttatttcttcactattgtacctgtggaaatacaagccattttacaggaaaaaatcttcaaaaactattaaatggatatcagcctgttaaaaaaaaaaaaaaagggcggccgctctagaggatccaagcttacgtacgcgtgcatgcgacgtcatagctcttntatagngtcacctaaattcaattnactggcccgnng

SEQ ID NO: 2355 - DNA, 438 bp, Homo sapiens
  misc_feature (3)..(3): n equals a,t,g, or c
  misc_feature (24)..(24): n equals a,t,g, or c
  misc_feature (27)..(27): n equals a,t,g, or c
  misc_feature (97)..(97): n equals a,t,g, or c
  misc_feature (155)..(155): n equals a,t,g, or c
  misc_feature (165)..(165): n equals a,t,g, or c
  misc_feature (231)..(231): n equals a,t,g, or c
  misc_feature (259)..(259): n equals a,t,g, or c
  misc_feature (261)..(261): n equals a,t,g, or c
  misc_feature (274)..(274): n equals a,t,g, or c
  misc_feature (327)..(327): n equals a,t,g, or c
  misc_feature (361)..(361): n equals a,t,g, or c
  misc_feature (370)..(370): n equals a,t,g, or c
  misc_feature (390)..(390): n equals a,t,g, or c
  misc_feature (422)..(422): n equals a,t,g, or c
  misc_feature (436)..(436): n equals a,t,g, or c
ccnttatggaaagccccgttgcgnaancaatttcacacaggaaacagctatgaccatgattacgccaagctctaatacgactcactatagggaaagntggtacgcctgcaggtaccggtccggaattcccgggtcgacccacgcgtccgactagntctagatcgngggcggccgctctagaggatccaagcttacgtacgcgtgcatgcgacggcatagctcttctatagngacacctaaattcaattcactggccgtngntttacaacgacgngactgggaaaaccctggcgttacccaacttaatcgccttgcagcacatccccntttcgccagctggcgtaatagcgaagaggcccgnaccgatcgncttgccaacaggtgcgcagnctgaatggcgaagggacgcgccctggagcggngcattaagcgcggngg

SEQ ID NO: 2356 - DNA, 168 bp, Homo sapiens
  misc_feature (14)..(14): n equals a,t,g, or c
  misc_feature (27)..(27): n equals a,t,g, or c
  misc_feature (79)..(79): n equals a,t,g, or c
  misc_feature (159)..(160): n equals a,t,g, or c
  misc_feature (162)..(162): n equals a,t,g, or c
  misc_feature (166)..(166): n equals a,t,g, or c
ggacgcgtggtttnacccacgcgtacnacagcggccgctgtagaggatccaagcttaccgtacgcgtgcatgccgacgncatagctcttctatagtgtcacctaaattcaattcactggccgtcgttttacaacgtcgtgactgggaaaacccagacanntnattnat

SEQ ID NO: 2357 - DNA, 575 bp, Homo sapiens
  misc_feature (3)..(3): n equals a,t,g, or c
  misc_feature (15)..(15): n equals a,t,g, or c
  misc_feature (17)..(17): n equals a,t,g, or c
  misc_feature (72)..(72): n equals a,t,g, or c
  misc_feature (78)..(78): n equals a,t,g, or c
  misc_feature (548)..(548): n equals a,t,g, or c
  misc_feature (550)..(550): n equals a,t,g, or c
  misc_feature (561)..(561): n equals a,t,g, or c
  misc_feature (569)..(569): n equals a,t,g, or c
  misc_feature (571)..(571): n equals a,t,g, or c
ggnctatacaaaatngntcgggaaccagctcatgaccatgattacgccaagctctaatacgactcactatantgattngctggtacgcctgcaggtaccggtccggaattcccgggtcgacccacgcgtccgcccacgcgtccgtttaatttgtacttaaaatacattttactaatcatattgattttaaatatgacaaattcttctagtagatactaatctttcttgtttatcatattgtcctagagaagcctaggtaaaaatgggttccacctagtctgtttgtataacaccttcccccgtcccctctccatccctgccaattgggctctatgcatattgacaagcaaataagaaaaccttaggtttcttgtatttgaatttccaaaacaataaaaggttttgactcaagatttgcattcaagaagaggcagaaattttgtcttatctttttatcattttgtgaacttgtgtttctctgtatgcttagaaaattttacacacaaggaatgtttgaaaaagtgagaattttagagtgcttgggtggntntatttggcagngctgatgngntagg

SEQ ID NO: 2358 - DNA, 188 bp, Homo sapiens
  misc_feature (3)..(3): n equals a,t,g, or c
  misc_feature (11)..(11): n equals a,t,g, or c
  misc_feature (17)..(17): n equals a,t,g, or c
  misc_feature (58)..(58): n equals a,t,g, or c
  misc_feature (60)..(60): n equals a,t,g, or c
  misc_feature (169)..(169): n equals a,t,g, or c
  misc_feature (174)..(174): n equals a,t,g, or c
  misc_feature (179)..(179): n equals a,t,g, or c
  misc_feature (184)..(184): n equals a,t,g, or c
  misc_feature (187)..(187): n equals a,t,g, or c
ggnaagacagnttatcnccatgattacgccaagctctaatacgactcactatagggantngttggtacgcctgcaggtaccggtccggaattcccgggtcgacccacgcgtccgctaagtctgatcgcattgtgaatgaaacttagatttgaaaacagctcctaggatncctgncagcncctgnagna

SEQ ID NO: 2359 - DNA, 168 bp, Homo sapiens
  misc_feature (8)..(9): n equals a,t,g, or c
  misc_feature (14)..(14): n equals a,t,g, or c
  misc_feature (66)..(66): n equals a,t,g, or c
  misc_feature (71)..(71): n equals a,t,g, or c
  misc_feature (154)..(155): n equals a,t,g, or c
acataatnngatcngtactcactcatgaccatgattacgccaagctctaatacgactcactatatngattngctggtacgcctgcaggtaccggtccggaattcccgggtcgacccacgcgtccgaatatttgttgctggaataaatgaatganntaaaaaaaaaaaa

SEQ ID NO: 2360 - DNA, 379 bp, Homo sapiens
  misc_feature (7)..(7): n equals a,t,g, or c
  misc_feature (21)..(21): n equals a,t,g, or c
  misc_feature (27)..(27): n equals a,t,g, or c
  misc_feature (34)..(34): n equals a,t,g, or c
  misc_feature (72)..(72): n equals a,t,g, or c
  misc_feature (271)..(271): n equals a,t,g, or c
  misc_feature (292)..(292): n equals a,t,g, or c
  misc_feature (370)..(370): n equals a,t,g, or c
  misc_feature (373)..(373): n equals a,t,g, or c
  misc_feature (376)..(376): n equals a,t,g, or c
  misc_feature (379)..(379): n equals a,t,g, or c
accgaanacttaatcaggaancagccntgacccngattacgccaagctctaatacgactcactatagggaanagctggtacgcctgcaggtaccggtccggaattcccgggtcgacccacgcgtccgactgacgtgaagaaaatatgccattgtttattccctcctgcatcatttccataatttgcttttgtactgtcaatttagaggaaatgtgtgatgctggtgttttgtttggcctgtttgtttgatgctgggggttttatgtgttgnaccctttaccccttacattgngtaatttgaaagtggcaaacaaacctgcagtaaaagtccttgattggcatcttcattcggatgatggagagcctttgnggnagnggn

SEQ ID NO: 2361 - DNA, 224 bp, Homo sapiens
  misc_feature (2)..(2): n equals a,t,g, or c
  misc_feature (14)..(14): n equals a,t,g, or c
  misc_feature (16)..(17): n equals a,t,g, or c
  misc_feature (94)..(94): n equals a,t,g, or c
  misc_feature (101)..(101): n equals a,t,g, or c
  misc_feature (121)..(121): n equals a,t,g, or c
  misc_feature (137)..(137): n equals a,t,g, or c
  misc_feature (159)..(159): n equals a,t,g, or c
  misc_feature (202)..(202): n equals a,t,g, or c
  misc_feature (210)..(210): n equals a,t,g, or c
cntaaggggaatcngnnaacagccatgaccatgattacgccaagctctaatacgactcactatagggaaagctggtacgcctgcaggtaccggnccggaantcccgggtcgacccacgcgnccgcccacgcgtccgntcctatgaccacaaagggccgnaagaaatattttttacactaaaatacacttgggtaccacttgnattttagngtaaataaaaagat

SEQ ID NO: 2362 - DNA, 440 bp, Homo sapiens
  misc_feature (1)..(1): n equals a,t,g, or c
  misc_feature (10)..(10): n equals a,t,g, or c
  misc_feature (16)..(16): n equals a,t,g, or c
  misc_feature (72)..(72): n equals a,t,g, or c
  misc_feature (83)..(83): n equals a,t,g, or c
  misc_feature (147)..(147): n equals a,t,g, or c
  misc_feature (160)..(160): n equals a,t,g, or c
  misc_feature (182)..(182): n equals a,t,g, or c
  misc_feature (230)..(230): n equals a,t,g, or c
  misc_feature (334)..(334): n equals a,t,g, or c
  misc_feature (431)..(431): n equals a,t,g, or c
  misc_feature (433)..(433): n equals a,t,g, or c
  misc_feature (435)..(435): n equals a,t,g, or c
  misc_feature (437)..(437): n equals a,t,g, or c
  misc_feature (439)..(439): n equals a,t,g, or c
nactatcggnaacctncacaggataaccgctatgaccatgattacgccaagctctaatacgactcactatanggaaagctggnacgcctgcaggtaccggtccggaattcccgggtcgacccacgcgtccgatcattttgctcatgngtcttttcttagngagcacagcaaaaaaatgtgtntctgatcattggacatggcatcagtagtgatgggattcactgacttgncacacaggagatctgggttatagttcaagctctctttctttttctaaaattggttatgccatttatattctcctctgagataaggatctactagaaattgctgngttctaaactaatacttatcaaacagggttccatggtcctaagggaaccgtgcactgcacatcttctgaggtctggaaaatctttaggaatttcagngngngngng

SEQ ID NO: 2363 - DNA, 247 bp, Homo sapiens
  misc_feature (15)..(15): n equals a,t,g, or c
  misc_feature (25)..(25): n equals a,t,g, or c
  misc_feature (36)..(36): n equals a,t,g, or c
  misc_feature (55)..(55): n equals a,t,g, or c
  misc_feature (70)..(70): n equals a,t,g, or c
  misc_feature (109)..(109): n equals a,t,g, or c
  misc_feature (122)..(122): n equals a,t,g, or c
  misc_feature (127)..(127): n equals a,t,g, or c
  misc_feature (140)..(141): n equals a,t,g, or c
  misc_feature (145)..(145): n equals a,t,g, or c
  misc_feature (176)..(176): n equals a,t,g, or c
  misc_feature (197)..(197): n equals a,t,g, or c
  misc_feature (212)..(212): n equals a,t,g, or c
  misc_feature (218)..(218): n equals a,t,g, or c
  misc_feature (220)..(220): n equals a,t,g, or c
cttaagggggggaantaaatggganaactccccccnccttttcccgggaaaaccnctctgaccatgattncgccaagctctaatacgactcactatttggaaagctggnacgcctgcaggtnccggnccggaattcccgnntcgncccacgcgtccgggagcagagaggaggcaanggccaccatggagaacaaggngatctgcgccctggncctggngnccatgctggccctcggcaccctggccg

SEQ ID NO: 2364 - DNA, 315 bp, Homo sapiens
  misc_feature (3)..(3): n equals a,t,g, or c
  misc_feature (11)..(11): n equals a,t,g, or c
  misc_feature (25)..(25): n equals a,t,g, or c
  misc_feature (27)..(27): n equals a,t,g, or c
  misc_feature (121)..(121): n equals a,t,g, or c
  misc_feature (157)..(157): n equals a,t,g, or c
  misc_feature (164)..(164): n equals a,t,g, or c
  misc_feature (184)..(184): n equals a,t,g, or c
  misc_feature (187)..(187): n equals a,t,g, or c
  misc_feature (215)..(215): n equals a,t,g, or c
  misc_feature (245)..(245): n equals a,t,g, or c
  misc_feature (260)..(260): n equals a,t,g, or c
  misc_feature (266)..(266): n equals a,t,g, or c
  misc_feature (277)..(277): n equals a,t,g, or c
  misc_feature (315)..(315): n equals a,t,g, or c
tangggggacntctaacgggaaacncnaacaattttacccaggaaaccgctatgaccatgattacgccaagctctaatacgactcactatagggaaagctggtacgcctgcaggtaccggnccggaattcccgggtcgacccacgcgtccgcatggntttcggngatttagagtttaagccagnagnggggcgactgtacatctatcgacatggngaggtagagcatgtttgggaggaaagacgntgaatcccatttggngacagngagcttgaggngctgccagaacactgcactgaagataggaggagactgn

SEQ ID NO: 2365 - DNA, 197 bp, Homo sapiens
  misc_feature (15)..(15): n equals a,t,g, or c
  misc_feature (21)..(22): n equals a,t,g, or c
  misc_feature (27)..(27): n equals a,t,g, or c
  misc_feature (41)..(41): n equals a,t,g, or c
  misc_feature (192)..(192): n equals a,t,g, or c
  misc_feature (194)..(197): n equals a,t,g, or c
agggggggattaatngaaaanntccgnaaatttccggtaangaccatgattacgccaagctctaatacgactcactatttgggaaagtttggtacgcctgcaggtaccggtccggaattcccgggtcgacccacgcgtccgggatatttgtaaaaaatatcctgcattatcttcaaaataaagaaacacgcnannnn

SEQ ID NO: 2366 - DNA, 139 bp, Homo sapiens
  misc_feature (5)..(5): n equals a,t,g, or c
  misc_feature (11)..(11): n equals a,t,g, or c
  misc_feature (56)..(56): n equals a,t,g, or c
  misc_feature (69)..(69): n equals a,t,g, or c
  misc_feature (84)..(84): n equals a,t,g, or c
  misc_feature (123)..(123): n equals a,t,g, or c
  misc_feature (128)..(128): n equals a,t,g, or c
cgacnatgctncgccaagctctaatacgactcactatagggaaatgttggtacgtntgcaggtaccggnccggaattcccgggncgacccacgcgtccggctaggagccgcgcgagtcgtagngacgntgaatgcgggt

SEQ ID NO: 2367 - DNA, 578 bp, Homo sapiens
  misc_feature (4)..(4): n equals a,t,g, or c
  misc_feature (7)..(7): n equals a,t,g, or c
  misc_feature (66)..(66): n equals a,t,g, or c
  misc_feature (169)..(169): n equals a,t,g, or c
  misc_feature (206)..(206): n equals a,t,g, or c
  misc_feature (256)..(257): n equals a,t,g, or c
  misc_feature (295)..(295): n equals a,t,g, or c
  misc_feature (308)..(308): n equals a,t,g, or c
  misc_feature (319)..(319): n equals a,t,g, or c
  misc_feature (321)..(321): n equals a,t,g, or c
  misc_feature (424)..(424): n equals a,t,g, or c
  misc_feature (452)..(452): n equals a,t,g, or c
  misc_feature (470)..(470): n equals a,t,g, or c
  misc_feature (478)..(478): n equals a,t,g, or c
  misc_feature (484)..(484): n equals a,t,g, or c
  misc_feature (488)..(488): n equals a,t,g, or c
  misc_feature (512)..(512): n equals a,t,g, or c
  misc_feature (527)..(527): n equals a,t,g, or c
cgtntcnatcggaaacagcctgaccatgattacgccaagctctaatacgactcactatagggaaanttggtacgcctgcaggtaccggtccggaattcccgggtcgacccacgcgtccgggtgaaaggggggaccctaccctcagaacatgagggaataatatttacgnggctcacaaagaccagtgagtacatcatatgcatctntcacaactccccagaagagggcctccagcacgagtctaggctcagccttnnctgaccctccgagaactctatgaattgctgccaagtgntttaattttcctnagaatttcttngnaatgttattgagggttggaggtccttttacaaattttggaaataagtaaatcaaatgagaagaccatgcttccaaacaatcattctggttaacagatcccctngatttaatgcaattatgaatgcgttagnggtagtgtagtttaaganctttcctnggatgnacangctttaagaaaccaacctaggagnggattttctataagnaatgggtctaagactttacgctttacacatcaatgatatacgctggctttt

SEQ ID NO: 2368 - DNA, 166 bp, Homo sapiens
  misc_feature (2)..(2): n equals a,t,g, or c
  misc_feature (14)..(14): n equals a,t,g, or c
  misc_feature (137)..(137): n equals a,t,g, or c
  misc_feature (139)..(140): n equals a,t,g, or c
  misc_feature (143)..(143): n equals a,t,g, or c
  misc_feature (165)..(165): n equals a,t,g, or c
gncgagaatactcntttcttcttgaaacagccatcaccatgattacgccaagctctaatacgactcactatagggaaagctggtacgcctgcaggtaccggtccggaattcccgggtcgacccacgcgtccgaaaanannaanagaaccttaaaaaactagaganc

SEQ ID NO: 2369 - DNA, 369 bp, Homo sapiens
  misc_feature (69)..(70): n equals a,t,g, or c
  misc_feature (313)..(313): n equals a,t,g, or c
  misc_feature (324)..(324): n equals a,t,g, or c
  misc_feature (345)..(345): n equals a,t,g, or c
  misc_feature (349)..(349): n equals a,t,g, or c
  misc_feature (357)..(357): n equals a,t,g, or c
tacagtttctttaggaaacagcctgaccatgattacgccaagctctaatacgactcactatagggaaanntggtacgcctgcaggtaccggtccggaattcccgggtcgacccacgcgtccgaaagttttaagtcctgggttttcagactactgtgtagcagctgtgtgtttaacatactgtagctttttctcccttgggggcacatacaaataggatgtgttgatgtggactctaaactgtaattttcctgtaactattttggaatgatgcatatttctaatgtttgttatacttgtacagagtattgctgntggttgctttnttttttttttaaggaaaaaanggcntgaaaacntttttttaaaga

SEQ ID NO: 2370 - DNA, 185 bp, Homo sapiens
  misc_feature (7)..(7): n equals a,t,g, or c
  misc_feature (12)..(12): n equals a,t,g, or c
  misc_feature (137)..(137): n equals a,t,g, or c
  misc_feature (155)..(155): n equals a,t,g, or c
  misc_feature (176)..(177): n equals a,t,g, or c
  misc_feature (179)..(179): n equals a,t,g, or c
ggagaancctcntttcattcttgaaacagctatcaccatgattacgccaagctctaatacgactcactatagggaaagctggtacgcctgcaggtaccggtccggaattcccgggtcgacccacgcgtccgggcctntgaaaataaggaagcatnggagctatagccatgtagagnnangggcta

SEQ ID NO: 2371 - DNA, 404 bp, Homo sapiens
  misc_feature (5)..(5): n equals a,t,g, or c
  misc_feature (8)..(9): n equals a,t,g, or c
  misc_feature (22)..(22): n equals a,t,g, or c
  misc_feature (44)..(44): n equals a,t,g, or c
  misc_feature (400)..(404): n equals a,t,g, or c
ccgcnagnnaacctcactttgntacgacccactatagggaaagntggtacgcctgcaggtaccggtccggaattcccgggtcgacccacgcgtccgaaataaccttttgtggtcactgtaaaattaatatttggtagacagaatccatgtacctttgctaaggttagaatgaataatttattgtatttttaatttgaatgtttgtgcttccgttttgtttctgctcagtaatatagtcaagcaagtttgttccaagtgacccattgagctgtgtatgcatttttgtttatttcaataaaatatatttgtattatttgtccttcatactatccatccataccacactatcttctgtatcaggtagtctaatagaaatatacctgttttgttctaaaaaaannnnn

SEQ ID NO: 2372 - DNA, 561 bp, Homo sapiens
  misc_feature (361)..(361): n equals a,t,g, or c
  misc_feature (426)..(426): n equals a,t,g, or c
  misc_feature (522)..(522): n equals a,t,g, or c
  misc_feature (526)..(526): n equals a,t,g, or c
  misc_feature (534)..(534): n equals a,t,g, or c
  misc_feature (549)..(549): n equals a,t,g, or c
  misc_feature (558)..(558): n equals a,t,g, or c
ggcccagtattattccagattctcctgagctagatactgccctaaggccttgtacacttaaactaccacgatgtgcctttctgaatattacccaattactccaggaagtgagcataaatataactgccattctttattaacattttatgcctatgccattttcaactagttatgcggtgactaattttagttgtttaggccccaagtactatatttgaataatattccatgtttttaacatgaagaaatgctactagttctagatcgcgagcggccgctctagaggatccaagcttacgtacgcgtgcatgcgacgtcatagctcttctatagtgtcacctaaattcaattcactggccgncgttttacaacgtcgtgactgggaaaaccctggcgttacccaacttaatcgccttgcagcacatncccctttcgcagctggcgtaatagcgaaaaagcccgcaccgatcggccttccaacaagttgcgcagcctgaatggggaatgggacgcgccctgtancggngcattaancgccgggggtgtggngggtacccncaa

SEQ ID NO: 2373 - DNA, 513 bp, Homo sapiens
  misc_feature (330)..(334): n equals a,t,g, or c
  misc_feature (336)..(340): n equals a,t,g, or c
  misc_feature (365)..(365): n equals a,t,g, or c
  misc_feature (404)..(404): n equals a,t,g, or c
  misc_feature (456)..(456): n equals a,t,g, or c
  misc_feature (474)..(474): n equals a,t,g, or c
  misc_feature (499)..(500): n equals a,t,g, or c
  misc_feature (505)..(505): n equals a,t,g, or c
ggcagactcttcctcctctcctcgatacacaggggcccctgccacagcctgactctctgccacctcgtgagtctctggaaagcagggtcggcctctgaatacagaggacttgggtcctgccggaggatgcttggccagtgggtgctggcacgtgagcagcccccggggagtcagagtggggctgcagcgaaggccgtggtggtcgaggtgagggtggtggccaggtcttgttgccgcagtgaggattctggggttaccctaagagccaccacattcaggcactcaagaaaaagcacgtcaaaataaaatattttcacctgaaaaaaaaannnnnannnnnaaaaaaaaaagggcggccgctctanaggatccaagcttacgtacgcgtgcatgcgacgtcatanctcttctatagtggcacctaaattcaattactggccgcgttttacaacgtcngactgggaaaaccctggngttacccaacttaatcgccttggannaaatncccttttg

SEQ ID NO: 2374 - DNA, 464 bp, Homo sapiens
  misc_feature (143)..(143): n equals a,t,g, or c
  misc_feature (166)..(166): n equals a,t,g, or c
  misc_feature (259)..(259): n equals a,t,g, or c
  misc_feature (272)..(272): n equals a,t,g, or c
  misc_feature (311)..(311): n equals a,t,g, or c
  misc_feature (316)..(319): n equals a,t,g, or c
  misc_feature (321)..(322): n equals a,t,g, or c
  misc_feature (325)..(326): n equals a,t,g, or c
  misc_feature (331)..(331): n equals a,t,g, or c
  misc_feature (333)..(333): n equals a,t,g, or c
  misc_feature (336)..(337): n equals a,t,g, or c
  misc_feature (347)..(347): n equals a,t,g, or c
  misc_feature (360)..(360): n equals a,t,g, or c
  misc_feature (364)..(364): n equals a,t,g, or c
  misc_feature (433)..(433): n equals a,t,g, or c
  misc_feature (457)..(457): n equals a,t,g, or c
aaaacatttgctataacttaaaatataattttgacatggatctaccattgtattttgaaactgtatagctatagtggctccttatgtatatttagatttacttacagcttgaaagtaatgaacaacttgcatgaattagtttnttgtaccacacattttattgttngtaggctactctccctgaaaaacaattatttcaggaatgtattcattgtggtacttttagaaatgattatttgtgaagttaatactcatattntttaccttatttnatttttattctgaataaaataatatggagattcttaccncaaannnnanncannaagtnanaannaccctcccanaagggcgggcgcnctanaagatccaagcttacgtacgcgtgcatgcaacgtcataactcttctatagtgtccctaaattcaattcnctgggccgtcgttttacaacgtcntgactgg

SEQ ID NO: 2375 - DNA, 279 bp, Homo sapiens
  misc_feature (2)..(2): n equals a,t,g, or c
  misc_feature (14)..(14): n equals a,t,g, or c
  misc_feature (28)..(29): n equals a,t,g, or c
  misc_feature (33)..(33): n equals a,t,g, or c
  misc_feature (101)..(101): n equals a,t,g, or c
  misc_feature (106)..(106): n equals a,t,g, or c
  misc_feature (112)..(113): n equals a,t,g, or c
  misc_feature (117)..(117): n equals a,t,g, or c
  misc_feature (133)..(133): n equals a,t,g, or c
  misc_feature (137)..(137): n equals a,t,g, or c
  misc_feature (143)..(143): n equals a,t,g, or c
  misc_feature (154)..(155): n equals a,t,g, or c
  misc_feature (168)..(168): n equals a,t,g, or c
  misc_feature (175)..(175): n equals a,t,g, or c
  misc_feature (210)..(210): n equals a,t,g, or c
  misc_feature (240)..(240): n equals a,t,g, or c
  misc_feature (247)..(247): n equals a,t,g, or c
  misc_feature (258)..(258): n equals a,t,g, or c
  misc_feature (266)..(266): n equals a,t,g, or c
cnctagagaacccncttttggaatacgnntcantatagggaaagctggtacgcctgcaggtaccggtccggaattcccgggtcgacccacgcgtccggagnactgntggganngggnttgtgaggtggcatcntgcnctgatnagggacccatnntgaatttctgtgngggatangagttgaacaaagtagcaaaacaaaggcaagtgantatatgaaagattagaagcactggaataancaggctntttaaagtgangaaattancaatgaaaaagca

SEQ ID NO: 2376 - DNA, 243 bp, Homo sapiens
  misc_feature (8)..(8): n equals a,t,g, or c
  misc_feature (11)..(11): n equals a,t,g, or c
  misc_feature (15)..(15): n equals a,t,g, or c
  misc_feature (23)..(23): n equals a,t,g, or c
  misc_feature (87)..(87): n equals a,t,g, or c
  misc_feature (119)..(119): n equals a,t,g, or c
  misc_feature (131)..(131): n equals a,t,g, or c
  misc_feature (165)..(165): n equals a,t,g, or c
  misc_feature (196)..(196): n equals a,t,g, or c
  misc_feature (205)..(205): n equals a,t,g, or c
  misc_feature (218)..(218): n equals a,t,g, or c
  misc_feature (229)..(229): n equals a,t,g, or c
aataaggngangagngttaagancggatacgactcactatagggaaagctggtacgcctgcaggtaccggtccggaattcccgggtngacccacgcgtccgtggaaatctgtcctccanaatccaggccanaaagttcacagtcaaatggggaggggtattcttnatgcaggagaccccaggccctggaggctgcnacatacctnaatcctgtcccangccggatcctnctgaagcccttttt

SEQ ID NO: 2377 - DNA, 178 bp, Homo sapiens
  misc_feature (2)..(2): n equals a,t,g, or c
  misc_feature (7)..(7): n equals a,t,g, or c
  misc_feature (17)..(17): n equals a,t,g, or c
  misc_feature (21)..(22): n equals a,t,g, or c
  misc_feature (128)..(128): n equals a,t,g, or c
  misc_feature (146)..(146): n equals a,t,g, or c
  misc_feature (152)..(152): n equals a,t,g, or c
  misc_feature (155)..(156): n equals a,t,g, or c
gncctgnggcttggaanctannaacccagttgggaacgacccactatagggaaagctggtacgcctgcaggtaccggtccggaattcccgggtcgacccacgcgtccggtaaaacctggataatcagngtatgttgcaccagaggnagcatnggnnttttaactgcaaaaaatgatgg

SEQ ID NO: 2378 - DNA, 139 bp, Homo sapiens
  misc_feature (17)..(17): n equals a,t,g, or c
  misc_feature (19)..(19): n equals a,t,g, or c
  misc_feature (23)..(23): n equals a,t,g, or c
  misc_feature (39)..(39): n equals a,t,g, or c
  misc_feature (104)..(104): n equals a,t,g, or c
  misc_feature (110)..(110): n equals a,t,g, or c
  misc_feature (115)..(115): n equals a,t,g, or c
  misc_feature (126)..(126): n equals a,t,g, or c
  misc_feature (138)..(138): n equals a,t,g, or c
tttggaatccagctaangnaccnccgtttgggaacgacncactatagggaaagctggtacgcctgcaggtaccggtccggaattcccgggtcgacccacgcgtncgattntatgnctttgtggctnctacagtaactna

SEQ ID NO: 2379 - DNA, 187 bp, Homo sapiens
  misc_feature (40)..(40): n equals a,t,g, or c
  misc_feature (105)..(105): n equals a,t,g, or c
  misc_feature (115)..(115): n equals a,t,g, or c
  misc_feature (140)..(140): n equals a,t,g, or c
  misc_feature (148)..(148): n equals a,t,g, or c
  misc_feature (182)..(182): n equals a,t,g, or c
ccgctatagacccccgttggaacgacccactatagggaangctggtacgcctgcaggtaccggtccggaattcccgggtcgacccacgcgtccggggctgagtgntctgggattnctctagaggctggcaagaaccaggnggttttgncttgcgggtctggacaggggttggaaaggccaancccga

SEQ ID NO: 2380 - DNA, 367 bp, Homo sapiens
  misc_feature (12)..(12): n equals a,t,g, or c
  misc_feature (14)..(15): n equals a,t,g, or c
  misc_feature (34)..(34): n equals a,t,g, or c
  misc_feature (96)..(96): n equals a,t,g, or c
  misc_feature (113)..(114): n equals a,t,g, or c
  misc_feature (142)..(142): n equals a,t,g, or c
  misc_feature (151)..(151): n equals a,t,g, or c
  misc_feature (153)..(154): n equals a,t,g, or c
  misc_feature (158)..(158): n equals a,t,g, or c
  misc_feature (171)..(171): n equals a,t,g, or c
  misc_feature (177)..(177): n equals a,t,g, or c
  misc_feature (179)..(179): n equals a,t,g, or c
  misc_feature (196)..(196): n equals a,t,g, or c
  misc_feature (199)..(199): n equals a,t,g, or c
  misc_feature (201)..(201): n equals a,t,g, or c
  misc_feature (205)..(206): n equals a,t,g, or c
  misc_feature (227)..(227): n equals a,t,g, or c
  misc_feature (237)..(237): n equals a,t,g, or c
  misc_feature (240)..(240): n equals a,t,g, or c
  misc_feature (245)..(245): n equals a,t,g, or c
  misc_feature (274)..(274): n equals a,t,g, or c
  misc_feature (289)..(289): n equals a,t,g, or c
  misc_feature (339)..(339): n equals a,t,g, or c
  misc_feature (349)..(349): n equals a,t,g, or c
  misc_feature (367)..(367): n equals a,t,g, or c
atttgtaatacnanncactatagggaaagctggnacgcctgcaggtaccggtccggaattcccgggtcgacccacgcgtccgatagtaaagactgntctgtggatgggagtgnntaatacattatatattttgtacagagantacaggccntnngatntattaaaatcagnagatgntnggcctaattcttagcantantnaganntttgcgccagaactttgttgngcacgctttntgngatcngcgttaaaaacctgcatagccaacattgnagatagaacttaaantagatattcaaataaatatttaattttttaaattgatcttgtataatcanatgccccttnaagcattattatagaagn

SEQ ID NO: 2381 - DNA, 239 bp, Homo sapiens
  misc_feature (13)..(13): n equals a,t,g, or c
  misc_feature (40)..(40): n equals a,t,g, or c
  misc_feature (68)..(68): n equals a,t,g, or c
  misc_feature (77)..(77): n equals a,t,g, or c
  misc_feature (132)..(132): n equals a,t,g, or c
  misc_feature (135)..(135): n equals a,t,g, or c
  misc_feature (157)..(157): n equals a,t,g, or c
  misc_feature (178)..(178): n equals a,t,g, or c
  misc_feature (182)..(182): n equals a,t,g, or c
  misc_feature (192)..(192): n equals a,t,g, or c
  misc_feature (233)..(233): n equals a,t,g, or c
acccattttcatntggaagcacgctatgaccatgattacnccaagctctaatacgactcactataggnaaagctggnacgcctgcaggtaccgggccggaattcccgggtcgacccacgcgtccggagatantangtaattgtattgatctgcagangcatccatctcttggattctnattncttctaccantgcagaactttcacctgtaatcactttcctttggccttaangataac

SEQ ID NO: 2382 - DNA, 279 bp, Homo sapiens
  misc_feature (1)..(1): n equals a,t,g, or c
  misc_feature (9)..(9): n equals a,t,g, or c
  misc_feature (12)..(12): n equals a,t,g, or c
  misc_feature (23)..(23): n equals a,t,g, or c
  misc_feature (34)..(34): n equals a,t,g, or c
  misc_feature (47)..(47): n equals a,t,g, or c
  misc_feature (203)..(203): n equals a,t,g, or c
  misc_feature (251)..(251): n equals a,t,g, or c
  misc_feature (256)..(256): n equals a,t,g, or c
  misc_feature (272)..(272): n equals a,t,g, or c
  misc_feature (275)..(275): n equals a,t,g, or c
nctacgaancanccaagctcctncgggaaagccntaacaatttcacncaggaaacagctatgaccatgattacgccaagctctaatacgactcactatagggaaagctggtacgcctgcaggtaccggtccggaattcccgggtcgacccacgcgtccggccccagccgtgagattcccaggagtttacacttggtgatcagnactgaacacagaccaccaaccatggagttggggcttagctggattatncttgntgctatgataaaaggngtnaacg

SEQ ID NO: 2383 - DNA, 262 bp, Homo sapiens
  misc_feature (19)..(19): n equals a,t,g, or c
  misc_feature (36)..(36): n equals a,t,g, or c
  misc_feature (54)..(54): n equals a,t,g, or c
  misc_feature (59)..(59): n equals a,t,g, or c
  misc_feature (61)..(61): n equals a,t,g, or c
  misc_feature (184)..(184): n equals a,t,g, or c
  misc_feature (250)..(250): n equals a,t,g, or c
  misc_feature (254)..(254): n equals a,t,g, or c
  misc_feature (256)..(256): n equals a,t,g, or c
  misc_feature (259)..(259): n equals a,t,g, or c
tagctcgtccggaaaaccnttacacaggtaaacagntatgaccatgattaccgncaagntntaatacgactcactatagggaaagctggtacgcctgcaggtaccggtccggaattcccgggtcgacccacgcgtccgaaaaaaaaaaaaaaaaaaaaaaaaaaaaaaaaaaaaaaaaaaaaanaaaaaaaaaaaaaaaaaaaaaaaaaaaaaaaaaaaaaaaaaaaaaaaaaaaaaaaaaaaaaaaaangggngntanttt

SEQ ID NO: 2384 - DNA, 194 bp, Homo sapiens
  misc_feature (20)..(20): n equals a,t,g, or c
  misc_feature (27)..(27): n equals a,t,g, or c
  misc_feature (39)..(39): n equals a,t,g, or c
  misc_feature (44)..(44): n equals a,t,g, or c
  misc_feature (74)..(74): n equals a,t,g, or c
  misc_feature (138)..(138): n equals a,t,g, or c
  misc_feature (155)..(155): n equals a,t,g, or c
  misc_feature (168)..(168): n equals a,t,g, or c
  misc_feature (178)..(178): n equals a,t,g, or c
  misc_feature (184)..(184): n equals a,t,g, or c
acaaccttacacaggtagcngctatgnccatgattacgncaagntctaatacgactcactatagggaaagctgntacgcctgcaggtaccggtccggaattcccgggtcgacccacgcgttgcgctattgcgggcctncagctcatcgtttcacntcacccccctgcncctccttggntctaantatgctaatg

SEQ ID NO: 2385 - DNA, 289 bp, Homo sapiens
  misc_feature (20)..(20): n equals a,t,g, or c
  misc_feature (22)..(22): n equals a,t,g, or c
  misc_feature (99)..(100): n equals a,t,g, or c
  misc_feature (150)..(150): n equals a,t,g, or c
  misc_feature (226)..(226): n equals a,t,g, or c
  misc_feature (250)..(250): n equals a,t,g, or c
  misc_feature (285)..(286): n equals a,t,g, or c
  misc_feature (288)..(288): n equals a,t,g, or c
acttgttctcctgggaagcncntaacaattttacacaggaagacagctatgaccatgattacgccaagctctaatacgactcactatagggaaagctgnnacgcctgcaggtaccggtccggaattcccgggtcgacccacgcgtccggncaggcctaaagccattttatagctattggcctaattgtgtaactttttctttcaaaatgttttattataatacttntgtcatttctttcacttaatatgncaattgtcataataaaaatttaaatttgaaaaaannana

SEQ ID NO: 2386 - DNA, 177 bp, Homo sapiens
  misc_feature (12)..(12): n equals a,t,g, or c
  misc_feature (64)..(64): n equals a,t,g, or c
  misc_feature (91)..(91): n equals a,t,g, or c
  misc_feature (113)..(113): n equals a,t,g, or c
  misc_feature (129)..(129): n equals a,t,g, or c
  misc_feature (165)..(165): n equals a,t,g, or c
  misc_feature (174)..(174): n equals a,t,g, or c
caggaaacagcnatgaccatgattacgccaagctctaatacgactcactatagggattgctggnacgcctgcaggtaccgggccggaattnccgggtcgacccacgcgtccgnaagatgatatcaatancaatgccacctgcttgaaggctatatgtgacaagtnactagaggntca

SEQ ID NO: 2387 - DNA, 197 bp, Homo sapiens
  misc_feature (19)..(19): n equals a,t,g, or c
  misc_feature (28)..(28): n equals a,t,g, or c
  misc_feature (77)..(77): n equals a,t,g, or c
  misc_feature (82)..(82): n equals a,t,g, or c
  misc_feature (95)..(95): n equals a,t,g, or c
  misc_feature (137)..(137): n equals a,t,g, or c
  misc_feature (167)..(167): n equals a,t,g, or c
  misc_feature (173)..(173): n equals a,t,g, or c
  misc_feature (182)..(182): n equals a,t,g, or c
  misc_feature (193)..(193): n equals a,t,g, or c
tctcttggataacaccctnacacagganacagctatgaccatgattacgccaagctctaatacgactcactataggnaaagntggtacgcctgcnggtaccggtccggaattcccgggtcgacccacgcgtccgtgntaaggctgctagccacctgttttgctaganacaggncgacctacnttacttgagtnccag

SEQ ID NO: 2388 - DNA, 388 bp, Homo sapiens
  misc_feature (5)..(5): n equals a,t,g, or c
  misc_feature (11)..(11): n equals a,t,g, or c
  misc_feature (15)..(15): n equals a,t,g, or c
  misc_feature (74)..(74): n equals a,t,g, or c
  misc_feature (93)..(93): n equals a,t,g, or c
  misc_feature (115)..(115): n equals a,t,g, or c
  misc_feature (240)..(240): n equals a,t,g, or c
  misc_feature (267)..(267): n equals a,t,g, or c
  misc_feature (294)..(294): n equals a,t,g, or c
  misc_feature (353)..(353): n equals a,t,g, or c
  misc_feature (355)..(355): n equals a,t,g, or c
  misc_feature (362)..(362): n equals a,t,g, or c
  misc_feature (364)..(364): n equals a,t,g, or c
ttaantgaacncccntacacaggacacagctatgaccatgattacgccaagctctaatacgactcactataggnaaagctgttacgcctgcangtaccggtccggaattcccggntcgacccacgcgtccgcctttggggtacataaaatgtcgggttctctgaattttttatcgaatttagaatgtctgctacatttatttaacttctgcaaatgcttaaaatgaaaacattttggaantgcgaggatttttgtcaagcggattgntctcttcatatattaaatgtttacttnatatctttaatccgaaacattaaaatagcattgaagaggcatgattttcaagattaagngngctatgnantaggaatacgcttttaaagaacga

SEQ ID NO: 2389 - DNA, 395 bp, Homo sapiens
  misc_feature (7)..(7): n equals a,t,g, or c
  misc_feature (15)..(15): n equals a,t,g, or c
  misc_feature (64)..(64): n equals a,t,g, or c
  misc_feature (69)..(69): n equals a,t,g, or c
  misc_feature (89)..(89): n equals a,t,g, or c
  misc_feature (269)..(269): n equals a,t,g, or c
  misc_feature (307)..(307): n equals a,t,g, or c
  misc_feature (370)..(370): n equals a,t,g, or c
  misc_feature (384)..(384): n equals a,t,g, or c
  misc_feature (387)..(387): n equals a,t,g, or c
  misc_feature (393)..(393): n equals a,t,g, or c
ttggtanttagctgnaacgcctgcaggtaccggtccggaattcccgggtcgacccacgcgtccnttcanttatttaaataaataactgntgtgtacaaaaaaaaaaaaaaagggcggccgctctagaggatccaagcttacgtacgcgtgcatgcgacgtcatagctcttctatagtgtcacctaaattcaattcactggccgtcgttttacaacgtcgtgactgggaaaaccctggcgttacccaacttaatcgccttgcagcacatncccctttcgccagctggcgtaatagcgaagaggcccgnaccgatcgcccttcccaacagttgcgcagcctgaatggcgaatgggacgcgccctgtagcggngcattaagcgcggnggntgtggngg

SEQ ID NO: 2390 - DNA, 423 bp, Homo sapiens
  misc_feature (3)..(3): n equals a,t,g, or c
  misc_feature (7)..(7): n equals a,t,g, or c
  misc_feature (28)..(28): n equals a,t,g, or c
  misc_feature (45)..(45): n equals a,t,g, or c
  misc_feature (77)..(77): n equals a,t,g, or c
  misc_feature (119)..(119): n equals a,t,g, or c
  misc_feature (148)..(148): n equals a,t,g, or c
  misc_feature (242)..(242): n equals a,t,g, or c
  misc_feature (252)..(252): n equals a,t,g, or c
  misc_feature (267)..(267): n equals a,t,g, or c
  misc_feature (375)..(375): n equals a,t,g, or c
  misc_feature (381)..(381): n equals a,t,g, or c
  misc_feature (417)..(417): n equals a,t,g, or c
  misc_feature (419)..(419): n equals a,t,g, or c
  misc_feature (421)..(421): n equals a,t,g, or c
atnatgnaaaacttcgtcactattttgncagatggtacccctgcnggtaccggtccggaattcccgggtcgacccantcgtccgctttttctagatcgcgagcggccgctctagagganccaagcttacgtacgcgtgcatgcgacgncatagctcttctatagtgtcacctaaattcaattcactggccgtcgttttacaacgtcgtgactgggaaaaccctggcgttacccaacttaatngccttgcagnacatccccctttcgncagctggcgtaatagcgaagaggcccgcaccgatcgccctttccaacagttgcgcagcctgaatggcgaatgggacgcgccctgtagcggcgcattaagcgcggcggntgtggnggttacgcgcagcgtgaccgttacacttgccagaantncnag

SEQ ID NO: 2391 - DNA, 258 bp, Homo sapiens
  misc_feature (14)..(14): n equals a,t,g, or c
  misc_feature (22)..(23): n equals a,t,g, or c
  misc_feature (38)..(38): n equals a,t,g, or c
  misc_feature (53)..(53): n equals a,t,g, or c
  misc_feature (103)..(103): n equals a,t,g, or c
  misc_feature (171)..(171): n equals a,t,g, or c
  misc_feature (183)..(183): n equals a,t,g, or c
  misc_feature (189)..(189): n equals a,t,g, or c
  misc_feature (218)..(218): n equals a,t,g, or c
  misc_feature (236)..(236): n equals a,t,g, or c
aaaaaaaaaaaaangaaaaaannaagggcggccgctcnagaggatccaagctnacgtacgcgtgcatgcgacgtcatagctcttctatagggtcacctaaatncaattcactggccgtcgttttacaacgtcgtgactgggaaaaccctggcgttacccaacttagggggncgggcagcacancccccnttcgccagctggcggaagagcgaagaggngccgcaccgatcgccctngccaacagttgcgcagcctgaa

SEQ ID NO: 2392 - DNA, 306 bp, Homo sapiens
  misc_feature (7)..(7): n equals a,t,g, or c
  misc_feature (34)..(34): n equals a,t,g, or c
  misc_feature (56)..(56): n equals a,t,g, or c
  misc_feature (64)..(64): n equals a,t,g, or c
  misc_feature (85)..(85): n equals a,t,g, or c
  misc_feature (204)..(204): n equals a,t,g, or c
  misc_feature (229)..(229): n equals a,t,g, or c
  misc_feature (256)..(256): n equals a,t,g, or c
  misc_feature (291)..(291): n equals a,t,g, or c
  misc_feature (304)..(304): n equals a,t,g, or c
  misc_feature (306)..(306): n equals a,t,g, or c
gaaaaantaaaaaaaaaaagggcggccgctctanaggatccaagcttacgtacgcntgcatgcnacgtcatagctcttctatagngtcacctaaattcaattcactggccgtcgttttacaacgtcgtgactgggaaaaccctggcgttacccaacttaatcgccttgcagcacatccccctttcgccagctggcgtaatagcnaaaaggcccgcaccgatcgcccttnccaacagttgcgcagcctgaatgggcnaatggggacgcgccctgtaaccggggcattaagcncggcgggttggtngn

SEQ ID NO: 2393 - DNA, 537 bp, Homo sapiens
  misc_feature (13)..(13): n equals a,t,g, or c
  misc_feature (16)..(17): n equals a,t,g, or c
  misc_feature (25)..(25): n equals a,t,g, or c
  misc_feature (125)..(125): n equals a,t,g, or c
  misc_feature (127)..(127): n equals a,t,g, or c
  misc_feature (154)..(154): n equals a,t,g, or c
  misc_feature (272)..(272): n equals a,t,g, or c
  misc_feature (282)..(282): n equals a,t,g, or c
  misc_feature (289)..(289): n equals a,t,g, or c
  misc_feature (302)..(302): n equals a,t,g, or c
  misc_feature (307)..(307): n equals a,t,g, or c
  misc_feature (315)..(315): n equals a,t,g, or c
  misc_feature (320)..(320): n equals a,t,g, or c
  misc_feature (327)..(327): n equals a,t,g, or c
  misc_feature (332)..(332): n equals a,t,g, or c
  misc_feature (342)..(342): n equals a,t,g, or c
  misc_feature (344)..(344): n equals a,t,g, or c
  misc_feature (347)..(347): n equals a,t,g, or c
  misc_feature (353)..(353): n equals a,t,g, or c
  misc_feature (361)..(361): n equals a,t,g, or c
  misc_feature (363)..(363): n equals a,t,g, or c
  misc_feature (369)..(369): n equals a,t,g, or c
  misc_feature (374)..(374): n equals a,t,g, or c
  misc_feature (386)..(386): n equals a,t,g, or c
  misc_feature (391)..(391): n equals a,t,g, or c
  misc_feature (456)..(456): n equals a,t,g, or c
  misc_feature (501)..(502): n equals a,t,g, or c
  misc_feature (529)..(529): n equals a,t,g, or c
  misc_feature (537)..(537): n equals a,t,g, or c
ggactagttctanatnncgagcggncgctctagaggatccaagcttacgtacgcgtgcatgcgacgttatagctattctatagtgtcacctaaattcaattcactggccgtcgttttacaacgtngngactgggaaaaccctggcgttacccancttaatcgccttgcagcacatccccctttcgccagctggtgtaatagcgaagaggcccgcaccgatcgcccttcccaacagttgcgcaaactgaatggcgaatgggaccctgccctgnaacggggcanttaagcncggtgggtggggngggtncctccaangtganccgttcnttgcngcgccctacncncgntctttngttttctncnttcttnctcgncacgttcgcggntttcncgaaagctctaaatcgggggctccctttagggttccgatttaagggttttacgggacctcgaccncaaaaaacttgattagggtgatggttcacgtagtgggcccatagnnctgatatacggtttttcgccctttgangttggaan

SEQ ID NO: 2394 - DNA, 204 bp, Homo sapiens
  misc_feature (42)..(42): n equals a,t,g, or c
  misc_feature (70)..(70): n equals a,t,g, or c
  misc_feature (128)..(128): n equals a,t,g, or c
  misc_feature (154)..(154): n equals a,t,g, or c
  misc_feature (167)..(167): n equals a,t,g, or c
  misc_feature (170)..(170): n equals a,t,g, or c
  misc_feature (198)..(198): n equals a,t,g, or c
gcccacgcgtccggtattatattaaaatactaaaaatcctanaaaaaaaaaaaaaaaaaagggcggccgntctagaggatccaagcttacgtacgcgtgcatgcgacgtcatagctcttctatagtgncacctaaattcaattcactggccgtngttttacaacgtngtnactgggaaaaccctggcgttacccaacntaatcg

SEQ ID NO: 2395 - DNA, 544 bp, Homo sapiens
  misc_feature (1)..(1): n equals a,t,g, or c
  misc_feature (505)..(505): n equals a,t,g, or c
  misc_feature (511)..(511): n equals a,t,g, or c
  misc_feature (519)..(519): n equals a,t,g, or c
  misc_feature (523)..(523): n equals a,t,g, or c
  misc_feature (533)..(533): n equals a,t,g, or c
nggaaactcatataaaatgagctttcctaaattaaatctattttaaataaaggttattactattaaaaaaaaaatcagagaaaatcctctgtagaaaaaatacacaaagaacatttctacagaggattttctctgattttattttctttgtttctgactctaataattagttggaaactcatataaaatgagctttcctaaattaaatctattttaaataaaggttattactattaaaaaaaaaaaaaaaaagggcggccgctctagaggatccaagcttacgtacgcgtgcatgcgacgtcatagctcttctatagtgtcacctaaattcaattcactggccgtcgttttacaacgtcgtgactgggaaaaccctggcgttacccaacttaatcgccttgcagcacatccccctttcgccagctggccgtaatagcgaagaggcccgcaccgatcgcccttcccaacagttgcgcagcctgaatggcgaatgggacgcgccctntaaccngcgcattnaacnccgcggggtngttgtgggtta

SEQ ID NO: 2396 - DNA, 212 bp, Homo sapiens
  misc_feature (5)..(6): n equals a,t,g, or c
  misc_feature (17)..(17): n equals a,t,g, or c
  misc_feature (24)..(24): n equals a,t,g, or c
  misc_feature (26)..(26): n equals a,t,g, or c
  misc_feature (202)..(203): n equals a,t,g, or c
  misc_feature (206)..(208): n equals a,t,g, or c
gtganntagacctcttntgccagncngactatagggaaagctggtacgcctgcaggtaccggtccggaattcccgggtcgacccacgcgtccgcccagctgctccgctcagagccttttcctctccacttcctgttcacacaggggggggcgggaagtggagggaggaagttggggggaggcgtgtaggggggacccattgnntgnnnggaa

SEQ ID NO: 2397 - DNA, 145 bp, Homo sapiens
  misc_feature (6)..(6): n equals a,t,g, or c
  misc_feature (8)..(8): n equals a,t,g, or c
  misc_feature (79)..(79): n equals a,t,g, or c
  misc_feature (87)..(87): n equals a,t,g, or c
  misc_feature (95)..(95): n equals a,t,g, or c
  misc_feature (143)..(143): n equals a,t,g, or c
  misc_feature (145)..(145): n equals a,t,g, or c
gacaantnctagatcgcgagcggccgctctataggatccaagcttacgtacgcgtgcatgcgacgtcataactcttctnttgtgtcncctaaatncaattcactggccgtcgttttacaacgtcgtgactgggaaaacccaangn

SEQ ID NO: 2398 - DNA, 137 bp, Homo sapiens
  misc_feature (7)..(7): n equals a,t,g, or c
  misc_feature (10)..(10): n equals a,t,g, or c
  misc_feature (23)..(23): n equals a,t,g, or c
  misc_feature (31)..(31): n equals a,t,g, or c
  misc_feature (33)..(33): n equals a,t,g, or c
  misc_feature (104)..(104): n equals a,t,g, or c
  misc_feature (106)..(106): n equals a,t,g, or c
  misc_feature (114)..(115): n equals a,t,g, or c
  misc_feature (125)..(125): n equals a,t,g, or c
taggatncanacttacattcccnttcatgcnanatcataactcttctatagtgtcacctaaattcaattcactggccgtcgttttacaacgtcctgactggganancaaaaacnnaagaaattgnaaggtccggcgg

SEQ ID NO: 2399 - DNA, 162 bp, Homo sapiens
  misc_feature (15)..(15): n equals a,t,g, or c
  misc_feature (25)..(25): n equals a,t,g, or c
  misc_feature (96)..(96): n equals a,t,g, or c
  misc_feature (116)..(116): n equals a,t,g, or c
  misc_feature (147)..(147): n equals a,t,g, or c
  misc_feature (160)..(161): n equals a,t,g, or c
gactagttctaggancgcgagcggncgctctagaggatccaagcttacgtacgcgtgcatgcgacgtcatagctcttctatagtgtcacctaaatncaattcactggccgtcgttntacaacgtcgtgactgggaaaacccaagggngagctgtggatcnna

SEQ ID NO: 2400 - DNA, 155 bp, Homo sapiens
  misc_feature (146)..(146): n equals a,t,g, or c
  misc_feature (150)..(150): n equals a,t,g, or c
  misc_feature (152)..(154): n equals a,t,g, or c
gactagttctagtatcgcgagcggccgctctagaagatccaagcttacgtacgcgtgcatgcgacgtcatagctcttctatagtgtcacctaaattcaattcactggccgtcgttttacaacgtcgtgactgggaaccccaaaagngggntnnnt

SEQ ID NO: 2401 - DNA, 161 bp, Homo sapiens
  misc_feature (44)..(44): n equals a,t,g, or c
  misc_feature (101)..(101): n equals a,t,g, or c
  misc_feature (103)..(103): n equals a,t,g, or c
  misc_feature (105)..(105): n equals a,t,g, or c
  misc_feature (126)..(126): n equals a,t,g, or c
  misc_feature (144)..(144): n equals a,t,g, or c
aagcttacggtacgcgtgcatgcgacgtcatagctcttctatantgtcacctaaattcaattcactggccgtcgttttacaacgtcgtgactgggaaaacntntnaaagagttgtaaaagaggccntgaattgaatttagtganatatagaagactatgat

SEQ ID NO: 2402 - DNA, 480 bp, Homo sapiens
  misc_feature (298)..(298): n equals a,t,g, or c
  misc_feature (353)..(353): n equals a,t,g, or c
  misc_feature (393)..(393): n equals a,t,g, or c
  misc_feature (395)..(395): n equals a,t,g, or c
  misc_feature (414)..(414): n equals a,t,g, or c
  misc_feature (429)..(429): n equals a,t,g, or c
  misc_feature (440)..(440): n equals a,t,g, or c
ggagaataaaagaaattcctatttgaaatgaattcctcatttggaggaaaaaaagcatgcattctagcacaacaagatgaaattatggaatacaaaagtggctccttcccatgtgcagtccctgtccccccccgccagtcctccacacccaaactgtttctgattggcttttagctttttgttgttttttttttccttctaacacttgtatttggaggctcttctgtgattttgagaagtatactcttgagtgtttaataaagtttttttccaaaaaaaaaaaaaaagggcgggccgntctagaggatccaagcttacgtacgccgtgcatgcgacgtataactctttatagnggcacctaaattcaattcactgggcccgtcgtttacacgncntgactgggaaaaccctggngttacccaacttaancgccttggagnaaatcccccttttgccaattggggtataaccaaaaaggcc

SEQ ID NO: 2403 - DNA, 105 bp, Homo sapiens
  misc_feature (30)..(30): n equals a,t,g, or c
  misc_feature (36)..(36): n equals a,t,g, or c
  misc_feature (45)..(45): n equals a,t,g, or c
  misc_feature (48)..(48): n equals a,t,g, or c
  misc_feature (71)..(71): n equals a,t,g, or c
atatagtgtcacctaaattcaattcactgnccgcgntttacaacntantgactgggaaaaccctggcgttncccaacttaatcgccttgcagcacatcccccttt

SEQ ID NO: 2404 - DNA, 476 bp, Homo sapiens
  misc_feature (8)..(8): n equals a,t,g, or c
  misc_feature (17)..(17): n equals a,t,g, or c
  misc_feature (19)..(19): n equals a,t,g, or c
  misc_feature (25)..(25): n equals a,t,g, or c
  misc_feature (34)..(34): n equals a,t,g, or c
  misc_feature (48)..(48): n equals a,t,g, or c
  misc_feature (88)..(88): n equals a,t,g, or c
  misc_feature (94)..(94): n equals a,t,g, or c
  misc_feature (101)..(101): n equals a,t,g, or c
  misc_feature (131)..(131): n equals a,t,g, or c
  misc_feature (150)..(150): n equals a,t,g, or c
  misc_feature (157)..(157): n equals a,t,g, or c
  misc_feature (167)..(167): n equals a,t,g, or c
  misc_feature (211)..(211): n equals a,t,g, or c
  misc_feature (234)..(234): n equals a,t,g, or c
  misc_feature (244)..(244): n equals a,t,g, or c
  misc_feature (257)..(257): n equals a,t,g, or c
  misc_feature (304)..(304): n equals a,t,g, or c
  misc_feature (312)..(312): n equals a,t,g, or c
  misc_feature (330)..(330): n equals a,t,g, or c
  misc_feature (334)..(334): n equals a,t,g, or c
  misc_feature (355)..(355): n equals a,t,g, or c
  misc_feature (406)..(406): n equals a,t,g, or c
  misc_feature (408)..(408): n equals a,t,g, or c
  misc_feature (410)..(410): n equals a,t,g, or c
  misc_feature (418)..(418): n equals a,t,g, or c
  misc_feature (436)..(436): n equals a,t,g, or c
gccgcggntgggccttnanccccgngcgccgcanacccgtcgaggacncgcacctgccgcggctggtgagccgcacgccaggcaccgnacccanatacgancactcgtacctgggcagcgcgcgggagcgncaggcgcggtccgagggcnccagccncggtggcagnctggagacgccatccaagcggagcgcgcagatcggcccgcgcancgcctcctactacgcttggtcgncgcccggcanctacaaggccggntcgtcgcaggacgaccaggaggacgcgtgcgacgacgcgctgtcgcnctacagcnagctggagctgacccgcngtcngtcctatcgtggccgctctanaggatccaagcttacgtacgcgtgcatgcgacgtcatagctcttctatagngncncctaaatncaattcactggccgtcgntttacaacgtcgtgactgggaaaaccctggggttacccaa

SEQ ID NO: 2405 - DNA, 485 bp, Homo sapiens
  misc_feature (3)..(3): n equals a,t,g, or c
  misc_feature (125)..(125): n equals a,t,g, or c
  misc_feature (274)..(274): n equals a,t,g, or c
  misc_feature (276)..(276): n equals a,t,g, or c
  misc_feature (334)..(334): n equals a,t,g, or c
  misc_feature (358)..(358): n equals a,t,g, or c
  misc_feature (374)..(374): n equals a,t,g, or c
  misc_feature (376)..(377): n equals a,t,g, or c
  misc_feature (428)..(428): n equals a,t,g, or c
  misc_feature (435)..(436): n equals a,t,g, or c
  misc_feature (470)..(470): n equals a,t,g, or c
  misc_feature (483)..(483): n equals a,t,g, or c
gcngtcattgagttactagcatttatctcattggaactttgacgccaacaaagccacccagctgagatctgttaactcattataggtttaatttgttgtttcctagttttgtacaagcagaatantaacattttaagtcacttaatgaacagttcaacttaaaagacaaattcagtcattgagttactagcatttaaaaaaaacttttatactataaacccatgttagtataaagtgtaaatgtaacaataaaatccagcaaagtaaaaaaaananaaaagggcggccgctctagaggatccaagcttacgtacgcgtgcatgcgacgtcatanctcttctatagtgtcacctaaatncaattcactggccggngnntttacaaccgtcgtgactgggaaaaaccctggcgttacccaacttaatcgnctttgcnngcacatccccccttttcggcagctggcgtaaatngcgaaagaaggcncg

SEQ ID NO: 2406 - DNA, 234 bp, Homo sapiens
  misc_feature (9)..(9): n equals a,t,g, or c
  misc_feature (12)..(12): n equals a,t,g, or c
  misc_feature (26)..(26): n equals a,t,g, or c
  misc_feature (56)..(56): n equals a,t,g, or c
  misc_feature (66)..(66): n equals a,t,g, or c
  misc_feature (107)..(107): n equals a,t,g, or c
  misc_feature (126)..(126): n equals a,t,g, or c
  misc_feature (173)..(173): n equals a,t,g, or c
  misc_feature (182)..(182): n equals a,t,g, or c
  misc_feature (191)..(191): n equals a,t,g, or c
  misc_feature (205)..(205): n equals a,t,g, or c
  misc_feature (222)..(222): n equals a,t,g, or c
ccaacagtngcncagcctgaatggcnaatggcacgcgccctgtagcggcgcattangcgcggcggntgtggtggatacgcgcagcgtgaccgctacacttgccagcnccctacgcccgctcctttngctttacttcccttcctttctcgccacgttcagccggctttccccgncaaagcttntaaatcggngggcttccctttanggggtcccgattttagnggccttttacgg

SEQ ID NO: 2407 - DNA, 334 bp, Homo sapiens
  misc_feature (3)..(3): n equals a,t,g, or c
  misc_feature (10)..(10): n equals a,t,g, or c
  misc_feature (12)..(12): n equals a,t,g, or c
  misc_feature (42)..(43): n equals a,t,g, or c
  misc_feature (112)..(112): n equals a,t,g, or c
  misc_feature (176)..(176): n equals a,t,g, or c
  misc_feature (194)..(194): n equals a,t,g, or c
  misc_feature (286)..(286): n equals a,t,g, or c
  misc_feature (312)..(312): n equals a,t,g, or c
  misc_feature (315)..(315): n equals a,t,g, or c
  misc_feature (319)..(319): n equals a,t,g, or c
  misc_feature (330)..(330): n equals a,t,g, or c
ttngtccgtntntcgcgagcggccgctctagaggatccaagnntacagtactcgtgcatgctgacgtcatagctcttctatagtgtcacctaaattcaattcactggccgtngttttacaacgtcgtgactgggaaaaccctggcgttacccaacttaatcgccttgcagcacatncccctttcgccagctggngtaatagcgaagaggcccgcaccgatcgcacttcccaacagttgcgcagcctgaatggcgaatgggacgcgccctgtagcggcgcattaagngcggcgggtgtggtggttacgcgcancgngacngctacacttgncagt

SEQ ID NO: 2408 - DNA, 306 bp, Homo sapiens
  misc_feature (21)..(21): n equals a,t,g, or c
  misc_feature (23)..(24): n equals a,t,g, or c
  misc_feature (30)..(30): n equals a,t,g, or c
  misc_feature (33)..(33): n equals a,t,g, or c
  misc_feature (246)..(246): n equals a,t,g, or c
  misc_feature (254)..(254): n equals a,t,g, or c
  misc_feature (276)..(276): n equals a,t,g, or c
  misc_feature (279)..(279): n equals a,t,g, or c
  misc_feature (302)..(302): n equals a,t,g, or c
cgtgcatgcgacgtcatagcngnnctatantgncacctaaattcaattcactggccgtcgttttacaacgtcgtgactgggaaaaccctggcgttacccaacttaatcgccttgcagcacatccccctttcgccagctggcgtaatagcgaagaggcccgcaccgatcgcccttcccaacagttgcgcagctgaatggcgaatgggacgcgccctgtagcggcgcaataagcgcggcgggtgtggnggtacccncaacgtgaccgtacacttggcnagngccctaacggcccggttcttttngctt

SEQ ID NO: 2409 - DNA, 502 bp, Homo sapiens
  misc_feature (19)..(19): n equals a,t,g, or c
  misc_feature (45)..(45): n equals a,t,g, or c
  misc_feature (125)..(125): n equals a,t,g, or c
  misc_feature (196)..(196): n equals a,t,g, or c
  misc_feature (417)..(417): n equals a,t,g, or c
  misc_feature (446)..(446): n equals a,t,g, or c
  misc_feature (461)..(461): n equals a,t,g, or c
  misc_feature (486)..(486): n equals a,t,g, or c
  misc_feature (488)..(488): n equals a,t,g, or c
gacgttacttccagattanccaggacgaagaagaggaggaagacnaggattaaatttcatttatctggaaaattttgtatgagttcttgaataaaacttgggaaccaaaaaaaaaaaaaaaaaanaaagggcggccgctctagaggatccaagcttacgtacgcgtgcatgcgacgtcatagctcttctatagtgncacctaaattcaattcactggccgtcgttttacaacgtcgtgactgggaaaaccctggcgttacccaacttaatcgccttgcagcacatccccctttcgccagctggcgtaatagcgaagaggcccgcaccgatcgcccttcccaacagttgcgcagcctgaatggcgaatgggacgcgccctgtagcggcgcattaagcgcggcgggtgtggtggttacnccgcagcgtgacccgctacacttgccagngccctaccgccccgntccttcgctttcttcccttcctttntngccacgttcgcccg

SEQ ID NO: 2410 - DNA, 327 bp, Homo sapiens
  misc_feature (1)..(1): n equals a,t,g, or c
  misc_feature (4)..(4): n equals a,t,g, or c
  misc_feature (13)..(13): n equals a,t,g, or c
  misc_feature (15)..(16): n equals a,t,g, or c
  misc_feature (132)..(132): n equals a,t,g, or c
  misc_feature (184)..(184): n equals a,t,g, or c
  misc_feature (204)..(204): n equals a,t,g, or c
  misc_feature (280)..(280): n equals a,t,g, or c
nganttacaacgncnngactgagaaaaccctggcggtacccaacttaatcgccttgcagcacatccccctttcgccagctggcgtaatagcgaagaggcccgcaccgatcgcccttcccaacagttgcgcancctgaatggcgaatgggacgcgccctgtagcggcgcattaagcgcggcgggngtggtgggtacgcgcagcgngaccgctacacttgcagcgcctagcgccgctctttcgcttcttccttctttctcgcacgtcggcggttttcccgtnagctctaacggggctccttaaggttcgattaaggcttacggacctcg

SEQ ID NO: 2411 - DNA, 344 bp, Homo sapiens
  misc_feature (18)..(18): n equals a,t,g, or c
  misc_feature (38)..(38): n equals a,t,g, or c
  misc_feature (47)..(47): n equals a,t,g, or c
  misc_feature (57)..(57): n equals a,t,g, or c
  misc_feature (105)..(105): n equals a,t,g, or c
  misc_feature (141)..(141): n equals a,t,g, or c
  misc_feature (156)..(156): n equals a,t,g, or c
  misc_feature (160)..(160): n equals a,t,g, or c
  misc_feature (166)..(166): n equals a,t,g, or c
  misc_feature (185)..(185): n equals a,t,g, or c
  misc_feature (187)..(187): n equals a,t,g, or c
  misc_feature (196)..(196): n equals a,t,g, or c
  misc_feature (199)..(199): n equals a,t,g, or c
  misc_feature (203)..(203): n equals a,t,g, or c
  misc_feature (205)..(207): n equals a,t,g, or c
  misc_feature (210)..(210): n equals a,t,g, or c
  misc_feature (223)..(223): n equals a,t,g, or c
  misc_feature (227)..(227): n equals a,t,g, or c
  misc_feature (229)..(229): n equals a,t,g, or c
  misc_feature (233)..(233): n equals a,t,g, or c
  misc_feature (296)..(296): n equals a,t,g, or c
  misc_feature (315)..(315): n equals a,t,g, or c
  misc_feature (319)..(319): n equals a,t,g, or c
  misc_feature (322)..(322): n equals a,t,g, or c
  misc_feature (328)..(328): n equals a,t,g, or c
gtttgatagatagatccnaacgttatctgccactcaanatcattctnaaaactctgnatgccatggttttcaatacgttcaatgttctacactggcaaagaattnatgaccagtctctcccatatcacaacatcacttatncctgatttcacctanaaangactcnattctttgtctcatgtctntncaccacatnatntccntnnngtnatccaatatgccncatnangacnaattccttcctgtcacaatttgatacccctccggcatactctatcttggggaaaacgtcaganacaatcctgactccgtctnaccntanaccacnctcttggactcttttg

SEQ ID NO: 2412 - DNA, 444 bp, Homo sapiens
  misc_feature (107)..(107): n equals a,t,g, or c
  misc_feature (147)..(147): n equals a,t,g, or c
  misc_feature (245)..(245): n equals a,t,g, or c
  misc_feature (249)..(249): n equals a,t,g, or c
  misc_feature (276)..(277): n equals a,t,g, or c
  misc_feature (282)..(282): n equals a,t,g, or c
  misc_feature (359)..(359): n equals a,t,g, or c
  misc_feature (380)..(380): n equals a,t,g, or c
  misc_feature (419)..(419): n equals a,t,g, or c
  misc_feature (433)..(433): n equals a,t,g, or c
  misc_feature (435)..(435): n equals a,t,g, or c
gacacccccttactgccccaagatacagtcgcccccgtattcgtcccaagggacaacctccgacgcgtctctttggacgccaccccaaggctgtccctggacgcagncgtccccagagccccggaacccaccagtgccctggacggnggtcccagcaactttggagctggccgcagtgtaccagggtctctctgtgtctccagagccctgtctgtcgctgggagctccatctctcctgccccacncatnatgccagagactgcagcctcagacccnngggangtgctggagccacagtgcagaggtggtgcccaactcagaggaccagggaccgggcgccgccttccagctcagtgaancaagccctacccagagctcangcctgcagttcagtggctgtcctgaactttggcaagaanatctggagggggcncnactgggcat

SEQ ID NO: 2413 - DNA, 522 bp, Homo sapiens
  misc_feature (30)..(30): n equals a,t,g, or c
  misc_feature (37)..(37): n equals a,t,g, or c
  misc_feature (472)..(472): n equals a,t,g, or c
  misc_feature (476)..(476): n equals a,t,g, or c
  misc_feature (501)..(501): n equals a,t,g, or c
  misc_feature (509)..(509): n equals a,t,g, or c
  misc_feature (516)..(516): n equals a,t,g, or c
ttttggctggctggccccaaggaagagganatggatntggacatacctgctgtgaaagtgaaagaggagccacgagatgaggaggaagaggccaagatgaaggctcctcccaaagcagccaggaagactccaggcctcccgaaggatgtatctgtggcagagctgctgagggagctgagcctcaccaaggaagaggaactgctgtttctgcagctgccagacaccctccctggccagccacccacccaggacatcaagcctatcaagacagaggtgcagggcgaggacggacaggtggtgctcatcaagcaggagaaagaccgagaagccaaattggcagagaatgcttgtaccctggctgacctgacagagggtcaggttggcaagctactcatccgcaagtctggaagggtgcaactccttttgggcaaggtgactctggacgttgaccatgggaactgcctgctccttnctgnaggagctggtgtccgtgggccttgnagacagtntgacatntgagat

SEQ ID NO: 2414 - DNA, 168 bp, Homo sapiens
  misc_feature (140)..(140): n equals a,t,g, or c
  misc_feature (161)..(161): n equals a,t,g, or c
  misc_feature (163)..(163): n equals a,t,g, or c
  misc_feature (166)..(166): n equals a,t,g, or c
  misc_feature (168)..(168): n equals a,t,g, or c
ggatcgctgcagcgagggtctggcggctaaaccgtggtttgagccaggctgccctcctgctgctgcggcagcctggggctcggggactggctagatctgtgagtacctgggccccaggcggttttcccaaaggggattanggatgtaaaggctatcttcanantgngn

SEQ ID NO: 2415 - DNA, 574 bp, Homo sapiens
  misc_feature (450)..(450): n equals a,t,g, or c
  misc_feature (463)..(463): n equals a,t,g, or c
  misc_feature (467)..(467): n equals a,t,g, or c
  misc_feature (504)..(504): n equals a,t,g, or c
  misc_feature (513)..(513): n equals a,t,g, or c
  misc_feature (516)..(516): n equals a,t,g, or c
  misc_feature (521)..(521): n equals a,t,g, or c
  misc_feature (568)..(568): n equals a,t,g, or c
gggcctgcagagcaacatgcccaagttttattgtgactactgcgatacatacctcacccatgactctccatctgtgagaaagacacactgcagtggaaggaaacacaaagagaatgtgaaagactattacctcctactccattctctgctcctcctcctgcaggggcgatgataccacctccccccagccttccgggtcctcctcgccctggtatgatgccagcaccccatatggggggccctcccatgatgccaatgatgggccctcctcctcctgggatgatgccagtgggacctgctcctggaatgaggccgccatgggaggccatatgccaatgatgcctgggcccccaatgatgagacctcctgcccgtcccatgatggtgcccactcggccggaatgactcgaccagacagataaggatagaggggaggccttattggatcggnttatattacctgnctgnttaccaggagatcatgctgctgggatactgagttttntaaacagcntanggaanacttggtccccttgtcctatgaaaagagaatagttttggaggggaanaaatgg

SEQ ID NO: 2416 - DNA, 483 bp, Homo sapiens
  misc_feature (451)..(451): n equals a,t,g, or c
  misc_feature (457)..(457): n equals a,t,g, or c
  misc_feature (469)..(469): n equals a,t,g, or c
  misc_feature (483)..(483): n equals a,t,g, or c
ggctcccaggggcgttgggaacggttgtaggacgtggctctttattcgtgagttttccatttacctccgctgaacctagagcttcagacgccctatggcgtccgcctcgacccaaccggcggccttgagcgctgagcaagcaaaggtggtcctcgcggaggtgatccaggcgttctccgccccggagaatgcagtgcgcatggacgaggctcgggataacgcctgcaacgacatgggtgtccttaagtttgctcgcttggtcaagtcctacgaagcccaggatcctgagatcgccagcctgtcaggcaagctgaaggcgctgtttctgccgcccatgaccctgccaccccatgggcctgctgctggtggcagcgtggccgcctcctgagagttggccctcccttgtgccactgccaggggaggaaaggccttgatgttccagacaataatnaatgcncctgtgacttanaaaaaaaaaaaaan

SEQ ID NO: 2417 - DNA, 503 bp, Homo sapiens
  misc_feature (289)..(289): n equals a,t,g, or c
  misc_feature (325)..(325): n equals a,t,g, or c
  misc_feature (340)..(340): n equals a,t,g, or c
  misc_feature (365)..(365): n equals a,t,g, or c
  misc_feature (454)..(454): n equals a,t,g, or c
  misc_feature (487)..(488): n equals a,t,g, or c
  misc_feature (497)..(497): n equals a,t,g, or c
  misc_feature (501)..(501): n equals a,t,g, or c
cccacgcgtccgggcagacatcaatacaaaatgggcagccacacgatgggccaagaagattgaagccagagaaaggaaagccaagatgacagattttgatcgttttaaagttatgaaggcaaagaaaatgaggaacagaataatcaagaatgaagttaagaagcttcaaaaggcagctctcctgaaagcttctcccaaaaaagcacctggtactaagggtactgctgctgctgctgctgctgctgctgctgctgctgctaaagttccagcaaaaaagatcaccgccgcnaattaaaaagctcccacccaaaaggttcctgcccanaaagccacaggccanaaagcacgcctgctccaaaactcanaaaggtcaaaaactccacccagaaacactctccaaagctctggcaaaaaacatattgcatcataaaattataagtcttttgactgttanaatgtaaaaaaaaaaaggggcctctaaagacanntcttccttntcantc

SEQ ID NO: 2418 - DNA, 632 bp, Homo sapiens
  misc_feature (7)..(7): n equals a,t,g, or c
  misc_feature (24)..(24): n equals a,t,g, or c
  misc_feature (40)..(40): n equals a,t,g, or c
  misc_feature (337)..(337): n equals a,t,g, or c
  misc_feature (340)..(340): n equals a,t,g, or c
  misc_feature (348)..(348): n equals a,t,g, or c
  misc_feature (355)..(355): n equals a,t,g, or c
  misc_feature (359)..(359): n equals a,t,g, or c
  misc_feature (365)..(366): n equals a,t,g, or c
  misc_feature (369)..(369): n equals a,t,g, or c
  misc_feature (380)..(380): n equals a,t,g, or c
  misc_feature (463)..(463): n equals a,t,g, or c
  misc_feature (519)..(519): n equals a,t,g, or c
  misc_feature (577)..(577): n equals a,t,g, or c
  misc_feature (584)..(584): n equals a,t,g, or c
  misc_feature (593)..(593): n equals a,t,g, or c
  misc_feature (595)..(595): n equals a,t,g, or c
  misc_feature (621)..(621): n equals a,t,g, or c
aacgccncaataagctcgcttggngccccaggtaccggtncggaattcccgggtcgacccacgcgtccgctcatggaaaaggagttccctggatttttggaaaatcaaaaagaccctctggctgtggacaaaataatgaaggacctggaccagtgtagagatggcaaagtgggcttccagagcttcttttccctaattgcgggcctcaccattgcatgcaatgactattttgtagtacacatgaagcagaagggaaagaagtaggcagaaatgagcagttcgctcctccctgataagagttgtcccaaagggtcgcttaaggaatctgccccacagnttnccccatanaaagganttanggaccnnaancaggacacttnagcaaatgtaaaaataaaatctaactctcatttgacaagcagagaaagaaaagttaaataccagataagcttttgatttttgnattggttgcatccccttgccctcaataaataaagttcttttttagttccaaaaaanaaaaaaaagggcggccgctctaaaggatccaagcttacgtacgcgtgcatgcgacgtnatagctnttctatagngncacctaaattcaattcactggccggnggtttacaacg

SEQ ID NO: 2419 - DNA, 320 bp, Homo sapiens
  misc_feature (1)..(1): n equals a,t,g, or c
  misc_feature (12)..(13): n equals a,t,g, or c
  misc_feature (74)..(74): n equals a,t,g, or c
  misc_feature (84)..(84): n equals a,t,g, or c
  misc_feature (105)..(105): n equals a,t,g, or c
  misc_feature (135)..(135): n equals a,t,g, or c
  misc_feature (137)..(137): n equals a,t,g, or c
  misc_feature (139)..(139): n equals a,t,g, or c
  misc_feature (196)..(196): n equals a,t,g, or c
  misc_feature (213)..(213): n equals a,t,g, or c
  misc_feature (289)..(289): n equals a,t,g, or c
  misc_feature (294)..(294): n equals a,t,g, or c
  misc_feature (306)..(306): n equals a,t,g, or c
  misc_feature (308)..(308): n equals a,t,g, or c
  misc_feature (319)..(319): n equals a,t,g, or c
ncactatagggnnaggtggaacgcccgcaggtaccggtccggaattcccgggtcgacccacgctttcgagcgcntttcccctgntgacatcgacactcatacagngaaagtatgacccttccctgaagcccctgncngnttcctatgatcaagcaacttccctgaggatcctcaacaatggtcatgctttcaacgnggagttggatgactctnaggacaaagcagtgctcaagggaggacccctggatggcactaacagatggattaagcttcactttaactggggttnacttnatggacaaaggntnaaaacatactng

SEQ ID NO: 2420 - DNA, 333 bp, Homo sapiens
  misc_feature (39)..(39): n equals a,t,g, or c
  misc_feature (76)..(76): n equals a,t,g, or c
  misc_feature (82)..(82): n equals a,t,g, or c
  misc_feature (112)..(112): n equals a,t,g, or c
  misc_feature (171)..(171): n equals a,t,g, or c
  misc_feature (177)..(177): n equals a,t,g, or c
  misc_feature (247)..(247): n equals a,t,g, or c
  misc_feature (256)..(256): n equals a,t,g, or c
  misc_feature (258)..(258): n equals a,t,g, or c
  misc_feature (290)..(290): n equals a,t,g, or c
  misc_feature (308)..(308): n equals a,t,g, or c
gagctcccgcctggcctttccaaaggccacagaggaggnaaaagcatctaagcctcaccatgaatggcccagtggnacccantttgcccggacaggggaccccaatagcaangctctgcctccttggccccaattcaaccaggcggaaacaatttctggaaatcaacccantgccangggccggacaaaatttcagggaggcctggatgctattctggtcaaaaaccctccccaacaaaatacaacntggccccananccaaaaaaaccggaagggccctggagggactnctgaaggcaggcctaaanctttcttggggttggggcaaaccaa

SEQ ID NO: 2421 - DNA, 652 bp, Homo sapiens
  misc_feature (607)..(607): n equals a,t,g, or c
gggcttcaacgacgagctggaagccttcaaggagcgtgtgcggggccgtgccaagctgcgcatcgagaaggccatgaaggagtacgaggaggaggagcgcaagaagcggctcggccccggcggcctggaccccgtcgaggtctacgaatccctccctgaggaactccagaagtgcttcgatgtgaaggacgtgcagatgctgcaggacgccatcagcaagatggaccccaccgacgcaaagtaccacatgcagcgctgcattgactctggcctctgggtccccaactctaaggccaagcgaaggccaaggagggagaggaggcaggtcctggggacccattactggaagctgttcccaagacgggcgatgagaaggatgtcaagtgtgtgacctgccccagctaccaccgtcacctgcttccaggcccctatgtgccccttttcagaaaacagatagatgccatctcgcccgctcctgacttctctacttgcgctgctcggcccagcctggggggcccgccagcctcctggcttttcactgtttcactctcagcgccattaagtctctgctttagtcaaggggcttcactgctgaagccccatacantatgcaaggccgggtccgggaggcagagtaccagctgtctacagt

SEQ ID NO: 2422 - DNA, 532 bp, Homo sapiens
  misc_feature (489)..(489): n equals a,t,g, or c
aggctttatcatcgacgatagcgtactttatagcggtgccagcctgaacgatgtttacctgcatcagcacgataaatatcgctacgaccgttatcatctgatccgtaaccgtaagatgtcagacattatgtttgaatgggttacacagaatattatgaatggccgcggcgttaatcgtctggatgatgttaatcggccaaaaagcccggaaatcaagaacgatattcgtctgttccgccaggagctgcgtgatgccgcttatcatttccagggcgatgccgacaacgatcagctttctgtaacgccgctagtggggctggggaaatcgagtctgttgaacaagaccattttccatcttatgccttgtgccgagcagaaactaaccatctgtacgccatacttcaacctgccagcaatccttgtgcgcaatattatccagttgctgcgcgaagggaaaaaggtcgaaattattgttggtgataaaaccgngaatgacttctacattccggaagatgaacctttcaagataatt

SEQ ID NO: 2423 - DNA, 444 bp, Homo sapiens
  misc_feature (14)..(14): n equals a,t,g, or c
  misc_feature (22)..(22): n equals a,t,g, or c
  misc_feature (33)..(33): n equals a,t,g, or c
  misc_feature (288)..(288): n equals a,t,g, or c
  misc_feature (359)..(359): n equals a,t,g, or c
  misc_feature (381)..(381): n equals a,t,g, or c
  misc_feature (405)..(405): n equals a,t,g, or c
  misc_feature (420)..(420): n equals a,t,g, or c
  misc_feature (439)..(439): n equals a,t,g, or c
ggcacgagctcgtncgtttggnagggggttgtnccctccttcgatgcattccagccttggactcattgactccagctaatgaagatcaaaaaattggtatagaaattattaaaagaacactcaaaattccagcaatgaccattgctaagaatgcaggtgttgaaggatctttgatagttgagaaaattatgcaaagttcctcagaagttggttatgatgctatggctggagattttgtgaaatatggtggaaaaagggaatcattgacccaacaaaggttgtgaaganctgctttatttgggtgctgctggtgtgggcccctctgtttaacctacagcagaagtttgtaggtccccagnaattcccaaagaaggagaaggncccctggaatgggtgcaatgggtnggaattgggaggttngtatttgggaggtggcatnttcct

SEQ ID NO: 2424 - DNA, 318 bp, Homo sapiens
  misc_feature (2)..(2): n equals a,t,g, or c
  misc_feature (8)..(8): n equals a,t,g, or c
  misc_feature (32)..(32): n equals a,t,g, or c
  misc_feature (38)..(38): n equals a,t,g, or c
  misc_feature (90)..(90): n equals a,t,g, or c
  misc_feature (136)..(136): n equals a,t,g, or c
  misc_feature (173)..(174): n equals a,t,g, or c
  misc_feature (214)..(214): n equals a,t,g, or c
  misc_feature (245)..(245): n equals a,t,g, or c
  misc_feature (254)..(254): n equals a,t,g, or c
  misc_feature (273)..(273): n equals a,t,g, or c
  misc_feature (315)..(315): n equals a,t,g, or c
  misc_feature (318)..(318): n equals a,t,g, or c
tnggcgtnacttttccggtgccacagtcctangactcnctcctcagagccgtgggaccgtgccctcagcagcttggcacccagactacanctgaacgtgaatcacaagccagcaacaccaaggtgacaagagattngcccaaatcttgtgacaaaactacacatgcccaccgnnccagacctgaactcctggggggaccgcagcttctcttccnccaaaacccaagacacgctatgatctcccgncccctgagncacatgcgtggtggtgacngtagccacgaagaccctgaggcaagtcaactggacgtggacngcn

SEQ ID NO: 2425 - DNA, 406 bp, Homo sapiens
  misc_feature (1)..(2): n equals a,t,g, or c
  misc_feature (80)..(80): n equals a,t,g, or c
  misc_feature (107)..(107): n equals a,t,g, or c
  misc_feature (134)..(134): n equals a,t,g, or c
  misc_feature (150)..(150): n equals a,t,g, or c
  misc_feature (263)..(263): n equals a,t,g, or c
  misc_feature (276)..(276): n equals a,t,g, or c
  misc_feature (326)..(326): n equals a,t,g, or c
  misc_feature (390)..(390): n equals a,t,g, or c
  misc_feature (400)..(400): n equals a,t,g, or c
  misc_feature (405)..(406): n equals a,t,g, or c
nncgccgggtttccccggggaaaaattttcccccggggggggttcccggaaccccccaaaccggccggttctccggggcncccggggggggaaaaagggggccttcnttaaggaaaaaaaaaggggggggcccngcccaatttgggccgnaatccccaaaaccccaattccggggccaaggccccggaatttccccgtgggttcttttgggaatccaaccgggggggtggggggaaaggggggaaaccccgtcgggccggtcnccttgccgtgggngggccccattggggggtggaagaaccacctccaagttactggagacctanagtccagaatgcttgtagtgagccaagtcagtgttctaagtatttatttaaaacaaaagaatcnccgttaaaanacatnn

SEQ ID NO: 2426 - DNA, 648 bp, Homo sapiens
  misc_feature (349)..(349): n equals a,t,g, or c
  misc_feature (367)..(367): n equals a,t,g, or c
  misc_feature (381)..(381): n equals a,t,g, or c
  misc_feature (422)..(422): n equals a,t,g, or c
  misc_feature (454)..(454): n equals a,t,g, or c
  misc_feature (456)..(456): n equals a,t,g, or c
  misc_feature (460)..(460): n equals a,t,g, or c
  misc_feature (465)..(465): n equals a,t,g, or c
  misc_feature (473)..(473): n equals a,t,g, or c
  misc_feature (581)..(581): n equals a,t,g, or c
  misc_feature (583)..(583): n equals a,t,g, or c
  misc_feature (586)..(586): n equals a,t,g, or c
  misc_feature (624)..(624): n equals a,t,g, or c
  misc_feature (647)..(647): n equals a,t,g, or c
ggagttcagctatgaactctccaaagtggaagggaaaacagggacccctgagaagcccctctcagaccttggcctcctatcctatcgaagctactggtcccagaccatcctggagatcctgatggggctgaagtcggagagcggggagaggccacagatcaccatcaatgagattagtgaaatcaccagcatcaagaaggaggatgtcatctccactctgcagtacctcaatctcatcaactactacaagggccagtacatcctcacactgtcagaggacatcgtggatggccatgagcgggccatgctcaagcggcttctgcggatccgacttcaagtgtctgccttnattcccagggactggaanaagaaggggggaantggtgaccagacactggccactggaattgcccaagacgggnagcagggacttgggggcttgaatagcccaatncnggcncccanttggaagnttcccacaaaagcaacttttaaggggaaaatggggcttgagggacaagttcaaaaaagggataggaccagggccttggcagggggccccactgggtggcccaacaccnangcnaagcttccgggcttaagaccaactttcaaaggtcaagntgggcccaaggcccaaggcttcnt

SEQ ID NO: 2427 - DNA, 481 bp, Homo sapiens
  misc_feature (316)..(316): n equals a,t,g, or c
  misc_feature (478)..(478): n equals a,t,g, or c
  misc_feature (480)..(481): n equals a,t,g, or c
ggctacactagagcagagtacgagtctgaggcggagggagtaatggcaggacaagcgtttagaaagtttcttccactctttgaccgagtattggttgaaaggagtgctgctgaaactgtaaccaaaggaggcattatgcttccagaaaaatctcaaggaaaagtattgcaagcaacagtagtcgctgttggatcgggttctaaaggaaagggtggagagattcaaccagttagcgtgaaagttggagataaagttcttctcccagaatatggaggcccaaagtagttctagatgacaaggattatttcctatttanagatggtgacattcttggaaagtacgtagactgaaataagtcactattgaaatggcatcaacatgatgctgcccattccactgaagttctgaaatctttcgtcatgtaaataatttccatatttctcttttataataaactaatgataactaatgaaaaaanann

SEQ ID NO: 2428 - DNA, 336 bp, Homo sapiens
  misc_feature (40)..(40): n equals a,t,g, or c
  misc_feature (335)..(335): n equals a,t,g, or c
ggttcggtatcgcccgtgccggtagcgccgctgccaccgntcaccatgggcccgggtcctcggctgctgctacctctcgtgctttgcgtggggctcggcgcacttgtgttttcttcgggggccgagggcttccgcaagcgaggcccctcggtgacggccaaggtcttctttgatgtgaggattggagacaaagatgttggcagaattgtgattggcctctttggaaaagttgtgcccaagacagtggaaaattttgttgctctagcaacaggagagaaaggatatggatataaaggaagcaagttttcatcgtgtcatcaaggatttcatgattnt

SEQ ID NO: 2429 - DNA, 410 bp, Homo sapiens
  misc_feature (86)..(86): n equals a,t,g, or c
  misc_feature (105)..(105): n equals a,t,g, or c
  misc_feature (112)..(112): n equals a,t,g, or c
  misc_feature (114)..(115): n equals a,t,g, or c
  misc_feature (117)..(117): n equals a,t,g, or c
  misc_feature (131)..(131): n equals a,t,g, or c
  misc_feature (139)..(139): n equals a,t,g, or c
  misc_feature (218)..(218): n equals a,t,g, or c
  misc_feature (234)..(234): n equals a,t,g, or c
  misc_feature (242)..(242): n equals a,t,g, or c
  misc_feature (246)..(246): n equals a,t,g, or c
  misc_feature (249)..(249): n equals a,t,g, or c
  misc_feature (264)..(264): n equals a,t,g, or c
  misc_feature (279)..(279): n equals a,t,g, or c
  misc_feature (293)..(293): n equals a,t,g, or c
  misc_feature (295)..(295): n equals a,t,g, or c
  misc_feature (318)..(318): n equals a,t,g, or c
  misc_feature (328)..(328): n equals a,t,g, or c
  misc_feature (330)..(330): n equals a,t,g, or c
  misc_feature (337)..(337): n equals a,t,g, or c
  misc_feature (401)..(401): n equals a,t,g, or c
  misc_feature (410)..(410): n equals a,t,g, or c
gatatcatatagtaaaacccagcccatgacccctaacaggggccctctcagccctcctaatgacctccggcctaaccatgtgattncacttccactccataacantcctcanannangcctactaaccaanacactaancatataccaatgatggcgcgatgtatcacgagaaagcacataccaaggccaccacacaccacctgtccaaaaaggcctncgatacgggataatcntatttatnaccncanaagtttttttcttcncaggatttttctganccttttaccactcnancctagcccctaccccccaattangaaggcactngnccccaanatgcatcaccccgctaaatcccctagaatcccactcctaaacacatccgtattactcgcatcangaatatcan

SEQ ID NO: 2430 - DNA, 536 bp, Homo sapiens
  misc_feature (80)..(80): n equals a,t,g, or c
  misc_feature (169)..(170): n equals a,t,g, or c
  misc_feature (254)..(254): n equals a,t,g, or c
  misc_feature (284)..(284): n equals a,t,g, or c
  misc_feature (341)..(341): n equals a,t,g, or c
  misc_feature (410)..(410): n equals a,t,g, or c
  misc_feature (418)..(418): n equals a,t,g, or c
  misc_feature (449)..(449): n equals a,t,g, or c
  misc_feature (453)..(453): n equals a,t,g, or c
  misc_feature (458)..(458): n equals a,t,g, or c
  misc_feature (461)..(461): n equals a,t,g, or c
  misc_feature (468)..(468): n equals a,t,g, or c
gcatgcctatcatatagtaaaacccagcccatgacccctaacaggagccctctcagccctcctaatgacctccggcctanccatgtgatttcacttccactccataacgctcctcatactaggcctactaaccaacacactaaccatataccaatgatggcgcgatgtnncacgagaaagcacataccaaggccaccacacaccacctgtccaaaaaggccttcgatacgggataatcctatttattacctcanaaatttttttcttcgcaggatttttctganccttttaccactccagcctagcccctaccccccaattaggaaggcactggcccccancaagcatcaccccgctgaatcccctaaaatccactcctaaacacatccgtatttatcacatcaagaatntcaatcanctgaactcaccataatctattagaaacaccnaaancaatnatnccagcanggttattacattttatggtctctatttacctcctaaaactcaaatattcaatctccttcacatttcca

SEQ ID NO: 2431 - DNA, 613 bp, Homo sapiens
  misc_feature (18)..(20): n equals a,t,g, or c
  misc_feature (54)..(54): n equals a,t,g, or c
  misc_feature (78)..(78): n equals a,t,g, or c
  misc_feature (101)..(101): n equals a,t,g, or c
  misc_feature (290)..(290): n equals a,t,g, or c
  misc_feature (371)..(371): n equals a,t,g, or c
  misc_feature (539)..(539): n equals a,t,g, or c
  misc_feature (581)..(581): n equals a,t,g, or c
caaaagggaacaaaaggnnnagctccaccgcggtggcggttgctctaaaactantggatcccccgggctgcaggaatncggcacgaaatttattacctcanaagtttttttcttcgcaggatttttctgagccttttaccactccagcctagcccctaccccccaattaggagggcactggcccccaacaggcatcaccccgctaaatcccctaaaagtcccactcctaaacacatccgtattactcgcatcaggagtatcaatcacctgagctcaccatagtctaatanaaaacaaccgaaaccaaataattcaagcactgcttattacaattttactgggtctctattttaccctcctacaagcctcanagtacttcgagtctcccttcaccatttccgacggcatctacggctcaacattttttgtagccacaggcttccacggacttcacgtcattattggctcaactttcctcactatctgcttcatccgccaactaatatttcactttacatccaaacatcactttggcttcnaaaccgccgcctgatactggcattttgtaaatgtggtttgantatttctgtatgtctccatctatggatgaagg

SEQ ID NO: 2432 - DNA, 391 bp, Homo sapiens
  misc_feature (315)..(315): n equals a,t,g, or c
  misc_feature (317)..(317): n equals a,t,g, or c
  misc_feature (339)..(339): n equals a,t,g, or c
  misc_feature (369)..(369): n equals a,t,g, or c
  misc_feature (387)..(387): n equals a,t,g, or c
gatgacccctaacaggagccctctcagccctcctaatgacctccggcctagccatgtgatttcacttccactccataacgctcctcatactaggcctactaaccaacacactaaccatataccaatgatggcgcgatgtaacacgagaaagcacataccaaggccaccacacaccacctgtccaaaaaggccttcgatacgggataatcctatttattacctcagaagtttttttcttcgcaggatttttctgagccttttaccactccagcctagcccctaccccccaattaggaaggcactggcccccaacangnatcaccccgcttaatcccctanaatttccacttcctaaacacatccgttttnatcgcatccgggattttncttc

SEQ ID NO: 2433 - DNA, 459 bp, Homo sapiens
  misc_feature (82)..(82): n equals a,t,g, or c
  misc_feature (127)..(127): n equals a,t,g, or c
  misc_feature (139)..(139): n equals a,t,g, or c
  misc_feature (223)..(223): n equals a,t,g, or c
  misc_feature (229)..(229): n equals a,t,g, or c
  misc_feature (246)..(246): n equals a,t,g, or c
  misc_feature (332)..(332): n equals a,t,g, or c
  misc_feature (334)..(334): n equals a,t,g, or c
  misc_feature (342)..(342): n equals a,t,g, or c
  misc_feature (351)..(351): n equals a,t,g, or c
  misc_feature (366)..(366): n equals a,t,g, or c
  misc_feature (391)..(391): n equals a,t,g, or c
  misc_feature (409)..(409): n equals a,t,g, or c
  misc_feature (421)..(421): n equals a,t,g, or c
gcgaccgttgactattctctacaaaccacaaagacattgggaacactatacctattattcggcgcatgagctggaatcctangcacagctctaagcctccttattcgagccgagctgggccagccangcaaccttctangtaacgaacacatctacaacgttatcgtcacagccatgcatttgttataatcttcttcatagtaataccatcataatcggaagntttggnaactgactagtcccctnataatcggtgcccgatatggggtttccccgcataaacaaataactctgaatcttactcctctctcctaatcctggtcgatctgctntntggaggcngacaggaanaggtgaacatctacnccttacaggaatatccacctgaacncgtaactactctctcttnctaaaggtttcncttttgggctcattctccacattcttaacccgctacat

SEQ ID NO: 2434 - DNA, 747 bp, Homo sapiens
  misc_feature (544)..(544): n equals a,t,g, or c
  misc_feature (548)..(548): n equals a,t,g, or c
  misc_feature (568)..(568): n equals a,t,g, or c
  misc_feature (573)..(573): n equals a,t,g, or c
  misc_feature (583)..(583): n equals a,t,g, or c
  misc_feature (642)..(642): n equals a,t,g, or c
  misc_feature (688)..(688): n equals a,t,g, or c
  misc_feature (695)..(695): n equals a,t,g, or c
  misc_feature (712)..(712): n equals a,t,g, or c
  misc_feature (723)..(723): n equals a,t,g, or c
  misc_feature (726)..(726): n equals a,t,g, or c
gcgctacttcccctatcatagaagagcttatcacctttcatgatcacgccctcataatcattttccttatctgcttcctagtcctgtatgcccttttcctaacactcacaacaaaactaactaatactaacatctcagacgctcaggaaatagaaaccgtctgaactatcctgcccgccatcatcctagtcctcatcgccctcccatccctacgcatcctttacataacagacgaggtcaacgatccctcccttaccatcaaatcaattggccaccaatggtactgaacctacgagtacaccgactacggcggactaatcttcaactcctacatacttcccccattattcctagaaccaggcgacctgcgactccttgacgttgacaatcgagtagtactcccgattgaagcccccattcgtataataattacatcacaagacgtcttgcactcatgagctgtcccacattaggcttaaaaacagatgcaattcccggacgtctaaaccaaaccactttcaccgctacacgaacggggggtatntacngtcaatgctctgaaatctgntggancaaaccacantttcatgcccatcgtcctaagaattaattcccctaaaaatctttgaaattagggccgtntttacctatagcacccctctacccctcttgaaccaaaaaaaaaaanaaatccnagggggggccggccccnttccccccatntgnttttttaaattcccggggcgc

SEQ ID NO: 2435 - DNA, 535 bp, Homo sapiens
  misc_feature (396)..(396): n equals a,t,g, or c
  misc_feature (494)..(494): n equals a,t,g, or c
  misc_feature (503)..(503): n equals a,t,g, or c
  misc_feature (507)..(507): n equals a,t,g, or c
  misc_feature (514)..(514): n equals a,t,g, or c
  misc_feature (527)..(527): n equals a,t,g, or c
gcgctacttcccctatcatagaagagcttatcacctttcatgatcacgccctcataatcattttccttatctgcttcctagtcctgtatgcccttttcctaacactcacaacaaaactaactaatactaacatctcagacgctcaggaaatagaaaccgtctgaactatcctgcccgccatcatcctagtcctcatcgccctcccatccctacgcatcctttacataacagacgaggtcaacgatccctcccttaccatcaaatcaattggccaccaatggtactgaacctacgagtacaccgactacgggggactaatcttcaactcctacatacttcccccattattcctagaacaggcgacctgcgactccttgacgttgacaatcgaattantactcccgattgaagcccccattcgtataataattacatcaccaagaagtcttggcctccattaaactttttcccccacatttagggctttaaaaaanaaaaatgcnattnccccggnaactttcttaaancccaaacc

SEQ ID NO: 2436 - DNA, 563 bp, Homo sapiens
  misc_feature (503)..(503): n equals a,t,g, or c
  misc_feature (523)..(523): n equals a,t,g, or c
  misc_feature (556)..(558): n equals a,t,g, or c
ctcagacgctcaggaaatagaaaccgtctgaactatcctgcccgccatcatcctagtcctcatcgccctcccatccctacgcatcctttacataacagacgaggtcaacgatccctcccttaccatcaaatcaattggccaccaatggtactgaacctacgagtacaccgactacggcggactaatcttcaactcctacatacttcccccattattcctagaaccaggcgacctgcgactccttgacgttgacaatcgagcagtactcccgattgaagcccccattcgtataataattacatcacaagacgtcttgcactcatgagctgtccccacattaggcttaaaaacagatgcaattcccggacgtctaaaccaaaccactttcaccgctacacgaccgggggtatactacggtcaatgctctgaaatctgtggagcaaaccacagtttcatgcccatcgtcctagaattaattcccctaaaaatctttgaaatagggnccgtatttaccctatagcancccctctaacccctctagagccaaaaaaaaaannnaaaaa

SEQ ID NO: 2437 - DNA, 536 bp, Homo sapiens
  misc_feature (1)..(1): n equals a,t,g, or c
  misc_feature (6)..(6): n equals a,t,g, or c
  misc_feature (18)..(18): n equals a,t,g, or c
  misc_feature (28)..(28): n equals a,t,g, or c
  misc_feature (35)..(35): n equals a,t,g, or c
  misc_feature (431)..(431): n equals a,t,g, or c
  misc_feature (457)..(457): n equals a,t,g, or c
  misc_feature (475)..(475): n equals a,t,g, or c
  misc_feature (486)..(486): n equals a,t,g, or c
  misc_feature (497)..(497): n equals a,t,g, or c
  misc_feature (535)..(535): n equals a,t,g, or c
nagaancatggatccccnggctgcagantcggcanagtaacagacgaggtcaacgatccctcccttaccatcaaatcaattggccaccaatggtactgaacctacgagtacaccgactacggcggactaatcttcaactcctacatacttcccccattattcctagaaccaggcgacctgcgactccttgacgttgacaatcgagtagtactcccgattgaagcccccattcgtataataattacatcacaagacgtcttgcactcatgagctgtccccacattaggcttaaaaacagatgcaattcccgggacgtctaaaccaaaccactttcaccggtacacgaccggggggtatactacgggtcaatgctctggaaatctggtgggagcaaaccacagtttcatggcccatcgtcctagaattaattncccctaaaaatctttggaataggggnccgtatttaccctatagnaacccctctancccctctaggngccaaaaaaaaaaaaaaaactgggggggggccgggaanc

SEQ ID NO: 2438 - DNA, 473 bp, Homo sapiens
  misc_feature (331)..(331): n equals a,t,g, or c
  misc_feature (341)..(341): n equals a,t,g, or c
  misc_feature (348)..(348): n equals a,t,g, or c
  misc_feature (423)..(423): n equals a,t,g, or c
  misc_feature (433)..(433): n equals a,t,g, or c
  misc_feature (453)..(453): n equals a,t,g, or c
  misc_feature (457)..(457): n equals a,t,g, or c
  misc_feature (466)..(466): n equals a,t,g, or c
cgttatcatttatgtgccttttatagtgtgaacacatcaccaccctgaatataattttagtgtttagagataaatattatttgcaacaatattcatctcatctcaagaaacgctcctatagggtatggagaatttaaaggacctgtaggttatgatgattataacgaaataaccaaagcaggatttcaatgaccagcccacaaaagtatcctgtgtactactggttgggaggtggaggggggttgttcttaagtaagaacccctaacatgtaactctgtggtttttatgtttcattaactatttaatctaccaatatggaactaggttcantaagaagaangacagcntagatccttacatatacacaccctttggaactggacccaaaactgcattggcatgaggttttgctctcatgaacntgaaacttgntctaatcagaggcctttcanaacntctcctttnaaccttg

SEQ ID NO: 2439 - DNA, 315 bp, Homo sapiens
  misc_feature (13)..(13): n equals a,t,g, or c
  misc_feature (315)..(315): n equals a,t,g, or c
gcacctgtggaanttgatcgaaggcggtgcccacatctacgtctgtggggatgcacggaacatggccagggatgtgcagaacaccttctacgacatcgtggctgagctcggggccatggagcacgcgcaggcggtggactacatcaagaaactgatgaccaagggccgctactccctggacgtgtggagctaggggcctgcctgccccacccaccccacagactccggcctgtaatcagctctcctggctccctcccgtagtctcctgggtgtgtttggcttggccttggcatgggcgcaggcccagtgacaaan

SEQ ID NO: 2440 - DNA, 526 bp, Homo sapiens
  misc_feature (4)..(4): n equals a,t,g, or c
  misc_feature (23)..(23): n equals a,t,g, or c
  misc_feature (32)..(33): n equals a,t,g, or c
  misc_feature (310)..(310): n equals a,t,g, or c
  misc_feature (332)..(332): n equals a,t,g, or c
  misc_feature (336)..(336): n equals a,t,g, or c
  misc_feature (369)..(369): n equals a,t,g, or c
  misc_feature (375)..(375): n equals a,t,g, or c
  misc_feature (387)..(387): n equals a,t,g, or c
  misc_feature (401)..(401): n equals a,t,g, or c
  misc_feature (414)..(414): n equals a,t,g, or c
  misc_feature (419)..(419): n equals a,t,g, or c
  misc_feature (461)..(462): n equals a,t,g, or c
  misc_feature (488)..(488): n equals a,t,g, or c
  misc_feature (518)..(518): n equals a,t,g, or c
  misc_feature (523)..(523): n equals a,t,g, or c
tttncctccagagcttcatgacngagccaaanngccatacacagaggcagtcatctatgagattcagagattttccgaccttctccccatgggtgtgccccacattgtcacccaacacaccagcttccgagggtacatcatccccaaggacacagaagtatttctcatcctgagcactgctctccatgacccacactactttgaaaaaccagacgccttcaatcctgaccactttctggatgccaatggggcactgaaaaagactgaagcttttatccccttctccttagggaagcggatttgtcttggngaaggcatcgcccgtgcggaanttgntcctctcttcaccaccatccttcagaacttctncatggncagccccgtggncccagaagacatcnatctgacaccccnagaangtggtgtggggcaaaaaaaccccccaacataccagaacccgnnttcctggccccgctgaaagggcttangggaaaggggggcaaaaggaattccagggncaatncaa

SEQ ID NO: 2441 - DNA, 513 bp, Homo sapiens
  misc_feature (353)..(353): n equals a,t,g, or c
  misc_feature (371)..(371): n equals a,t,g, or c
  misc_feature (407)..(407): n equals a,t,g, or c
  misc_feature (448)..(448): n equals a,t,g, or c
  misc_feature (461)..(461): n equals a,t,g, or c
  misc_feature (490)..(490): n equals a,t,g, or c
  misc_feature (497)..(497): n equals a,t,g, or c
  misc_feature (511)..(511): n equals a,t,g, or c
gcttctccgctccttctaggatctccgcctggttcggcccgcctgcctccactcctgcctctaccatgtccatcagggtgacccagaagtcctacaaggtgtccacctctggcccccgggccttcagcagccgctcctacacgagtgggcccggttcccgcatcagctcctcgagcttctcccgagtgggcaagcagcaactttcgcggtggcctgggcgggcggctatggtggggccagcggcatgggaggcatcaccggagttacggtaaccagagctgctgagcccccttgtcctggaagtggaccccaacatcaggccgtgcgcacccaggagaaggagcagaatcaangacccttaacacaagttngcctccttataaacaagggaacggttcttggaccanaatacaagatgcttggagaccaagtggaagcctcctgcagnacaagaagacggntcgaagcaacatggccaacatgttcgaanagctacnttaacaacttaggngg

SEQ ID NO: 2442 - DNA, 641 bp, Homo sapiens
  misc_feature (467)..(467): n equals a,t,g, or c
  misc_feature (552)..(552): n equals a,t,g, or c
  misc_feature (569)..(569): n equals a,t,g, or c
  misc_feature (587)..(587): n equals a,t,g, or c
  misc_feature (632)..(633): n equals a,t,g, or c
gcgatcttggggagccacacagcccgggtcgcaggcacctccccgccagctctcccgcttctcgcacagcttcccgacgcgtctgctgagccccatggcccacgccacgctctccgccgcccccagcaatccccggctcctgcgggtggcgctgctgctcctgctcctggtggccgccagccggcgcgcagcaggagcgtccgtggtcactgaactgcgctgccagtgcttgcagacactgcagggaattcacctcaagaacatccaaagtgtgaatgtaaggtcccccggaccccactgcgcccaaaccgaagtcatagccacactcaagaatgggaagaaagcttgtctcaaccccgcatcccccatggttcagaaaatcatcgaaaagatactgaacaaggggagcaccaactgacaggagagaagtaagaagcttatcagcgtatcattgacacttcctgcanggtggtccctgcccttaccagagctgaaaatgaaaaagagaacagcagcttttctagggacagctggaaaaggacttaatgtgtntgactatttcttacganggttctacttaattatgnatttatttttgaaaagcttggattttaatattttacaatgctggnnatttaaag

SEQ ID NO: 2443 - DNA, 317 bp, Homo sapiens
  misc_feature (187)..(187): n equals a,t,g, or c
  misc_feature (224)..(224): n equals a,t,g, or c
  misc_feature (255)..(255): n equals a,t,g, or c
  misc_feature (284)..(284): n equals a,t,g, or c
  misc_feature (290)..(290): n equals a,t,g, or c
  misc_feature (313)..(313): n equals a,t,g, or c
aggaactttccggaatgacaattctgctgagatgtgccggaagtgcagcacagggtgccccagaaggatggtcaaggtcaaggattgtacgccctggagtgacatcgagtgtgtccacaaagaatcaggcaatggacataatatatgggtgatttttgttgtgactttggttgttccgttgctgttngtggctgtgctgattgtctggtgttgcatcggctcangttgttgaagggaccccaagtgcatggacanggtgtgtttctggcgcttgggtctcctangaaggnctggggctgaagacaatgctcanaacg

SEQ ID NO: 2444 - DNA, 407 bp, Homo sapiens
  misc_feature (356)..(356): n equals a,t,g, or c
  misc_feature (366)..(366): n equals a,t,g, or c
  misc_feature (378)..(378): n equals a,t,g, or c
  misc_feature (396)..(397): n equals a,t,g, or c
gctttattcccatcctggtttccaactataacccaaaggaatttgaaagttgtattcagtattatttggaaaacaattggcttcaacatgagaaagctcctacagaagaagggaaaaaagagctgctgttcctaagtaacgcgaacccctcgctgctggagcggcactgtgcctacctctaagccaagatcacagcatgtgaggaagacagtggacatctgctttatgctggacccagtaagatgaggaagtcgggcagtacacaggaagaggagccaggcccttgtacctatgggattggacaggactgcagttggctctggacctgcattaaaatgggtttcactgtgaatgcntgacaataanatattcccttgncctaaaactttatatcannttattggatg

SEQ ID NO: 2445 - DNA, 315 bp, Homo sapiens
  misc_feature (4)..(4): n equals a,t,g, or c
  misc_feature (23)..(23): n equals a,t,g, or c
  misc_feature (54)..(54): n equals a,t,g, or c
  misc_feature (63)..(63): n equals a,t,g, or c
  misc_feature (87)..(87): n equals a,t,g, or c
  misc_feature (102)..(102): n equals a,t,g, or c
  misc_feature (118)..(118): n equals a,t,g, or c
  misc_feature (121)..(121): n equals a,t,g, or c
  misc_feature (256)..(256): n equals a,t,g, or c
  misc_feature (259)..(259): n equals a,t,g, or c
  misc_feature (263)..(263): n equals a,t,g, or c
  misc_feature (273)..(273): n equals a,t,g, or c
  misc_feature (296)..(296): n equals a,t,g, or c
gtcnccgtccccggtccggaatncccgggtcgacccacgcgtccgatccaccanttatctttnaaaagcctgccaagaccagcaaanggccgggttcgtttnaggaagaactccttanccnaaccgaaactgttgtgactgaatatctaaatagtggaaatgcaaatgaggctgtcaatggtgtaagagaaatgagggctcctaaacactttcttcctgagatgttaagcaaagtaatcatcctgtcactagatanaancgangaagataaanaaaaagcaagttctttgatcagnttactcaaacaggaaggga

SEQ ID NO: 2446 - DNA, 226 bp, Homo sapiens
  misc_feature (15)..(15): n equals a,t,g, or c
  misc_feature (26)..(26): n equals a,t,g, or c
  misc_feature (46)..(46): n equals a,t,g, or c
  misc_feature (48)..(48): n equals a,t,g, or c
  misc_feature (51)..(51): n equals a,t,g, or c
  misc_feature (110)..(110): n equals a,t,g, or c
  misc_feature (177)..(177): n equals a,t,g, or c
  misc_feature (196)..(196): n equals a,t,g, or c
  misc_feature (202)..(202): n equals a,t,g, or c
  misc_feature (205)..(205): n equals a,t,g, or c
  misc_feature (222)..(222): n equals a,t,g, or c
ggcgctctttaatantggatcccccnggctgcatgaattccgctcnangancactctttttattgtactcgtgaataatgatgaaggagaatggaatggcccaccacctnaatgcaaaaggaaaaatctctaacttccaaaggtcccaccagcagttcagaaaacctaccaacagtnaatgttccaactacagaangtctcnccnacttctcagaaagccancaca

SEQ ID NO: 2447 - DNA, 457 bp, Homo sapiens
  misc_feature (298)..(298): n equals a,t,g, or c
  misc_feature (308)..(308): n equals a,t,g, or c
  misc_feature (323)..(323): n equals a,t,g, or c
  misc_feature (357)..(357): n equals a,t,g, or c
  misc_feature (365)..(365): n equals a,t,g, or c
  misc_feature (399)..(399): n equals a,t,g, or c
  misc_feature (402)..(402): n equals a,t,g, or c
  misc_feature (424)..(424): n equals a,t,g, or c
  misc_feature (431)..(431): n equals a,t,g, or c
aagtatcaggtcctgcctctgaatgtgctcccttcccttccagatcaagatcacccacaagaaccagatgcccatgctcatgggcccacccccccgctccaccaatttctttggcttcttgagctaagggggacacccttggcctccaagccagccttgaacccacctccctgtccctggactctactcccgaggctctgtacattgctgccacatactcctgccagcttgggggagtgttccttcaccctcacagtatttattatcctgcaccaccttcactgttccccatgcgcanacacatacanacaccccaaaacacntacattggaaagtggcttcattgaataaaaggantgtgtttncctttggggatctgctaagtaaggggtaaattcnttnttttaaaacttcaatccttaangaagtanattctcccagaagcaaagaaaaattc

SEQ ID NO: 2448 - DNA, 369 bp, Homo sapiens
  misc_feature (266)..(266): n equals a,t,g, or c
  misc_feature (321)..(321): n equals a,t,g, or c
  misc_feature (325)..(325): n equals a,t,g, or c
  misc_feature (333)..(333): n equals a,t,g, or c
  misc_feature (355)..(355): n equals a,t,g, or c
  misc_feature (358)..(358): n equals a,t,g, or c
gggtggcgatggcactgtgggctgggtgcttggcgccctggaggagacacggtaccgactggcctgcccggagccttctgtggccatcctgcccctgggcacagggaatgaccttggtcgagtcctccgctggggggcgggctacagcggcgaggacccgttctccgtactgctgtctgtggacgaggccgacgccgtgctcatggaccgctggaccatcctgctggatgcccacgaggctggcagtgcagagaacgacacggcanacgcagagccccccaagatcgtgcagatgagtaactacttgtggcattggcatcnaccnggactgancctggacttcaccaagcaccgnaangaggaacctgc

SEQ ID NO: 2449 - DNA, 251 bp, Homo sapiens
  misc_feature (3)..(3): n equals a,t,g, or c
  misc_feature (21)..(21): n equals a,t,g, or c
  misc_feature (73)..(73): n equals a,t,g, or c
  misc_feature (81)..(81): n equals a,t,g, or c
  misc_feature (90)..(90): n equals a,t,g, or c
  misc_feature (128)..(128): n equals a,t,g, or c
  misc_feature (133)..(133): n equals a,t,g, or c
  misc_feature (161)..(161): n equals a,t,g, or c
  misc_feature (176)..(176): n equals a,t,g, or c
  misc_feature (180)..(180): n equals a,t,g, or c
  misc_feature (186)..(186): n equals a,t,g, or c
  misc_feature (239)..(239): n equals a,t,g, or c
ccngatggctgaagagggtgngccggcgcccctgcctccagaggacgcccctaacgccgcatccctggcgccnacccctgngtcccccgncctcgagccctttaatctgacttcggagccctcggacnacgcnctggacctcagcactttcctccagcaanacccggacgccttcnaacngggacnccccgaactccccaaaaagaaaccgaaaaacccacaaagaaaacaccaaggcngtacccgggggc

SEQ ID NO: 2450 - DNA, 367 bp, Homo sapiens
  misc_feature (303)..(303): n equals a,t,g, or c
  misc_feature (330)..(330): n equals a,t,g, or c
  misc_feature (344)..(344): n equals a,t,g, or c
  misc_feature (351)..(351): n equals a,t,g, or c
  misc_feature (361)..(361): n equals a,t,g, or c
gtggatgcacacctctgttcataccaaagctggctggcagtcactgctctggagctaaaggtggaaagaagtctgatcagtcaaactgtagcctggaaccattactacagcagctttcaacaagctacaaaacaatgccagatgtgtgccaagcttctaatctgcttcctgcattgaggtctttaaactgttgtctaccttccagcttatagaaatctcccacttatttggaaaaaaaaaatgtcttgtggcaagcaacaaaaattgggactccctgctccaaaaaacatgttgggatggggnaatttttctttaacagggttgaacccnattgaaaaaaccanccccctngtttaatttnaagaaa

SEQ ID NO: 2451 - DNA, 322 bp, Homo sapiens
  misc_feature (7)..(8): n equals a,t,g, or c
  misc_feature (39)..(39): n equals a,t,g, or c
  misc_feature (104)..(104): n equals a,t,g, or c
  misc_feature (111)..(111): n equals a,t,g, or c
  misc_feature (176)..(176): n equals a,t,g, or c
  misc_feature (198)..(198): n equals a,t,g, or c
  misc_feature (219)..(219): n equals a,t,g, or c
  misc_feature (226)..(226): n equals a,t,g, or c
  misc_feature (230)..(230): n equals a,t,g, or c
  misc_feature (274)..(274): n equals a,t,g, or c
  misc_feature (289)..(289): n equals a,t,g, or c
  misc_feature (320)..(320): n equals a,t,g, or c
ggcagannaaagatggagatgagtttaataattcaattngccagttatttcttgctttcaatatgctgatggacaggcctctggaggaagccgtcaagatcaanggggcanctttgaagtaccttcctagcataattaatgatgtcaaacttgtatttgatcctgttgagctcagngtgctcttctgcaaattcattnaaagcattcctgacaaccagntggttcngcanaaacttaactgcatgaccaagatagtagagagcactctttttcnacagtcagagtgcanagaagtgctgctgccactgctgacggaccanct

SEQ ID NO: 2452 - DNA, 365 bp, Homo sapiens
  misc_feature (294)..(294): n equals a,t,g, or c
  misc_feature (320)..(321): n equals a,t,g, or c
  misc_feature (328)..(328): n equals a,t,g, or c
  misc_feature (346)..(346): n equals a,t,g, or c
ggttgcggtcaagatggcgctggtggcttctgtgcgagtcccggcgcgcgttctgctccgcgcgggggcccggctcccgggcgcggccctcgggcggacggagcgggcggccggcggcggagacggcgcgcggcgcttcgggagccagcgggtgctggtggagccggacgcgggcgcaggggtcgctgtgatgaaattcaagaaccccccagtgaacagcctgagcctggagtttctgacggagctggtcatcagcctgagaagctggagaatgacaagagcttccgcggtgtnattctgacctcggaccgccgggtgtnntctcggncggctggacctgacgganatgtgtgggaagaaccccg

SEQ ID NO: 2453 - DNA, 560 bp, Homo sapiens
  misc_feature (378)..(378): n equals a,t,g, or c
  misc_feature (511)..(511): n equals a,t,g, or c
  misc_feature (544)..(544): n equals a,t,g, or c
  misc_feature (549)..(549): n equals a,t,g, or c
  misc_feature (554)..(554): n equals a,t,g, or c
  misc_feature (560)..(560): n equals a,t,g, or c
ggacaccccagcaaaagtaccagcgcctactgcatgaggtccaagagctgacaactgaagttgaaaaaatcaagacgacagtgaaggagtcagccacagaggagaagctgacccctgtgttgctggctaaacagctggcagccctgaagcagcagctggttgcttcccacctggagaagctgctgggaccagatgctgcaatcaaccttaccgaccccgatggcgccctggctaagcgcctactactgcagctggaagcaacaaagaacagcaaagggggatcagggggaaaaaccactgggacccccccagatagcagccttgtcacttatgaactacattctcggcctgagcaggacaaagttctctcaaagctgncaaaagtccagaacttgaaaagcgcctgacagaactggagacagctgtcgttgtgatcaggatgctcagaatccctttctgcaggtctacagggagcctgtctcatggagactgtaaactgttgcaagcaaangtgaacgccttaaacttgcagttttggatcaantgganggttnggttcn

SEQ ID NO: 2454 - DNA, 558 bp, Homo sapiens
  misc_feature (11)..(11): n equals a,t,g, or c
  misc_feature (21)..(21): n equals a,t,g, or c
  misc_feature (44)..(44): n equals a,t,g, or c
ccctcactaanggaacaaagnctggtgctccaccgcggtggcgnccgctctagaactagtggatcccccgggctgcaggaattcggcacgagggaaaactagcttaaatctctcactcaacctgatttttgaattgccttctctttttatggtggagggcaagcaattcagatctctggattatgaattttgtgaaacccatgatagtactattacttgaagcctgtgttgaagatatgagttaatctttaatgtgctttgtgatatgtatttatttagtctcaaactaccaccaagtatcattgtaggcttgtttgcactggatttttagcttactctcattatacagagttattggatgtatttgtatttgaagctatatttgtagttatagcaagtgtactgcttatattgtagcattgtgtataaaaatctgatttagatttttggaatgctagtatctggaaaatacccttaaagtattttccagacagctgggccaagtatttcagtaattatgcttgttaacttttattatttatatctcttgtgtcttag

SEQ ID NO: 2455 - DNA, 328 bp, Homo sapiens
  misc_feature (270)..(270): n equals a,t,g, or c
  misc_feature (279)..(279): n equals a,t,g, or c
  misc_feature (282)..(282): n equals a,t,g, or c
  misc_feature (298)..(298): n equals a,t,g, or c
  misc_feature (309)..(309): n equals a,t,g, or c
gctgctgccctccgagtcaccgatggcgcattggtggtggtggactgcgtgtcaggcgtgtgacagtgctgcggcaggccattgccgagcgcatcaagcctgtgctgatgatgaacaagacgtgaacgtcatcatctccacctacggcgagggcgagagcggccccatgggcaacatcatgatcgatcctgtcctcggtaccgtgggctttgggtctggcctccacgggtgggccttcaccctgaagcagtttgccgagatgtatgtggncaagttcgncgncaagggggagggccanttggggcctgncgagcgggccaagaaagta

SEQ ID NO: 2456 - DNA, 230 bp, Homo sapiens
  misc_feature (10)..(10): n equals a,t,g, or c
  misc_feature (12)..(12): n equals a,t,g, or c
  misc_feature (19)..(19): n equals a,t,g, or c
  misc_feature (23)..(23): n equals a,t,g, or c
  misc_feature (35)..(35): n equals a,t,g, or c
  misc_feature (47)..(47): n equals a,t,g, or c
  misc_feature (52)..(52): n equals a,t,g, or c
  misc_feature (58)..(58): n equals a,t,g, or c
  misc_feature (107)..(107): n equals a,t,g, or c
  misc_feature (118)..(118): n equals a,t,g, or c
  misc_feature (129)..(129): n equals a,t,g, or c
  misc_feature (163)..(163): n equals a,t,g, or c
  misc_feature (185)..(185): n equals a,t,g, or c
  misc_feature (192)..(192): n equals a,t,g, or c
  misc_feature (214)..(214): n equals a,t,g, or c
  misc_feature (217)..(217): n equals a,t,g, or c
gctcatgttntngatccanacanagtgtgccgacnacgccatgaccntggtnctaaanaaagagcttgttgctcatttagaagtgcaccatcacgggtctgaccttntgggaccccanctgtgaggcanaggacaggggtgacaagtttgtattgcgcagtgnttactccagctgtggcatgcangtgtcancaagtatgatcagcaatgaggnggnggtcaatatactg

SEQ ID NO: 2457 - DNA, 547 bp, Homo sapiens
  misc_feature (4)..(4): n equals a,t,g, or c
  misc_feature (459)..(459): n equals a,t,g, or c
  misc_feature (463)..(463): n equals a,t,g, or c
  misc_feature (532)..(532): n equals a,t,g, or c
gcgnacgcgtgggcgcctcctccgctgtctccctggagttcttgcaagtcggccaggatgtctcaggctgagtttgagaaagctgcagaggaggttaggcaccttaagaccaagccatcggatgaggagatgctgttcatctatggccactacaaacaagcaactgtgggcgacataaatacagaacggcccgggatgttggacttcacgggcaaggccaagtgggatgcctggaatgagctgaaagggacttccaaggaagatgccatgaaagcttacatcaacaaagtagaagagctaaagaaaaaatacgggatatgagagactggatttggttactgtgccatgtgtttatcctaaactgagacaatgccttggttttttctaatacccgtggatggtgggaattcgggaaaataaccaggtaaaccagctactcaaggctgctcaccatacggntctnacagattaggggctaaaacgattactgacttttcttgagtaggttttatctgaaatcaattaaaagtgnatttggtactttaaa

SEQ ID NO: 2458 - DNA, 361 bp, Homo sapiens
  misc_feature (191)..(191): n equals a,t,g, or c
  misc_feature (196)..(196): n equals a,t,g, or c
  misc_feature (213)..(213): n equals a,t,g, or c
  misc_feature (245)..(245): n equals a,t,g, or c
  misc_feature (308)..(308): n equals a,t,g, or c
  misc_feature (311)..(311): n equals a,t,g, or c
  misc_feature (331)..(331): n equals a,t,g, or c
  misc_feature (338)..(338): n equals a,t,g, or c
  misc_feature (341)..(341): n equals a,t,g, or c
ggcctggtgtcggtggttagtttctgcgacttgtgttgggactgctgataggaagatgtcttcaggaaatgctaaaattgggcaccctgcccccaacttcaaagccacagctgttatgccagatggtcagtttaaagatatcagcctgtctgactacaaaggaaaatatgttgtgttcttcttttaccctnttganttcacctttgtgtgccncacggagatcattgctttcagtgatagggcanaagaatttaagaaactcaactgccaagtgattggtgcttctgtggattctcacttctgtcatntancatgggtcaatacacctaanaaacaangangactgggacccatgaacatt

SEQ ID NO: 2459 - DNA, 764 bp, Homo sapiens
  misc_feature (2)..(2): n equals a,t,g, or c
  misc_feature (9)..(9): n equals a,t,g, or c
  misc_feature (62)..(62): n equals a,t,g, or c
  misc_feature (64)..(64): n equals a,t,g, or c
  misc_feature (69)..(69): n equals a,t,g, or c
  misc_feature (300)..(300): n equals a,t,g, or c
  misc_feature (565)..(565): n equals a,t,g, or c
  misc_feature (629)..(629): n equals a,t,g, or c
  misc_feature (745)..(745): n equals a,t,g, or c
  misc_feature (753)..(753): n equals a,t,g, or c
tntagtttngcgcctgccgtaccggtccggaattcccgggtcgacccacgcgtccgtacaantntggtngtaaactgctttgtgaataataatcgtcaatgccagtgtacttcagttggtgcacaaaatactgtcatttgctcaaagctggctgccaaatgtttggtgatgaaggcagaaatgaatggctcaaaacttgggagaagagcaaaacctgaaggggccctccagaacaatgatgggctttatgatcctgactgcgatgagagcgggctctttaaggccaagcagtgcaacggnacctccatgtgctggtgtgtgaacactgctggggtcagaagaacagacaaggacactgaaataacctgctctgagcgagtgagaacctactggatcatcattgaactaaaacacaaagcaagagaaaaaccttatgatagtaaaagtttgcggactgcacttcagaaggagatcacaacgcgttatcaactggatccaaaatttatcacgagtattttgtatgagaataatgttatcactattgatctggttcaaaattcttctnaaaaaaactcagaatgatgtggacatagctgatgtggcttattattttgaaaaagatgttaaangtgaatccttggttcattctaagaaaatggacctgacagtaaatggggaacaactggatctggatcctggcaaactttaatttattatgttgatgaaaaagcaccttgattctcantgcagggnctaaaaagctg

SEQ ID NO: 2460 - DNA, 487 bp, Homo sapiens
  misc_feature (17)..(17): n equals a,t,g, or c
  misc_feature (22)..(22): n equals a,t,g, or c
  misc_feature (349)..(349): n equals a,t,g, or c
  misc_feature (480)..(480): n equals a,t,g, or c
ggttttcaggaacttantttanggtgacacgtagtagaaggtacgcctgcaggtaccgggtccggaattcccgggtacctgatctacctgaaatttaaggcaacctacgatggaaatcatgataccttccgagtggagtttctggtggtccctgtgggaggcctctcatttttagttaatcacgatttctctcctcttgagatcctctggaccttctccatctacctggagtccgtggctatccttccgcagctatttatgatcagcaagactggggaggccgagaccatcaccacccactacctgttcttcctgggcctctatcgtgctttgtatcttgtcaactggntctggcgcttctactttgagggcttctttgacctcattgctgtggtggccggcgtagtccagaccatcctatactgtgacttcttctacttgtacatacaaaagtactcaagggaaagaagctcagtttgncagcata

SEQ ID NO: 2461 - DNA, 407 bp, Homo sapiens
  misc_feature (44)..(44): n equals a,t,g, or c
  misc_feature (48)..(48): n equals a,t,g, or c
  misc_feature (56)..(56): n equals a,t,g, or c
  misc_feature (80)..(80): n equals a,t,g, or c
  misc_feature (92)..(92): n equals a,t,g, or c
  misc_feature (123)..(123): n equals a,t,g, or c
  misc_feature (128)..(128): n equals a,t,g, or c
  misc_feature (142)..(142): n equals a,t,g, or c
  misc_feature (166)..(166): n equals a,t,g, or c
  misc_feature (213)..(213): n equals a,t,g, or c
  misc_feature (218)..(218): n equals a,t,g, or c
  misc_feature (223)..(223): n equals a,t,g, or c
  misc_feature (226)..(226): n equals a,t,g, or c
  misc_feature (250)..(250): n equals a,t,g, or c
  misc_feature (275)..(275): n equals a,t,g, or c
  misc_feature (289)..(289): n equals a,t,g, or c
  misc_feature (297)..(297): n equals a,t,g, or c
  misc_feature (348)..(349): n equals a,t,g, or c
  misc_feature (360)..(361): n equals a,t,g, or c
  misc_feature (368)..(368): n equals a,t,g, or c
ccccctcctgtggagcaggtcacactgcaggagggggccgtggncganaccccaanagctggccccctcctgtggagcangtcacactgcangacttgagtcagctcatcatccgaaactgcncctcntttgacattcacancatccacgtgtgtctgcaccttgnagtcttacttggctttccatctgatggtcccctggtgtgtgccctgnaacangaacnaangctccgcctccctccgaaagccanctccccctttgcaaccccttctccnaaaagcaatggcanaagaactnaatccccacgtgatggtgctccctggcccataactggcccgggaccggttnngggaaccccanntttcttngaaaacccttgcccacttcctggttggtttcaggaaacc

SEQ ID NO: 2462 - DNA, 474 bp, Homo sapiens
  misc_feature (429)..(429): n equals a,t,g, or c
  misc_feature (438)..(438): n equals a,t,g, or c
  misc_feature (447)..(447): n equals a,t,g, or c
  misc_feature (451)..(451): n equals a,t,g, or c
  misc_feature (454)..(454): n equals a,t,g, or c
gcacgcagcccacggtctgtactgacgcgccctcgcttcttcctctttctcgactccatcttcgcggtagctgggaccgccgttcagtcgccaatatgcagctctttgtccgcgcccaggagctacacaccttcgaggtgaccggccaggaaacggtcgcccagatcaaggctcatgtagcctcactggagggcattgccccggaagatcaagtcgtgctcctggcaggcgcgcccctggaggatgaggccactctgggccagtgcggggtggaggccctgactaccctggaagtagcaggccgcatgcttggaggtaaagtccatggttccctggcccgtgctggaaaagtgagaggtcagactcctaaggtggccaaacaggagaagaagaagaagaagacaggtcgggctaagcggcggatgcagnacaaccggngctttgtcnacgntgngccacctttggcaagaagaa

SEQ ID NO: 2463 - DNA, 630 bp, Homo sapiens
  misc_feature (7)..(7): n equals a,t,g, or c
  misc_feature (38)..(38): n equals a,t,g, or c
  misc_feature (212)..(212): n equals a,t,g, or c
  misc_feature (218)..(218): n equals a,t,g, or c
  misc_feature (290)..(290): n equals a,t,g, or c
  misc_feature (385)..(385): n equals a,t,g, or c
  misc_feature (418)..(418): n equals a,t,g, or c
  misc_feature (436)..(436): n equals a,t,g, or c
  misc_feature (501)..(501): n equals a,t,g, or c
  misc_feature (519)..(519): n equals a,t,g, or c
  misc_feature (529)..(529): n equals a,t,g, or c
  misc_feature (547)..(547): n equals a,t,g, or c
  misc_feature (584)..(584): n equals a,t,g, or c
  misc_feature (602)..(602): n equals a,t,g, or c
  misc_feature (621)..(621): n equals a,t,g, or c
  misc_feature (627)..(627): n equals a,t,g, or c
ggttgangaccagattacagctgtcagaaaattcatanaaatgggtttcattgatgaaaaaagaatagccatatggggctggtcctatggaggatacgtttcatcactggcccttgcatctggaactggtcttttcaaatgtggtatagcagtggctccagtctccagctgggaatattacgcgtctgtctacacagagagattcatgggtntcccancaaaggatgataatcttgagcactataagaattcaactgtgatggcaagagcagaatatttcagaaatgtanactatcttctcatccacggaacagcagatgataatgtgcactttcaaaactcagcacagattgctaaagctctggttaatgcacaagtggatttncaggcaatgtggtactctgaccagaaccacggnttatccggcctgtccacnaaccacttatacacccacatgacccacttcctaaagcagtgtttctctttgtcagactaaaaacnatgcatatgcaatcctgnatcagaaatntgaaaaccttatataaanccttcagacaagtttgcttaatttaatttttatgttngaaaaatgctagtttaancaaccaattaatggtgttnaaaggntgt

SEQ ID NO: 2464 - DNA, 251 bp, Homo sapiens
  misc_feature (5)..(5): n equals a,t,g, or c
  misc_feature (9)..(9): n equals a,t,g, or c
  misc_feature (13)..(13): n equals a,t,g, or c
  misc_feature (15)..(15): n equals a,t,g, or c
  misc_feature (22)..(23): n equals a,t,g, or c
  misc_feature (48)..(48): n equals a,t,g, or c
  misc_feature (70)..(70): n equals a,t,g, or c
  misc_feature (73)..(74): n equals a,t,g, or c
  misc_feature (76)..(76): n equals a,t,g, or c
  misc_feature (86)..(86): n equals a,t,g, or c
  misc_feature (113)..(113): n equals a,t,g, or c
  misc_feature (126)..(126): n equals a,t,g, or c
  misc_feature (129)..(129): n equals a,t,g, or c
  misc_feature (132)..(133): n equals a,t,g, or c
  misc_feature (165)..(165): n equals a,t,g, or c
  misc_feature (187)..(187): n equals a,t,g, or c
  misc_feature (214)..(214): n equals a,t,g, or c
  misc_feature (237)..(237): n equals a,t,g, or c
  misc_feature (248)..(248): n equals a,t,g, or c
ggcanaggncgtngncaatgcnncaataccctgcagaccaatgccggntacctggagcaggtgaagcgcnagnngngttgaccctnagacacagttggaaagccatggaactnttacctggcacgnagnggnntgccggtgggaggatttggaccgttgaacatnatccacgttaatggggacgaanggggaaagggttccacctttgcctttnaaggaatttttttccccaaaaanttgggcttaangac

SEQ ID NO: 2465 - DNA, 489 bp, Homo sapiens
  misc_feature (33)..(33): n equals a,t,g, or c
  misc_feature (39)..(39): n equals a,t,g, or c
  misc_feature (61)..(61): n equals a,t,g, or c
  misc_feature (72)..(72): n equals a,t,g, or c
  misc_feature (78)..(78): n equals a,t,g, or c
  misc_feature (117)..(117): n equals a,t,g, or c
  misc_feature (134)..(134): n equals a,t,g, or c
  misc_feature (137)..(137): n equals a,t,g, or c
  misc_feature (172)..(172): n equals a,t,g, or c
  misc_feature (198)..(198): n equals a,t,g, or c
  misc_feature (204)..(204): n equals a,t,g, or c
  misc_feature (221)..(221): n equals a,t,g, or c
  misc_feature (231)..(231): n equals a,t,g, or c
  misc_feature (249)..(249): n equals a,t,g, or c
  misc_feature (259)..(259): n equals a,t,g, or c
  misc_feature (270)..(270): n equals a,t,g, or c
  misc_feature (285)..(285): n equals a,t,g, or c
  misc_feature (290)..(290): n equals a,t,g, or c
  misc_feature (307)..(307): n equals a,t,g, or c
  misc_feature (309)..(309): n equals a,t,g, or c
  misc_feature (323)..(323): n equals a,t,g, or c
  misc_feature (350)..(350): n equals a,t,g, or c
  misc_feature (405)..(405): n equals a,t,g, or c
  misc_feature (456)..(456): n equals a,t,g, or c
  misc_feature (459)..(459): n equals a,t,g, or c
  misc_feature (467)..(467): n equals a,t,g, or c
  misc_feature (472)..(472): n equals a,t,g, or c
gtaaatatcctcaatagggaataagatatgctncccatnccttcgggtaaaaagttttgtncaacactccangctcantcaactcactggtgtatgggaattgtcttgatgtaaggncatacttcctgccttcnttntggctgcgcacaaaaccatagattgctcttctgtnaggttttgaattactgatcgcacttnatcgtnttgcatcttaatgcgtnttcttatctnaaatcgcttatatctggngctggcaatngctgattatcnatgcacatgaattgnctagngaaaaatgctagaacananaacaaaaacttgcnccaccatgaaggaataccgattccccnccatggtacatattccaggcccgttatctcgggctttaaaagcaaaaatttccancccaaataacaacagttcttggttctccccggaagtttcaggactgaaccnccnccgaaaanaacanttggaacctttctttgg

SEQ ID NO: 2466 - DNA, 375 bp, Homo sapiens
  misc_feature (224)..(224): n equals a,t,g, or c
  misc_feature (242)..(242): n equals a,t,g, or c
  misc_feature (264)..(264): n equals a,t,g, or c
  misc_feature (282)..(282): n equals a,t,g, or c
  misc_feature (329)..(329): n equals a,t,g, or c
  misc_feature (333)..(333): n equals a,t,g, or c
  misc_feature (348)..(348): n equals a,t,g, or c
  misc_feature (368)..(368): n equals a,t,g, or c
gctttcattgccaagtccttctatgacctcagtgccatcagcctggatggggagaaagtagatttcaatacgtctcggggcagggccgtgctgattgagaatgtggcttcgctctgaggcacaaccacccgggacttcacccagctcaacgagctgcaatgccgctttcccaggcgcctggtggtccttgggcttcccttgcaaccaatttgggacatcagganaactgtcaaaatgagganatcctgaacagtctcaattatnttccgtcctggggtgggnataccaaccccccttccccctttttccaaaaattttaaggttaaatnggcnaaaaaaaacatcctntttttccccctaccttaaangaaaaac

SEQ ID NO: 2467 - DNA, 287 bp, Homo sapiens
  misc_feature (20)..(20): n equals a,t,g, or c
  misc_feature (109)..(109): n equals a,t,g, or c
  misc_feature (140)..(140): n equals a,t,g, or c
  misc_feature (143)..(143): n equals a,t,g, or c
  misc_feature (150)..(150): n equals a,t,g, or c
  misc_feature (225)..(225): n equals a,t,g, or c
  misc_feature (245)..(245): n equals a,t,g, or c
  misc_feature (264)..(264): n equals a,t,g, or c
  misc_feature (274)..(274): n equals a,t,g, or c
  misc_feature (276)..(276): n equals a,t,g, or c
gcggatgagcccatccctgncaaggagctagagcgaggtgtggcgggggcccacggcctgctctgcctcctctccgaccacgtggacaagaggatcctggatgctgcangggccaatctcaaagtcatcagcaccatgtntgngggcatngaccacttggctttggatgaaatcaagaagcgtgggatccgagttggctacaccccagatgtcctgacagatacnaccgtcgaactcgcagtctncctgctacttaccacctgncgtcggttgncngaggccatcga

SEQ ID NO: 2468 - DNA, 105 bp, Homo sapiens
  misc_feature (42)..(42): n equals a,t,g, or c
  misc_feature (55)..(55): n equals a,t,g, or c
  misc_feature (70)..(70): n equals a,t,g, or c
  misc_feature (73)..(73): n equals a,t,g, or c
  misc_feature (78)..(78): n equals a,t,g, or c
ctcaagtgagccgcatgcttggcagatctggccgacaggaantacaagcaggctnccaagtgcctactgntgncttcntttgatcactgtgacttccctgagctg

SEQ ID NO: 2469 - DNA, 500 bp, Homo sapiens
  misc_feature (64)..(64): n equals a,t,g, or c
  misc_feature (94)..(94): n equals a,t,g, or c
  misc_feature (138)..(138): n equals a,t,g, or c
  misc_feature (199)..(199): n equals a,t,g, or c
  misc_feature (249)..(249): n equals a,t,g, or c
  misc_feature (266)..(266): n equals a,t,g, or c
  misc_feature (270)..(270): n equals a,t,g, or c
  misc_feature (293)..(293): n equals a,t,g, or c
  misc_feature (300)..(300): n equals a,t,g, or c
  misc_feature (302)..(302): n equals a,t,g, or c
  misc_feature (311)..(311): n equals a,t,g, or c
  misc_feature (317)..(317): n equals a,t,g, or c
  misc_feature (321)..(322): n equals a,t,g, or c
  misc_feature (345)..(345): n equals a,t,g, or c
  misc_feature (367)..(367): n equals a,t,g, or c
  misc_feature (381)..(381): n equals a,t,g, or c
  misc_feature (387)..(387): n equals a,t,g, or c
  misc_feature (394)..(394): n equals a,t,g, or c
  misc_feature (400)..(400): n equals a,t,g, or c
  misc_feature (422)..(422): n equals a,t,g, or c
  misc_feature (431)..(432): n equals a,t,g, or c
  misc_feature (436)..(436): n equals a,t,g, or c
  misc_feature (443)..(444): n equals a,t,g, or c
  misc_feature (451)..(451): n equals a,t,g, or c
  misc_feature (455)..(455): n equals a,t,g, or c
  misc_feature (459)..(459): n equals a,t,g, or c
  misc_feature (470)..(472): n equals a,t,g, or c
  misc_feature (474)..(474): n equals a,t,g, or c
  misc_feature (477)..(478): n equals a,t,g, or c
  misc_feature (482)..(482): n equals a,t,g, or c
  misc_feature (484)..(484): n equals a,t,g, or c
  misc_feature (489)..(490): n equals a,t,g, or c
  misc_feature (492)..(492): n equals a,t,g, or c
  misc_feature (498)..(498): n equals a,t,g, or c
aattcggcacagccatggcccgcgctgctctctccgccgcccccagcaatccccggctcctgcnagtggcactgctgctcctgctcctggtagncgctggccggcgcgcacaggtagtgtccgtggccactgaaactncgctgccagtgcttgcagaccctgcagggaattcaccccaagaacatccaaagtgtgaacntaaagtcccccggaccccactgcgcccaaaccgaagtcatagccacactnaagaatgggaggaaagnttgncttcaatcctgcatgccccattntttaagnanattatcggnaaaggntgtnnaacagtggcaaattcaattggancagaagggagggaggaaggttnaatggtgggtgttngcttgnagggagngccttngccttttttagggtagcaaagngggaaaggnnggtnaaagttnngaggggncacntggnttttggctaannngnttnnaggnancgttnngnggaatntt

SEQ ID NO: 2470 - DNA, 104 bp, Homo sapiens
  misc_feature (10)..(10): n equals a,t,g, or c
  misc_feature (18)..(18): n equals a,t,g, or c
  misc_feature (51)..(51): n equals a,t,g, or c
  misc_feature (80)..(80): n equals a,t,g, or c
  misc_feature (98)..(98): n equals a,t,g, or c
gtcccccggnccccactncgcccaaaccggagtcatagccacactcaagantgggcggaaagcttgcctcaatcctgcancccccatagttatgaaantcatcg

SEQ ID NO: 2471 - DNA, 393 bp, Homo sapiens
  misc_feature (111)..(111): n equals a,t,g, or c
  misc_feature (120)..(120): n equals a,t,g, or c
  misc_feature (165)..(165): n equals a,t,g, or c
  misc_feature (181)..(181): n equals a,t,g, or c
  misc_feature (318)..(318): n equals a,t,g, or c
  misc_feature (341)..(341): n equals a,t,g, or c
  misc_feature (350)..(350): n equals a,t,g, or c
  misc_feature (364)..(364): n equals a,t,g, or c
  misc_feature (387)..(387): n equals a,t,g, or c
tgggggctcttgggttcctcgtctgctacacagaagtgaggagattcccctgactgatctcatgttgttaagtgttctatccatccccaccacaccccaacttcttcatgnaagcaggtntccatccttataacttgagaggctgtgaatcattccatagatgtnggtcttctgctaccgntcttcacattgcctctacataccaggtcttcagctgcattctaggaaacatcatatactattggattgcaaatctataaataatataagacaatggactgacaggggaaaaaagtttttttttaagtttacaaactncaatcccacttgttggcatttcnaagggggcnatactttttccttnattccaccgtttaaagaagtttnggaatt

SEQ ID NO: 2472 - DNA, 362 bp, Homo sapiens
  misc_feature (225)..(225): n equals a,t,g, or c
  misc_feature (252)..(252): n equals a,t,g, or c
  misc_feature (262)..(262): n equals a,t,g, or c
  misc_feature (304)..(304): n equals a,t,g, or c
  misc_feature (307)..(307): n equals a,t,g, or c
  misc_feature (316)..(316): n equals a,t,g, or c
  misc_feature (335)..(335): n equals a,t,g, or c
  misc_feature (351)..(351): n equals a,t,g, or c
gcctgaagaggctgccacagtgacttcctacctgaactgctcctggccccctcctccaagaagggcaaagctcgcctgagccctcgaagtgtgggcgtcatctccccgtaccggaaacaggtggagaaaatccgttactgcatcaccaaacttgacagggagcttcgaggactggatgacatcaaggacttgaaggtggttcagtagaagaattcaaggcaagangaagcgtatctatttcacggcgaacancagactttgnactgatctgactttattggttcttaacccaagaggtaatgantgnaccggcaangctgtatatcggggaaccntttctggcatacctgntgaagatctga

SEQ ID NO: 2473 - DNA, 535 bp, Homo sapiens
  misc_feature (255)..(255): n equals a,t,g, or c
  misc_feature (288)..(288): n equals a,t,g, or c
  misc_feature (321)..(321): n equals a,t,g, or c
  misc_feature (325)..(325): n equals a,t,g, or c
  misc_feature (444)..(444): n equals a,t,g, or c
  misc_feature (457)..(457): n equals a,t,g, or c
  misc_feature (461)..(461): n equals a,t,g, or c
  misc_feature (526)..(527): n equals a,t,g, or c
gcggcacgaggaatttgctcgctacactactcctgaggatgctactcccgagcccggagaggacccacgcgtgacccgggccaagtacttcattcgagatgagtttctgaggatcagcactgccagtggagatgggcgtcactactgctaccctcatttcacctgcgctgtggacactgagaacatccgccgtgtgttcaacgactgccgtgacatcattcagcgcatgcaccttcgtcagtacgagctgctctnagaagggaacccccaaatttaattaaagccttnagcacaattaattaaaagtgaaacgtaattgtncaancagttaatcacccaccatagggcatgattaacaaagcaacctttcccttccccgaatgattttgcgaaacccccttttcccttcagcttgcttagatttccaaatttaaaaagcttaangggggctacaganaaangaaaaaagggcacaaaaattccctctcactttcattaaaataataaaacagcagccgccaaccanntaaatgaa

SEQ ID NO: 2474 - DNA, 381 bp, Homo sapiens
  misc_feature (10)..(10): n equals a,t,g, or c
  misc_feature (72)..(72): n equals a,t,g, or c
  misc_feature (90)..(90): n equals a,t,g, or c
  misc_feature (92)..(92): n equals a,t,g, or c
  misc_feature (96)..(96): n equals a,t,g, or c
  misc_feature (113)..(113): n equals a,t,g, or c
  misc_feature (117)..(117): n equals a,t,g, or c
  misc_feature (153)..(153): n equals a,t,g, or c
  misc_feature (158)..(158): n equals a,t,g, or c
  misc_feature (203)..(203): n equals a,t,g, or c
  misc_feature (231)..(231): n equals a,t,g, or c
  misc_feature (234)..(234): n equals a,t,g, or c
  misc_feature (250)..(250): n equals a,t,g, or c
  misc_feature (276)..(276): n equals a,t,g, or c
  misc_feature (322)..(322): n equals a,t,g, or c
  misc_feature (324)..(324): n equals a,t,g, or c
  misc_feature (327)..(327): n equals a,t,g, or c
  misc_feature (361)..(361): n equals a,t,g, or c
  misc_feature (372)..(372): n equals a,t,g, or c
ggtaaccccnggggtttcccgggaaaatttcccccgggggttccggaacccccaacggccggttcccgggcncccaacggccggtttttntnttcntggaagggggaaagggngtcncgaagcccaggcccgcttggtttttggggcgggaanggaantccccttaaggcccgtaagtaaaggcattaaataaatggtctttnatcttttgaagtgggatctacaatgggnttnagcaagtggtggctcnagttcctaggacttgtacaagaaatntggaaaacttgaattcttaggtttggataatgcagggcaaaaccantnttnttaacatgctcaaaggatgacagattggccaacntgttccaacantacatccga

SEQ ID NO: 2475 - DNA, 109 bp, Homo sapiens
  misc_feature (42)..(42): n equals a,t,g, or c
  misc_feature (86)..(86): n equals a,t,g, or c
  misc_feature (98)..(98): n equals a,t,g, or c
  misc_feature (102)..(102): n equals a,t,g, or c
  misc_feature (104)..(104): n equals a,t,g, or c
gctcagcagggagccccatgcccttccaggtgtggagagcancctgcgtgtcactggctgccgccagatcttacggagcctcccanagcacaactacngtantncttcg

SEQ ID NO: 2476 - DNA, 393 bp, Homo sapiens
  misc_feature (18)..(18): n equals a,t,g, or c
  misc_feature (87)..(87): n equals a,t,g, or c
  misc_feature (216)..(216): n equals a,t,g, or c
  misc_feature (234)..(234): n equals a,t,g, or c
  misc_feature (239)..(239): n equals a,t,g, or c
  misc_feature (246)..(246): n equals a,t,g, or c
  misc_feature (306)..(306): n equals a,t,g, or c
  misc_feature (326)..(326): n equals a,t,g, or c
  misc_feature (379)..(379): n equals a,t,g, or c
  misc_feature (387)..(388): n equals a,t,g, or c
ccacgcgtccggacaagnctgtgaaggatctggtcatcttgctctatgaaactgcgctcctgtcttctggcttcagtctggaagatncccagacacatgctaacaggatctacaggatgatcaaacttggtctgggtattgatgaagatgaccctactgctgatgataccagtgctgctgtaactgaagaaatgccaccccttgaaggagatgacnacacatcacgcatggaanaagtngactaanctctggctgagggatgacttacctgttcagtactctacaattctctgatagtatatttcnaggatgcttttctctatttngtgtaatattaaatagtctgatggcatgacaactactttaaagggaaagattngattctgnntacta

SEQ ID NO: 2477 - DNA, 256 bp, Homo sapiens
  misc_feature (10)..(10): n equals a,t,g, or c
  misc_feature (206)..(206): n equals a,t,g, or c
  misc_feature (218)..(218): n equals a,t,g, or c
  misc_feature (222)..(222): n equals a,t,g, or c
  misc_feature (246)..(246): n equals a,t,g, or c
  misc_feature (250)..(250): n equals a,t,g, or c
ccgtgagggnaagcgtctccgttgggtccggccgctctgcgggactctgaggaaaagctcgcaccaggtggacgcggatctgtcaacatgggtaaaggagaccccaacaagccgcggggcaaaatgtcctcgtacgccttcttcgtgcagacctgccgggaaagagcacaagaaagaaacacccggactcttccgtcaatttcgcnggaattctccanaaantttttcggaaaaatggaaaaaccntttntgccaa

SEQ ID NO: 2478 - DNA, 478 bp, Homo sapiens
  misc_feature (254)..(254): n equals a,t,g, or c
  misc_feature (330)..(330): n equals a,t,g, or c
  misc_feature (332)..(332): n equals a,t,g, or c
  misc_feature (346)..(346): n equals a,t,g, or c
  misc_feature (359)..(359): n equals a,t,g, or c
  misc_feature (400)..(400): n equals a,t,g, or c
  misc_feature (445)..(445): n equals a,t,g, or c
  misc_feature (458)..(458): n equals a,t,g, or c
  misc_feature (461)..(461): n equals a,t,g, or c
  misc_feature (475)..(475): n equals a,t,g, or c
gggagccggcgccgggagtgagccataactggtggctgctcttgcgccaatgagcctccccaattcctcctgcctcttagaagacaagatgtgtgagggcaacaagaccactatggccagcccccagctgatgcccctggtggtggtcctgagcactatctgcttggtcacagtagggctcaacctgctggtgctgtatgccgtacggagtgagcggaagctccacactgtggggaacctgtacatcgtcagcntttcggtggcggacttgatcgtgggtgccgtcgtcatgcctatgaacatcctctacctgctcatgtccaagtggtnantgggccgtcctttntgcctcttttggntttccatggactatgtggccagcacagcgtccattttcagngtcttcatcctgtgcattgatcgctaccgctctgtccacaacccntcaggtaccttangtnttgtaccaaaaccngag

SEQ ID NO: 2479 - DNA, 574 bp, Homo sapiens
  misc_feature (15)..(16): n equals a,t,g, or c
  misc_feature (528)..(528): n equals a,t,g, or c
  misc_feature (549)..(550): n equals a,t,g, or c
  misc_feature (557)..(557): n equals a,t,g, or c
  misc_feature (567)..(567): n equals a,t,g, or c
gcccacgcgtccggnnagtcagatagtgaggaacgattccagttggtagatctgcgtttgtgagggttttattctgttctctgaatcttggccaaaggaaagttggaaggcaactgacagattctgccttttaggtacttgaactggcaggaaatgcatcaaaagacttaaaggtaaagcgtattacccctcgtcacttgcaacttgctattcgtggagatgaataattggattctctcatcaaggctacaattgctggtggtggtatgttaacttctaacattttaaaaaatttcttcataggaaggaattttttgctgcttttaattagtttttccaggagaggaaatttaagtatattttcaatgatggaagtatggttgtatcatgaaatttgatttatatgtataactcaatgaatttttacttcatacttgagctgcatgttttaaagatacctttcaagttgaacagtatacacttcttggtttcaaatactgggattttttaaaaaatttaagtggaatnaattcctgcactcttctaagnnggtattncacacattcncaaaatt

SEQ ID NO: 2480 - DNA, 386 bp, Homo sapiens
  misc_feature (352)..(352): n equals a,t,g, or c
  misc_feature (363)..(363): n equals a,t,g, or c
  misc_feature (369)..(369): n equals a,t,g, or c
  misc_feature (378)..(378): n equals a,t,g, or c
  misc_feature (384)..(384): n equals a,t,g, or c
gcttgtcgggaggagcataagaagaagcacccagatgcttcagtcaacttctcagagttttctaagaagtgctcagagaggtggaagaccatgtctgctaaagagaaaggaaaatttgaagatatggcaaaagcggacaaggcccgttatgaaagagaaatgaaaacctatatccctcccaaaggggagacaaaaaagaagttcaaggatcccaatgcacccaagaggcctccttcggccttcttcctcttctgctctgagtatcgcccaaaaatcaaaggagaacatcctggcctgtccattggtgatgttgcgaagaaactgggagagatgtggaataacactgctgcanatgacaagcancttatnaaaaagaangctgcnaa

SEQ ID NO: 2481 - DNA, 550 bp, Homo sapiens
  misc_feature (10)..(10): n equals a,t,g, or c
  misc_feature (191)..(191): n equals a,t,g, or c
  misc_feature (205)..(206): n equals a,t,g, or c
  misc_feature (346)..(346): n equals a,t,g, or c
  misc_feature (360)..(360): n equals a,t,g, or c
  misc_feature (378)..(378): n equals a,t,g, or c
  misc_feature (383)..(383): n equals a,t,g, or c
  misc_feature (392)..(392): n equals a,t,g, or c
  misc_feature (396)..(396): n equals a,t,g, or c
  misc_feature (399)..(399): n equals a,t,g, or c
  misc_feature (403)..(403): n equals a,t,g, or c
  misc_feature (405)..(405): n equals a,t,g, or c
  misc_feature (412)..(412): n equals a,t,g, or c
  misc_feature (416)..(416): n equals a,t,g, or c
  misc_feature (424)..(424): n equals a,t,g, or c
  misc_feature (427)..(428): n equals a,t,g, or c
  misc_feature (450)..(450): n equals a,t,g, or c
  misc_feature (453)..(454): n equals a,t,g, or c
  misc_feature (476)..(476): n equals a,t,g, or c
  misc_feature (514)..(514): n equals a,t,g, or c
  misc_feature (516)..(516): n equals a,t,g, or c
ggcacgaggnaggaactgattcgtcctgagagaaacacattggttgtgagttttgtggacctggaacaatttaaccagcaactttccaccaccattcaagaggagttctatagagtttacccttacctgtgtcgggccttgaaaacattcgtcaaagactctggaagaagaacttataaataaaaaaagantcatagagaaagtnnttcatcgactcacacactatgatcatgttctaattgagctcacccaggctgggattgaaaggctccacagagggaagtgagagctatgaagaagatccctacttggtagttaaaccctaactacttggctggaggattgnagataagtggaaantaatggaccagagctgangaacngtgggcacncacntcntggncngggagcngggngggagctnggnnagggacaaagtgtttccgggantgnnggcttccaggatttgttttccngaaccaagaattgagttgaaggtcccaagtgtcacatncntcacaggtttcataccaacacaggcttcagcaat

SEQ ID NO: 2482 - DNA, 440 bp, Homo sapiens
  misc_feature (138)..(138): n equals a,t,g, or c
  misc_feature (181)..(181): n equals a,t,g, or c
  misc_feature (204)..(204): n equals a,t,g, or c
  misc_feature (211)..(211): n equals a,t,g, or c
  misc_feature (214)..(214): n equals a,t,g, or c
  misc_feature (218)..(218): n equals a,t,g, or c
  misc_feature (254)..(254): n equals a,t,g, or c
  misc_feature (265)..(265): n equals a,t,g, or c
  misc_feature (276)..(276): n equals a,t,g, or c
  misc_feature (282)..(282): n equals a,t,g, or c
  misc_feature (303)..(303): n equals a,t,g, or c
  misc_feature (317)..(317): n equals a,t,g, or c
  misc_feature (330)..(330): n equals a,t,g, or c
  misc_feature (340)..(340): n equals a,t,g, or c
  misc_feature (359)..(359): n equals a,t,g, or c
  misc_feature (379)..(380): n equals a,t,g, or c
  misc_feature (428)..(428): n equals a,t,g, or c
  misc_feature (440)..(440): n equals a,t,g, or c
ggttctccaacagcttcaggttcatcagtaagtcctggtttatacagtaaaaccatgacccctatatatgaccccatcaatggaacaccagcatcatccaccatgacttggttcagtgacagccctttgacggaacanaactgcagcatcctcgcattcagccaacccccccagtccccanaagcacttgcggatatgtaccancctcggnctntggntgataaagccaagctcaatgcaggttggctagactnctgacgctcgnttatggaacanggcatncaacaggatgagcagctgctnttacgatttaaatnttattgtttcttngacttgaatnctaaatatgatgctgtccnaataaaccaactctatgagnnagccaggtgggccattctcttacaagaaattgattgcacacgaggggngaaatgttagan

SEQ ID NO: 2483 - DNA, 387 bp, Homo sapiens
  misc_feature (5)..(5): n equals a,t,g, or c
  misc_feature (8)..(8): n equals a,t,g, or c
  misc_feature (11)..(11): n equals a,t,g, or c
  misc_feature (13)..(13): n equals a,t,g, or c
  misc_feature (15)..(15): n equals a,t,g, or c
aaggngancgncnancctcactaaagggaacaaaagctggagctccaccgcggtggcggccgctctagaactagtggatcccccgggctgcaggaattcggcacgagccgctacaaccaagagacaccaatggagatctgcctcaatggaacccctgctctggcctacctggcgagtgcgcccccacccctgtgtccaagtggccgcactccagacctgaaggctctactcaacgtggtggacaatgcccggagtttcatctacgtcgctgtcatgaactacctgcccactctggagttctcccacctacgagcgtggcgtcaaggtgcgcctgctcatcagctgctggggacactcggaggccatccatgcgggccttcctgctct

SEQ ID NO: 2484 - DNA, 338 bp, Homo sapiens
  misc_feature (195)..(195): n equals a,t,g, or c
  misc_feature (280)..(280): n equals a,t,g, or c
  misc_feature (313)..(313): n equals a,t,g, or c
aattcggcacgagcacagctcatgttttccagcctgtgtgggagcttggtctgaagagagattaagtgatagcctacttatggatcctggagaattcttcagaaatccatgtgtaactcaggtgcctatttggttatgacaaaagatatggctaatttttattttgaaaagtttgaataaacttagttttctctntttccacttgcaaagagttttgatgatggagactattttcctgtgtggggcacatgccttggatttgaagagcttttgatgctgnttagtggagagtgcttattaactgccacaggtnactgtttgacgtggcaatgccgttg

SEQ ID NO: 2485 - DNA, 496 bp, Homo sapiens
gggagcaggtggcggttttggctcccccatggacatctttgatatgttttttggaggaggaggaaggatgcagagagaaaggagaggtaaaaatgttgtacatcagctctcagtaaccctagaagacttatataatggtgcaacaagaaaactggctctgcaaaagaatgtgatttgtgacaaatgtgaaggtagaggaggtaagaaaggagcagtagagtgctgtcccaattgccgaggtactggaatgcaaataagaattcatcagataggacctggaatggttcagcaaattcagtctgtgtgcatggagtgccagggccatggggagcggatcagtcctaaagatagatgtaaaagctgcaacggaaggaagatagttcgagagaagaaaattttagaagttcatattgacaaaggcatgaaagatggccagaagataacattccatggtgaaggagaccaagaaccaggactggagccaggcgatattatc

SEQ ID NO: 2486 - DNA, 189 bp, Homo sapiens
  misc_feature (18)..(18): n equals a,t,g, or c
  misc_feature (27)..(27): n equals a,t,g, or c
  misc_feature (52)..(52): n equals a,t,g, or c
  misc_feature (58)..(58): n equals a,t,g, or c
  misc_feature (74)..(74): n equals a,t,g, or c
  misc_feature (123)..(123): n equals a,t,g, or c
  misc_feature (139)..(139): n equals a,t,g, or c
  misc_feature (147)..(147): n equals a,t,g, or c
  misc_feature (155)..(155): n equals a,t,g, or c
  misc_feature (188)..(188): n equals a,t,g, or c
catctgaaaaagaatgantcccaacantccctctatcacatatgaacatcantcagtngtttgaatttcatcgnatgatctgggcagacctcagctgcctggtttaccgagctgatacccagncataccagcctttatnaacaaagnctgggttnaaagagaagttctacgtgctccttcgtgggcang

SEQ ID NO: 2487 - DNA, 531 bp, Homo sapiens
  misc_feature (6)..(6): n equals a,t,g, or c
  misc_feature (22)..(22): n equals a,t,g, or c
  misc_feature (154)..(154): n equals a,t,g, or c
  misc_feature (300)..(300): n equals a,t,g, or c
  misc_feature (448)..(448): n equals a,t,g, or c
  misc_feature (478)..(478): n equals a,t,g, or c
  misc_feature (525)..(525): n equals a,t,g, or c
tgaatncccgggtcgacccacncgtccgcccaacacaggcatgctcataaggaaaggttaaaaaaagtaaaaggaactcggcaaatcttaccccgcctgtttaccaaaaacatcacctctagcatcaccagtattagaggcaccgcctgcccantgacacatgtttaacggccgcggtaccctaaccgtgcaaaggtagcataatcacttgttccttaagtagggacctgtatgaatggctccacgagggttcagctgtctcttacttttaaccagtgaaattgacctgcccgtgaagangcgggcatgacacagcaagacgagaagacctatggagctttaatttattaatgcaaacagtacctaacaaacccacaggtcctaaactaccaaacctgcattaaaaatttcggttggggcgaactcggaacaaaaaccaacctccgancaatacatgctaagacttcaccagtccaancgaactactatactccattgatccaataacttgaacaacggaacaanttaccc

SEQ ID NO: 2488 - DNA, 409 bp, Homo sapiens
  misc_feature (7)..(8): n equals a,t,g, or c
  misc_feature (401)..(401): n equals a,t,g, or c
  misc_feature (405)..(406): n equals a,t,g, or c
  misc_feature (408)..(408): n equals a,t,g, or c
gggaaanntctgcgccatgagagccaagtggaggaagaagcgaatgcgcaggctgaagcgcaaaagaagaaagatgaggcagaggtccaagtaaaccgctagcttgttgcaccgtggaggccacaggagcagaaacatggaatgccagacgctggggatgctggtacaagttgtgggactgcatgctactgtctagagcttgtctcaatggatctagaacttcatcgccctctgatcgccgatcacctctgagacccaccttgctcataaacaaaatgcccatgttggtcctctgccctggacctgtgacattctggactatttctgtgtttatttgtggccgagtgtaacaaccatataataaatcacctcttccgctgttttagctgaagaattaaaanctanntna

SEQ ID NO: 2489 - DNA, 497 bp, Homo sapiens
  misc_feature (184)..(184): n equals a,t,g, or c
  misc_feature (351)..(351): n equals a,t,g, or c
  misc_feature (360)..(360): n equals a,t,g, or c
  misc_feature (388)..(389): n equals a,t,g, or c
  misc_feature (423)..(423): n equals a,t,g, or c
  misc_feature (437)..(437): n equals a,t,g, or c
  misc_feature (439)..(439): n equals a,t,g, or c
  misc_feature (455)..(455): n equals a,t,g, or c
  misc_feature (460)..(460): n equals a,t,g, or c
aaaatagtcctttgcttcactacaaaacgtaggatatctggcgggtgatgcgaagattcttaataacatcaatttttcgctgcgtgctggcgaatttaagttaattaccggtccttctggttgtggcaaaagtacgctgctaaaaatagttgcttcattgatcagcccaaccagcggaacgttnactgtttgaaggtgaggatgtcagcacactaaagccagaaatctaccgccaacaagtctcttactgcgcccagacaccgacgctgtttggcgatacggtatacggtaaatctggatctttccctggcagatccgtaaccggcagcctgacccagccatttttctcgnttttttcgnacggtttggctttgccggacagcatttnnacggggatttcgccgggtttttggtggggaaaanaaggatttcatggntngtaacccgcaattttngccgnggttttattgttgggtggaataaccatgggtgggtgg

SEQ ID NO: 2490 - DNA, 171 bp, Homo sapiens
  misc_feature (44)..(44): n equals a,t,g, or c
  misc_feature (58)..(58): n equals a,t,g, or c
  misc_feature (71)..(71): n equals a,t,g, or c
  misc_feature (105)..(105): n equals a,t,g, or c
  misc_feature (122)..(122): n equals a,t,g, or c
  misc_feature (147)..(147): n equals a,t,g, or c
  misc_feature (157)..(157): n equals a,t,g, or c
  misc_feature (171)..(171): n equals a,t,g, or c
gtccggaattcccgggtcgacccacgcgtccggtcctttgcttncatggaggtcctgnactggacacacgngaaggagcagctggaaactctccggaagctgcanaggagggaggtggctgngcagtggctgcggcctgcagaggangaccacctgnaggattccctggan

SEQ ID NO: 2491 - DNA, 448 bp, Homo sapiens
  misc_feature (294)..(294): n equals a,t,g, or c
  misc_feature (344)..(344): n equals a,t,g, or c
  misc_feature (405)..(405): n equals a,t,g, or c
  misc_feature (419)..(419): n equals a,t,g, or c
  misc_feature (426)..(426): n equals a,t,g, or c
  misc_feature (431)..(431): n equals a,t,g, or c
  misc_feature (444)..(444): n equals a,t,g, or c
gactagttctagatcgcgagcggccgccctttttttttttttttttttaatggtatgaatctcatttattgaaaacattatttctcacctttctcaaattgaagactgcaaaaaataaaagcagtgctttattgagttgtcatgagcctcgggcgggagcagcagcactgcctctccacgctccgggaaaccgcagctggcgtgtgccacatcggtcccacctcgctttacaaaacagtcctgaagcttaatcaaataaaattattgtacacaacatttacattagaaaaaganagctgggtgtaggaaagccgggcctggtgttccctttaagcgaaggtggntccacagttggggcatcgtcgcttcctcaaggcaaaacagcaaatgaacccaaaggggaanaggatgatggccangaagatncccangaaggtgaagcantcct

SEQ ID NO: 2492 - DNA, 370 bp, Homo sapiens
  misc_feature (29)..(29): n equals a,t,g, or c
  misc_feature (53)..(53): n equals a,t,g, or c
  misc_feature (74)..(74): n equals a,t,g, or c
  misc_feature (98)..(98): n equals a,t,g, or c
  misc_feature (104)..(104): n equals a,t,g, or c
  misc_feature (175)..(175): n equals a,t,g, or c
  misc_feature (194)..(194): n equals a,t,g, or c
  misc_feature (201)..(201): n equals a,t,g, or c
  misc_feature (205)..(205): n equals a,t,g, or c
  misc_feature (207)..(207): n equals a,t,g, or c
  misc_feature (209)..(209): n equals a,t,g, or c
  misc_feature (215)..(215): n equals a,t,g, or c
  misc_feature (223)..(223): n equals a,t,g, or c
  misc_feature (231)..(231): n equals a,t,g, or c
  misc_feature (235)..(235): n equals a,t,g, or c
  misc_feature (250)..(250): n equals a,t,g, or c
  misc_feature (267)..(267): n equals a,t,g, or c
  misc_feature (337)..(337): n equals a,t,g, or c
  misc_feature (347)..(347): n equals a,t,g, or c
  misc_feature (351)..(352): n equals a,t,g, or c
  misc_feature (369)..(369): n equals a,t,g, or c
cccacgcgtccgaagatcatcttctgatntgttggtttttgaatatactaaanaccctgctaaaccagaccaantggaaaatgtaatcctgatctcanattaanaagtcccataaggaagctatggtctctcctgaaattcaaatttgaatggaaatctcctaatgcatctgatnaacatactgtttgtctgtnggatatnggcncngnaacaanagaatgcnaaattgtngatnctaaaccatctttantggccactcaactgttnttaaaagatgtgactggcacctgctgcacaattcattgtatggatctgttgctgatgatcaaaacttatnatatggaacncaanntccaatacaactccaanc

SEQ ID NO: 2493 - DNA, 383 bp, Homo sapiens
  misc_feature (318)..(318): n equals a,t,g, or c
  misc_feature (325)..(325): n equals a,t,g, or c
  misc_feature (349)..(349): n equals a,t,g, or c
  misc_feature (352)..(352): n equals a,t,g, or c
  misc_feature (380)..(380): n equals a,t,g, or c
ctggtaggttcgcaggtacaggtccggaattcccgggtcgacccacgcgtccggaagatgcagaagatcggcctccagaactcctgtttattcatggaggacacactgctaagatttcagattttagctggaaccccaatgagccttgggtcatttgctcagtgtctgaggataacatcatgcagatatggcaaatggctgaaaatatttacaatgatgaagagtcagatgtcacgacatccgaactggagggacaaggatcttaaacccaaagtacgagaaatgtttctgttgaatgtaatgctacatgaatgcttnatttatntttcgccaaaaaggcattgtatantangaaatgtaagtggggtggcttatggctnctt

SEQ ID NO: 2494 - DNA, 583 bp, Homo sapiens
  misc_feature (6)..(7): n equals a,t,g, or c
  misc_feature (43)..(43): n equals a,t,g, or c
  misc_feature (56)..(56): n equals a,t,g, or c
  misc_feature (123)..(123): n equals a,t,g, or c
  misc_feature (140)..(140): n equals a,t,g, or c
  misc_feature (147)..(147): n equals a,t,g, or c
  misc_feature (189)..(189): n equals a,t,g, or c
  misc_feature (213)..(213): n equals a,t,g, or c
  misc_feature (217)..(217): n equals a,t,g, or c
  misc_feature (222)..(222): n equals a,t,g, or c
  misc_feature (253)..(253): n equals a,t,g, or c
  misc_feature (330)..(330): n equals a,t,g, or c
  misc_feature (332)..(332): n equals a,t,g, or c
  misc_feature (348)..(348): n equals a,t,g, or c
  misc_feature (369)..(369): n equals a,t,g, or c
  misc_feature (419)..(419): n equals a,t,g, or c
  misc_feature (430)..(430): n equals a,t,g, or c
  misc_feature (485)..(485): n equals a,t,g, or c
  misc_feature (493)..(493): n equals a,t,g, or c
  misc_feature (541)..(541): n equals a,t,g, or c
  misc_feature (543)..(543): n equals a,t,g, or c
  misc_feature (570)..(570): n equals a,t,g, or c
aacagnnctgaccatgattacgccaagctctaatacgactcantatagggaaattntggtacgcctgcaggtaccggtccggaattcccgggtcgacccacgcgtccgcccagctgggatctnagggcttccttttctgncctcctncaggatggggtcaaccgccatcctcgccctcctcctggctgntctccaaggagtctgtgccgaagngcanctggngcagtccggagtagaggtgaaaaagcccggngagtctctgaggatctctgtaaggtttctggatacagctttaccagctactggatcaagtgggtgcgccagatgccngngaaaggcctggagtgnatggcgaggattgatcctagngactcttataccaactacagcccgtccttccaaggccacgtcaccatctnagctgacaagnccatcagcactgctacctgcagtggagcagctgaaggcctcggacaccggcatgnattactgngccagacatgaagccagaggcttggactactttgactactggggccangnaaccctggtaccgcttcttagcttcancaagggccatcgg

SEQ ID NO: 2495 - DNA, 243 bp, Homo sapiens
  misc_feature (48)..(48): n equals a,t,g, or c
  misc_feature (206)..(206): n equals a,t,g, or c
  misc_feature (228)..(228): n equals a,t,g, or c
  misc_feature (232)..(232): n equals a,t,g, or c
  misc_feature (238)..(239): n equals a,t,g, or c
gtctggaactgcctctgttgtgtgcctgctgaataacttctatcccanagaggccaaagtacagtggaaggtggataacgccctccaatcgggtaactcccaggagagtgtcacagagcaggacagcaaggacagcacctacagcctcagcagcaccctgacgctgagcaaagcagactacgagaaacacaaagtctacgcctgcnaagtcacccatcagggcctganctcncccgtnncaaa

SEQ ID NO: 2496 - DNA, 396 bp, Homo sapiens
  misc_feature (323)..(323): n equals a,t,g, or c
  misc_feature (329)..(329): n equals a,t,g, or c
  misc_feature (363)..(363): n equals a,t,g, or c
  misc_feature (378)..(378): n equals a,t,g, or c
  misc_feature (382)..(382): n equals a,t,g, or c
gccttctcacaatgaggctccctgctcagctcctggggctgctaatgctctgggtctctggatccagtgggaatattgtgatgactcagtctccagtctccctatacgtcacccctggagagccggcctccatctcctgcaggtctagtcagaccctcctgcatagtaatggatacaactatttggattggtacctgcagaagccagggcagtctccacagctcctgatctatttgggttctaatcgggcctccggggtccctgacaggttcagtggcagtgggtcaggcacagactttacactgaaaatcaccagagtggangctgangatgttgggggttattattactggatgcaagctntacaaattcattcantttnggccctggaccaaa

SEQ ID NO: 2497 - DNA, 407 bp, Homo sapiens
  misc_feature (141)..(141): n equals a,t,g, or c
  misc_feature (193)..(193): n equals a,t,g, or c
  misc_feature (279)..(279): n equals a,t,g, or c
  misc_feature (314)..(314): n equals a,t,g, or c
  misc_feature (326)..(326): n equals a,t,g, or c
  misc_feature (342)..(342): n equals a,t,g, or c
  misc_feature (383)..(383): n equals a,t,g, or c
  misc_feature (396)..(396): n equals a,t,g, or c
gtccactatggcctgggctccactacttctcaccctcctcgctcactgcacaggttcttgggccatttttatgctgactcagccccactctgtgtcggagtctccggggaagacggtaaccatctcctgcacccgcagcantggcaagcattgccagcaactatgtgcagtggttccagcagcgcccgggcangttcccccaccactgtgatctatgaggataaccaaagaccctctggggtccctgatcggttctctggcttacatcgacagctcctncaactctgccttccttaccattctctggactgaanactgaggacgangctgactactactggnagtcttattaataacaagcaatgttgggtatttcggcgganggaccaaaacctnaaccttctaag

SEQ ID NO: 2498 - DNA, 244 bp, Homo sapiens
  misc_feature (5)..(5): n equals a,t,g, or c
  misc_feature (34)..(34): n equals a,t,g, or c
  misc_feature (39)..(39): n equals a,t,g, or c
  misc_feature (85)..(85): n equals a,t,g, or c
  misc_feature (87)..(87): n equals a,t,g, or c
  misc_feature (113)..(113): n equals a,t,g, or c
  misc_feature (131)..(131): n equals a,t,g, or c
  misc_feature (141)..(141): n equals a,t,g, or c
  misc_feature (159)..(159): n equals a,t,g, or c
  misc_feature (204)..(204): n equals a,t,g, or c
  misc_feature (209)..(209): n equals a,t,g, or c
  misc_feature (217)..(218): n equals a,t,g, or c
ggcanagccagagggaaccatggaaaccccagcncattncttttcctcctgctactctggctcccagataccaccggagaaaatntnttgacgcatttcccaggcaccctgtntttttttccaggggaaanagccaccctntcctgctgggccagtcanagtgtttacagcagctacttagcctggtaccagcagaaacctggncaagntcccaggnncctcatctatggtgcatccagcaggg

SEQ ID NO: 2499 - DNA, 370 bp, Homo sapiens
  misc_feature (9)..(9): n equals a,t,g, or c
  misc_feature (22)..(22): n equals a,t,g, or c
  misc_feature (29)..(29): n equals a,t,g, or c
  misc_feature (53)..(53): n equals a,t,g, or c
  misc_feature (81)..(81): n equals a,t,g, or c
  misc_feature (148)..(148): n equals a,t,g, or c
  misc_feature (161)..(161): n equals a,t,g, or c
  misc_feature (204)..(204): n equals a,t,g, or c
  misc_feature (228)..(228): n equals a,t,g, or c
  misc_feature (248)..(248): n equals a,t,g, or c
  misc_feature (289)..(289): n equals a,t,g, or c
  misc_feature (311)..(311): n equals a,t,g, or c
  misc_feature (337)..(337): n equals a,t,g, or c
  misc_feature (357)..(357): n equals a,t,g, or c
  misc_feature (361)..(361): n equals a,t,g, or c
gtcgtcccnctagatggacatnaggtccncgctcacctcctggggctcctgcnctctgctccgagggccagatgtgacgtncagatgacccatctcattcttctgctgcatctgtaggagacagagtcaccatcacttgcccgggcangtcagagcattancagcgatgtaaattggatcagcagacaatatggaaagccctancctcctgatctatgctgcatcaantcgcatagtggggcccatanggtcagtgcagtgatctgggacagacttcactctcacatancagtctgcacctgagatttganctactactgcaacagagtacagaggnactcacgttagcatggaacnatgnagattaaca

SEQ ID NO: 2500 - DNA, 473 bp, Homo sapiens
  misc_feature (56)..(56): n equals a,t,g, or c
  misc_feature (65)..(65): n equals a,t,g, or c
  misc_feature (125)..(125): n equals a,t,g, or c
  misc_feature (139)..(139): n equals a,t,g, or c
  misc_feature (196)..(196): n equals a,t,g, or c
  misc_feature (225)..(225): n equals a,t,g, or c
  misc_feature (235)..(235): n equals a,t,g, or c
  misc_feature (251)..(251): n equals a,t,g, or c
  misc_feature (285)..(285): n equals a,t,g, or c
  misc_feature (296)..(296): n equals a,t,g, or c
  misc_feature (350)..(350): n equals a,t,g, or c
  misc_feature (393)..(393): n equals a,t,g, or c
  misc_feature (406)..(406): n equals a,t,g, or c
  misc_feature (448)..(448): n equals a,t,g, or c
  misc_feature (452)..(452): n equals a,t,g, or c
  misc_feature (463)..(463): n equals a,t,g, or c
ggcagagcagcactctcgggaacgtctccaccatggcctgggctctgctcctcctnagcctcctnactcagggcacaggatcctgggctcagtctgccctgactcaacctcgctcagtgtccggntctcctggacagtnagtcaccatctcctgcactgggaaccagcagtgaatgttggtggttataactttgtntcctggtaccaacaggacccaggcaaagnccccaaactnatgatttatgaatgtncacttaagcgggccctcaggggtccctgaatcgntttctttgggntccaagttttggcaacacggccttccctggaccattttttggggttccaggttnaggatgacggtggattattaactggttggttcatatttcaggnggcttacaatagnttatgtttttcgggaattggggaccaaggttcaacgtcctgnggtnagccccagggncaaacccatt

SEQ ID NO: 2501 - DNA, 510 bp, Homo sapiens
  misc_feature (54)..(54): n equals a,t,g, or c
  misc_feature (67)..(67): n equals a,t,g, or c
  misc_feature (119)..(119): n equals a,t,g, or c
  misc_feature (145)..(145): n equals a,t,g, or c
  misc_feature (264)..(264): n equals a,t,g, or c
  misc_feature (320)..(320): n equals a,t,g, or c
  misc_feature (330)..(330): n equals a,t,g, or c
  misc_feature (338)..(338): n equals a,t,g, or c
  misc_feature (341)..(341): n equals a,t,g, or c
  misc_feature (358)..(358): n equals a,t,g, or c
  misc_feature (376)..(377): n equals a,t,g, or c
  misc_feature (383)..(385): n equals a,t,g, or c
  misc_feature (387)..(388): n equals a,t,g, or c
  misc_feature (390)..(390): n equals a,t,g, or c
  misc_feature (394)..(394): n equals a,t,g, or c
  misc_feature (406)..(406): n equals a,t,g, or c
  misc_feature (414)..(414): n equals a,t,g, or c
  misc_feature (416)..(416): n equals a,t,g, or c
  misc_feature (420)..(420): n equals a,t,g, or c
  misc_feature (435)..(435): n equals a,t,g, or c
  misc_feature (445)..(447): n equals a,t,g, or c
  misc_feature (453)..(453): n equals a,t,g, or c
  misc_feature (457)..(458): n equals a,t,g, or c
  misc_feature (462)..(462): n equals a,t,g, or c
  misc_feature (469)..(469): n equals a,t,g, or c
  misc_feature (473)..(473): n equals a,t,g, or c
  misc_feature (481)..(482): n equals a,t,g, or c
  misc_feature (494)..(495): n equals a,t,g, or c
  misc_feature (497)..(497): n equals a,t,g, or c
  misc_feature (505)..(506): n equals a,t,g, or c
  misc_feature (509)..(509): n equals a,t,g, or c
aattcggcagagcaggaggcagcgctctcgggtcgtttccaccatggcctgggntctgctattcctnaccctgctcactcagggcacagggtcctgggcccagtctgccctgactcagnctgcctccgtgtctgggtctcctggnacagtcgatcaccatctcctgcactgggaacaagtagtgacgttggtggctataaattatgtcttctggtaccatcaataacccaggcaaagccccccaaccctggttttatggatgtnagttattgggcctaaggggttttttaaatgcgctttttttgggttccaagtttggnaaaaaggggncttccttngancatttttggggttcccnccctggggggggtttttnntttttnnntnngngctnttttggaaaggnccccactntntttntttgggggggggggncccaattttnnncctttngggnnaaanaaggttncccnggggggtnntttttccccccnngngggggggnnaana

SEQ ID NO: 2502 - DNA, 510 bp, Homo sapiens
  misc_feature (97)..(97): n equals a,t,g, or c
  misc_feature (425)..(425): n equals a,t,g, or c
  misc_feature (468)..(468): n equals a,t,g, or c
  misc_feature (471)..(471): n equals a,t,g, or c
  misc_feature (487)..(487): n equals a,t,g, or c
  misc_feature (493)..(493): n equals a,t,g, or c
gaaagctggtacgcctgcaggtaccggtccggaattcccgggtcgacccacgcgtccgctctttgtggtggcagcagctacaggtgtcctgtcccanctgcagttggtgcagtcaggggctgaggtgaggaagcctgggtcttcggtgaatatctcctgcaaggcttctggaggcaccttcagtagatatgctgtcacctgggtgcgacaggcccctggacaaggccttgagtgggtgggaggcatcactcctgtctatggtacgacacactatgcagataatttgcgcggccgggtcaccataacggcggacaaatccacgaacatagcctatatggaattgaagagcctgaaatttgaagacacggccatgtatttctgtgcgagggttcacaactcctatgacagttcggctctcaattggntcgacccctggggccagggaactctggtcaccgtctcctcagnctncaccaagggcccatcngtcttncccctggcacccttctt

SEQ ID NO: 2503 - DNA, 249 bp, Homo sapiens
ggactcctctaccagctacagtgcgtccttccgaggccacgtcatcatctcagctgacaactccatcagcactgcctacctgcagtggagcagcctgaaggcctcggacagcgccatttatttctgtgcgagacctattgcgagtgtgaaagctcgtctggtggcaccaagcaaggactactggggccagggaaccctggtcaccgtctcctcagcctccaccaagggcccatcggtcttccccctgga

SEQ ID NO: 2504 - DNA, 490 bp, Homo sapiens
  misc_feature (14)..(14): n equals a,t,g, or c
  misc_feature (421)..(421): n equals a,t,g, or c
  misc_feature (456)..(456): n equals a,t,g, or c
  misc_feature (465)..(465): n equals a,t,g, or c
  misc_feature (483)..(483): n equals a,t,g, or c
  misc_feature (487)..(487): n equals a,t,g, or c
ggtagccccagccntgagattcccaggagtttccacttggtgatcagcactgaacacagaccaccaaccatggagtttgggcttagctgggttttccttgttgctattttaaaaggtgtccaatgtgaggtgcggctggtggagtctgggggaggcttggttcagccagggcggtccctgagactctcctgtacaactcctggattcacctttgatgattatgcgatgaactggttccgccaggctccagggagggggctggagtgggtgggtttcattagaagcaaaacttatggtgggacaacacaatacgccgcggctgtgaaaggcagattcaccatctcaagagatgattccaaaagtatcgtctatctgcaaatgaacagcctgaagaccgaggacacagcccgtgtattattgngctaaagaagggtattgtaataagtaccaacttgnttgggccanggaaccctggtcaccggnttcntta

SEQ ID NO: 2505 - DNA, 489 bp, Homo sapiens
  misc_feature (11)..(11): n equals a,t,g, or c
  misc_feature (83)..(83): n equals a,t,g, or c
  misc_feature (132)..(132): n equals a,t,g, or c
  misc_feature (164)..(164): n equals a,t,g, or c
  misc_feature (239)..(239): n equals a,t,g, or c
  misc_feature (280)..(280): n equals a,t,g, or c
  misc_feature (334)..(334): n equals a,t,g, or c
  misc_feature (360)..(360): n equals a,t,g, or c
  misc_feature (382)..(382): n equals a,t,g, or c
  misc_feature (395)..(395): n equals a,t,g, or c
  misc_feature (401)..(401): n equals a,t,g, or c
  misc_feature (411)..(411): n equals a,t,g, or c
  misc_feature (416)..(418): n equals a,t,g, or c
  misc_feature (438)..(440): n equals a,t,g, or c
  misc_feature (444)..(445): n equals a,t,g, or c
  misc_feature (452)..(453): n equals a,t,g, or c
  misc_feature (467)..(467): n equals a,t,g, or c
  misc_feature (471)..(471): n equals a,t,g, or c
  misc_feature (473)..(474): n equals a,t,g, or c
  misc_feature (486)..(486): n equals a,t,g, or c
  misc_feature (488)..(488): n equals a,t,g, or c
gaattcggcanagcagtaccccgtacacttttggccaggggaccaaactggagatcaaaggaactttggctgcaccatctgtnttcatcttaccgccatctgatgagcagttgaaatctggaactgcctctnttgtgtgcctgctgaataacttctatcccagngaggccaaagtacagtggaaggtggataacgccctccaatcgggtaacttccaggtggagtgtcacagagcaggncagcaaggacagcacctacagcctcagcagcaccctgacgntgagcaaagcagactacggggaaacacaaagttttacggctgcgagttcacccntcagggccttaggttggcccgttaanaaggggttttaacagggggggntttttaggggggngggttncccccccttnttctnnnttttccattttaccccttcnnntttnnggctttnnctttttaaaagggngggncnncccttttggggncnc

SEQ ID NO: 2506 - DNA, 579 bp, Homo sapiens
  misc_feature (1)..(1): n equals a,t,g, or c
  misc_feature (39)..(39): n equals a,t,g, or c
  misc_feature (380)..(380): n equals a,t,g, or c
  misc_feature (413)..(413): n equals a,t,g, or c
  misc_feature (461)..(461): n equals a,t,g, or c
  misc_feature (467)..(467): n equals a,t,g, or c
  misc_feature (517)..(517): n equals a,t,g, or c
  misc_feature (547)..(547): n equals a,t,g, or c
  misc_feature (555)..(555): n equals a,t,g, or c
  misc_feature (564)..(564): n equals a,t,g, or c
  misc_feature (571)..(571): n equals a,t,g, or c
nttttttaaattggtatcagcagaaaccagggaaagccnctgagctcctgatctatgctgcttctgctttgcgaggtggggtcccatcaaggttcagtggcagtggatctgggacagatttcactctcaccatcagcagtctgcagcctgaagattttgcaacttacttctgtcaacagagtgacgatttcccttttagcttcggccaagggacacgactggagatgaaacgaactgtggctgcaccatctgtcttcatcttcccgccatctgatgagcagttgaaatctggaactgcctctgttgtgtgcctgctgaataacttctatcccagagaggccaaagtacagtggaaggtggataacgccctccaatcgggnactcccaggagagtgtcacagagcaggacagcnaggacagcacctacagcctcagcagcaccctgacgctgagcaaagcanactacnagaaacacaaagtctacgcctgcgaagtcacccatcaaggcctgagctcncccgtcacaaagagcttaacaggggagagngttaaaanggagaaatncccccanctgctcct

SEQ ID NO: 2507 - DNA, 499 bp, Homo sapiens
  misc_feature (14)..(14): n equals a,t,g, or c
  misc_feature (147)..(147): n equals a,t,g, or c
  misc_feature (183)..(183): n equals a,t,g, or c
  misc_feature (244)..(244): n equals a,t,g, or c
  misc_feature (340)..(340): n equals a,t,g, or c
  misc_feature (350)..(350): n equals a,t,g, or c
  misc_feature (352)..(353): n equals a,t,g, or c
  misc_feature (357)..(357): n equals a,t,g, or c
  misc_feature (379)..(379): n equals a,t,g, or c
  misc_feature (388)..(388): n equals a,t,g, or c
  misc_feature (402)..(402): n equals a,t,g, or c
  misc_feature (406)..(406): n equals a,t,g, or c
  misc_feature (411)..(413): n equals a,t,g, or c
  misc_feature (416)..(416): n equals a,t,g, or c
  misc_feature (420)..(421): n equals a,t,g, or c
  misc_feature (444)..(444): n equals a,t,g, or c
  misc_feature (448)..(448): n equals a,t,g, or c
  misc_feature (457)..(457): n equals a,t,g, or c
  misc_feature (460)..(461): n equals a,t,g, or c
  misc_feature (468)..(468): n equals a,t,g, or c
  misc_feature (473)..(473): n equals a,t,g, or c
  misc_feature (476)..(476): n equals a,t,g, or c
  misc_feature (486)..(487): n equals a,t,g, or c
  misc_feature (490)..(490): n equals a,t,g, or c
  misc_feature (494)..(494): n equals a,t,g, or c
aattcggcagaggnaaaccccagcgcattcttttcctcctgtagggccagtcagagtgttagtaccaggttcgtagcctggtaccaacagaaacttggccaggctcccagggtcctcatttatagtacatcctccagggcccctggnattcccagaacaggttcagtggcagtgggtctgggnactgaactttcacttcttcaacatcagcgggcctgggagcctgaagattttgcagtattantactgtgcaactcttatcgtagggccctcgggcacttttcgggcggaggggacccaaggtgggagattgagacggaactttgggcttgcaaccatnttgttttttnanntttnccggccattttgattggggcantttggaaanttttgggacttgcncttntttgnnnttncccnnttggaaaaaatttttttttcccngggnggggccaanttnnaaagggnagggnggnttaaagggcnntcnaatnggggg

SEQ ID NO: 2508 - DNA, 496 bp, Homo sapiens
  misc_feature (103)..(103): n equals a,t,g, or c
  misc_feature (447)..(447): n equals a,t,g, or c
  misc_feature (463)..(463): n equals a,t,g, or c
  misc_feature (489)..(489): n equals a,t,g, or c
gtccactatggcctgggctccactacttctcaccctcctcgctcactgcacaggttcttgggccatttttatgctgactcagccccactctgtgtcggagccnccggggaagacggtaaccatctcctgcacccgcagcagtggcagcattgccagcaactatgtgcagtggttccagcagcgcccgggcagttcccccaccactgtgatctatgaggataaccaaagaccctctggggtccctgatcggttctctggctccatcgacagctcctccaactctgcctccctcaccatctctggactgaagactgaggacgaggctgactactactgtcagtcttatgatagcagcaatgtggtattcggcggagggaccaaactgaccgtcctaggtcaagcccaaggcttgcccctcggtcactctgttcccgccctccttctgangagctttaagccaacnaggccacactggtgtgtctcataagngattcta

SEQ ID NO: 2509 - DNA, 433 bp, Homo sapiens
ggccccagccgtgagattcccaggagtttccacttggtgatcagcactgaacacagaccaccaaccatggagtttgggcttagctgggttttccttgttgctattttaaaagcctccaccaagggcccatcggtcttccccctggcaccctcctccaagagcacctctgggggcacagcggccctgggctgcctggtcaaggactacttccccgaaccggtgacggtgtcgtggaacttaggcgcccttgaccagcggcgtgcacaccttcccggctgtcctacagtcctcaggactctactccctcagcagcgtggtgaccgtgccctccagcagcttgggcacccagacctacatctgcaacgtgaatcacaagcccagcaacaccaaggtggacaagagagttgagcccaaatcttgtgacaaaactcac

SEQ ID NO: 2510 - DNA, 518 bp, Homo sapiens
  misc_feature (253)..(253): n equals a,t,g, or c
  misc_feature (263)..(263): n equals a,t,g, or c
  misc_feature (284)..(284): n equals a,t,g, or c
  misc_feature (295)..(295): n equals a,t,g, or c
  misc_feature (316)..(316): n equals a,t,g, or c
  misc_feature (369)..(369): n equals a,t,g, or c
  misc_feature (391)..(391): n equals a,t,g, or c
  misc_feature (454)..(454): n equals a,t,g, or c
  misc_feature (475)..(475): n equals a,t,g, or c
  misc_feature (477)..(477): n equals a,t,g, or c
  misc_feature (491)..(491): n equals a,t,g, or c
  misc_feature (506)..(506): n equals a,t,g, or c
gggaagcagcactggtggtgcctcagccatggcctggaccgttctcctcctcggcctcctctctcactgcacaagcctctgtgacctcctatgtgctgactcagccaccctcggtgtcagtggccccaggacagacggccaggattacctgtggggcaaacaacattggaattaaaaatgtgcactggtaccagcagaagccaggccaggcccctgtgctggtcgtctatgatgataagcgaccggccctcancgatcctgancgaattttttggttccaactnttgggaacacnggccaccctgaccatcaacanggtcgaaccggggatgaagccgactattactgtcaggtgtgggatactagtantgccaaggagtgttcggcgganggaccaaacttaccgtctaattaacccaaggctgcccctcggtcactctgttccacccttctnttaagaacttcaaccaaaaangncacacttggtgtgncttataaatgacttntacccggaaccc

SEQ ID NO: 2511 - DNA, 402 bp, Homo sapiens
  misc_feature (341)..(341): n equals a,t,g, or c
  misc_feature (345)..(345): n equals a,t,g, or c
  misc_feature (364)..(364): n equals a,t,g, or c
  misc_feature (372)..(372): n equals a,t,g, or c
  misc_feature (380)..(380): n equals a,t,g, or c
gcaggaggcaagctctgtcggaatatctccaccatggcctgggctctgctcctcctcaccctcctcactcagggcacaggatcctgggctcagtctgccctgactcagcctccctccgtgtccgggtctcctggacagtcagtcaccatctcctgcactggaaccagcagtgacgttggtggttataaccgtgtctcctggtaccagcagtccccaggcacagcccccaaactcatgatttatgaggtcagtaatcggccctcaagagtccctgatcgcttctctgggtccaagtctggcaacacgggcttccttgacatcttttgggctccaagcttgangacnaaaggtgaattattactgnctgctcgnatcaaagnaagtaagttttttttcctattt

SEQ ID NO: 2512 - DNA, 349 bp, Homo sapiens
  misc_feature (8)..(8): n equals a,t,g, or c
  misc_feature (14)..(14): n equals a,t,g, or c
  misc_feature (41)..(41): n equals a,t,g, or c
  misc_feature (92)..(92): n equals a,t,g, or c
  misc_feature (102)..(102): n equals a,t,g, or c
  misc_feature (223)..(223): n equals a,t,g, or c
  misc_feature (240)..(240): n equals a,t,g, or c
  misc_feature (246)..(246): n equals a,t,g, or c
  misc_feature (268)..(268): n equals a,t,g, or c
  misc_feature (290)..(291): n equals a,t,g, or c
  misc_feature (303)..(303): n equals a,t,g, or c
  misc_feature (338)..(338): n equals a,t,g, or c
ggcacgancttganttggtttcaccagaggccaggccagtntccaaggcgcctactttataagatttctaatcgggaactctggcgtcccanacagattcancggcagtggggtcaggcactgatttgcacactgaaaatcagcagggtggaggctgaggatgttggcatttattaactgcatgcaaaggttcacactggcctcggaacgttcggccaagggnaccaaggtgggaaatcnaaacgnaactgtggctgcaccatctgtnttcatctttcccggccatctgnntgagccatttgnaaatctggaactgcctctgttgtgtgccctgctgnataactttcta

SEQ ID NO: 2513 - DNA, 169 bp, Homo sapiens
  misc_feature (1)..(1): n equals a,t,g, or c
  misc_feature (9)..(9): n equals a,t,g, or c
  misc_feature (29)..(29): n equals a,t,g, or c
  misc_feature (117)..(117): n equals a,t,g, or c
  misc_feature (126)..(126): n equals a,t,g, or c
  misc_feature (158)..(160): n equals a,t,g, or c
ngaaaaaangggggattctccctcacttnaagggaacaaacagctggcagctccaccgcggtggcggccgctctacaactactggatcccccgggctgcaggaatactgcaccaccntaacaacangtttgtgctattcactgtggcataacaatggnnnaattagtcg

SEQ ID NO: 2514 - DNA, 140 bp, Homo sapiens
  misc_feature (1)..(1): n equals a,t,g, or c
  misc_feature (9)..(9): n equals a,t,g, or c
  misc_feature (36)..(37): n equals a,t,g, or c
  misc_feature (58)..(58): n equals a,t,g, or c
  misc_feature (103)..(103): n equals a,t,g, or c
  misc_feature (115)..(115): n equals a,t,g, or c
  misc_feature (125)..(125): n equals a,t,g, or c
  misc_feature (134)..(134): n equals a,t,g, or c
ncgattgcnccctttctaaaagggaaccaaagctgnncctccaccgaggtggcggacnttctagaactagtggatcccccgggctgcaggaattcggcacganctccatctcaanaaaaaaaaanaaaaaaaancccaaa

SEQ ID NO: 2515 - DNA, 107 bp, Homo sapiens
  misc_feature (1)..(1): n equals a,t,g, or c
  misc_feature (24)..(24): n equals a,t,g, or c
  misc_feature (26)..(26): n equals a,t,g, or c
  misc_feature (52)..(52): n equals a,t,g, or c
  misc_feature (60)..(60): n equals a,t,g, or c
  misc_feature (107)..(107): n equals a,t,g, or c
ngttttttcgaattaaccccctcncntggaataaaactggagctccaccgcngtggcggncgctctaaaactaatggatcccccgggctgcaggaattcggcacgan

SEQ ID NO: 2516 - DNA, 104 bp, Homo sapiens
  misc_feature (26)..(26): n equals a,t,g, or c
  misc_feature (28)..(28): n equals a,t,g, or c
  misc_feature (95)..(95): n equals a,t,g, or c
  misc_feature (97)..(97): n equals a,t,g, or c
  misc_feature (101)..(101): n equals a,t,g, or c
ccctctctaaaaggacaaaagctggncnccaccgcggtggcggccgctctagaactagtggatcccccgggctgcaggaattcggcacgaggtcngnctangcc

SEQ ID NO: 2517 - DNA, 134 bp, Homo sapiens
  misc_feature (9)..(9): n equals a,t,g, or c
  misc_feature (17)..(17): n equals a,t,g, or c
  misc_feature (25)..(25): n equals a,t,g, or c
  misc_feature (48)..(48): n equals a,t,g, or c
  misc_feature (72)..(72): n equals a,t,g, or c
  misc_feature (120)..(121): n equals a,t,g, or c
  misc_feature (123)..(123): n equals a,t,g, or c
attacgttnagctggcncaattaancctcaataattgggaacaaggcnctggagctccaccgcggtggcggncgctctagaactagtggatcccccgggctgcaggaattcggcacgagnncnagtccatgacc

SEQ ID NO: 2518 - DNA, 124 bp, Homo sapiens
  misc_feature (10)..(10): n equals a,t,g, or c
  misc_feature (19)..(19): n equals a,t,g, or c
  misc_feature (30)..(30): n equals a,t,g, or c
  misc_feature (32)..(32): n equals a,t,g, or c
  misc_feature (56)..(56): n equals a,t,g, or c
  misc_feature (113)..(113): n equals a,t,g, or c
  misc_feature (117)..(117): n equals a,t,g, or c
gccaattaancctcaatanttgggaacaananctggagctccaccgcggtggcggncgctctagaactagtggatcccccgggctgcaggaattcggcacgaggccatgttancgangacattt

SEQ ID NO: 2519 - DNA, 562 bp, Homo sapiens
  misc_feature (1)..(1): n equals a,t,g, or c
  misc_feature (14)..(14): n equals a,t,g, or c
  misc_feature (25)..(25): n equals a,t,g, or c
ncctcactaagggnacaaagctggngctccaccgcggtggcggccgctctagaactagtggatcccccgggctgcaggaattcggcacgagaccccatacagaaaccacctaccctcggggaggcttaattacctggtaatgtcgcagctgcactgctacctgtgtattttctgttttaatactggtagctctcaccacataagcttaattactgggggcagagtgacatgctcgtgcacagtcaagattccactaaaatggtttgatttcgttgtaaatagtctcgtattgcctaatgcattaaaactcttgaaatgattgtattgctaggccctttcttcaaaacgggctttcttcgcattatttagtttacaggtggacttttttttttttaaaggaagccaaattattgaatgtgtaagagtactataaaaagctgattgctcatcttgagtgtcaagacccagttccgggtactttattctttagatttggtagtgtagcattatcgaccctctgccctatgttgctgtactgtttcctttaaaaggaaatggctga

SEQ ID NO: 2520 - DNA, 440 bp, Homo sapiens
  misc_feature (1)..(1): n equals a,t,g, or c
  misc_feature (13)..(13): n equals a,t,g, or c
  misc_feature (417)..(417): n equals a,t,g, or c
nctcataagggancaaagctggtgctccaccgcggtggcggccgctctagaactagtggatcccccgggctgcaggaattcggcacgagcccatcctttgctcctaggattttacatgttgcctgcaaagggagtcaaacttagggggcaggcaaacaaacgagttctttccagcctctgtaaccggatcgctagagcgaaataaactcgcacaagtgtccagagatcgtagccagacagccagcctgcgcttgaagcaacttttaagtgaggctgcaagagccgccgggatgtagattttagttcgtggccaagcacaactacgacaccctgtccctgcccccaccccatccccaagaatgcatggaggaaggagagaggacgaggtgagggccgcctgcatttctgcacgtcggngccggttagaaaccctgcagttt

SEQ ID NO: 2521 - DNA, 149 bp, Homo sapiens
  misc_feature (13)..(13): n equals a,t,g, or c
  misc_feature (23)..(23): n equals a,t,g, or c
  misc_feature (25)..(25): n equals a,t,g, or c
  misc_feature (120)..(120): n equals a,t,g, or c
  misc_feature (146)..(146): n equals a,t,g, or c
aacccgcaccaanggcaacaaancncgggccccaccgcggtgacgcccgctcgagaactagtggatcccccgggctgcaggaattcggcacgaggttaattagaataaagtcattttctnccaaaaaaaaaaaaaaaaaaaaaagnaaa

SEQ ID NO: 2522 - DNA, 149 bp, Homo sapiens
  misc_feature (1)..(2): n equals a,t,g, or c
  misc_feature (4)..(4): n equals a,t,g, or c
  misc_feature (15)..(15): n equals a,t,g, or c
  misc_feature (18)..(18): n equals a,t,g, or c
  misc_feature (24)..(24): n equals a,t,g, or c
  misc_feature (127)..(127): n equals a,t,g, or c
  misc_feature (129)..(129): n equals a,t,g, or c
  misc_feature (134)..(134): n equals a,t,g, or c
  misc_feature (140)..(140): n equals a,t,g, or c
  misc_feature (148)..(148): n equals a,t,g, or c
nnangacctttcttnganttaacncccctcccttggaataaaactggagctccaccgccgtggcggcgctctaaaactagtggatcccccgggctgcaggaattcgggacgagttcatggagaggcnantgctnggttcncctgtgang

SEQ ID NO: 2523 - DNA, 461 bp, Homo sapiens
  misc_feature (4)..(4): n equals a,t,g, or c
  misc_feature (246)..(246): n equals a,t,g, or c
  misc_feature (353)..(353): n equals a,t,g, or c
  misc_feature (431)..(431): n equals a,t,g, or c
  misc_feature (444)..(444): n equals a,t,g, or c
  misc_feature (446)..(446): n equals a,t,g, or c
  misc_feature (448)..(448): n equals a,t,g, or c
  misc_feature (451)..(451): n equals a,t,g, or c
gttngaggaccttcgtctccctgagggagaccttggcatggagattgagcagaagtacgactgtggagaagagatcctgatcacggtgctgtctgccatgacagaggaggcagctgttgcaatcaaggccatggcaaaataactggctcccagggtggcggtggtggcagcagtgatcctctgaacctgcagaggccccctccccgagcctggcctggctctggcccggcctaagctggactcctnctacacaatttatttgacgttttattttggttttccccaccccctcaatctgtcggggagcccctgcccttcacctagctcccttggccaggagcgagcgaagctgnggccttggtgaagctgccctcctcttctcccctcacactacagccctggtgggggagaagggggtgggtgctgcttgnggttagtcttttntntnttntttaattcaa

SEQ ID NO: 2524 - DNA, 368 bp, Homo sapiens
  misc_feature (270)..(270): n equals a,t,g, or c
  misc_feature (288)..(288): n equals a,t,g, or c
  misc_feature (336)..(336): n equals a,t,g, or c
  misc_feature (348)..(348): n equals a,t,g, or c
  misc_feature (355)..(355): n equals a,t,g, or c
gctcgctctcctgccccaccccgaggtaaagggggcgactaagagaagatggtgttgctcaccgcggtcctcctgctgctggccgcctatgcggggccggcccagagcctgggctccttcgtgcactgcgagccctgcgacgagaaagccctctccatgtgcccccccagccccctgggctgcgagctggtcaaggagccgggctgcggctgctgcatgacctgcgccctggccgaggggcagtcgtgcggcgtctacaccgagcgctgngcccaggggctgcgctgnctcccccggcaggacgaggagaagccgctgcacgccctgctgcacggncgcggggtttgnctcaacnaaaagagctaccg

SEQ ID NO: 2525 - DNA, 695 bp, Homo sapiens
  misc_feature (477)..(477): n equals a,t,g, or c
  misc_feature (525)..(525): n equals a,t,g, or c
  misc_feature (573)..(573): n equals a,t,g, or c
  misc_feature (625)..(625): n equals a,t,g, or c
  misc_feature (664)..(665): n equals a,t,g, or c
  misc_feature (671)..(671): n equals a,t,g, or c
  misc_feature (690)..(690): n equals a,t,g, or c
gtgctgagaatattcctgagaatcccctgaagtatctgtatccaaatattgacaaagaccatgcctttggaaagtattactccaggccaaaggaagtcacccttctagacttcagaccacagacaacctgctccccatgtctcctgaggagtttgacgaggtgtctcggatagtgggctctgtagaattcgacagtatgatgaacacagtatagagcatgaatttttttcatcttctctggcgacagttttccttctcatctgtgattccctcctgctactctgttccttcacatcctgtgtttctagggaaatgaaagaaaggccagcaaattcgctgcaacctgttgatagcaagtgaatttttctctaactcagaaacatcagttactctgaagggcatcatgcatcttactgaaggtaaaattgaaaggcattctctgaagagtgggtttcacaagtgaaaaacatccagatncacccaaagtatcaggacgagaatgagggtcctttgggaaaggagaanttaagcaacatctagcaaatgttatgcataaagtcagtgcccaactgntataggttgttggataaatcaagtggttatttagggaactgcttgaccgtangaaccggtaaatttctggtggggagaattcttacatgtnntctttngctttaagggaactgggcnagttt

SEQ ID NO: 2526 - DNA, 294 bp, Homo sapiens
  misc_feature (216)..(216): n equals a,t,g, or c
  misc_feature (220)..(220): n equals a,t,g, or c
  misc_feature (281)..(281): n equals a,t,g, or c
  misc_feature (284)..(284): n equals a,t,g, or c
  misc_feature (287)..(287): n equals a,t,g, or c
gcactccactccttgtgcggcgctaggccccccgtcccggtcatggccatgctcagggtccagcccgaggcccaagccaaggtggatgtgtttcgtgaagacctctgtaccaagacagagaacctgctcgggagctatttccccaagaagatttctgagctggatgcatttttaaaggagccagctctcaatgaagccaacttgagcaatctgaangccnattggacatcccagtgcctgatccagtcaaggagaaagagaaagaggaacggaagaaacanganganaaaggaa

SEQ ID NO: 2527 - DNA, 507 bp, Homo sapiens
  misc_feature (301)..(301): n equals a,t,g, or c
  misc_feature (364)..(364): n equals a,t,g, or c
  misc_feature (382)..(382): n equals a,t,g, or c
  misc_feature (404)..(404): n equals a,t,g, or c
  misc_feature (429)..(429): n equals a,t,g, or c
  misc_feature (437)..(437): n equals a,t,g, or c
  misc_feature (451)..(451): n equals a,t,g, or c
  misc_feature (457)..(457): n equals a,t,g, or c
  misc_feature (484)..(484): n equals a,t,g, or c
tatacggaaagctggtacgcctgcaggtaccggtccggaattcccgggtcgacccacgcgtccgcatccggacaccacagcggcccttcgctccacgcagaaaaccacacttctcaaaccttcactcaacacttccttccccaaagccagaagatgcacaaggaggaacatgaggtggctgtgctgggggcaccccccagcaccatccttccaaggtccaccgtgatcaacatccacagcgagacctccgtgcccgaccatgtcgtctggtccctgttcaacaccctcttcttgaactggngctgtctgggcttcatagcattcgcctactccgtgaagtctagggacaggaagatggttggcngacgtgaccggggcccangcctatgcctccaccggtcaantgcctgaacatctgggccctgattntgggcatnctcatgactcattnggattnatccttgttacttggtatttctgcttntgtgacagtctaccattatttat

SEQ ID NO: 2528 - DNA, 565 bp, Homo sapiens
  misc_feature (4)..(4): n equals a,t,g, or c
  misc_feature (45)..(45): n equals a,t,g, or c
  misc_feature (125)..(125): n equals a,t,g, or c
  misc_feature (149)..(149): n equals a,t,g, or c
  misc_feature (212)..(212): n equals a,t,g, or c
  misc_feature (216)..(216): n equals a,t,g, or c
  misc_feature (260)..(260): n equals a,t,g, or c
  misc_feature (294)..(294): n equals a,t,g, or c
  misc_feature (298)..(298): n equals a,t,g, or c
  misc_feature (305)..(305): n equals a,t,g, or c
  misc_feature (312)..(312): n equals a,t,g, or c
  misc_feature (462)..(462): n equals a,t,g, or c
  misc_feature (495)..(495): n equals a,t,g, or c
  misc_feature (497)..(497): n equals a,t,g, or c
  misc_feature (542)..(542): n equals a,t,g, or c
  misc_feature (547)..(547): n equals a,t,g, or c
  misc_feature (552)..(552): n equals a,t,g, or c
gctngctatgggcctagagtagcttacctaaatgctactaacctncctccataccattattgtaaagattaaaggtgatgcatctgttaagtaactaatagagtgcttattaaaaggtatgtgtncaataagtattaattccctttctntctttttcttactagtgcacttgtgtttttaatggatcatactttaccctatattgtattgtnggangcatcgtggatggatggctgctggaaaccccttgccataaccanctcttcttcaatacttaaggatttaccgtggctntgantaatganaatttcnaaaccacattttgaaaaattatttccatcccagtgctacttgtgtttacttcttaacaatcattttctaacttgaaagctggcattccatgtcttcatttttgggctgtttcaatgcaagggcttccctaaaacaaaaaccaactgggtnaatgttattaagtgatttgaaaaaaattggaanancttattccatctatgccttttgatgctactttatattccggaaanttaantttcnccccattttccaa

SEQ ID NO: 2529 - DNA, 543 bp, Homo sapiens
  misc_feature (227)..(227): n equals a,t,g, or c
  misc_feature (235)..(235): n equals a,t,g, or c
  misc_feature (249)..(249): n equals a,t,g, or c
  misc_feature (263)..(263): n equals a,t,g, or c
  misc_feature (348)..(348): n equals a,t,g, or c
  misc_feature (367)..(367): n equals a,t,g, or c
  misc_feature (369)..(369): n equals a,t,g, or c
  misc_feature (386)..(386): n equals a,t,g, or c
  misc_feature (409)..(409): n equals a,t,g, or c
  misc_feature (420)..(420): n equals a,t,g, or c
  misc_feature (423)..(423): n equals a,t,g, or c
  misc_feature (441)..(441): n equals a,t,g, or c
  misc_feature (473)..(473): n equals a,t,g, or c
  misc_feature (477)..(477): n equals a,t,g, or c
  misc_feature (501)..(501): n equals a,t,g, or c
  misc_feature (515)..(515): n equals a,t,g, or c
  misc_feature (537)..(537): n equals a,t,g, or c
gcacatagctagtcagtgacagactagtatctgggtcactggactccttactcaaaatctactatttaatcagtctgtcagattaacccacctggcatatgtacctggtgtgtgtgtaaagctctgatgtaatcagctgtacttagttccttttagtgttcctatctctttatccaagtgtattaatttcatcttattaaatctttgaagtatcagaccatgagaangcatgaanaaacctgggctganaatcttcgctatangaaacctgatcttgactgtatggctggcttaagacgtttcacactggaattgcaacacacttattggtgacctaaggtgcatgtncttttgcaaaatctctcantnaaggaatttattggctnaaaactccttgaactgccacaantgcgggccccnccnattaaaagaaacaaaggnttttgcttaaaaggcccttgaaaaccaattcnaacncctggtccctcctcggaatttcanaaaaaaaatccccnccctttgaacccccccctcaanaaaaaa

SEQ ID NO: 2530 - DNA, 355 bp, Homo sapiens
  misc_feature (89)..(89): n equals a,t,g, or c
  misc_feature (167)..(167): n equals a,t,g, or c
  misc_feature (214)..(214): n equals a,t,g, or c
  misc_feature (233)..(233): n equals a,t,g, or c
  misc_feature (248)..(248): n equals a,t,g, or c
  misc_feature (263)..(263): n equals a,t,g, or c
  misc_feature (275)..(275): n equals a,t,g, or c
  misc_feature (282)..(282): n equals a,t,g, or c
  misc_feature (333)..(333): n equals a,t,g, or c
  misc_feature (339)..(339): n equals a,t,g, or c
gcgatgcgctgtatgccggtatggaacgggcagacgctgacgttcgtgcaggaccgaccgtcggataagacgtggacctataaccgcantaatgtggtgatgccggatgatggcgcgccgttccgctacagcttcagcgccctgaaggaccgccataatgccctttnaggtgaactggattgacccgaacaacggctgggaaacggcgacagancttgttgaaagatacgcangccattgcccgtttncggtcgttatgtttncaaaaattgatnccttttngcttttaccagccgggggggggggcccggttaccccattcccccccctatngttganttcccttattaaaatt

SEQ ID NO: 2531 - DNA, 329 bp, Homo sapiens
gctctctagagccctagcagttgaactgttagacaaagtgaacaatccagataaccacgcacattacactgaagcagatgacgatgactttgagccccatgcaatcattcgtcataccattagatctacaaacaggaatgccagagctgaacggacagcttcagaaataaattttgacaaattacaatttgaacctcctctgagaaaagaaacagaagcacgagatgaaatgggattgtcatccagacccaaatttcatgtttacagtggaatccttttgttgatggtgcaaatactggcaaatcacctcaaaacgttgcaataccacc

SEQ ID NO: 2532 - DNA, 339 bp, Homo sapiens
  misc_feature (259)..(259): n equals a,t,g, or c
  misc_feature (336)..(336): n equals a,t,g, or c
  misc_feature (339)..(339): n equals a,t,g, or c
ctttaatctcatttccccctccatttccaggtactgcaaaaagcctttgacttcaaactgcacaattcagatagcaacacctgggaaaggcaagaagtcaacaccaaaacccatccctattctagctgctggtttttgctcagacaaaatgtcattgttgcttgtatatggcagttggtttcagcctactattgagcgagtggtacgttagctgctactctggagtaaagcaatatagcatccctgttgtccatggaanaaaattgattttaaaaataacaacattggtctttaagataaataatatatccttttttaattaaaggattcttcatnatn

SEQ ID NO: 2533 - DNA, 415 bp, Homo sapiens
  misc_feature (14)..(14): n equals a,t,g, or c
  misc_feature (274)..(274): n equals a,t,g, or c
  misc_feature (297)..(297): n equals a,t,g, or c
  misc_feature (302)..(302): n equals a,t,g, or c
  misc_feature (389)..(389): n equals a,t,g, or c
  misc_feature (396)..(396): n equals a,t,g, or c
  misc_feature (402)..(402): n equals a,t,g, or c
  misc_feature (404)..(404): n equals a,t,g, or c
  misc_feature (413)..(413): n equals a,t,g, or c
gggaggagctagangagctggagcaggaggaattggcccaggagttgttaaatgtgggcgacaaggaagaagaaccctcagtcaaattgcctagtgtaccttctactcatctgcggcagggccagctcccaaagtggatgaagatgaagaagcactaaagcagttggctgagtgggtatcctgataaatctgggcttgtcttcctaatgctacctttgttggtcctttcttccttaagtgccaagtgctgagctaaaggagaattgcagctgantatgctcgaaatagttcatccangtcangtggagaaacactatcgggaaatggaagaaaaattagcactgattattcagaaacattggaaagggtcagggaaagggaaaattttnaccaacngaagcngnctcttatanaa

SEQ ID NO: 2534 - DNA, 241 bp, Homo sapiens
gatggttcagagaaaatattactgattgtgcttgtcccagcatttagcatgttgaagttttgtatataagaagttttagcatagtggattttttataagtaggttaaaaaatactatttgtatgttcagttaaactttctctgtatgtttgtctgttacagctcagtccttttgtttacagcgagtttgccagggagagaaaccttcacgtttcattacttgacccgactctatgagcatt

SEQ ID NO: 2535 - DNA, 536 bp, Homo sapiens
  misc_feature (494)..(494): n equals a,t,g, or c
  misc_feature (506)..(506): n equals a,t,g, or c
  misc_feature (518)..(518): n equals a,t,g, or c
  misc_feature (530)..(531): n equals a,t,g, or c
gctcggatcaggatttaaaccggatgaggagtgaattgctggtgcctgggtcacagcttattttaggtccccatgaatccaagatacctatacttttgattcagcagccaggaaaagtgactggtgaagatcgactaggctggggaagtggctgggatgtcctactcccaaagggctggggcatggctttctggattccatttatttatcgaggtgtgagagtcggagggttgaaagagtctgcagtgcattctcagtataagaggtcgcctaatgtcccaggcgattttccagactgccctgccgggatgctgtttgcggaagagcaagctaagaatcttcttgaaaagtacaaaagacgccctcctgcaaaacggcccaactacgttaagcttggcactctggcacctttctgctgtccctgggagcagttaactcaagactgggagtcaagagtccaggcttacgaagaaccttctgtagcttcatctccnaatggtaagganagtgaccttagnaagatctgaagnnccttg

SEQ ID NO: 2536 - DNA, 487 bp, Homo sapiens
  misc_feature (8)..(8): n equals a,t,g, or c
  misc_feature (28)..(28): n equals a,t,g, or c
  misc_feature (435)..(435): n equals a,t,g, or c
  misc_feature (456)..(456): n equals a,t,g, or c
cgcgacgntgggcgggtccgcggcgcgntcggtcggcgcctattctcgggctgtttggcggaggcttggaatagttaaatgactttggtcttgtccaaggttagatggagttcaactctaacgtcaagtcttggtccttttcattgacgaagcttcacaaaagatgtctaagcaacagccaactcagtttataaatccagaaacacctggctatgttggatttgcaaacctccccaatcaagttcaccgaaaatcagtgaaaaaaggttttgagttcacactgatggtggtcggtgaatcaggtctaggaaaatcgactctcataaacagcctattcctaactgatctgtacccagaaagagtcatacctggagcagcagaaaaaattgaaagaactgtccagattgaggcttcaactgttgaaattgaagagcnaggggtcaagctacggcttgncagtggtagatacccctggctatgggtgacg

SEQ ID NO: 2537 - DNA, 410 bp, Homo sapiens
  misc_feature (4)..(4): n equals a,t,g, or c
  misc_feature (19)..(20): n equals a,t,g, or c
  misc_feature (68)..(68): n equals a,t,g, or c
  misc_feature (251)..(251): n equals a,t,g, or c
  misc_feature (363)..(363): n equals a,t,g, or c
  misc_feature (373)..(373): n equals a,t,g, or c
ttanccctcactaaagggnncaaaagctggggctccaccgcggtgacgaccgctctagaactagtggntcccccgggctgcaggaattcggcacgagggccgttctggagctgttgataagagagctcgggaagctggaaatataaatcaatccctgttgactttgggaagggtcattactgcccttgtagaaagaacacctcatgttccttatcgagaatctaaactaactagaatcctccaggattctnttggagggcgtacaagaacatctataattgcaacaatttctcctgcatctctcaatcttgaggaaactctgagtacattggaatatgctcatagagcaaagaacatattgantaagcctgangtgaatcagaaactcaccaaaaaagctcttattaagg

SEQ ID NO: 2538 - DNA, 100 bp, Homo sapiens
  misc_feature (50)..(50): n equals a,t,g, or c
  misc_feature (77)..(77): n equals a,t,g, or c
  misc_feature (79)..(79): n equals a,t,g, or c
  misc_feature (89)..(89): n equals a,t,g, or c
  misc_feature (91)..(91): n equals a,t,g, or c
cctgggaatgtaatgagtgtggaaaagacactctcggatgtcctacctcnctgtaccttatgtaactcattcatgananaaaccctatnantgtgctgaa

SEQ ID NO: 2539 - DNA, 484 bp, Homo sapiens
  misc_feature (5)..(5): n equals a,t,g, or c
  misc_feature (272)..(272): n equals a,t,g, or c
  misc_feature (315)..(315): n equals a,t,g, or c
  misc_feature (342)..(342): n equals a,t,g, or c
  misc_feature (428)..(428): n equals a,t,g, or c
  misc_feature (437)..(437): n equals a,t,g, or c
  misc_feature (446)..(446): n equals a,t,g, or c
  misc_feature (471)..(471): n equals a,t,g, or c
  misc_feature (473)..(473): n equals a,t,g, or c
gccgnacgactgttacagaggtctccagagccttctctctcctgtgcaaaatggcaactcttaaggaaaaactcattgcaccagttgcggaagaagaggcaacagttccaaacaataagatcactgtagtgggtgttggacaagttggtatggcgtgtgctatcagcattctgggaaagtctctggctgatgaacttgctcttgtggatgttttggaagataagcttaaaggagaaatgatggatctgcatcatgggagcttatttcttcanacacctaaaattgtggcagataaagattattctgtgaccgccnattctaagattgtagtggtaactgcangagtccgtcagcaagaaggggagagtcggctcaatctggtgcagagaaatgttaatgtcttcaaattcattattcctcagatcgtnaagtacaantcctgattncaatcataattgtggtttccaaccnangtggacatttc

SEQ ID NO: 2540 - DNA, 593 bp, Homo sapiens
  misc_feature (2)..(2): n equals a,t,g, or c
  misc_feature (7)..(7): n equals a,t,g, or c
  misc_feature (16)..(16): n equals a,t,g, or c
  misc_feature (18)..(18): n equals a,t,g, or c
  misc_feature (90)..(90): n equals a,t,g, or c
  misc_feature (117)..(117): n equals a,t,g, or c
  misc_feature (119)..(119): n equals a,t,g, or c
  misc_feature (122)..(122): n equals a,t,g, or c
  misc_feature (126)..(126): n equals a,t,g, or c
  misc_feature (130)..(130): n equals a,t,g, or c
  misc_feature (132)..(132): n equals a,t,g, or c
  misc_feature (139)..(140): n equals a,t,g, or c
  misc_feature (142)..(142): n equals a,t,g, or c
  misc_feature (146)..(146): n equals a,t,g, or c
  misc_feature (148)..(148): n equals a,t,g, or c
  misc_feature (151)..(151): n equals a,t,g, or c
  misc_feature (155)..(157): n equals a,t,g, or c
  misc_feature (164)..(164): n equals a,t,g, or c
  misc_feature (169)..(170): n equals a,t,g, or c
  misc_feature (223)..(223): n equals a,t,g, or c
  misc_feature (343)..(343): n equals a,t,g, or c
  misc_feature (411)..(411): n equals a,t,g, or c
  misc_feature (426)..(426): n equals a,t,g, or c
  misc_feature (430)..(430): n equals a,t,g, or c
  misc_feature (473)..(473): n equals a,t,g, or c
  misc_feature (490)..(490): n equals a,t,g, or c
  misc_feature (514)..(514): n equals a,t,g, or c
  misc_feature (539)..(539): n equals a,t,g, or c
  misc_feature (547)..(547): n equals a,t,g, or c
  misc_feature (560)..(560): n equals a,t,g, or c
  misc_feature (576)..(576): n equals a,t,g, or c
tnttagngcccgcagncnccggtccggaattcccgggtcgacccacgcgtccgactagttctagttcgcgagcggccgctctagaggatncaaggttacgtacgcaaccatgccagncnaangctntttnantggggcnncnaaantnaanttannnggccgcngtttnncaacgtcgtgactgggaaaaccctggcgttacccaacttaatcgccttgcagnacatccccctttcgccagctggcgtaatagcgaagaggcccgcaccgatcgcccttcccaacagttgcgcagcctgaatggcgaatgggacgcgccctgtagcggcgcattaagcgcggngggtgtggtggttacgcgcagcgtgaccgctacacttgccagcgccctagcgcccgctcctttcgctntcttcccttcctttntcgncacgttcgccggctttccccgtcaagctctaaatcgggggctncctttagggttccgatntagtgctttacggcacctcgaccncaaaaaacttgattagggtgatggntcacgtantgggccatcgacntgatagacggatattngccctttgacgttggag

SEQ ID NO: 2541 - DNA, 302 bp, Homo sapiens
  misc_feature (11)..(11): n equals a,t,g, or c
  misc_feature (15)..(15): n equals a,t,g, or c
  misc_feature (44)..(44): n equals a,t,g, or c
ccctcactaanggancaaaagctggtgctccaccgcggtggcgnccgctctagaactagtggatcccccgggctgcaggaattcggcacgagaatgtcaggtaattgttagccaaccaatcatatttaaaactgagacaccaagtaattgactggaatctctttgtaccggatttactaagtggtgggttttctcatggagtgagctgttgggagttccactatttcattggaatatggacaaattttagaatgaaaggtaaacacttgggagagagagagagaaagaaacacagacgaagg

SEQ ID NO: 2542 - DNA, 275 bp, Homo sapiens
  misc_feature (10)..(10): n equals a,t,g, or c
  misc_feature (37)..(37): n equals a,t,g, or c
  misc_feature (216)..(216): n equals a,t,g, or c
  misc_feature (255)..(256): n equals a,t,g, or c
  misc_feature (260)..(260): n equals a,t,g, or c
  misc_feature (272)..(272): n equals a,t,g, or c
gccttctctnaatgaggctccctgctcagctcctggngctgctaatgctctgggtctctggatccagtgggaatattgtgatgactcagtctccactctccctgcccgtcacccctggagagccggcctccatctcctgcaggtctagtcagaccctcctgcatagtaatggatacaactatttggattggtacctgcagaagccagggcagtctncacagctcctgatctatttgggttctaatcgggccttcnngggntccttgacaggnttt

SEQ ID NO: 2543 - DNA, 498 bp, Homo sapiens
  misc_feature (4)..(4): n equals a,t,g, or c
  misc_feature (8)..(8): n equals a,t,g, or c
  misc_feature (47)..(47): n equals a,t,g, or c
  misc_feature (85)..(85): n equals a,t,g, or c
  misc_feature (92)..(92): n equals a,t,g, or c
  misc_feature (119)..(119): n equals a,t,g, or c
  misc_feature (471)..(471): n equals a,t,g, or c
  misc_feature (474)..(474): n equals a,t,g, or c
tttntatnatttgcgaactcccgttaaagcttgtacgccctgcaggnaccggtccggaattcccgggtcgacccacgcgtccggntctgtcntataacaagcttaaaaacataccaacngtcaatgaaaaccttgaaaactattacctggaggtcaatcaacttgagaagtttgacataaagagcttctgcaagatcctggggccattatcctactccaagatcaagcagaagctctttatgtcaatcgcatctcagaaaccagtcttccaccggatatgtatgaatgtctacgtgttgctaacgaagtcactcttaattaatatctgtatcctggaacaatattttatggttatgtttttctgtgtgtcagttttcatagtatccatattttattactgtttattacttccatgaattttaaaatctgagggaaatgttttggaaacatttattttttttaaaaaaaaanaanaagggcggccgctctagaggatct

SEQ ID NO: 2544 - DNA, 429 bp, Homo sapiens
  misc_feature (205)..(205): n equals a,t,g, or c
  misc_feature (360)..(360): n equals a,t,g, or c
  misc_feature (368)..(368): n equals a,t,g, or c
  misc_feature (371)..(371): n equals a,t,g, or c
  misc_feature (387)..(387): n equals a,t,g, or c
  misc_feature (414)..(414): n equals a,t,g, or c
gcccacgcgtccgggccgtcatggcgccccgaaccctcctcctgctactcttgggggccctggccctgacccagacctgggcgggctcccactccatgaggtatttcaccacatccgtgtcccggcccggccgcggggagccccgcttcatcgccgtgggctacgtggacgacacgcagttcgtgcggttcgacagcgacgccgngagccagaggatggagccgcgggcgccgtggatagagcaggagaggcctgagtattgggaccaggagacacggaatgtgaaggcccactcacagattgaccgagtggacctggggaccctgcgcggctactacaaccagagcgaggccggttctnacaccatncanatgatgtatggctgcnacgtggggttcggacgggcgcttcctncgcgggtaccaacat

SEQ ID NO: 2545 - DNA, 565 bp, Homo sapiens
  misc_feature (8)..(8): n equals a,t,g, or c
  misc_feature (13)..(13): n equals a,t,g, or c
  misc_feature (263)..(263): n equals a,t,g, or c
  misc_feature (293)..(293): n equals a,t,g, or c
  misc_feature (383)..(383): n equals a,t,g, or c
  misc_feature (499)..(499): n equals a,t,g, or c
  misc_feature (538)..(538): n equals a,t,g, or c
gggaagcntgctntgaccttgccaaggagcagggcccatacgaaacctatgagggctctccagttagcaaaggaattcttcagtatgatatgtggaatgttactcctacagacctatgggactggaaggttctcaaggagaagattgcaaagtatggtataagaaacagtttacttattgccccgatgcctacagcttccactgctcagatcctggggaataatgagtccattgaaccttacaccagcaacatctatactcgnagagacttgtcaggagaatttcagattgtnaatcctcacttattgaaagatcttaccgagcggggcctatggcatgaagagatgaaaaaccagattattgcatgcaatggctctattcanagcataccataaattcctgatgacctgaagcaactttataaaactgtgtgggaaatctctcagaaaactgttctcaagatggcagctgagagaggtgctttcattgatcaaagccnatctttgaacattccacattgcttgagcctaaaccttantttgggggggcccccaaaaaaaacccc

SEQ ID NO: 2546 - DNA, 185 bp, Homo sapiens
  misc_feature (16)..(16): n equals a,t,g, or c
  misc_feature (31)..(31): n equals a,t,g, or c
  misc_feature (168)..(168): n equals a,t,g, or c
  misc_feature (171)..(171): n equals a,t,g, or c
  misc_feature (173)..(173): n equals a,t,g, or c
  misc_feature (175)..(175): n equals a,t,g, or c
  misc_feature (185)..(185): n equals a,t,g, or c
gcactatgcaagctcnggataacatcacgancgcccggctgctgcagcaggaggttctgcagaacgtctcggatgctgagagctgttaccttgtccacaccctgctggagttctacttgaaaactgttttcaaaaactaccacaatagaacagttgaagtcagggatnctnantncattctctan

SEQ ID NO: 2547 - DNA, 575 bp, Homo sapiens
  misc_feature (8)..(8): n equals a,t,g, or c
  misc_feature (246)..(246): n equals a,t,g, or c
  misc_feature (259)..(259): n equals a,t,g, or c
  misc_feature (282)..(282): n equals a,t,g, or c
  misc_feature (289)..(289): n equals a,t,g, or c
  misc_feature (401)..(401): n equals a,t,g, or c
  misc_feature (439)..(439): n equals a,t,g, or c
  misc_feature (473)..(473): n equals a,t,g, or c
  misc_feature (505)..(505): n equals a,t,g, or c
  misc_feature (507)..(507): n equals a,t,g, or c
  misc_feature (521)..(521): n equals a,t,g, or c
  misc_feature (531)..(531): n equals a,t,g, or c
  misc_feature (547)..(547): n equals a,t,g, or c
gcccactngtccgcccggatattaatagtcttggaaagcggtttctacagctgctgctttgcctgcaaatagcaatgcttttcccaaacatgcacataacactgccttctcttaacgagaacctccaaaataaacaatagtcacccttgacctactaaacagtcatcacatagagatgagtttttatcctcaccttcttgcttcttcagtgaacaagtagtaacaagcagcttctggatgtgcctngaactgacttggnataccaatggttgccaaaaatgnataaagngcaaattgaaaaacacaggagactacatctatatcagtgacacattttctttcctttcttacagggttttggaaattggccatctgcatggcaaagaccgatctttctctgnctcaccaacctgacaaaaaaggtgtgccaagggacttnatcttacctatcagtgatgtccgggccagcatangtgcttggggtcaattacctttggtcggaacngngcaccactgacatnatggctcggntggactctggaaagangaaaatggtggacatgtttgggcataaa

SEQ ID NO: 2548 - DNA, 628 bp, Homo sapiens
  misc_feature (19)..(19): n equals a,t,g, or c
  misc_feature (22)..(22): n equals a,t,g, or c
  misc_feature (28)..(28): n equals a,t,g, or c
  misc_feature (574)..(574): n equals a,t,g, or c
  misc_feature (578)..(578): n equals a,t,g, or c
  misc_feature (580)..(580): n equals a,t,g, or c
  misc_feature (603)..(603): n equals a,t,g, or c
  misc_feature (619)..(619): n equals a,t,g, or c
gggagaccagcctacagcnttntgcttntgtatccagcgccaggtcccgccagtcccagctgcgcgcgccccccagtcccgcacccgttcggcccaggctaagttagccctcaccatgccggtcaaaggaggcaccaagtgcatcaaatacctgctgttcggatttaacttcatcttctggcttgccgggattgctgtccttgccattggactatggctccgattcgactctcagaccaagagcatcttcgagcaagaaactaataataataattccagcttctacacaggagtctatattctgatcggagccggcgccctcatgatgctggtgggcttcctgggctgctgcggggctgtgcaggagtcccagtgcatgctgggactgttcttcggcttcctcttggtgatattcgccattgaaatagctgcggccatctggggatattcccacaaggatgaggtgattaaggaagtccaggagttttacaaggacacctacaacaagctgaaaaccaaggatgagccccagagggaaacgctgaaagccatccactatgcgttgaactgctgngggntnggctggggggcgtggaaacaagnttatctcaagaaaatntggccccaa

SEQ ID NO: 2549 - DNA, 452 bp, Homo sapiens
  misc_feature (10)..(10): n equals a,t,g, or c
  misc_feature (20)..(21): n equals a,t,g, or c
  misc_feature (24)..(24): n equals a,t,g, or c
  misc_feature (29)..(29): n equals a,t,g, or c
  misc_feature (31)..(31): n equals a,t,g, or c
  misc_feature (95)..(95): n equals a,t,g, or c
  misc_feature (195)..(195): n equals a,t,g, or c
  misc_feature (199)..(199): n equals a,t,g, or c
  misc_feature (206)..(206): n equals a,t,g, or c
  misc_feature (214)..(214): n equals a,t,g, or c
  misc_feature (222)..(222): n equals a,t,g, or c
  misc_feature (241)..(241): n equals a,t,g, or c
  misc_feature (328)..(328): n equals a,t,g, or c
  misc_feature (343)..(343): n equals a,t,g, or c
  misc_feature (352)..(352): n equals a,t,g, or c
  misc_feature (380)..(380): n equals a,t,g, or c
  misc_feature (398)..(399): n equals a,t,g, or c
  misc_feature (431)..(431): n equals a,t,g, or c
  misc_feature (449)..(449): n equals a,t,g, or c
gcgtggagtngaactctccnnggnatcgntntctacttcagatcttgctcagttttgcttccggtgggctcctgggagatgctttcctgcacctnattcctcatgctcttgaacctcattctcaccacactctggagcaacccggacatggacactcccacagtggccagggccccattctgtctgtgggactgngggntctcagnggaattgntgcctttnttgacgtggagaaatttgngagacatgtgaaaggaggacatggtcacagtcatggacatggacacgctcacagtcatacacgtggaagtcatggacatggaagacnagagcgttctaccanggagaagcngatctcagaggaagaagattaggaaacnagaagggttcaaaaaaanngaagaaggaacacagtacccaagatggcccangagaactcagaacgctgnaaa

SEQ ID NO: 2550 - DNA, 551 bp, Homo sapiens
  misc_feature (4)..(5): n equals a,t,g, or c
  misc_feature (544)..(544): n equals a,t,g, or c
  misc_feature (548)..(551): n equals a,t,g, or c
gganngatatagagtttatctacacggccccctcctcggcagtgtgtggggtctcgctggacgttggaggaaagaaggaatatctcattgcaggaaaggccgagggggacggcaagatgcacatcaccctctgtgacttcatcgtgccctgggacaccctgagcaccacccagaagaagagcctgaaccacaggtaccagatgggctgcgagtgcaagatcacgcgctgccccatgatcccgtgctacatctcctccccggacgagtgcctctggatggactgggtcacagagaagaacatcaacgggcaccaggccaagttcttcgcctgcatcaagagaagtgacggctcctgtgcgtggtaccgcggcgcggcgccccccaagcaggagtttctcgacatcgaggacccataagcaggccttcaacgcccctgtggccaactgcaaaaaaagccttcaagggtttcgactggtccagctctgacatcccttcttggaaacagcatgaataaaacactcatcccatgggttccaaattaaanaatnnnn

SEQ ID NO: 2551 - DNA, 669 bp, Homo sapiens
  misc_feature (374)..(374): n equals a,t,g, or c
  misc_feature (406)..(406): n equals a,t,g, or c
  misc_feature (441)..(441): n equals a,t,g, or c
  misc_feature (533)..(533): n equals a,t,g, or c
  misc_feature (547)..(547): n equals a,t,g, or c
  misc_feature (549)..(549): n equals a,t,g, or c
  misc_feature (552)..(552): n equals a,t,g, or c
  misc_feature (608)..(608): n equals a,t,g, or c
  misc_feature (615)..(615): n equals a,t,g, or c
  misc_feature (623)..(623): n equals a,t,g, or c
  misc_feature (647)..(647): n equals a,t,g, or c
  misc_feature (655)..(655): n equals a,t,g, or c
gaccgcgcgctcgccccgccgctcctgctgcagccccagggcccctcgccgccgccaccatggacgccatcaagaagaagatgcagatgctgaagctcgacaaggagaacgccttggatcgagctgagcaggcggaggccgacaagaaggcggcggaagacaggagcaagcagctggaagatgagctggtgtcactgcaaaagaaactcaagggcaccgaagatgaactggacaaatactctgaggctctcaaagatgcccaggagaagctggagctggcagagaaaaaggccaccgatgctgaagccgacgtagcttctctgaacagacgcatccagctggttgaagaagaagtttggatcgtgcccaagaancgttctggcaacagctttgcagaaacttggangaagcttgagaaggcagcagatgagagtgagagangcatgaaagtcattgagaagtcgagcccaaaaagatgaagaaaaaatggaaattcaggagatccaactgaaagaagcaaagccattgttaanatccgaccggaatntnaanagggggccgtaactggcattattgaaaggactggaactgcaaaagacggctgactntaaaagnaatggccnacttgaaaaaattgaaactgggcnaaactgancctggagttaggtt

SEQ ID NO: 2552 - DNA, 310 bp, Homo sapiens
  misc_feature (93)..(93): n equals a,t,g, or c
  misc_feature (198)..(198): n equals a,t,g, or c
  misc_feature (228)..(228): n equals a,t,g, or c
  misc_feature (246)..(246): n equals a,t,g, or c
  misc_feature (283)..(283): n equals a,t,g, or c
  misc_feature (307)..(307): n equals a,t,g, or c
  misc_feature (309)..(309): n equals a,t,g, or c
gtcgacctctgctgcagcccgtgccgccgccgcctcctgggaagagaggaagcgggagaggagcccacgtcgcctgtcacccaatatctccanccgcgcagtcccgaatagtgtaagatgttcgcctgcgccaagctcgcctgcaccccctctctgatccgagctggatccatagttgcatacagaccaatttctgcntcagtgtttatctcgaccagaagctaatangactggaaaaggctcttncggtatttaatggggcccaaatggttttttcttcaanttatccccaagggattttccaaancna

SEQ ID NO: 2553 - DNA, 553 bp, Homo sapiens
  misc_feature (445)..(445): n equals a,t,g, or c
  misc_feature (482)..(482): n equals a,t,g, or c
  misc_feature (485)..(485): n equals a,t,g, or c
  misc_feature (518)..(518): n equals a,t,g, or c
  misc_feature (534)..(534): n equals a,t,g, or c
  misc_feature (541)..(541): n equals a,t,g, or c
gtgagaacgtattaaaaacttctgggaaactacgggagaaccttcttcacggtgccttggaacactatgttaattgcctggatctggtaaacaagaggctaccttatggccttgctcagattggagtgtgttttcatcctgtttttgacactaagcagatacgaaatggtgttaaaagtattggtgagaagactgaagcttcgttagtatggtttactcctccgagaacttcaaaccagtggcttgatttctggttacgtcatcgactccagtggtggagaaagtttgccatgagtccatctaacttcagcagcagtgactgtcaggatgaagaaggccggaaaggaaacaaactttactacaattttcccctggggaaaggagttaatagaaaccctgtggaacctaagagatccgaacttttacacatgtatcctggcaatgnggctaaattaccatggccgaaatggacgaaaaaatgnggntccttggggtcctctctggaaatggggacctanacccgaggcatgctgnctaactntatgattctttt

SEQ ID NO: 2554 - DNA, 476 bp, Homo sapiens
  misc_feature (5)..(5): n equals a,t,g, or c
  misc_feature (24)..(24): n equals a,t,g, or c
  misc_feature (33)..(33): n equals a,t,g, or c
  misc_feature (58)..(59): n equals a,t,g, or c
  misc_feature (61)..(61): n equals a,t,g, or c
  misc_feature (68)..(68): n equals a,t,g, or c
  misc_feature (72)..(73): n equals a,t,g, or c
  misc_feature (77)..(77): n equals a,t,g, or c
  misc_feature (87)..(87): n equals a,t,g, or c
  misc_feature (99)..(99): n equals a,t,g, or c
  misc_feature (143)..(143): n equals a,t,g, or c
  misc_feature (167)..(167): n equals a,t,g, or c
  misc_feature (173)..(173): n equals a,t,g, or c
  misc_feature (183)..(183): n equals a,t,g, or c
  misc_feature (186)..(186): n equals a,t,g, or c
  misc_feature (191)..(191): n equals a,t,g, or c
  misc_feature (198)..(198): n equals a,t,g, or c
  misc_feature (200)..(201): n equals a,t,g, or c
  misc_feature (217)..(217): n equals a,t,g, or c
  misc_feature (233)..(233): n equals a,t,g, or c
  misc_feature (235)..(235): n equals a,t,g, or c
  misc_feature (239)..(239): n equals a,t,g, or c
  misc_feature (284)..(285): n equals a,t,g, or c
  misc_feature (293)..(293): n equals a,t,g, or c
  misc_feature (308)..(308): n equals a,t,g, or c
  misc_feature (320)..(320): n equals a,t,g, or c
  misc_feature (329)..(329): n equals a,t,g, or c
  misc_feature (353)..(353): n equals a,t,g, or c
  misc_feature (364)..(364): n equals a,t,g, or c
  misc_feature (375)..(375): n equals a,t,g, or c
  misc_feature (408)..(408): n equals a,t,g, or c
  misc_feature (437)..(438): n equals a,t,g, or c
  misc_feature (444)..(444): n equals a,t,g, or c
  misc_feature (476)..(476): n equals a,t,g, or c
gccanaacacattcgtcgtaactntacatctgntggggatcatatcataattgatggnntncacgcanaatnnccanatgacttggngcgagaagctgnttataaaatttttctttatcccaatgctggtcaattgaaatgtntataagaattgctcagcagcaganatcttntggcaaagtnggnggggnattccangnnttctcacagggctctncaaggaacgatagctnanaatncagagactgacatgcaggtccttgaaaaactatctggcaaacttnntgaaaganctctgaaagattttnagatgatacganggatgaaantgaaactgaatcctcaaaattccnaagtaatgccntgggacccccnttactacagtggtgtgattcgtgcagaaaggtntaatattgagcccagcctatattgcccgnntttctntcttggagcatgcatggaaagcctgaatattn

SEQ ID NO: 2555 - DNA, 434 bp, Homo sapiens
  misc_feature (7)..(7): n equals a,t,g, or c
  misc_feature (15)..(15): n equals a,t,g, or c
  misc_feature (18)..(18): n equals a,t,g, or c
  misc_feature (56)..(56): n equals a,t,g, or c
  misc_feature (61)..(61): n equals a,t,g, or c
  misc_feature (321)..(321): n equals a,t,g, or c
  misc_feature (368)..(369): n equals a,t,g, or c
  misc_feature (391)..(391): n equals a,t,g, or c
  misc_feature (394)..(394): n equals a,t,g, or c
  misc_feature (427)..(427): n equals a,t,g, or c
cgtacangagctganggngagcgcgcctgcaggtcgacactagtggatccaaagantgtcngcacagttttctctcttggagcatgcatggaaggcctgaatattttgcttaacagactgttggggatttcattatatgcagagcagcctgcaaaaggagaggtgtggagcgaagatgtccgaaaactggctgttgttcatgaatctgaaggattgttggggtacatttactgtgatttttttcagcgagcagacaaaccacatcaggattgccatttcactatccgtggaggcagactaaaaggaagatgggagactatncaactcccagttgtaagttcttatgctggaatcttccccgttcccgnnagggagttctccaactttggcnaangcctgggcatgatgggaaaacctttcccaggangggggac

SEQ ID NO: 2556 - DNA, 591 bp, Homo sapiens
  misc_feature (4)..(4): n equals a,t,g, or c
  misc_feature (34)..(34): n equals a,t,g, or c
  misc_feature (399)..(399): n equals a,t,g, or c
  misc_feature (455)..(455): n equals a,t,g, or c
  misc_feature (527)..(527): n equals a,t,g, or c
  misc_feature (529)..(529): n equals a,t,g, or c
  misc_feature (567)..(567): n equals a,t,g, or c
  misc_feature (585)..(586): n equals a,t,g, or c
gctntgtcctcgctctgggaatcaaaaccccggntgggaactgaggcttccgaactgcttccaaccctggacacgaaggcccccaccggccggagaacgaaaccctggggtcgtctgaagaggagggccaggagtccccagggccagacagcgaagccccagagctgctgcggagctgaacaccgaggtccccaagccctccgcaaaggacgtggagatcctggagcaagagagcgaagtcctcgagccatcagtcgagcaggacgcagagagccccgggctgtccacagctgcgggctttgagagtcctgagccaggcagagacgaccctgggccgtccgaagcgcaaagggcggaggtccaggggcagcatccccctccaggccctaagacctcctnctccaggtcaggctcggaagccccccacctgcgttttccgccgtgccccgaggctncccagcgtcccccggaggagcggttcatggagacgcccatcgagcgcgaaatccgccggagctgcgaacgcnangagaagctgcgcccgaacccgggccttagcccggccgngcaagccgtgaactcgtnnaactt

SEQ ID NO: 2557 - DNA, 331 bp, Homo sapiens
  misc_feature (276)..(276): n equals a,t,g, or c
  misc_feature (286)..(286): n equals a,t,g, or c
  misc_feature (294)..(294): n equals a,t,g, or c
  misc_feature (321)..(321): n equals a,t,g, or c
  misc_feature (330)..(330): n equals a,t,g, or c
ggttcaagagagagacaggggttgatttgactaaagacaacatggcacttcagagggtacgggaagctgctgaaaaggctaaatgtgaactctcctcatctgtgcagactgacatcaatttgccctatcttacaatggattcttctggacccaagcatttgaatatgaagttgacccgtgctcaatttgaagggattgtcactgatctaatcagaaggactatcgctccatgccaaaaagctatgcatgatgcagaagtcatcttgagtgacatangagaagtgantcctgtgngtggcatgactaggatgcccatgttcngcagactgnc

SEQ ID NO: 2558 - DNA, 558 bp, Homo sapiens
  misc_feature (10)..(10): n equals a,t,g, or c
  misc_feature (405)..(405): n equals a,t,g, or c
  misc_feature (417)..(417): n equals a,t,g, or c
  misc_feature (425)..(425): n equals a,t,g, or c
  misc_feature (446)..(446): n equals a,t,g, or c
  misc_feature (456)..(456): n equals a,t,g, or c
  misc_feature (507)..(507): n equals a,t,g, or c
  misc_feature (517)..(517): n equals a,t,g, or c
  misc_feature (529)..(529): n equals a,t,g, or c
  misc_feature (534)..(534): n equals a,t,g, or c
  misc_feature (542)..(542): n equals a,t,g, or c
gctcgggagntgaccaagaagttgcgggaacaggggtctctgctggggaagctggtccagaatggaacagaaccttcatccctgccattcttggaccccaatgcccgccccctggtaccagaggtctccattaaggtacagaggtagagtgggagagtgttgcaagctctagcacagtagttatattctgcccacaattggggggtgaacacaggagagaatcaaaggaggctttgaaggtaggagttggtgcaggcatatcttatacccactgagcacagctgccaactgttgccctttattcgtctatttctcagactccacgggtattcaatacagggggtgcccctcggatccttgctttggactgtggcctcaagtataatcagatcgatgcctctgcancgtggggctgangcactgtngtaccctgggacatgcactanacagccaaantttgagggctcttcttaagtatgggctggtgacctgctctattccatgcgnatccactgancggtttattganctatnccgactgntttggactgctggcac

SEQ ID NO: 2559 - DNA, 313 bp, Homo sapiens
  misc_feature (7)..(7): n equals a,t,g, or c
  misc_feature (13)..(13): n equals a,t,g, or c
  misc_feature (17)..(17): n equals a,t,g, or c
  misc_feature (24)..(24): n equals a,t,g, or c
  misc_feature (31)..(31): n equals a,t,g, or c
  misc_feature (34)..(34): n equals a,t,g, or c
  misc_feature (40)..(40): n equals a,t,g, or c
  misc_feature (44)..(44): n equals a,t,g, or c
  misc_feature (47)..(49): n equals a,t,g, or c
  misc_feature (53)..(53): n equals a,t,g, or c
  misc_feature (62)..(62): n equals a,t,g, or c
  misc_feature (65)..(65): n equals a,t,g, or c
  misc_feature (73)..(73): n equals a,t,g, or c
  misc_feature (125)..(125): n equals a,t,g, or c
  misc_feature (139)..(139): n equals a,t,g, or c
  misc_feature (241)..(241): n equals a,t,g, or c
  misc_feature (268)..(268): n equals a,t,g, or c
  misc_feature (287)..(287): n equals a,t,g, or c
  misc_feature (297)..(297): n equals a,t,g, or c
  misc_feature (304)..(304): n equals a,t,g, or c
gcgactncattgngganagaattnaccaagngtngcagtntgcnggnnnccancacactttnatnggtgtttnggacatttatggtttcgaaacctttgatgtgaacagctttgaacaatttgcncccaaattacgctnatgaaaaactgcaacaacagtttaacatgcatgtcttcaaactggaacaagaagaatacatgaaggaagatataccttggacgctgatagatttttatgacnatcaaccagtttttgacctgattgaancaaaatgggaatcctggantttctggatnaaaaatntttgtttcc

SEQ ID NO: 2560 - DNA, 505 bp, Homo sapiens
  misc_feature (5)..(5): n equals a,t,g, or c
  misc_feature (67)..(68): n equals a,t,g, or c
  misc_feature (103)..(104): n equals a,t,g, or c
  misc_feature (469)..(469): n equals a,t,g, or c
  misc_feature (474)..(474): n equals a,t,g, or c
  misc_feature (483)..(483): n equals a,t,g, or c
  misc_feature (490)..(490): n equals a,t,g, or c
  misc_feature (496)..(496): n equals a,t,g, or c
agggnaagctggtacgcctgcaggtaccggtccggaattcccgggtcgacccacgcgtccgcccatnnttccgctagctttctccgattataaacaacactgnnctgaacatccttgtggcacggtctttgctcacatgcagggttattttgccagtgctggttcctggaaaaaaaatagttgggcagagaatgtacacacttttgggactcgtaatgcctctcctgggaaaggcggggcccgtcttctgctcccccaacagtgtgggaaacggtaccctctcccttgctgggcagcaagcacctcttcccagtgctgatggaatcttggtgcctctcgccctcagctgcacagaagctctgccgcctcttgggactgggggtgacggatttctcccgagccttgctcacccctcgcatcaaagttggccgagactatgtgcagaaagcccagactaaggaacaggtangcggngctggcggngggcaangcacanaaagagccg

SEQ ID NO: 2561 - DNA, 119 bp, Homo sapiens
  misc_feature (3)..(3): n equals a,t,g, or c
  misc_feature (34)..(34): n equals a,t,g, or c
  misc_feature (47)..(47): n equals a,t,g, or c
  misc_feature (72)..(72): n equals a,t,g, or c
  misc_feature (96)..(96): n equals a,t,g, or c
  misc_feature (111)..(111): n equals a,t,g, or c
ctngaagatttgcatgacttgctagcttcattgntgaataatgcatntgatgactatctaaatgccatgatnagtgaggctccaatgcccatcagntttgccatgttcctnaccatgtt

SEQ ID NO: 2562 - DNA, 411 bp, Homo sapiens
  misc_feature (402)..(402): n equals a,t,g, or c
gaaagtgctgatgaggaatctggctctgcctgaggacgtccgagggaagtgcacgagcctgctgcagctctatgatgcctccaacagcgagtggcagctggggaagaccaaggtctttcttcgagaatccttggaacagaaactggagaagcggagggaagaggaagtgagccacgcggccatggtgattcgggcccatgtcttgggcttcttagcacgaaaacaatacagaaaggtcctttattgtgtggtgataatacagaagaattacagagcattccttctgaggaggagatttttgcacctgaaaaaggcagccatagttttccagaagcaactcagaggtcagattgctcggagagtttacagacaatttgctggcagagaaaagggagcaagaanaaaaaaaaa

SEQ ID NO: 2563 - DNA, 209 bp, Homo sapiens
  misc_feature (90)..(90): n equals a,t,g, or c
  misc_feature (137)..(137): n equals a,t,g, or c
gaacagcttagcaaaggaaactttggagcccctctctcaggcagcctggttgcttcaggtcaagaagaccacagacagtgatgccaaggngatctacgaacgctgcacctcactgtctgctgtgcagatcataaagntccttaattcatacacacctatagatgactttgagaagagagtgactccatcctttgttcgcaaagtacagg

SEQ ID NO: 2564 - DNA, 603 bp, Homo sapiens
  misc_feature (543)..(543): n equals a,t,g, or c
  misc_feature (550)..(550): n equals a,t,g, or c
  misc_feature (575)..(575): n equals a,t,g, or c
  misc_feature (584)..(584): n equals a,t,g, or c
  misc_feature (587)..(587): n equals a,t,g, or c
ggcaaaaggtacatcaaggcactggcagaagaaaacaggaatgtggtggatgggccatacgctggagtcatgacagcttatgatctgaagaaaacccttgctgtgttattagataacattttgcagcgcattggcaagttggagtcgaaggtggacaatcttgttgtcaatggcaccggaacaaactcaaccaactccactacagctgttcccagcttggttgcacttgagaaaattaatgtggcagatatcattaacggagctcaagaaaaatgtgtattgcctcctatggacggctaccctcactgtgagggaaagatcaagtggatgaaagacatgtggcgttcagatccctgctacgcagactatggagtggatggatccacctgctctttttttatttacctcagtgaggttgaaaattggtgtcctcatttaccttggagagcaaaaaatccctacgaagaagctgatcataattcattggcggaaattctacagatttttaatattctctacagtatgatgaaaaaagcatgaaanaattccnggtggatgagactacggatccggcnaaatggctnacncatggatccaagcaat

SEQ ID NO: 2565 - DNA, 471 bp, Homo sapiens
  misc_feature (341)..(341): n equals a,t,g, or c
  misc_feature (351)..(351): n equals a,t,g, or c
  misc_feature (358)..(358): n equals a,t,g, or c
  misc_feature (363)..(363): n equals a,t,g, or c
  misc_feature (409)..(409): n equals a,t,g, or c
  misc_feature (433)..(433): n equals a,t,g, or c
  misc_feature (439)..(439): n equals a,t,g, or c
  misc_feature (458)..(458): n equals a,t,g, or c
  misc_feature (464)..(464): n equals a,t,g, or c
gcgtgtcgggacgtgcggaggctctcactttccgtcatggcgctgaaggaacaaacaattcctccgtccgctaagtatggcgggcggcacacggtgaccatgatcccaggggatggcatcgggccagagctcatgctgcatgtcaagtccgtcttcaggcacgcatgtgttaccagtggactttgaagaggtgcacgtgagttccaatggctgatgaagaggacattccgcaatggccatcatgggccatccgccgggaaccgcgtgggcccttgaaggggcaacattcgaaaccaaccattaaccttgccaccgttcgcacaaatcttcgaaacaacatnctttcggcancagcttnggacntctattgccaacgttcattccattgttaagagcctttccaggcgtnggttgaaccgggcacaaggacttngacatnctcccattgttccgggganaacaanaggggga

SEQ ID NO: 2566 - DNA, 322 bp, Homo sapiens
  misc_feature (69)..(69): n equals a,t,g, or c
  misc_feature (100)..(100): n equals a,t,g, or c
  misc_feature (113)..(113): n equals a,t,g, or c
  misc_feature (257)..(257): n equals a,t,g, or c
  misc_feature (263)..(263): n equals a,t,g, or c
  misc_feature (289)..(289): n equals a,t,g, or c
  misc_feature (301)..(301): n equals a,t,g, or c
  misc_feature (309)..(309): n equals a,t,g, or c
gcaatactcatcattaataatcataatggctatagcaataaaactaggaatagccccctttcacttctnagtcccagaggttacccaaggcacccctctnacatccggcctgnttcttctcacatgacaaaaactagcccccatctcaatcatataccaaatctctccctcactaaacgtaagccttctcctcactctctcaatcttatccatcatagcaggcagttgaagtggattaaaccatcccagctacgcanaatctnaacttactcctcaattacccacatangatgaataatancagtcctnccgtacaacctac

SEQ ID NO: 2567 - DNA, 419 bp, Homo sapiens
  misc_feature (254)..(254): n equals a,t,g, or c
  misc_feature (275)..(275): n equals a,t,g, or c
  misc_feature (277)..(277): n equals a,t,g, or c
  misc_feature (314)..(314): n equals a,t,g, or c
  misc_feature (330)..(330): n equals a,t,g, or c
  misc_feature (369)..(369): n equals a,t,g, or c
  misc_feature (385)..(385): n equals a,t,g, or c
  misc_feature (403)..(403): n equals a,t,g, or c
  misc_feature (407)..(407): n equals a,t,g, or c
gcaacaatatactctccggacaatgaaccataaccaatactaccaatcaatactcatcattaataatcataatggctatagcaataaaactaggaatagccccctttcacttctgagtcccagaggttacccaaggcacccctctgacatccggcctgcttcttctcacatgacaaaaactagcccccatctcaatcatataccaaatctctccctcactaaacgtaagccttctcctcactctctcaatcttntccatcatagcaggcagtttnangtggattaaaccaaacccagcttcgctaaatcttagnatactcctccaattanccacatgggaatgaaattatagcaggttcttacggttanaaccctaacattaacngtcctgaattttaacttntttnttttatccctga

SEQ ID NO: 2568 - DNA, 491 bp, Homo sapiens
  misc_feature (107)..(107): n equals a,t,g, or c
  misc_feature (248)..(248): n equals a,t,g, or c
  misc_feature (251)..(251): n equals a,t,g, or c
  misc_feature (260)..(260): n equals a,t,g, or c
  misc_feature (320)..(320): n equals a,t,g, or c
  misc_feature (398)..(398): n equals a,t,g, or c
  misc_feature (430)..(430): n equals a,t,g, or c
  misc_feature (437)..(437): n equals a,t,g, or c
  misc_feature (451)..(451): n equals a,t,g, or c
  misc_feature (468)..(468): n equals a,t,g, or c
gggacaatgaaccataaccaatactaccaatcaatactcatcattaataatcataatggctatagcaataaaactaggaatagccccctttcacttctgagtcccanaagttacccaaggcacccctctgacatccggcctgcttcttctcacatgacaaaaactagcccccatctcaatcatataccaaatctctccctcactaaacgtaagccttctcctcactctctcaatcttatccatcatancangcagttgangtggattaaaccaaacccagctacgcaaaatcttagcatactcctcaattacccacatangatgaataataacagttctaccgtacaaccttacataaccattcttaatttaactatttatattatcctaactactancgcattcctactaatccacttaaaatccacancacgaanctactactatctcncaccttaaaaaactttnattaaatacacccttattcctcc

SEQ ID NO: 2569 - DNA, 290 bp, Homo sapiens
  misc_feature (260)..(261): n equals a,t,g, or c
  misc_feature (268)..(268): n equals a,t,g, or c
  misc_feature (272)..(272): n equals a,t,g, or c
  misc_feature (281)..(281): n equals a,t,g, or c
gaatatactctccggacaatgaaccataaccaatactaccaatcaatactcatcattaataatcataatggctatagcaataaaactaggaatagccccctttcacttctgagtcccagaggttacccaaggcacccctctgacatccggcctgcttcttctcacatgaacaaaaactagcccccatctcaatcatataccaaatctctccctcactaaaagtaagccttctcctcactctctcaatcttttccatcttnncaggctnttanggtggattnaaaccaacc

SEQ ID NO: 2570 - DNA, 566 bp, Homo sapiens
  misc_feature (50)..(50): n equals a,t,g, or c
  misc_feature (69)..(69): n equals a,t,g, or c
  misc_feature (85)..(85): n equals a,t,g, or c
  misc_feature (105)..(105): n equals a,t,g, or c
  misc_feature (128)..(128): n equals a,t,g, or c
  misc_feature (151)..(151): n equals a,t,g, or c
  misc_feature (159)..(159): n equals a,t,g, or c
  misc_feature (176)..(176): n equals a,t,g, or c
  misc_feature (223)..(223): n equals a,t,g, or c
  misc_feature (267)..(267): n equals a,t,g, or c
  misc_feature (311)..(311): n equals a,t,g, or c
  misc_feature (323)..(323): n equals a,t,g, or c
  misc_feature (382)..(382): n equals a,t,g, or c
  misc_feature (386)..(386): n equals a,t,g, or c
  misc_feature (410)..(410): n equals a,t,g, or c
  misc_feature (414)..(414): n equals a,t,g, or c
  misc_feature (486)..(486): n equals a,t,g, or c
  misc_feature (493)..(493): n equals a,t,g, or c
  misc_feature (497)..(497): n equals a,t,g, or c
  misc_feature (499)..(499): n equals a,t,g, or c
  misc_feature (554)..(554): n equals a,t,g, or c
gctcgtgccgaattcggcacgagcttctcctcactctctcaatcttatcnatcatagcaggcatttgangtggattaaaccaaanccagttacgcaaaatcttancatactcctcaattaccacatangatgaataatagcagttctaccntacaaccntaacataaccattcttnatttaactatttatattatcctaactactaccgcattcctactactnaacttaaactccagcaccacgaccctactactatctcgcacctnaaacaagctaacatgactaacacccttaattccatccaccctcntctccctaggangcctgcccccgctaaccggctttttgcccaaatgggccattatcgaagaattcacgacnaacnatagcctcatcatccccaccatcnttgnccacatcacctccttaaactctaattctaactacgcctaatctactccacctcaattacacttactcccatntcttaanaacntnaaaataaatggacgttggaacattcaaaacccacccattctccccacactcaaanacttaacacgtt

SEQ ID NO: 2571 - DNA, 331 bp, Homo sapiens
  misc_feature (282)..(282): n equals a,t,g, or c
  misc_feature (295)..(295): n equals a,t,g, or c
  misc_feature (317)..(317): n equals a,t,g, or c
  misc_feature (330)..(331): n equals a,t,g, or c
gaatcaacaccctcctagccttactactaataattattacattttgactaccacaactcaacggctacatagaaaaatccaccccttacgagtgcggcttcgaccctatatcccccgcccgcgtccctttctccataaaattcttcttagtagctattaccttcttattatttgatctagaaattgccctccttttacccctaccatgagccctacaaacaactaacctgccactaatagttatgttcatccctcttattaatcatcatccttagccctaantctggcctatganttgactaccaaaaggattagantggaaccgaattnn

SEQ ID NO: 2572 - DNA, 539 bp, Homo sapiens
  misc_feature (1)..(1): n equals a,t,g, or c
  misc_feature (23)..(23): n equals a,t,g, or c
  misc_feature (34)..(34): n equals a,t,g, or c
  misc_feature (36)..(36): n equals a,t,g, or c
  misc_feature (82)..(82): n equals a,t,g, or c
  misc_feature (110)..(110): n equals a,t,g, or c
  misc_feature (136)..(136): n equals a,t,g, or c
  misc_feature (151)..(151): n equals a,t,g, or c
  misc_feature (178)..(178): n equals a,t,g, or c
  misc_feature (185)..(185): n equals a,t,g, or c
  misc_feature (272)..(273): n equals a,t,g, or c
  misc_feature (319)..(319): n equals a,t,g, or c
  misc_feature (350)..(351): n equals a,t,g, or c
  misc_feature (355)..(355): n equals a,t,g, or c
  misc_feature (367)..(367): n equals a,t,g, or c
  misc_feature (426)..(426): n equals a,t,g, or c
  misc_feature (434)..(434): n equals a,t,g, or c
  misc_feature (436)..(436): n equals a,t,g, or c
  misc_feature (438)..(438): n equals a,t,g, or c
  misc_feature (488)..(488): n equals a,t,g, or c
  misc_feature (500)..(500): n equals a,t,g, or c
  misc_feature (516)..(516): n equals a,t,g, or c
  misc_feature (525)..(525): n equals a,t,g, or c
  misc_feature (538)..(538): n equals a,t,g, or c
ncaaaccctagacaaaacacatngcctacccctncnttgtactatccctatgaggcataattataacaagctccatctgccnacgacaaacagacctaaaatcgctcatngcatactcttcaatcagccacatagncctcgtagtaacagncattctcatccaaaccccctgaagctncaccggngcagtcattctcataatcgcccacggacttacatcctcattactattctgcctagcaaactcaaactacgaacgcactcacaggcgnntcataatcctctctcaaggacttcaaactctactcccactaatagntttttgatgacttctagcaagcctcgctganntcgncttaccccccantgattaacctactgggagaactctctgtgctagtaaccacgttctcctgatcaaatatnactctccngntnacaggactcaacatactaatcgcagggcctggtgctccctctaacatatntcgcacaaacgnaaatgggggggtcaantcacccaanccacatttgaacng

SEQ ID NO: 2573 - DNA, 453 bp, Homo sapiens
  misc_feature (17)..(17): n equals a,t,g, or c
  misc_feature (74)..(74): n equals a,t,g, or c
  misc_feature (130)..(130): n equals a,t,g, or c
  misc_feature (148)..(148): n equals a,t,g, or c
  misc_feature (187)..(187): n equals a,t,g, or c
  misc_feature (192)..(192): n equals a,t,g, or c
  misc_feature (197)..(197): n equals a,t,g, or c
  misc_feature (223)..(223): n equals a,t,g, or c
  misc_feature (263)..(264): n equals a,t,g, or c
  misc_feature (266)..(266): n equals a,t,g, or c
  misc_feature (288)..(289): n equals a,t,g, or c
  misc_feature (304)..(304): n equals a,t,g, or c
  misc_feature (315)..(315): n equals a,t,g, or c
  misc_feature (319)..(319): n equals a,t,g, or c
  misc_feature (343)..(344): n equals a,t,g, or c
  misc_feature (356)..(356): n equals a,t,g, or c
  misc_feature (362)..(362): n equals a,t,g, or c
  misc_feature (381)..(381): n equals a,t,g, or c
  misc_feature (394)..(394): n equals a,t,g, or c
  misc_feature (400)..(400): n equals a,t,g, or c
  misc_feature (405)..(405): n equals a,t,g, or c
  misc_feature (411)..(411): n equals a,t,g, or c
  misc_feature (416)..(416): n equals a,t,g, or c
  misc_feature (427)..(427): n equals a,t,g, or c
  misc_feature (450)..(450): n equals a,t,g, or c
gatcataatggctatancaataaaactaggaatagccccctttcacttctgagtcccagaggttacccaaggcnacccctcctgaaattccggcctggcttccttctcacattgaacaaaaaaactaagncccccaatctcaattcantattaccaaaattcttcttcccctccaacttaaaaacgnttaangcccnttccttccctccaacttccttcttcnaaattcctttaattcccattccaattaagccaagggggcnngntttgaaaagggttggggaattnnaaaaaccccaaaaanccccccaagcntttncccgccaaaaaaattccttttaannccaattaacctncccctnccaaatttttaaccccccnccctttttggggnaattgnaaaantttaanttaangccaaggtttncccttacccgggtttaccaaaanccc

SEQ ID NO: 2574 - DNA, 527 bp, Homo sapiens
  misc_feature (28)..(28): n equals a,t,g, or c
  misc_feature (80)..(80): n equals a,t,g, or c
  misc_feature (154)..(154): n equals a,t,g, or c
  misc_feature (183)..(183): n equals a,t,g, or c
  misc_feature (210)..(210): n equals a,t,g, or c
  misc_feature (224)..(224): n equals a,t,g, or c
  misc_feature (232)..(232): n equals a,t,g, or c
  misc_feature (262)..(262): n equals a,t,g, or c
  misc_feature (264)..(264): n equals a,t,g, or c
  misc_feature (280)..(280): n equals a,t,g, or c
  misc_feature (282)..(282): n equals a,t,g, or c
  misc_feature (298)..(298): n equals a,t,g, or c
  misc_feature (303)..(303): n equals a,t,g, or c
  misc_feature (313)..(313): n equals a,t,g, or c
  misc_feature (325)..(325): n equals a,t,g, or c
  misc_feature (350)..(350): n equals a,t,g, or c
  misc_feature (356)..(356): n equals a,t,g, or c
  misc_feature (369)..(369): n equals a,t,g, or c
  misc_feature (380)..(380): n equals a,t,g, or c
  misc_feature (391)..(391): n equals a,t,g, or c
  misc_feature (494)..(494): n equals a,t,g, or c
  misc_feature (501)..(501): n equals a,t,g, or c
  misc_feature (505)..(505): n equals a,t,g, or c
  misc_feature (516)..(516): n equals a,t,g, or c
  misc_feature (518)..(518): n equals a,t,g, or c
gcctctgagcaaggtccctctgcagcanaacttccaggacaaccaattccaggggaagtggtatgtggtaggcctggcanggaatgcaattctcagagaagacaaagacccgcaaaagatgtatgccaccatctatgagctgaaagaagacaanagctacaatgtcacctccgtcctgtttangaaaaagaagtgtgactactggatcangacttttgttccangttgccancccggcgagttcacgctgggcaacattaananttaccctggattaacnanttacctcgtccgagtngtgancacaactacnaccagcatgctntggtgttcttccaaaaaatttctcnaaacanggaattcttccanatcacccctcnggaaaaaccangaacttgacttccggaacttaaaggaaaaacttcctccccctcctcccaattctcctgggcccccttaaaaaccactctccttcccttttcccattccaacanttttttnaaanggtgaattttnangtttccccc

SEQ ID NO: 2575 - DNA, 547 bp, Homo sapiens
  misc_feature (24)..(24): n equals a,t,g, or c
  misc_feature (66)..(66): n equals a,t,g, or c
  misc_feature (377)..(377): n equals a,t,g, or c
  misc_feature (415)..(415): n equals a,t,g, or c
  misc_feature (490)..(490): n equals a,t,g, or c
  misc_feature (493)..(493): n equals a,t,g, or c
  misc_feature (503)..(503): n equals a,t,g, or c
  misc_feature (521)..(521): n equals a,t,g, or c
  misc_feature (537)..(537): n equals a,t,g, or c
gcagggtttctgtgtgttgggtgncggggggggtgaaagccacccagggaggcagccaaaggaaanaaggacatctggtgctggagggtctgagtggggtccaggggccccaggcaggccaggagggacagcctggtgtcagctcagggagaaggcccaggcccatctcggctgggtggggtagggcccctccaggtagtgggggatgagctgtcacgggttgggccggactgagagcaacagaaccctgctgctgccctggccccaccttgtccagcacaggaggcccaagcctgggttgtctcccctctcacccacccatctctccctcccaaggaaaaagaagtgtgactactggatcaggacttttgttccangttgccagcccggcgagttcacgctgggcaacattaanagttaccctggattaacgagttacctcgtccgaatggtgagcaccaactacaaccagcatgctatggtgttcttnaanaaagtttctnaaaacagggaagtacttnaagaacaccttttacnggagaaccaa

SEQ ID NO: 2576 - DNA, 593 bp, Homo sapiens
  misc_feature (4)..(4): n equals a,t,g, or c
  misc_feature (29)..(29): n equals a,t,g, or c
ccanccctcactaagggaacaaagctggngctccaccgcggtggcggccgctctagaactagtggatcccccgggctgcaggaattcggcacgaggggtcccgggcgcgtttcgggtgctggcggctgcagccgagttcaaacctaagcagctggaagggccctgtggctaggtaccatagagtctctacacaggagtaaatcagcctggtgtgcaggggaggcagacacacaaacagaaaattggactacagtgctaagatgctgtaagaagaggttaactaaaggacaggaagatggggccaagagatggtgctactgtctactttagggatcgtctttcaaggcgaggggcctcctatctcaagctgtgatacaggaaccatggccaactgtgagcgtaccttcattgcgatcaaaccagatggggtccagcggggtcttgtgggagagattatcaagcgttttgagcagaaaggttccgccttgttggtctgaattcatgcaagcttccgaagatcttctcaaggaacactacgttgacctgaaggaccgtccattctttgccggcctggtgaaatacatgcactcagg

SEQ ID NO: 2577 - DNA, 416 bp, Homo sapiens
  misc_feature (365)..(365): n equals a,t,g, or c
  misc_feature (370)..(370): n equals a,t,g, or c
  misc_feature (393)..(393): n equals a,t,g, or c
  misc_feature (396)..(397): n equals a,t,g, or c
gctggaagcactgttcagcgatgtcaacatgcaggaataccccgatttaattcacatttataaaggctttgaaaatgtaatccatgacaaattgcctctccaagaaagtgaagaagaagagagggaggagaggtctggcctccaactaagtcttgaacaaggaactggtgaaaactcttttcgaagcctgacttggccaccttcgggttccccatctcatgctggtacaaccccacctgaaaatggactctcagagcacccctgtgaaacagaacagataaatgcaaagagaaaagatacaaccagtgacaaagatgattcgctaggaagccaacaaacaaatgaacaatgtgctcaaaaagctnagccnacagaagtctgcgaaccaattgnttnnccaagtgaaatatggggat

SEQ ID NO: 2578 - DNA, 441 bp, Homo sapiens
  misc_feature (19)..(19): n equals a,t,g, or c
  misc_feature (147)..(147): n equals a,t,g, or c
  misc_feature (174)..(174): n equals a,t,g, or c
  misc_feature (383)..(383): n equals a,t,g, or c
gttcacctcactaagggancaaaagctggagctccaccgcggtgcggccgctctagactagtggatcccccgggctgcaggaattcggcacgagattccgtcctgcgcggttgttctctggagcagcgttcttttatctccgtccgncttctctcctacctaagtgcgtgccgncacccgatggaagattcgatggacatggacatgagccccctgaggccccagaactatcttttcggttgtgaactaaaggccgacaaagattatcactttaaggtggataatgatgaaaatgagcaccagttatctttaagaacggtcagtttaggggctggtgcaaaggatgagttgcacattgttgaagcagaggcaatgaattacgnaggcagtccattaaagtaacactggcaactttgaaaatgtctgtacagccaacggttt

SEQ ID NO: 2579 - DNA, 520 bp, Homo sapiens
  misc_feature (429)..(429): n equals a,t,g, or c
  misc_feature (445)..(445): n equals a,t,g, or c
  misc_feature (451)..(451): n equals a,t,g, or c
  misc_feature (489)..(489): n equals a,t,g, or c
  misc_feature (494)..(494): n equals a,t,g, or c
gagaaaagcagggaacatgagatcgatgggcgatctatttccctgtactatactggagagaaaggtcaaaatcaagactatagaggtggaaagaatagcacttggagtggtgaatcaaaaactctggttttaagcaacctctcctacagtgcaacagaagaaactcttcaggaagtatttgagaaagcaacttttatcaaagtaccccagaaccaaaatggcaaatctaaagggtatgcatttatagagtttgcttcattcgaagacgctaaagaagctttaaattcctgtaataaaagggaaattgagggcagagcaatcaggctggagttgcaaggacccaggggatcacctaatgccagaagccagccatccaaaactctgtttgtcaaaggcctgtctgaggataccactgaagagacattaaanggagtcatttgacggnttccgnttcgggccaaggatagtttactggcccggggaaaactngggtncctcccaaaggggttttgggtttttg

SEQ ID NO: 2580 - DNA, 416 bp, Homo sapiens
  misc_feature (12)..(12): n equals a,t,g, or c
  misc_feature (133)..(133): n equals a,t,g, or c
  misc_feature (149)..(149): n equals a,t,g, or c
  misc_feature (222)..(222): n equals a,t,g, or c
  misc_feature (228)..(228): n equals a,t,g, or c
  misc_feature (266)..(266): n equals a,t,g, or c
  misc_feature (290)..(290): n equals a,t,g, or c
  misc_feature (296)..(296): n equals a,t,g, or c
  misc_feature (306)..(306): n equals a,t,g, or c
  misc_feature (310)..(310): n equals a,t,g, or c
  misc_feature (345)..(345): n equals a,t,g, or c
  misc_feature (368)..(368): n equals a,t,g, or c
  misc_feature (394)..(394): n equals a,t,g, or c
  misc_feature (396)..(396): n equals a,t,g, or c
  misc_feature (413)..(413): n equals a,t,g, or c
gcagcggctccnggttctggaaggccctgaccttcatggccgtcggaggaggactcgcagtcgccgggctgcccgcgctgggcttcaccggcgccggcatcgcggccaactcggtggctgcctcgctgatganctggtctgcgatcctnaatgggggcggcgtgcccgccggggggctagtggccacgctgcagagcctcggggctggtggcagcaaagtcntcatangtaatattggtgccctgatgggctacgccacccacaantatctcgatagtgaggaggatgangagtanccagcagctnccanaacctcttcttccttcttggcctaactcttccagntaggatctagaactttgcctttnattttttttttatttttttttgaaananggttctcactatattgncag

SEQ ID NO: 2581 - DNA, 432 bp, Homo sapiens
  misc_feature (50)..(50): n equals a,t,g, or c
  misc_feature (213)..(213): n equals a,t,g, or c
  misc_feature (254)..(254): n equals a,t,g, or c
  misc_feature (273)..(273): n equals a,t,g, or c
  misc_feature (279)..(279): n equals a,t,g, or c
  misc_feature (346)..(347): n equals a,t,g, or c
  misc_feature (380)..(380): n equals a,t,g, or c
  misc_feature (409)..(409): n equals a,t,g, or c
tcacacgcctgcagttcaccaccaccgtggtctcttgctgtcccgcggantgcagactgaagggagcaacggcaagaaagaagtgctgagcggtttccaagtggtgctggaagacacagtgcttttccctgagggcgggggacagcctgatgaccgtggtacaatcaatgacatctctgtgctgagagtgactctgtgctgagagtgactcgncgtggggaacaggctgatcatttcacccagacacccctggntccaggaagccaggttctngtccgngtagattgggagcggaggtttgaccacatgcagcagcattcagggcagcatctcatcacggcagttnntgaccatctatttaagctgaagacaacatcatnggagttagggagatttcggagtgcgattnagctggacaccccctctatgact

SEQ ID NO: 2582 - DNA, 693 bp, Homo sapiens
  misc_feature (114)..(114): n equals a,t,g, or c
  misc_feature (510)..(510): n equals a,t,g, or c
  misc_feature (565)..(565): n equals a,t,g, or c
  misc_feature (614)..(614): n equals a,t,g, or c
  misc_feature (635)..(635): n equals a,t,g, or c
  misc_feature (663)..(663): n equals a,t,g, or c
  misc_feature (687)..(688): n equals a,t,g, or c
gcaaagacttgcccacctgaataagtgcttgatgaactttaagctagggaatttcagctatcaaaaaaacccactgaaattgggagagcttcaaggaaaccacttcactgttgntctcagaaatataacaggaactgatgaccaagtacagcaagctatgaactctctcaaggagattggatttattaactactatggaatgcaaagatttggaaccacagctgtccctacgtatcaggttggaagagctatactacaaaattcctggacagaagtcatggatttaatattgaaaccccgctctggagctgaaaagggctacttggttaaatgcagagaagaatgggcaaagaccaaagacccaactgctgcctcagaaaactacctgtcaaaagatacccagaaataatcgcttaatgtatattcatagctaccaaagctatgtgtggaataacatggtaagcaagaggatagaagactatggactaaacctgttccaggggacctcgntctcaaaggaccccagcccctatattgaggaagatgatgtaataattactctatncatgatgtgggaatgccttgcctggtttcgatggtatctaccccaagcnttaaaattcaagaagcctacngggaaatgctcccagttgacaatctganatggccacctgagacccaaaatcnnaattt

SEQ ID NO: 2583 - DNA, 407 bp, Homo sapiens
  misc_feature (276)..(276): n equals a,t,g, or c
  misc_feature (296)..(296): n equals a,t,g, or c
  misc_feature (343)..(343): n equals a,t,g, or c
  misc_feature (348)..(348): n equals a,t,g, or c
  misc_feature (352)..(352): n equals a,t,g, or c
  misc_feature (359)..(359): n equals a,t,g, or c
  misc_feature (364)..(364): n equals a,t,g, or c
  misc_feature (395)..(395): n equals a,t,g, or c
tcgaggctgacgttgacggtgttgataatgagatcaaactgccccgccagtgctttcagtgcctgcggatcgcggctattcaccactttatcggcacccatcgccagcacttcctgctctttcgccggattagaactaaaggctgtcacctcgcatcccattgcgtgcagaagttttatagcgatatgccccagcccgccaataccaattaccccaacgcggctggtagcagtgcatatggtgcatcaacagtggtttaaagaccgtggataccgncgcacaacagcggccccggnggactcgatatccaatatttttctgggcagtgggattcacccattgnccatnccgnacggaanttttnggcaagccaccgggatttcaaatcgtggggnaccgaacttgtt

SEQ ID NO: 2584 - DNA, 415 bp, Homo sapiens
  misc_feature (5)..(5): n equals a,t,g, or c
  misc_feature (8)..(8): n equals a,t,g, or c
  misc_feature (363)..(363): n equals a,t,g, or c
  misc_feature (379)..(379): n equals a,t,g, or c
  misc_feature (383)..(383): n equals a,t,g, or c
  misc_feature (389)..(389): n equals a,t,g, or c
  misc_feature (397)..(397): n equals a,t,g, or c
ggcanagnaaacagaaaactgcaaaatattgatgacaaaaattaaagaagacataaataaatggagaaatataccatgctcatggattggaagacttacattgctaaactgtcacttctccccagatggatctacagagtccacataatctcacttaaaactccagaagaaatttttatgaaagttgacagctgattctaaaattttacatagaaatgcaaaggtctccgaatagtcaaaacaattaggaaaaggaaaaacaagttggaagacttactttccggctgggttaaaggtggactacacagttacagtaatcagataggttggtattaggttggacagttgtttcattggattggntgcgggttttggattngacncacacngaattgtnccttggttttttaatagt

SEQ ID NO: 2585 - DNA, 193 bp, Homo sapiens
  misc_feature (157)..(157): n equals a,t,g, or c
  misc_feature (172)..(172): n equals a,t,g, or c
  misc_feature (187)..(187): n equals a,t,g, or c
  misc_feature (191)..(192): n equals a,t,g, or c
ggcagcggcggcggcgcggagagacgcagcggaggttttcctggtttcggaccccagcggccggatggtgaaatcctccctgcagcggatcctcaatagccactgcttcgccagagagaaggaaggggataaacccagcgccaccatccacgccagncgcaccatgccgctnctaagcctgcacagnccgnng

SEQ ID NO: 2586 - DNA, 469 bp, Homo sapiens
gaaacagagtccagagctggtgaagaagcacaagaaaaagagggttgtccccaaaaagcctcccccatcaccccaacctacagggaaaattgagatcaaaattgtccgcccatgggctgaagggactgaagagggtgcacgttggctgactgatgaggacacgagaaacctcaaggagatcttcttcaatatcttggtgccgggagctgaagaggcccagaaggaacgccagcggcagaaagagctggagagcaattaccgccgggtgtggggctctccaggtggggagggcacaggggacctggacgaatttgacttctgagaccaaacagcagagtggagctgagctgtggacctctcgggcaactctgtgggtgtgggggccctgggtgaattctgctgcccctgctggcagccaccttgagacctcaccgggcctgtgattttgctctcctgaactctcactcaa

SEQ ID NO: 2587 - DNA, 347 bp, Homo sapiens
ttgtaatttaaggatcggggaccaaaaatgtttaaagactaaatgtgttcacattactatagatatgtctataaggtgaagattcttttcttaggtatacaaatgtgatgttgtatataaatgggcttcccacccacaaatgcttattagcctaaaatggcctgaaagctctagtaattaaattatttctctgcgtcctaattttttgtctttgaaacagattatttagaaaatcatgtacttcgcttaagtttctaacttttacttgctttttccagagttatttataccaaatcctacaggggattgtgttttgtcactctagaagagttcttcacagagactta

SEQ ID NO: 2588 - DNA, 330 bp, Homo sapiens
  misc_feature (147)..(147): n equals a,t,g, or c
  misc_feature (261)..(261): n equals a,t,g, or c
  misc_feature (274)..(275): n equals a,t,g, or c
  misc_feature (290)..(290): n equals a,t,g, or c
  misc_feature (330)..(330): n equals a,t,g, or c
gctcgtgccgaattcggcacgagcggcacgagtaagggttcctgctttcacagaattattccagggtttatgtgtcagggtggtgacttcacacgccataatggcactggtggcaagtccatctatggggagaaatttgaagatganaacttcatcctaaagcatacgggtcctggcatcttgtccatggcaaatgctggacccaacacaaatggttcccagtttttcatctgcactgcccaagactgattggttgggatngccaacatttgtnnttttgggcaaagttnaaaagaaaggcatgaatattgttggaaaggccatggaacn

SEQ ID NO: 2589 - DNA, 323 bp, Homo sapiens
  misc_feature (84)..(84): n equals a,t,g, or c
  misc_feature (99)..(99): n equals a,t,g, or c
  misc_feature (103)..(103): n equals a,t,g, or c
  misc_feature (107)..(107): n equals a,t,g, or c
  misc_feature (134)..(134): n equals a,t,g, or c
  misc_feature (142)..(142): n equals a,t,g, or c
  misc_feature (144)..(144): n equals a,t,g, or c
  misc_feature (170)..(170): n equals a,t,g, or c
  misc_feature (193)..(193): n equals a,t,g, or c
  misc_feature (215)..(215): n equals a,t,g, or c
  misc_feature (253)..(253): n equals a,t,g, or c
  misc_feature (287)..(287): n equals a,t,g, or c
  misc_feature (294)..(294): n equals a,t,g, or c
  misc_feature (296)..(296): n equals a,t,g, or c
  misc_feature (315)..(315): n equals a,t,g, or c
gatccaggccgggcccgagcagtactcagcctgagtaaactcgttgcccggaagccctgacctggtggactacaccctgtcaancccagcacgtgctgntganacanccagaacccgcggcgggacgcactgangagggccntnagtcagtacctgacggacagggttcnctggagggactgaagacggccgngcccaccatggcggcacaacancccccgatacccatgccagtgtgtgtgccaaggatcancggtcaccacccatgactgctgccctcggcacangggcctngnccactggatgtgaccttcntccatcat

SEQ ID NO: 2590 - DNA, 546 bp, Homo sapiens
  misc_feature (2)..(2): n equals a,t,g, or c
  misc_feature (301)..(301): n equals a,t,g, or c
  misc_feature (346)..(346): n equals a,t,g, or c
  misc_feature (435)..(435): n equals a,t,g, or c
  misc_feature (453)..(453): n equals a,t,g, or c
  misc_feature (508)..(508): n equals a,t,g, or c
  misc_feature (510)..(510): n equals a,t,g, or c
  misc_feature (514)..(514): n equals a,t,g, or c
  misc_feature (521)..(521): n equals a,t,g, or c
gntttggggtcatcccctttggccacaaagtcactggccatgtgctgcacatcctcctcaagatgacattcatcgtccaacgaccggtggctgctgctcccttaggctctcccaaccacagtttctcccaattgctccaaatattcctcagcccagcaggtgggggaaatggccaaggggtctgtaacttcagaaatgaatgattgggaccagtctgtctcattataatcctgaattacatccacagcatctccagctgcaagtcactctgggcccagttctcagacaaggccaagtcggncacaccaggggctctctggggagcctggaggaagtttgactcttnagtctgctgcatctcagccaggagttcatccatcttcaaggtctgaggggcacgggatacaagggtacactgtggtcctgcaggaattnacccaccaattcatcttnagaagctactcccaaaggctttggagactgcctcagaggctggggctcggaggcngngcangggtcangcgtcaggccttagtgcttctgctg

SEQ ID NO: 2591 - DNA, 478 bp, Homo sapiens
  misc_feature (1)..(1): n equals a,t,g, or c
  misc_feature (313)..(313): n equals a,t,g, or c
  misc_feature (316)..(316): n equals a,t,g, or c
  misc_feature (335)..(335): n equals a,t,g, or c
  misc_feature (341)..(341): n equals a,t,g, or c
  misc_feature (362)..(362): n equals a,t,g, or c
  misc_feature (365)..(365): n equals a,t,g, or c
  misc_feature (395)..(395): n equals a,t,g, or c
  misc_feature (438)..(438): n equals a,t,g, or c
  misc_feature (442)..(442): n equals a,t,g, or c
  misc_feature (454)..(454): n equals a,t,g, or c
  misc_feature (459)..(459): n equals a,t,g, or c
ncctgtggcgggtgtggggagcggagcccagagctcctgtggggccgctgctttggcggtgggcccagccgggagcagcctctttcgaaggccgccgtgacctcttcaagggcgtggagacgggaaggaaaaggccccggttggggttccagggcgccggtaacgttaaccggcgccttgcctgtcctctaaccgtcgctccctcctcccctagaaagatgttctcgtccgtggcgcacctggcgcgggcgaaccccttcaacacgccacatctgcagctggtgcacgatggtctcggggacctccgcagcanctncccagggcccacgggccanccccgncgcctcgcaacctgcagccgncgncgtggaagagtacagttgtgaatttggctncgcgaagtattatgcactgtgtggcttttggtggggtcttaanttgnggtctgacacanactgntggggttcccctggattta

SEQ ID NO: 2592 - DNA, 340 bp, Homo sapiens
  misc_feature (10)..(10): n equals a,t,g, or c
  misc_feature (123)..(123): n equals a,t,g, or c
  misc_feature (216)..(216): n equals a,t,g, or c
  misc_feature (262)..(262): n equals a,t,g, or c
  misc_feature (271)..(271): n equals a,t,g, or c
  misc_feature (301)..(301): n equals a,t,g, or c
  misc_feature (315)..(315): n equals a,t,g, or c
  misc_feature (338)..(338): n equals a,t,g, or c
attcggcacnaggtgaaaaggggcttggtgttaaggaatgaaaagtgcaatgagaactataccactgacttcattttcaacctgtactctgaggaggggaagggcatcttcgacagcaggaanaatgtgcttggtcacatgcagcagggtgggagcccaaccccatttgataggaattttgccactaaaatgggcgccaaggctatgaactggatntctgggaaaatcaaaaaaaattaccgtaatgggcggatctttgccnatactccanatccggctttgttcttgggatacttaaaangcctggtcttccancagtggctgactgaaagacaacnat

SEQ ID NO: 2593 - DNA, 462 bp, Homo sapiens
  misc_feature (275)..(275): n equals a,t,g, or c
  misc_feature (324)..(324): n equals a,t,g, or c
  misc_feature (340)..(340): n equals a,t,g, or c
  misc_feature (356)..(356): n equals a,t,g, or c
  misc_feature (385)..(385): n equals a,t,g, or c
  misc_feature (397)..(397): n equals a,t,g, or c
  misc_feature (399)..(399): n equals a,t,g, or c
  misc_feature (432)..(433): n equals a,t,g, or c
  misc_feature (443)..(443): n equals a,t,g, or c
aaggtgaaagagctgaagagggctaagacggtgctcacggtcattaaatggaaaggggaaaaatccaagtatccacagacttcgccatgcagaatgttctgctgcagatggggctgcacgtgctggcggtgaacggcatgctgattcgtgaggcccggagctacatcttgcgctgccatggctgtttcaagacaacgtctgacatgagccgagtgttctgctcacactgtgggaacaagaccctgaagaaatgtccgtgaccgtcagcgacaacngcacccttgcacatgcacttctcccgcaaccccaaggtgctgaaccccncgggctccggtactcncttcccactcccaaangggggcaaatacccatcaaccccatctcnccaaagatcacncntccctccacttgcaatctccaaaaggccaggcnnaaaaccactnttccccctaatactccccg

SEQ ID NO: 2594 - DNA, 330 bp, Homo sapiens
  misc_feature (214)..(214): n equals a,t,g, or c
cggtcgcccccaccggccccatggcagcccccggcgccccagctgagtacggctacatccggaccgtcctgggccagcagatcctgggacaactggacagctccagcctggcgctgccctccgaggccaagctgaagctggcggggagcagcggccgcggcggccagacagtcaagagcctgcggatccaggagcaggtgcagcagaccctcgnccggaaggccgcagctccgtgggcaacggaaatcttcaccgaaccagcagtgttctgagtatgtctacaacctacacttgttgaaaatgattttgttggaggccgttcccctgttc

SEQ ID NO: 2595 - DNA, 273 bp, Homo sapiens
  misc_feature (8)..(8): n equals a,t,g, or c
  misc_feature (20)..(20): n equals a,t,g, or c
  misc_feature (32)..(32): n equals a,t,g, or c
  misc_feature (62)..(62): n equals a,t,g, or c
  misc_feature (81)..(81): n equals a,t,g, or c
  misc_feature (95)..(95): n equals a,t,g, or c
  misc_feature (108)..(108): n equals a,t,g, or c
  misc_feature (127)..(127): n equals a,t,g, or c
  misc_feature (137)..(137): n equals a,t,g, or c
  misc_feature (149)..(149): n equals a,t,g, or c
  misc_feature (162)..(162): n equals a,t,g, or c
  misc_feature (206)..(206): n equals a,t,g, or c
  misc_feature (208)..(208): n equals a,t,g, or c
  misc_feature (222)..(222): n equals a,t,g, or c
  misc_feature (239)..(239): n equals a,t,g, or c
  misc_feature (265)..(265): n equals a,t,g, or c
gctcgtgncgattcggcacnagacggggctcntcccatttatcccagtggctcaacaacttntttgccctccccttctccnccatggcttcccancttgacatgtctnccgtggtgggggcaggggnaaagcatacnccagactcttgnaacaagtgttccncctggggactctgtcacaagctccatagaagcctctcaagtccnantgcctctggaaagnctctccaattacattcncaccaccctgtgccccaaaaaagggnccccatca

SEQ ID NO: 2596 - DNA, 482 bp, Homo sapiens
  misc_feature (420)..(420): n equals a,t,g, or c
  misc_feature (431)..(431): n equals a,t,g, or c
  misc_feature (434)..(434): n equals a,t,g, or c
  misc_feature (449)..(449): n equals a,t,g, or c
  misc_feature (464)..(464): n equals a,t,g, or c
gctctgacagtgacaaagagtggattgctgctctgcgtcggaaatatcgaagccgagagcaaaccctgtcctccagtggcgaaagctgggagactctgccggggaaagaagagcgggaacctccacaggctaaggtgagtgccagcactggcaccagccctggccccggtgctagtgccagtgccggggctggcgccggggccaatgctggcagcaatggcagcaattaccttgaagaagttcgagaaccatctcttcaggaagagcaggcatccctggaagaaggagaaattccttggctccagtaccatgagaatgacagtagcagtgagggggataatgattctggtcacgagttgatgcaacctggggtattcatgctggatggaaacacaaccttgaagatgacttcagtgtgancgaagacctanaantggattggaaccttnttgatggatttgcanatgggttaaggaatggct

SEQ ID NO: 2597 - DNA, 478 bp, Homo sapiens
  misc_feature (8)..(8): n equals a,t,g, or c
  misc_feature (434)..(434): n equals a,t,g, or c
  misc_feature (447)..(447): n equals a,t,g, or c
  misc_feature (450)..(450): n equals a,t,g, or c
  misc_feature (460)..(460): n equals a,t,g, or c
  misc_feature (462)..(462): n equals a,t,g, or c
gtctttgnacaatttaatgggaaaagatgcaccgacgctgtgggagacagacgacagtgtgtgcccacagagccctgtgaggatgctgaggatgactgcggaaatgactttcaatgcagtacaggcagatgcataaagatgcgacttcggtgtaatggtgacaatgactgcggagacttttcagatgaggatgattgtgaaagtgagccccgtcccccctgcagagacagagtggtagaagagtctgagctggcactaacagcaggctatgggatcaacattttagggatggatcccctaagcacaccttttgacaatgagttctacaatggactctgtaaccgggatcgggatggaaacactctgacatactaccgaagaccttggaacgtggcttctttgatctatgaaaccaaaggcgagaaaaatttcanaaccgaacattcnaanaacaaattgnancatttaaaagtatcat

SEQ ID NO: 2598 - DNA, 422 bp, Homo sapiens
  misc_feature (376)..(376): n equals a,t,g, or c
  misc_feature (391)..(392): n equals a,t,g, or c
  misc_feature (394)..(394): n equals a,t,g, or c
  misc_feature (402)..(402): n equals a,t,g, or c
ggaagaattcctctgaagggaacaagcatcacaagagtacacctctactcattcactgcagggatggatctcagcaaacgggaatattttgtgctttgttaaatctcttagaaagtgcggaaacagaagaggtagtggatatttttcaagtggtaaaagctctacgcaaagctaggccaggcatggtttccacattcgagcaatatcaattcctatatgaccgtcattgccagcacctaccctgctcagaatggacaaggtaaagaaaaacaaccatcaagaagataaaattgaatttgataatgaagtggacaaagtaaagcaggatgctaattgtgttaatccacttggtgccccagaaaagcttctgaagcanaggaacaggctgaanntntgaacccncgagtggtcttgatgggcca

SEQ ID NO: 2599 - DNA, 452 bp, Homo sapiens
  misc_feature (5)..(5): n equals a,t,g, or c
gcagngggacaacgccgctgtcgccctgctgcagcccttcctggtggtcaccaaggaggcctttgacagatcctttgaggtgaacctgcgtgcggtcatccaggtgtcgcagattgtggccaggggcttaatagcccgggagtcccaggggccatcgtgaatgtctccagccagtgctcccagcgggcagtaactaaccatagcgtctactgctccaccaagggtgccctgggacatgctgaccaaggtgatggccctagagctcgggccccacaagctgtcccggtgtagatccgagtgaatgcagtaaaccccacagtggtgatgacgtccatgggccaggccacctggagtgacccccacaaggccaagactatgctgaaccgaatcccacttggcaagtttgctgaggtagagcacgtggtgaacggcatcctctttctgctgagtga

SEQ ID NO: 2600 - DNA, 672 bp, Homo sapiens
  misc_feature (9)..(9): n equals a,t,g, or c
  misc_feature (48)..(48): n equals a,t,g, or c
  misc_feature (315)..(315): n equals a,t,g, or c
  misc_feature (329)..(329): n equals a,t,g, or c
  misc_feature (393)..(393): n equals a,t,g, or c
  misc_feature (408)..(408): n equals a,t,g, or c
  misc_feature (441)..(441): n equals a,t,g, or c
  misc_feature (463)..(463): n equals a,t,g, or c
  misc_feature (468)..(468): n equals a,t,g, or c
  misc_feature (477)..(477): n equals a,t,g, or c
  misc_feature (479)..(479): n equals a,t,g, or c
  misc_feature (494)..(494): n equals a,t,g, or c
  misc_feature (513)..(514): n equals a,t,g, or c
  misc_feature (523)..(523): n equals a,t,g, or c
  misc_feature (526)..(526): n equals a,t,g, or c
  misc_feature (528)..(528): n equals a,t,g, or c
  misc_feature (550)..(550): n equals a,t,g, or c
  misc_feature (557)..(557): n equals a,t,g, or c
  misc_feature (563)..(563): n equals a,t,g, or c
  misc_feature (606)..(606): n equals a,t,g, or c
  misc_feature (627)..(627): n equals a,t,g, or c
  misc_feature (647)..(647): n equals a,t,g, or c
  misc_feature (669)..(670): n equals a,t,g, or c
ggacaatgnttttctttaaaatactcagaggacaggatcactgtggantcgaatcagaagtggtggctggaattccacgcaccgatcagtactgggaaaagatctaatctgccgtgggcctgtcgtgccagtcctgggggcgagatcggggtagaaatgcattttattctttaagttcacgtaagatacaagtttcaggcagggtctgaaggactggattggccaaacatcagacctgtcttccaaggagaccaagtcctggctacatcccagcctgtggttacagtgcagacaggccatgtgagccaccgctgncagcacagagcgtncttccccctgtagactggttgccaactcctggaacactgactgtggcccccttcgtgatccatncatcttcagggagcnagacatatgacgcaggaatggaaagcggagttnctaacaggatgaaagttccccnatcanttcccccantnccttcaagcaagtanctttccacatttgtcacannaaattatangananatgggtgttgggagcccttttngagaacnccagtntttccaggcccctgcatttatcgagttttgcaatggttacaanctttttgatctgtgttcaccntgaattcttttaatataaantttctttttctctctttatctnntt

SEQ ID NO: 2601 - DNA, 322 bp, Homo sapiens
  misc_feature (2)..(2): n equals a,t,g, or c
  misc_feature (9)..(10): n equals a,t,g, or c
  misc_feature (24)..(24): n equals a,t,g, or c
  misc_feature (88)..(88): n equals a,t,g, or c
  misc_feature (106)..(106): n equals a,t,g, or c
  misc_feature (139)..(139): n equals a,t,g, or c
  misc_feature (154)..(154): n equals a,t,g, or c
  misc_feature (162)..(162): n equals a,t,g, or c
  misc_feature (169)..(169): n equals a,t,g, or c
  misc_feature (171)..(171): n equals a,t,g, or c
  misc_feature (176)..(176): n equals a,t,g, or c
  misc_feature (182)..(182): n equals a,t,g, or c
  misc_feature (267)..(267): n equals a,t,g, or c
  misc_feature (286)..(286): n equals a,t,g, or c
  misc_feature (304)..(304): n equals a,t,g, or c
  misc_feature (308)..(308): n equals a,t,g, or c
  misc_feature (320)..(320): n equals a,t,g, or c
cncatatcnnagccccagcagcancgcccaaagcaaccccaataacaacgccatggccgggtggaaacgcctacatcgacaacctcanggcggacggggacctgtnagaacgcggcatcgtggctacaaggactcgccntccgtctggccgccntccccggnaaacgtncntaaanttaacncaagctgaagtggtgtcctggttggcaaaaaccggcaagttttactttaatggctgacactttgggggccagaaatgttcggttnatcccggaattaattgttncaagaatgggggaaattnaccntggaattttttntt

SEQ ID NO: 2602 - DNA, 518 bp, Homo sapiens
  misc_feature (1)..(1): n equals a,t,g, or c
  misc_feature (456)..(456): n equals a,t,g, or c
  misc_feature (458)..(458): n equals a,t,g, or c
  misc_feature (474)..(474): n equals a,t,g, or c
  misc_feature (510)..(510): n equals a,t,g, or c
  misc_feature (514)..(514): n equals a,t,g, or c
naaaaaggggtcactatggagttcaaaggacagaactcctgcctggtgaccgggacaacctggccattcagacccggggtggcccagaaaagcatgaagtaactggctgggtgctggtatctcctctaagtaaggaagatgctggagaatatgagtgccatgcatccaattcccaaggacaggcttcagcatcagcaaaaattacagtggttgatgccttacatgaaataccagtgaaaaaaggtgaaggtgccgagctataaacctccagaatattattagtctgcatggttaaaagtagtcatggataactacattacctgttcttgcctaataagtttcttttaatccaatccactaacactttagttatattcactggttttacacagagaaatacaaaataaaagatcacacatcaagactatctacaaaaattttattatatattttacngnaagaaaaagccttgcnttatcattaaaccaattaaaaataccttttttattnacancccc

SEQ ID NO: 2603 - DNA, 536 bp, Homo sapiens
  misc_feature (358)..(358): n equals a,t,g, or c
  misc_feature (412)..(412): n equals a,t,g, or c
  misc_feature (418)..(418): n equals a,t,g, or c
  misc_feature (428)..(428): n equals a,t,g, or c
  misc_feature (469)..(469): n equals a,t,g, or c
  misc_feature (488)..(488): n equals a,t,g, or c
  misc_feature (506)..(506): n equals a,t,g, or c
  misc_feature (508)..(508): n equals a,t,g, or c
  misc_feature (520)..(520): n equals a,t,g, or c
accaaactgagtgtgtgtgtgtgtgtttattggggtgtggcatgaggcgagtgtgtaagacagagagcaaaagagctacagaggccactctaagcagcagcatcatgtgaccactaaagatttacacctgaaactaaatacagaatgttctatctctacagattccaaaggttttcctaaaaatataaccaacaacagggggaaaaaaagatacccagattccaaggacctcacgatggtgctgaaaacctatgacaccagcttcctggactttctccagaaggtgtttggtatggggaacctttctctttcgcatggaccccgggaccaggccctccaagcatggcttgggattccntcagtcttcgggaacctccaagccacagcccaggccccagaccctggagggaantcccanttcctttttncccctcttggagacaagggaagggacaaggtttccagggtngtcattcactcggagcagnaaaggcagatggagattnanccaaagggattnccaggggaaaccaaag

SEQ ID NO: 2604 - DNA, 388 bp, Homo sapiens
  misc_feature (6)..(6): n equals a,t,g, or c
  misc_feature (28)..(28): n equals a,t,g, or c
  misc_feature (290)..(290): n equals a,t,g, or c
  misc_feature (339)..(339): n equals a,t,g, or c
  misc_feature (358)..(358): n equals a,t,g, or c
  misc_feature (386)..(386): n equals a,t,g, or c
  misc_feature (388)..(388): n equals a,t,g, or c
gggtgnatggggtatttcaccacgtggngctggctacacatttggacaagacatttctgaaacctttaaccatgccaatggtctcacactggtttctcgtgcccaccagcttgtaatggagggatacaattggtgtcatgatcggaatgtggttaccattttcagtgcacccaattactgttatcgttgtgggaaccaggctgctatcatggaattagatgacactttaaaatattccttccttcaatttgacccagcgcctcgtcgtggtgagcctcatgttacacggngcaccccagactacttcctataaatttctcctgggaaacctgcctttgnatgtggaagtatacctggntttttaaaatatatgtatttaaaaacanan

SEQ ID NO: 2605 - DNA, 418 bp, Homo sapiens
  misc_feature (315)..(315): n equals a,t,g, or c
  misc_feature (372)..(372): n equals a,t,g, or c
  misc_feature (387)..(387): n equals a,t,g, or c
  misc_feature (416)..(418): n equals a,t,g, or c
ggggactcctgacatagccagctgctgtgaaataatggaagagcttacaacctgccttaaaaattaccgaaaaaccttaatacatagctgcttgtctcctactatacctgtctgacacaatatcaccagagcaagccatagacagcctgcgagacctaagaggatccggggcaatacagaccatcaagcaatacaattatcttcatgagtttcgggacaaattagctgcacatctatcatcaagagattcacaatcaagatctgtatcaagataaaggaattcaaatagcatatatatgaccatgtctgaaatgncagttctctacataatttggattgaaatgaaaccaccagtggtatcaacttgaatgnaaatgtcctgtgccnatattcctaaggtttattgccaaaaaaannn

SEQ ID NO: 2606 - DNA, 444 bp, Homo sapiens
  misc_feature (311)..(311): n equals a,t,g, or c
  misc_feature (372)..(372): n equals a,t,g, or c
  misc_feature (386)..(386): n equals a,t,g, or c
  misc_feature (417)..(417): n equals a,t,g, or c
  misc_feature (425)..(425): n equals a,t,g, or c
  misc_feature (439)..(439): n equals a,t,g, or c
gggcgccgagccgcggtccgagcagaactggggctcccttgcatcttccagttacaaattcagtgccttctgcagtttccccagagctcctcaagaataacggaagggagaatatgacagatacctagcatctagcaaaataatggcagctgcttaccttgaccccaacttgaatcacacaccaaattcgagtactaagactcacctgggtactggtatggaacgttctcctggtgcaatgggagcgagtattaaaggtctttcattattttgaaagcaatagtgagccaaccacctgggccagtattatnaggcatggagatgctactgatgtcaggggcatcattcagaagatagtggacagtcacaaantaaagcattgtggnctgctatggattcccgcctcagtcccttgcngtcagatngaaggttcactggnttcac

SEQ ID NO: 2607 - DNA, 362 bp, Homo sapiens
  misc_feature (153)..(153): n equals a,t,g, or c
  misc_feature (312)..(312): n equals a,t,g, or c
  misc_feature (320)..(320): n equals a,t,g, or c
  misc_feature (329)..(329): n equals a,t,g, or c
  misc_feature (348)..(348): n equals a,t,g, or c
  misc_feature (358)..(358): n equals a,t,g, or c
ggagaagcttccaggaatacatggcccaaatggagaagaagttggaggaggaaagggaaaaccttctcagagagcatgaaaggctgctaaaacacaagctgaaggtacaagaagaaatgcttaaggaagaatttcaaaagaaatctgagcagntaaataaagagattaatcaactgaaagaaaaaattgaaagcactaaaaatgaacaagttaaggctcttaaagatccttgacatggctagcaacataatgactgtcactctacctggggctttcaagctacttggagtagggacaaaatgatcttggctnacgtattnaagagcctnaatattccagttaagaaanttataatatnaggt

SEQ ID NO: 2608 - DNA, 460 bp, Homo sapiens
  misc_feature (312)..(312): n equals a,t,g, or c
  misc_feature (332)..(332): n equals a,t,g, or c
  misc_feature (397)..(397): n equals a,t,g, or c
  misc_feature (451)..(451): n equals a,t,g, or c
cccacgcgtccgcttgggcttctttgaaggctctgtgctgttccccgagcccctgacatggatggataagctggtggtggagtacgccaacgccatttgccaatgggagcgtaacaagttgcagtgctctgacacggagcaggtggaggccgacctggagtgaggcctccggactctggcacgctccaacagccctcctctggaagctgcgtcccctcaccccctgtttcaggtctcccatctccctcagtgacctggatctgacctcacaccatcagcagggggcacccaccatgcacacctgtctcggantaagcaactcttcctggggnctccaggctatttttgttgcttaattactggttttctccattgcattgttaggcatggtgacaantgacagaattcttgcctcttgtccagtttcaacatctggttgcttttaaccaantacatctag

SEQ ID NO: 2609 - DNA, 371 bp, Homo sapiens
  misc_feature (52)..(52): n equals a,t,g, or c
  misc_feature (154)..(154): n equals a,t,g, or c
  misc_feature (231)..(231): n equals a,t,g, or c
  misc_feature (361)..(361): n equals a,t,g, or c
aattcggcagaggcagaacaaggagcatgtgattgaggccctgcgcaggcanagttcaagtttcctggccgccagaagatccacatctcaaagaagtggggcttcaccaagttcaatgctgatgaatttgaagacatggtggctgaaaagcggnctgcatcccagatggctgtggggtcaagtacatccccagtcgtgggccctctgggacaagtggcgggccctgcactncatggagggctttccaatgtgcttgcccccctcttgaatacttcaccaataaaattctaatttcctgttccaaaaaaaaaaaaaaaaaaaattccgggggggggcccgtaacccatttggccccttaggnggttgttttt

SEQ ID NO: 2610 - DNA, 415 bp, Homo sapiens
  misc_feature (16)..(16): n equals a,t,g, or c
  misc_feature (144)..(144): n equals a,t,g, or c
  misc_feature (147)..(147): n equals a,t,g, or c
  misc_feature (288)..(289): n equals a,t,g, or c
  misc_feature (292)..(292): n equals a,t,g, or c
  misc_feature (304)..(304): n equals a,t,g, or c
  misc_feature (313)..(313): n equals a,t,g, or c
  misc_feature (365)..(365): n equals a,t,g, or c
  misc_feature (373)..(373): n equals a,t,g, or c
  misc_feature (379)..(379): n equals a,t,g, or c
  misc_feature (399)..(399): n equals a,t,g, or c
  misc_feature (406)..(406): n equals a,t,g, or c
ggcagagtgaattcantcagaactttatgtaagacctgatgacgtccatgtaaacatccggctagtggagttgtatcgctcaactaaaagattgaaggatgctgtggcccactgccatgaggcaagaaggaacatagctttgcnttncaagtttagagtggaattcgtgtgttgtacagacccttaagttttgatagtgctcttcagtctgcgaaatcttctttgggtggaaatgaatgaactgtgcagctaactttcttagaaatgaaaaggacatttctatatgtnngcnggttctctggtncttgaaagntgggtccagcatggtaataatgttccaatggcgagctctttctgagctgggnggctttgngctatntcatagcatttcagtaagtnttcccantgtaggggg

SEQ ID NO: 2611 - DNA, 251 bp, Homo sapiens
  misc_feature (221)..(221): n equals a,t,g, or c
  misc_feature (230)..(230): n equals a,t,g, or c
caccggggttgactccgggggcgcggcgaggagagacatgaggctgagctggttccgggtcctgacagtactgtccatctgcctgagcgccgtggccacggccacgggggccgagggcaaaaggaagctgcagatcggggtcaagaagcgggtggaccactgtcccatcaaatcgcgcaaaggggatgtcctgcacatgcactacacggggaagctggaanatgggacanagtttgacagcagcctgcccc

SEQ ID NO: 2612 - DNA, 517 bp, Homo sapiens
  misc_feature (39)..(39): n equals a,t,g, or c
  misc_feature (56)..(56): n equals a,t,g, or c
  misc_feature (72)..(72): n equals a,t,g, or c
  misc_feature (97)..(97): n equals a,t,g, or c
  misc_feature (113)..(113): n equals a,t,g, or c
  misc_feature (135)..(135): n equals a,t,g, or c
  misc_feature (138)..(138): n equals a,t,g, or c
  misc_feature (147)..(147): n equals a,t,g, or c
  misc_feature (167)..(167): n equals a,t,g, or c
  misc_feature (172)..(172): n equals a,t,g, or c
  misc_feature (176)..(176): n equals a,t,g, or c
  misc_feature (181)..(181): n equals a,t,g, or c
  misc_feature (185)..(185): n equals a,t,g, or c
  misc_feature (189)..(189): n equals a,t,g, or c
  misc_feature (194)..(194): n equals a,t,g, or c
  misc_feature (219)..(219): n equals a,t,g, or c
  misc_feature (223)..(223): n equals a,t,g, or c
  misc_feature (226)..(226): n equals a,t,g, or c
  misc_feature (277)..(277): n equals a,t,g, or c
  misc_feature (288)..(288): n equals a,t,g, or c
  misc_feature (322)..(322): n equals a,t,g, or c
  misc_feature (324)..(324): n equals a,t,g, or c
  misc_feature (326)..(326): n equals a,t,g, or c
  misc_feature (367)..(367): n equals a,t,g, or c
  misc_feature (372)..(372): n equals a,t,g, or c
  misc_feature (397)..(397): n equals a,t,g, or c
  misc_feature (437)..(437): n equals a,t,g, or c
  misc_feature (458)..(459): n equals a,t,g, or c
  misc_feature (492)..(492): n equals a,t,g, or c
  misc_feature (515)..(515): n equals a,t,g, or c
gggcagggatcccgtccgagccccggccccaagtaacgncggcggcccggagccgncttggaggtccccctncccactaagtgcctctttgcatagnaccagtccccacccgnacggtctctggaccactacagntgnacgggcaanggcgggtcggggaggcgcanacggncccnatggnccanctgntgggnacaagatctgtcaatttaagctggntctnctnggggagtcttcggtaggcaaatccagccttgtcctccgctttttcaagggncaattttacgngtaccacgagagcacaatttgagcgggctttctnananagacttttttccttggtgcaaaaacagtcaaagttttaganttggncaaaaattggcaaagagcggtttanagcttgcccccatgtatttttgggggcccagtttcatctngctttttaataccacacagtnnattttaagggccagaattggttaagggcttaanggaagccacccacaatgtaattnaa

SEQ ID NO: 2613 - DNA, 505 bp, Homo sapiens
  misc_feature (10)..(10): n equals a,t,g, or c
  misc_feature (13)..(13): n equals a,t,g, or c
  misc_feature (29)..(30): n equals a,t,g, or c
  misc_feature (39)..(39): n equals a,t,g, or c
  misc_feature (52)..(52): n equals a,t,g, or c
  misc_feature (110)..(110): n equals a,t,g, or c
  misc_feature (132)..(132): n equals a,t,g, or c
  misc_feature (293)..(293): n equals a,t,g, or c
  misc_feature (306)..(306): n equals a,t,g, or c
  misc_feature (387)..(387): n equals a,t,g, or c
  misc_feature (389)..(389): n equals a,t,g, or c
  misc_feature (392)..(393): n equals a,t,g, or c
  misc_feature (398)..(398): n equals a,t,g, or c
  misc_feature (404)..(405): n equals a,t,g, or c
  misc_feature (425)..(425): n equals a,t,g, or c
  misc_feature (452)..(452): n equals a,t,g, or c
  misc_feature (461)..(461): n equals a,t,g, or c
  misc_feature (482)..(483): n equals a,t,g, or c
  misc_feature (492)..(492): n equals a,t,g, or c
  misc_feature (498)..(498): n equals a,t,g, or c
  misc_feature (500)..(500): n equals a,t,g, or c
  misc_feature (503)..(503): n equals a,t,g, or c
aattcggcanagnagggaagcagcggctnngcttcattncatctgtggtgangtttacccttctaaagaaaaactagggatttagaggacgtttgggcactgaacgcaantttctgcataggaaacctaggngatcccccaaaagaggtccctctggtaggccctcgagatgctgctggcggcctgggggaaatcctcattgacgattcaatttgttgaaggccaatttgtggactcctacgatccaaccatagaaaacacttttacaaagttgatcacagtcaaatggacangattatcatgttnaacttgtagacacagccgggccaagatgaatattctatcctttccctcaggacatactccatagatattaatgggttatantnctnntgtantcctgnnacaccattcaaaaggtttgnaggggtttaagttatccctgggcaatngtgggtatngtgggggaaggacaataaccnntttgttggntggggntnagnag

SEQ ID NO: 2614 - DNA, 171 bp, Homo sapiens
  misc_feature (5)..(5): n equals a,t,g, or c
  misc_feature (18)..(18): n equals a,t,g, or c
  misc_feature (23)..(23): n equals a,t,g, or c
  misc_feature (64)..(64): n equals a,t,g, or c
  misc_feature (70)..(70): n equals a,t,g, or c
  misc_feature (101)..(101): n equals a,t,g, or c
  misc_feature (109)..(109): n equals a,t,g, or c
  misc_feature (146)..(146): n equals a,t,g, or c
  misc_feature (154)..(154): n equals a,t,g, or c
  misc_feature (165)..(165): n equals a,t,g, or c
cccgnagacacgggcaanaactngggtctacttgaagctgaactctgagaccgacgcagacacngaatgngtattactgtgcgagacacaccaaccagcancacccganctacaggatgaaacggtggatcgacccctggggccanggaacccnggtcaccgacnactcag

SEQ ID NO: 2615 - DNA, 467 bp, Homo sapiens
  misc_feature (8)..(8): n equals a,t,g, or c
  misc_feature (330)..(330): n equals a,t,g, or c
  misc_feature (349)..(349): n equals a,t,g, or c
  misc_feature (423)..(423): n equals a,t,g, or c
  misc_feature (430)..(430): n equals a,t,g, or c
  misc_feature (432)..(432): n equals a,t,g, or c
  misc_feature (451)..(451): n equals a,t,g, or c
  misc_feature (467)..(467): n equals a,t,g, or c
ggcgcggntggaggtgtgaggatccgaacccaggggtggaggcggctcctgcgatcgaaggggacttgagactcaccggccgcacgccatgagggccctgtgggtgctgggcctctgctgcgtcctgctgaccttcgggtcggtcagagctgacgatgaagttgatgtggatggtacagtagaagaggatctgggtaaaagtagagaaggatcaaggacttcctgctcacagcccgacgaaaggatgccaaatctgtcaagatcaagaaaaataaggacaacgtgaagtttaaagttcgatgcagcagatacctttacaccctggtcatnactgacaaagagaaggcanagaaactgaagcagtccctgcccccccggtttgcccagtgaaggaactgaaatgaaccagacaacactgatttngaactgncnttatattaaaatactaaanatcctaatatattcan

SEQ ID NO: 2616 - DNA, 313 bp, Homo sapiens
  misc_feature (60)..(60): n equals a,t,g, or c
  misc_feature (87)..(87): n equals a,t,g, or c
  misc_feature (115)..(115): n equals a,t,g, or c
  misc_feature (139)..(139): n equals a,t,g, or c
  misc_feature (144)..(144): n equals a,t,g, or c
  misc_feature (251)..(251): n equals a,t,g, or c
  misc_feature (275)..(275): n equals a,t,g, or c
  misc_feature (280)..(280): n equals a,t,g, or c
  misc_feature (283)..(283): n equals a,t,g, or c
  misc_feature (300)..(300): n equals a,t,g, or c
ggcaggatcaaggtgaaaaggagaaccccatgcgggaacttcgcatccgcaaactctgtntcaacatctgtgttggggagagtgganacagactgacgcgagcagccaaggtgtnggagcagctcacagggcagacccntgtgntttccaaagctagatacactgtcagatcctttggcatccggagaaatgaaaagattgctgtccactgcacagttctaggggccaaggcagaagaaatcttggagaanggtctaaaggtgcgggagtatganttaanaanaaacaacttctcagatnctggaaactttgg

SEQ ID NO: 2617 - DNA, 324 bp, Homo sapiens
  misc_feature (85)..(85): n equals a,t,g, or c
  misc_feature (172)..(172): n equals a,t,g, or c
  misc_feature (213)..(213): n equals a,t,g, or c
  misc_feature (222)..(222): n equals a,t,g, or c
  misc_feature (233)..(234): n equals a,t,g, or c
  misc_feature (269)..(269): n equals a,t,g, or c
  misc_feature (299)..(299): n equals a,t,g, or c
  misc_feature (317)..(317): n equals a,t,g, or c
gcgccatcttccagtaattcgccaaaatgacgaacacaaagggaaagaggagaggcacccgatatatgttctctaggccttttanaaaacatggagttgttcctttggccacatatatgcgaatctataagaaaggtgatattgtacacatcaagggaatgggtactgttcnaaaaggaatgccccacaagtgttaccatggcataactggangagtctacnatgttacccannatgctgttggcattgttgtaaacaaacaagttaanggcaagattcttgccaagagaattaatgtncgtattgagcacattaancactcta

SEQ ID NO: 2618 - DNA, 625 bp, Homo sapiens
  misc_feature (1)..(1): n equals a,t,g, or c
  misc_feature (524)..(524): n equals a,t,g, or c
  misc_feature (552)..(552): n equals a,t,g, or c
  misc_feature (563)..(563): n equals a,t,g, or c
  misc_feature (567)..(567): n equals a,t,g, or c
  misc_feature (577)..(577): n equals a,t,g, or c
  misc_feature (604)..(604): n equals a,t,g, or c
ncgccgaaagcgaagaaggaagctcctgcccctcctaaagctgaagccaaagcgaaggctttaaaggccaagaaggcagtgttgaaaggtgtccacagccacaaaaagaagaagatccgcacgtcacccaccttccggcggccgaagacactgcgactccggagacagcccaaatatcctcggaagagcgctcccaggagaaacaagcttgaccactatgctatcatcaagtttccgctgaccactgagtctgccatgaagaagatagaagacaacaacacacttgtgttcattgtggatgttaaagccaacaagcaccagattaaacaggctgtgaagaagctgtatgacattgatgtggccaaggtcaacaccctgattcggcctgatggagagaagaaggcatatgttcgactggctcctgattacgatgctttggatgttgccaacaaaattgggatcatctaaactgagtccagctgcctaattctgaatatatatatatatatatcttttcaccatanaaaaaaaaaaaaaaaaagggccggccgntctagaggatncaancttacgtacncgttgcatgccgacgtcttagctcttntatagtggtcaccctaaaatt

SEQ ID NO: 2619 - DNA, 151 bp, Homo sapiens
  misc_feature (49)..(49): n equals a,t,g, or c
  misc_feature (90)..(90): n equals a,t,g, or c
  misc_feature (107)..(107): n equals a,t,g, or c
  misc_feature (110)..(110): n equals a,t,g, or c
  misc_feature (126)..(126): n equals a,t,g, or c
  misc_feature (146)..(146): n equals a,t,g, or c
ggcccgggtggttgctgccgaaatgggcaagttcatgaaacctgggaangtggtgcttgtcctggctgggacgctactccggacgcaaanctgtcatcgtgaagaanatngatgatggcacctcanatcgcccctacagccatgcnctggt

SEQ ID NO: 2620 - DNA, 431 bp, Homo sapiens
  misc_feature (13)..(13): n equals a,t,g, or c
  misc_feature (29)..(29): n equals a,t,g, or c
  misc_feature (408)..(408): n equals a,t,g, or c
  misc_feature (413)..(413): n equals a,t,g, or c
  misc_feature (419)..(420): n equals a,t,g, or c
  misc_feature (427)..(427): n equals a,t,g, or c
aatgattacgccntttctaatacgactcnctatagggaaagctggtacgcctgcaggtaccggtccggaattcccgggtcgacccacgcgtccggtcgccgctgcggagggagccgccgccatgtctgcgcatctgcaatggatggtcgtgcggaactgctccagtttcctgatcaagaggaataagcagacctacagcactgagcccaataacttgaaggcccgcaattccttccgctacaacggactgattcaccgcaagactgtgggctggagccggcagccgacgcaaagttctggtgggtcattaacggaatccggcacggaacctgccactcctatgtgcgacacatcaacagatgtccgcccctcacactcaacctatcccaaacataccccactgcctgnacacnaggcannctctccncaac

SEQ ID NO: 2621 - DNA, 142 bp, Homo sapiens
  misc_feature (22)..(22): n equals a,t,g, or c
  misc_feature (29)..(30): n equals a,t,g, or c
  misc_feature (33)..(33): n equals a,t,g, or c
  misc_feature (40)..(40): n equals a,t,g, or c
  misc_feature (46)..(46): n equals a,t,g, or c
  misc_feature (75)..(75): n equals a,t,g, or c
  misc_feature (102)..(102): n equals a,t,g, or c
  misc_feature (119)..(119): n equals a,t,g, or c
  misc_feature (138)..(138): n equals a,t,g, or c
ggcacgagcgcaaagaagggtngcgagannaanaaaggcngttctnccatcaacgaatgataacccgagaatacnccatcaacattcacaatcgcatccatngagtgggcttcaagaancgtgcacctcgggcactcnaaga

SEQ ID NO: 2622 - DNA, 518 bp, Homo sapiens
  misc_feature (2)..(2): n equals a,t,g, or c
  misc_feature (4)..(4): n equals a,t,g, or c
  misc_feature (11)..(11): n equals a,t,g, or c
ananagacacnaaccctcactaaagggaacaaaagctggagctccaccgcggtggcggccgctctagaactagtggatcccccgggctgcaggaattcggcacgaggttgtctgcaggcactcagaatggtccagcgtttgacataccgacgtaggctttcctacaatacagcctctaacaaaactaggctgtcccgaacccctggtaatagaattgtttacctttataccaagaaggttgggaaagcaccaaaatctgcatgtggtgtgtgcccaggcagacttcgaggggttcgtgctgtaagacctaaagttcttatgagattgtccaaaacaaagaaacatgtcagcagggcctatggtggttccatgtgtgctaaatgtgttcgtgacaggatcaagcgtgctttccttatcgaggagcagaaaatcgttgtgaaagtgttgaaggcacaagcacagagtcagaaagctaaataaaaaaatgaaacttttttgagtaataaaaatgaaaagac

SEQ ID NO: 2623 - DNA, 269 bp, Homo sapiens
  misc_feature (21)..(21): n equals a,t,g, or c
  misc_feature (98)..(98): n equals a,t,g, or c
  misc_feature (141)..(141): n equals a,t,g, or c
  misc_feature (213)..(213): n equals a,t,g, or c
  misc_feature (224)..(224): n equals a,t,g, or c
  misc_feature (244)..(244): n equals a,t,g, or c
  misc_feature (259)..(259): n equals a,t,g, or c
  misc_feature (269)..(269): n equals a,t,g, or c
gctgcactgccaccctgggcnacttcgccaaggccacctttgatgccatttctaagacctacagctacctgacccccgacctctggaaggagactgtnttcaccaagtctccctatcaggagttcactgaccacctcgtcnagacccacaccagagtctccgtgcagcggactcaggctccagctgtggctacaacatagggtttttatacangaaaaataaantgaattaagcgtgttaaaanaaaaaaaaaaaaacncgaaaccaan

SEQ ID NO: 2624 - DNA, 451 bp, Homo sapiens
  misc_feature (6)..(7): n equals a,t,g, or c
  misc_feature (224)..(224): n equals a,t,g, or c
  misc_feature (366)..(366): n equals a,t,g, or c
  misc_feature (394)..(394): n equals a,t,g, or c
  misc_feature (435)..(435): n equals a,t,g, or c
  misc_feature (448)..(448): n equals a,t,g, or c
  misc_feature (451)..(451): n equals a,t,g, or c
gggtcnntgcctccaagatgacaaagaaaagaaggaacaatggtcgtgccaaaaagggccgcggccacgtgcagcctattcgctgcactaactgtgcccgatgcgtgcccaaggacaaggccattaagaaattcgtcattcgaaacatagtggaggccgcagcagtcagggacatttctgaagcgagcgtcttcgatgcctatgtgcttcccaagctgtatgtnaagctacattactgtgtgagttgtgcaattcacagcaaagtagtcaggaatcgatctcgtgaagcccgcaaggaccgaacacccccaccccgatttagacctgcgggtgctgccccacgtcccccaccaaagcccatgtaangagctgagttcttaaagactgaagacangctattctctggagaaaaataaaatggaaattgtacttaanaaaaaaaaaaaanggn

SEQ ID NO: 2625 - DNA, 293 bp, Homo sapiens
  misc_feature (17)..(17): n equals a,t,g, or c
  misc_feature (34)..(34): n equals a,t,g, or c
  misc_feature (49)..(49): n equals a,t,g, or c
  misc_feature (54)..(54): n equals a,t,g, or c
  misc_feature (168)..(168): n equals a,t,g, or c
  misc_feature (257)..(257): n equals a,t,g, or c
  misc_feature (262)..(262): n equals a,t,g, or c
  misc_feature (286)..(286): n equals a,t,g, or c
  misc_feature (292)..(293): n equals a,t,g, or c
ggtcaccatcagctgtnctggaaccacccgcganaatacggccatggtnctcgntcttgtcgtgtctgttcaaaccggcacggtctgatccggaaatatggcctcaatatgtgccgccagtgtttccgtcagtacgcgaaggatatcggtttcattaagttggactanatgctcttccttcataggattatccggggcatctactcaatgaaaaaccatgataattctttgtatataaaataaacatttgaaataancttcnaattgtcaaaaaaaaaaaatatgncctctnn

SEQ ID NO: 2626 - DNA, 338 bp, Homo sapiens
  misc_feature (188)..(188): n equals a,t,g, or c
  misc_feature (209)..(209): n equals a,t,g, or c
  misc_feature (300)..(300): n equals a,t,g, or c
  misc_feature (302)..(302): n equals a,t,g, or c
  misc_feature (313)..(313): n equals a,t,g, or c
  misc_feature (315)..(315): n equals a,t,g, or c
  misc_feature (338)..(338): n equals a,t,g, or c
gcgcctcggaggcgttcagctgcttcaagatgaagctgaacatctccttcccagccactggctgccagaaactcattgaagtggacgatgaacgcaaacttcgtactttctatgagaagcgtatggccacagaagttgctgctgacgctctgggtgaagaatggaagggttatgtggtccgaatcagnggtgggaacgacaaacaaggnttccccatgaagcagggtgtcttgacccatggccgtgtccgctgctactgagtaaggggcatttcctgttacaagaccaatggagaactgnanaaagaattgananaatcagttcgtggttgcattgtn

SEQ ID NO: 2627 - DNA, 422 bp, Homo sapiens
  misc_feature (138)..(138): n equals a,t,g, or c
  misc_feature (272)..(272): n equals a,t,g, or c
  misc_feature (303)..(303): n equals a,t,g, or c
  misc_feature (325)..(325): n equals a,t,g, or c
  misc_feature (336)..(336): n equals a,t,g, or c
  misc_feature (347)..(347): n equals a,t,g, or c
  misc_feature (357)..(357): n equals a,t,g, or c
  misc_feature (376)..(376): n equals a,t,g, or c
  misc_feature (380)..(380): n equals a,t,g, or c
  misc_feature (399)..(400): n equals a,t,g, or c
  misc_feature (421)..(421): n equals a,t,g, or c
aattcggcagaggtcatagaacccagaaggaaattgagcaggaagctgcagttgaattatcacagttgagggacccacagcatgatctagatcgagtaaagaaacctgaatgggttatcctgataggtgtttgcactncatcttgggctgtgtacccattggcaaatgcagggaggattttggtggttattactgcccttgccatgggtcacacttatgatgcatctgggcaggatccagattgggtcctgctcctcttcaaccttgaagtnccccacggtattgagtttcaccagtgacggntattggtggatttgtttggttnaagagactttnggacttcaagnccataagggnttttttttcagtcctttanggtncaaccccgagggggctttnnttttgggggagggaggccttnt

SEQ ID NO: 2628 - DNA, 493 bp, Homo sapiens
  misc_feature (13)..(13): n equals a,t,g, or c
  misc_feature (27)..(27): n equals a,t,g, or c
  misc_feature (311)..(311): n equals a,t,g, or c
  misc_feature (384)..(384): n equals a,t,g, or c
  misc_feature (394)..(394): n equals a,t,g, or c
  misc_feature (409)..(409): n equals a,t,g, or c
  misc_feature (412)..(412): n equals a,t,g, or c
  misc_feature (417)..(417): n equals a,t,g, or c
  misc_feature (419)..(419): n equals a,t,g, or c
  misc_feature (437)..(438): n equals a,t,g, or c
  misc_feature (443)..(444): n equals a,t,g, or c
  misc_feature (457)..(457): n equals a,t,g, or c
  misc_feature (461)..(461): n equals a,t,g, or c
  misc_feature (474)..(474): n equals a,t,g, or c
  misc_feature (486)..(486): n equals a,t,g, or c
aattcggcagagnatcagaagtgaatnatgctggggataacgatgagagtcaccgcaatttcatccaggacgaatgctgcgtttgattcatgagtgtcctcatcaggaagggaagagcatccatgaagctccgggctcagctctgcgagccttagcgtcaaggccatcaaggaagcgattgattatctgaccgttgagggccacatctatcccactgtggatcgggagcattttaagtctgctgattgaggcagggaaaacatcctttcatttttcgaagacccttgcatccagctgtggagtaattttgnacctgtttgactttttaggaagtaggattaaaaaaaaaattttcaagtgggcattcttttgtcaactcgttgnttttttaaanggttttgaacttttnggntttcngnatttgaggtccagggganncggtnntgggtaaatttgncaanccttggggttttnctggcagttatnggaaaat

SEQ ID NO: 2629 - DNA, 439 bp, Homo sapiens
  misc_feature (150)..(150): n equals a,t,g, or c
  misc_feature (397)..(397): n equals a,t,g, or c
  misc_feature (426)..(427): n equals a,t,g, or c
  misc_feature (429)..(429): n equals a,t,g, or c
  misc_feature (437)..(437): n equals a,t,g, or c
ggatataagcttgaccacgagttgagaccctgagcacaggcctccaggagccgctgggagctgccgccaggagctgtcaccatgacgggggaacttgaggttaagaacatggacatgaagccggggtcaaccctgaagatcacaggcagnatcgccgatggcactgatggctttgtaattaatctgggccaggggacagacaagctgaacctgcatttcaaccctcgcttcagcgaatccaccattgtctgcaactcattggacggcagcaactgggggcaagaacaacgggaagatcacctgtgcttcagcccaaggtcagaggtcaagttcacagtgaccttttgagaagtgacaaattcaaaggtgaaacctgccaaaatgggcacgaactggntttttcccaacaaggcttggggtcacaanncnaccttaanct

SEQ ID NO: 2630 - DNA, 330 bp, Homo sapiens
  misc_feature (284)..(284): n equals a,t,g, or c
  misc_feature (330)..(330): n equals a,t,g, or c
tgaatctagcaccatgacggaactagagacagttcatgggcatgatcatagacgtcttttcccgatattcgggcagcgagggcagcacgcagaccctgaccaagggggagctcaaggtgctgatggagaaggagctaccaggcttcctgcagagtggaaaagacaaggatgccgtggataaattgctcaaggacctggacgccaatggagatgcccaggtggacttcagtgagttcatcgtgttcgtggctgcaatcacgtctgcctgtcacaagtactttganaaggcaggactcaaatgatgccctggagatgtcacagattcctggn

SEQ ID NO: 2631 - DNA, 508 bp, Homo sapiens
  misc_feature (12)..(12): n equals a,t,g, or c
  misc_feature (51)..(51): n equals a,t,g, or c
  misc_feature (79)..(79): n equals a,t,g, or c
  misc_feature (268)..(268): n equals a,t,g, or c
  misc_feature (273)..(273): n equals a,t,g, or c
  misc_feature (282)..(282): n equals a,t,g, or c
  misc_feature (296)..(296): n equals a,t,g, or c
  misc_feature (301)..(301): n equals a,t,g, or c
  misc_feature (310)..(310): n equals a,t,g, or c
  misc_feature (333)..(333): n equals a,t,g, or c
  misc_feature (346)..(347): n equals a,t,g, or c
  misc_feature (357)..(357): n equals a,t,g, or c
  misc_feature (366)..(366): n equals a,t,g, or c
  misc_feature (379)..(379): n equals a,t,g, or c
  misc_feature (384)..(384): n equals a,t,g, or c
  misc_feature (401)..(401): n equals a,t,g, or c
  misc_feature (405)..(405): n equals a,t,g, or c
  misc_feature (414)..(414): n equals a,t,g, or c
  misc_feature (417)..(417): n equals a,t,g, or c
  misc_feature (428)..(428): n equals a,t,g, or c
  misc_feature (433)..(433): n equals a,t,g, or c
  misc_feature (435)..(435): n equals a,t,g, or c
  misc_feature (437)..(437): n equals a,t,g, or c
  misc_feature (441)..(441): n equals a,t,g, or c
  misc_feature (492)..(492): n equals a,t,g, or c
ggcacgagtggnaattttaagggaatgaaaattaaacctggctcaatgggnaaaccttctcctgctttcgatgttaagnttgtagatgtaaatggcaatgttctacctcctggacaagaaggtgatattggcattcaagttctacccaaccgaccatttggcctttttactcattacgtggataatccttcaaaaacagcttcaactctacgaggcaattctatatcactggggacagaggatatatggataaagatgggtatttctngtttntttgcaagngcagatgttggcanatatnccctggttntcgatttggcccctttgggtggnaaatcccccattnncaccccttantttagagtnccctttttcaaangcccnaccccttcaaggggggnggtnaaagttttnggntttaaaacccntttcnangnccanttcagggccccttttaaggggttccggggcttttaaaaactccgggccttnaatttccccagggggg

SEQ ID NO: 2632 - DNA, 361 bp, Homo sapiens
  misc_feature (11)..(11): n equals a,t,g, or c
  misc_feature (33)..(33): n equals a,t,g, or c
  misc_feature (115)..(115): n equals a,t,g, or c
  misc_feature (200)..(200): n equals a,t,g, or c
  misc_feature (206)..(206): n equals a,t,g, or c
  misc_feature (250)..(250): n equals a,t,g, or c
  misc_feature (255)..(255): n equals a,t,g, or c
  misc_feature (257)..(257): n equals a,t,g, or c
  misc_feature (289)..(289): n equals a,t,g, or c
  misc_feature (294)..(294): n equals a,t,g, or c
  misc_feature (307)..(307): n equals a,t,g, or c
  misc_feature (311)..(312): n equals a,t,g, or c
ggttaaatttnaggtagcagagggaaaacaagnggaaatccaacataagggacaggctgagaaaaaagaattacaacataaaatagatgaaatggaagaaaaagaacaggagctncaggcaaaaatagaagctttgcaagctgataatgatttcaccaatgaaaggctaacagctttacaagagaagctgaccgtcgaanggcatntaaccaaagcggtagaagaaacaaagctttcaaaagaaaatcanacaanancaaaagaatctgatttttcagatactctgagnccaancaaggaaaataanaaannaagggcggtcgctctataggatccaaggcttacgtactcgtgcatgcga

SEQ ID NO: 2633 - DNA, 407 bp, Homo sapiens
  misc_feature (11)..(11): n equals a,t,g, or c
  misc_feature (14)..(14): n equals a,t,g, or c
  misc_feature (57)..(57): n equals a,t,g, or c
  misc_feature (65)..(65): n equals a,t,g, or c
  misc_feature (80)..(80): n equals a,t,g, or c
  misc_feature (101)..(101): n equals a,t,g, or c
  misc_feature (104)..(104): n equals a,t,g, or c
  misc_feature (137)..(137): n equals a,t,g, or c
  misc_feature (236)..(236): n equals a,t,g, or c
  misc_feature (290)..(290): n equals a,t,g, or c
  misc_feature (334)..(334): n equals a,t,g, or c
  misc_feature (339)..(339): n equals a,t,g, or c
  misc_feature (359)..(359): n equals a,t,g, or c
  misc_feature (366)..(366): n equals a,t,g, or c
  misc_feature (383)..(383): n equals a,t,g, or c
aatatttccanagntggtccgcctgcaggtaccggtccggaattcccgggtcgattncacgcgtnttggaaatgaccccncagcagggagacgtctacatntgncaagtggagcacaccagcctggacagtcctgtnaccgtggagtggaaggcacagtctgattctgcccggagtaagacattgacgggagctgggggcttcgtgctggggctcatcatctgtggagtgggcatnttcatgcacaggaggaacaagaaagttcaacgaggatctgcataaacagggttnctgacctaccgaaaagactaatgtgccttagaacaagcatttgntgggntttggtaacacctggttcangacaganccttagcttttcccaanaggatactggttgcaaaaaagttt

SEQ ID NO: 2634 - DNA, 303 bp, Homo sapiens
  misc_feature (1)..(1): n equals a,t,g, or c
  misc_feature (11)..(11): n equals a,t,g, or c
  misc_feature (51)..(51): n equals a,t,g, or c
  misc_feature (53)..(53): n equals a,t,g, or c
  misc_feature (106)..(106): n equals a,t,g, or c
  misc_feature (125)..(125): n equals a,t,g, or c
  misc_feature (175)..(175): n equals a,t,g, or c
  misc_feature (188)..(188): n equals a,t,g, or c
  misc_feature (242)..(242): n equals a,t,g, or c
  misc_feature (258)..(258): n equals a,t,g, or c
  misc_feature (264)..(264): n equals a,t,g, or c
  misc_feature (303)..(303): n equals a,t,g, or c
naattcggcanaggaaccggggctgctgctttgactccaggatccctggtngnccttggtgtttcaagcccctgcaggaagcagaatgcaccttttgaggcacctncagctgcccccggccgggnaagtgcgaaggctcggagcacccttgcccggctgtgaattgctgccaggnactgttgcatctncagcttttctgtgccctttgctcccggcaagcggttctgcttgaaagtttcatnatcttgggaggcctgnatggtnctttaacggaattaaaggttccccccattgcttccaaan

SEQ ID NO: 2635 - DNA, 165 bp, Homo sapiens
ggcacagccacccagggcctgagtcctgtccacaccccaggtgacggccggctccacaaggcagtgagcgtgggcccccgggtgcacatcattgaggagctgcagatcttctcatcgggacagcccgtggcagaatctgctcctgggacacccacaggggggctg

SEQ ID NO: 2636 - DNA, 406 bp, Homo sapiens
  misc_feature (62)..(62): n equals a,t,g, or c
  misc_feature (105)..(105): n equals a,t,g, or c
  misc_feature (334)..(334): n equals a,t,g, or c
  misc_feature (352)..(352): n equals a,t,g, or c
  misc_feature (364)..(364): n equals a,t,g, or c
  misc_feature (382)..(382): n equals a,t,g, or c
  misc_feature (391)..(391): n equals a,t,g, or c
gtggataccaaccggaaaacccctatcccgcacagcccactgtggtccccactgtctacgangtgcatccggctcagtactacccgtcccccgtgccccagtacnccccgagggtcctgacgcaagcttccaaccccgtcgtctgcacgcaagccaaatccccatccgggacagtgtgcacctcaaagactaagaaagcactgtgcatcaccttgacctggggacttcctcctgggaactgcgctggccgctggcctactctggaaattcatgggcagcaaatgctccaactctgggatagaatgcgaatcctcaagttctgcatcaaccctcntactggtgttatagcgtntcaactgccccngggggaagaaaaaaatcngtgttcctnttttcaaacttctcc

SEQ ID NO: 2637 - DNA, 334 bp, Homo sapiens
  misc_feature (10)..(10): n equals a,t,g, or c
  misc_feature (19)..(19): n equals a,t,g, or c
  misc_feature (69)..(70): n equals a,t,g, or c
  misc_feature (98)..(98): n equals a,t,g, or c
  misc_feature (132)..(132): n equals a,t,g, or c
  misc_feature (165)..(165): n equals a,t,g, or c
  misc_feature (168)..(168): n equals a,t,g, or c
  misc_feature (173)..(173): n equals a,t,g, or c
  misc_feature (218)..(218): n equals a,t,g, or c
  misc_feature (220)..(220): n equals a,t,g, or c
  misc_feature (223)..(223): n equals a,t,g, or c
  misc_feature (229)..(229): n equals a,t,g, or c
  misc_feature (233)..(233): n equals a,t,g, or c
  misc_feature (247)..(247): n equals a,t,g, or c
  misc_feature (314)..(314): n equals a,t,g, or c
  misc_feature (327)..(327): n equals a,t,g, or c
  misc_feature (331)..(331): n equals a,t,g, or c
  misc_feature (333)..(333): n equals a,t,g, or c
gacctcagcnttcgctacncgggacccccacagaagagacgtggcccggcgtgacccgcatctctgagnnccgcacctacagcttcccctgctacctnccgcagcccgctcatcaaccacgccgcccaggcnggatacggatggcatccacctcctgagcagccngcncctgnatgaatccaagagtcgcatgcagcagaagctgccctgagtcactncnacntccggnctcngggaagagccgtgngcaccaaccttgaaaacactggcgacaacgtctccctgaaggggaaaccactccagaagggacccangctacccaggggntggncna

SEQ ID NO: 2638 - DNA, 568 bp, Homo sapiens
  misc_feature (341)..(341): n equals a,t,g, or c
  misc_feature (395)..(395): n equals a,t,g, or c
  misc_feature (407)..(407): n equals a,t,g, or c
  misc_feature (429)..(429): n equals a,t,g, or c
  misc_feature (444)..(444): n equals a,t,g, or c
  misc_feature (455)..(455): n equals a,t,g, or c
  misc_feature (457)..(457): n equals a,t,g, or c
  misc_feature (508)..(508): n equals a,t,g, or c
  misc_feature (524)..(524): n equals a,t,g, or c
  misc_feature (526)..(526): n equals a,t,g, or c
  misc_feature (555)..(555): n equals a,t,g, or c
  misc_feature (557)..(557): n equals a,t,g, or c
gcacgggaatgtgcccctgcactatgcctgtttttggggccaagatcaagtggcagaggacctggtggcaaatggggcccttgtcagcatctgtaacaagtatggagagatgcctgtggacaaagccaaggcacccctgagagagcttctccgagagcgggcagagaagatgggccagaatctcaaccgtattccatacaaggacacattctggaaggggaccacccgcactcggccccgtgagtcaccactgtgggaagaagggttgtaaaaggaaataatcctggcctcttggggctgggttagggtgaagctgggtacctgacctgccacactcttangaaatggaaccctgaacaaacactctggcattgacttcaaacaagcttaacttnctgacgaagctnaacgaagaatactcttggaaangtgacccctgccttnttgccctcctnantaacccccataaatacttgctttgtacctgttttaagttttcttcaattantgggcaaggaagtggnanaacatttaagcttctaccctactgtctgnantttggaaggcc

SEQ ID NO: 2639 - DNA, 335 bp, Homo sapiens
  misc_feature (7)..(7): n equals a,t,g, or c
  misc_feature (25)..(25): n equals a,t,g, or c
  misc_feature (28)..(29): n equals a,t,g, or c
  misc_feature (43)..(43): n equals a,t,g, or c
  misc_feature (49)..(49): n equals a,t,g, or c
  misc_feature (55)..(55): n equals a,t,g, or c
  misc_feature (63)..(63): n equals a,t,g, or c
  misc_feature (82)..(82): n equals a,t,g, or c
  misc_feature (105)..(105): n equals a,t,g, or c
  misc_feature (119)..(119): n equals a,t,g, or c
  misc_feature (123)..(123): n equals a,t,g, or c
  misc_feature (187)..(187): n equals a,t,g, or c
  misc_feature (334)..(334): n equals a,t,g, or c
tgcagcnagacaatcggagagaaantgnngcaaaaagagccantggganatgatnagtctgtnccagagaatgtgctgagtntcgatgaccttactgcagacgcnttagctaacctgancaanccacaaatcaaaaaagtccgactcctcattgatgaagccatcctgaagtgtgacgcggagggantaaagttggaagcagagcggtttgagaacctccgagagattgggaaccttctgcacccttctgtacccatcagtaacgatgaggtaggtggctgtgccgcagcaggaggctgccttaggtcgctgctgtctctgcaggggcggggang

SEQ ID NO: 2640 - DNA, 117 bp, Homo sapiens
  misc_feature (16)..(16): n equals a,t,g, or c
  misc_feature (47)..(47): n equals a,t,g, or c
  misc_feature (79)..(79): n equals a,t,g, or c
  misc_feature (86)..(87): n equals a,t,g, or c
  misc_feature (104)..(104): n equals a,t,g, or c
gtgcgtggcaggtgangatgaacagtctacacagatggctgcaaggngggaagatgataaagttacagaagcatcttcnaacaggnntgctgctattaaaatcnataccaaaagtga

SEQ ID NO: 2641 - DNA, 488 bp, Homo sapiens
  misc_feature (11)..(11): n equals a,t,g, or c
  misc_feature (446)..(446): n equals a,t,g, or c
  misc_feature (460)..(460): n equals a,t,g, or c
  misc_feature (474)..(475): n equals a,t,g, or c
  misc_feature (482)..(482): n equals a,t,g, or c
gcctgcaggtnccggtccggaattcccgggtcgacccacgcgtccgaagaagtcctgcaaagacaatcgcaccacagaatgctccaagagatgagtctaggggccgttcctcgttttatcctgatggtggagatcaggaaactgcaaagactgggaagttcttaaaaaggttcacagatgaagagtctagagtattcctgcttgataggggtaataccagggataaagaggcttcaaaagagaaaggatcagagaaagggagggcagagggagaatgggaagatcaggaagctctagattacttcagtgataaagagtctggaaaacaaaagtttaatgattcagaaggggatgacacagaggagacagaggattatagacagttcaggaagtcaagtcctcgcagatcagggtaaaagttttgctactgcatctcacccggaatncctgaaggaggaanggactcaagtaccnngttccanaggttt

SEQ ID NO: 2642 - DNA, 103 bp, Homo sapiens
  misc_feature (28)..(28): n equals a,t,g, or c
  misc_feature (30)..(30): n equals a,t,g, or c
  misc_feature (58)..(58): n equals a,t,g, or c
  misc_feature (72)..(72): n equals a,t,g, or c
  misc_feature (100)..(100): n equals a,t,g, or c
gaccggtatcaggtgtgccaaggcgaantnaaagaattgcaggcaaaagagtttgcanaatggaatcagganaagcaggctgcttttctcctaaaatcancca

SEQ ID NO: 2643 - DNA, 686 bp, Homo sapiens
  misc_feature (1)..(1): n equals a,t,g, or c
  misc_feature (8)..(8): n equals a,t,g, or c
  misc_feature (11)..(11): n equals a,t,g, or c
  misc_feature (38)..(38): n equals a,t,g, or c
  misc_feature (86)..(86): n equals a,t,g, or c
  misc_feature (321)..(321): n equals a,t,g, or c
  misc_feature (613)..(613): n equals a,t,g, or c
  misc_feature (615)..(615): n equals a,t,g, or c
  misc_feature (645)..(645): n equals a,t,g, or c
  misc_feature (651)..(651): n equals a,t,g, or c
  misc_feature (663)..(663): n equals a,t,g, or c
nttactanatnttcctgcaggtatttgggccaagaatncccgggtcgacccacgcgtccgatggcggagtacgacttgactactcntatcgcgcactttttggatcggcatctagtctttccgcttcttgaatttctctctgtaaaggagatatataatgaaaaggaattattacaaggtaaattggaccttcttagtgataccaacatggtagactttgctatggatgtatacaaaaacctttattctgatgatattcctcatgctttgagagagaaaagaaccacagtggttgcacaactgaaacaagcttcaggcagnaaccagaaccaattgtgaagatgtttgaagatccagaaactacaaggcaaatgcagtcaaccagggatggtaggatgctctttgactacctggcggacaagcatggttttaggcaggaatatttagatacactctacagatatgcaaaattccagtacgaatgtgggaattactcaggagcaagcagaatatctttatttttttagagtgctggttccagcaacagatagaaatgctttaagtcactctggggaagctggcctctgaaatcttaatgcagaattggggatgnancatggaagaccttacacggttaaaagagancatagntaataattctgngggtctccatttagctcttagca

SEQ ID NO: 2644 - DNA, 354 bp, Homo sapiens
  misc_feature (306)..(306): n equals a,t,g, or c
  misc_feature (328)..(328): n equals a,t,g, or c
  misc_feature (334)..(334): n equals a,t,g, or c
  misc_feature (343)..(343): n equals a,t,g, or c
  misc_feature (348)..(348): n equals a,t,g, or c
gcaactatgagaccattgaacagaagaaggcctatgagattgcagggctcctgggtgacatcgggggccagatggggctgttcatcggggccagcatcctcacggtgctggagctctttgactacgcctacgaggtcattaagcacaagctgtgccgacgaggaaaatgccagaaggaggccaaaaggagcagtgcggacaagggcgtggccctcacctggacgacgtcaaaagacacaacccgttgcgagaaccttcggggccaccctgccgggatgacatacgcttggcaacattctaccttanccattcgggccgaaggacttcnaagacntttacttgnttgancccccg

SEQ ID NO: 2645 - DNA, 620 bp, Homo sapiens
  misc_feature (33)..(33): n equals a,t,g, or c
  misc_feature (55)..(55): n equals a,t,g, or c
  misc_feature (62)..(62): n equals a,t,g, or c
  misc_feature (74)..(74): n equals a,t,g, or c
  misc_feature (93)..(93): n equals a,t,g, or c
  misc_feature (104)..(104): n equals a,t,g, or c
  misc_feature (145)..(145): n equals a,t,g, or c
  misc_feature (196)..(196): n equals a,t,g, or c
  misc_feature (260)..(260): n equals a,t,g, or c
  misc_feature (276)..(277): n equals a,t,g, or c
  misc_feature (280)..(280): n equals a,t,g, or c
  misc_feature (324)..(324): n equals a,t,g, or c
  misc_feature (331)..(331): n equals a,t,g, or c
  misc_feature (341)..(341): n equals a,t,g, or c
  misc_feature (368)..(368): n equals a,t,g, or c
  misc_feature (377)..(377): n equals a,t,g, or c
  misc_feature (401)..(401): n equals a,t,g, or c
  misc_feature (414)..(414): n equals a,t,g, or c
  misc_feature (418)..(418): n equals a,t,g, or c
  misc_feature (450)..(450): n equals a,t,g, or c
  misc_feature (471)..(471): n equals a,t,g, or c
  misc_feature (491)..(491): n equals a,t,g, or c
  misc_feature (534)..(534): n equals a,t,g, or c
  misc_feature (542)..(542): n equals a,t,g, or c
  misc_feature (555)..(555): n equals a,t,g, or c
  misc_feature (613)..(613): n equals a,t,g, or c
  misc_feature (620)..(620): n equals a,t,g, or c
gtaaaatttatttattacaggaatcagaatgtnttgtgtcactattatctgctancattaanaatagagatcangttgaattttgtatgaatntcctatttatnaacacttttattaatactacaatggtgctgctgtgattgancacgagcgagttcagaagacctttcctcacccaattgataaatgggccatngctgatgcacaatctgctatagaaaaacaaaaacgaagaaatcctcttttactgcctgtggacnaaatccatccttcgtnnaangaattattagggtacaaaatgagactaccatgtatccctatatnttgtggntgtactacantatatctcagcctgatattttaaaatnggctggtcntcttgtttttaatatccggcattntgaaatatctcanacangactttaaattgtctattttgttgcggatcangttaatgttacaaggtatttnaattttacttgaatagcacnatctaatttctgcctcaatctttatgttttaattattaaatanattatctnttatgatttgctncttactggaaacaaaaaaaaaatcctggctttacttcattaaccatgaatatttcccngtttttn

SEQ ID NO: 2646 - DNA, 153 bp, Homo sapiens
  misc_feature (3)..(3): n equals a,t,g, or c
  misc_feature (20)..(20): n equals a,t,g, or c
  misc_feature (30)..(30): n equals a,t,g, or c
  misc_feature (53)..(53): n equals a,t,g, or c
  misc_feature (88)..(88): n equals a,t,g, or c
  misc_feature (101)..(101): n equals a,t,g, or c
  misc_feature (140)..(140): n equals a,t,g, or c
  misc_feature (142)..(142): n equals a,t,g, or c
  misc_feature (148)..(148): n equals a,t,g, or c
gcncgagcgggtactacccnggcgggtatngaggggctcccggatggcctgcntttccccgacatcctctggatcctctgtttggttnctttgctgctgtngctggacaggatgggcctattgatgctgatgaatttctnanatgtcngacct

SEQ ID NO: 2647 - DNA, 377 bp, Homo sapiens
  misc_feature (17)..(17): n equals a,t,g, or c
  misc_feature (52)..(52): n equals a,t,g, or c
  misc_feature (225)..(225): n equals a,t,g, or c
  misc_feature (238)..(238): n equals a,t,g, or c
  misc_feature (243)..(243): n equals a,t,g, or c
  misc_feature (261)..(261): n equals a,t,g, or c
  misc_feature (285)..(285): n equals a,t,g, or c
  misc_feature (293)..(293): n equals a,t,g, or c
  misc_feature (335)..(335): n equals a,t,g, or c
  misc_feature (351)..(351): n equals a,t,g, or c
  misc_feature (371)..(371): n equals a,t,g, or c
ggcggggctgcctaggnctgggttgtcctttgcatctgcacgtgttcgcagncgtttccgcgatgctgcctctgctgcgctgcgtgccccgtgtgctgggctcctccgtcgccggcctccgcgctgccgcgcccgcctcgcctttccggcagctcctgcagccggcaccccggctgtgcacccggcccttcgggctgctcagcgtgcgcgcaggttccgagcggnggccgggcctccngcggnctcgcggaccctgcgccngtggctgtggctgcggctcgctgnacaccganggagacaaagcttttgttgattacctgagtgatgaaattaangaggaaagaaaaattnagaagcataaaacccttccnaagatg

SEQ ID NO: 2648 - DNA, 479 bp, Homo sapiens
  misc_feature (14)..(14): n equals a,t,g, or c
  misc_feature (344)..(344): n equals a,t,g, or c
  misc_feature (413)..(413): n equals a,t,g, or c
  misc_feature (432)..(433): n equals a,t,g, or c
  misc_feature (441)..(441): n equals a,t,g, or c
  misc_feature (474)..(474): n equals a,t,g, or c
ggaaaaattaatanctcctagaacaaaagctataattccagttgatattggaggatttccagctgattattcagaaattttagatttagtggaaaggaaaaaagatatatttaatcctaaaaaaggaacttatcaagaaaaacttgggagaatattagttttggctgattctgctcactcatttggtagtagctacaaaggaaagaaaataggaagtgtagcagatgtaacttcattttcatttcatgcaataaaaaatttaacaacagcagaaggtggagctttaacatggaatcttcctaataattttgataatgagcaaatttataaagagttgatgttgntagctttacatggcaaaataaggatgcactagcaaagctaaaagcaggtgcttggaaatatgatattgncatgccaggatacaaatgnnatatgacngatattatggcggctattgggttaatccacttnaagat

SEQ ID NO: 2649 - DNA, 410 bp, Homo sapiens
  misc_feature (287)..(287): n equals a,t,g, or c
  misc_feature (300)..(300): n equals a,t,g, or c
  misc_feature (370)..(370): n equals a,t,g, or c
  misc_feature (374)..(374): n equals a,t,g, or c
  misc_feature (402)..(402): n equals a,t,g, or c
  misc_feature (405)..(405): n equals a,t,g, or c
  misc_feature (408)..(408): n equals a,t,g, or c
gcatggatgagatggcagttgaattcctgcatgaactgaatgttccatttttcaaagttggatctggagacactaataattttccttatctggaaaagacagccaaaaaagtgtaccagcgcatacccgctccagcctgaggacgtcaacctgcgggtcatctcggaatatcagaagctctttcctgacattcccatagggtattctgggcatgaaacaggcatagcgatatctgtggccgcagtggctctgggggccaaggtgttggaacgtcacataactttggncaagacctggaangggagtgaccactcggactcgctggagcctggagaactgggcgaagctggtgcggtcagtgcgtcttgtnggancgtgccctgggctccccaagcaaagcanctnacngc

SEQ ID NO: 2650 - DNA, 164 bp, Homo sapiens
  misc_feature (148)..(148): n equals a,t,g, or c
  misc_feature (153)..(154): n equals a,t,g, or c
  misc_feature (159)..(159): n equals a,t,g, or c
  misc_feature (162)..(162): n equals a,t,g, or c
ggcagcctgcagtctgaagattttgcagtttattactgtcagcagtatagtctctggtacacttttggccaggggaccaacctggagatcaaacgaactgtggctgcaccatctgtcttcatcttcccgccatctgataaaacaattnaaatnntgaanttnct

SEQ ID NO: 2651 - DNA, 450 bp, Homo sapiens
  misc_feature (208)..(208): n equals a,t,g, or c
  misc_feature (271)..(271): n equals a,t,g, or c
  misc_feature (307)..(307): n equals a,t,g, or c
  misc_feature (328)..(328): n equals a,t,g, or c
  misc_feature (359)..(359): n equals a,t,g, or c
  misc_feature (380)..(380): n equals a,t,g, or c
  misc_feature (407)..(407): n equals a,t,g, or c
  misc_feature (425)..(425): n equals a,t,g, or c
  misc_feature (444)..(444): n equals a,t,g, or c
ggtcgcggcggggaccatgttgcttccgaacatcctgctcaccggtacaccaggggttggaaaaaccacactaggcaaagaacttgcgtcaaaatcaggactgaaatacattaatgtgggtgatttagctcgagaagtctgatcatcggatatcatggagtctggcaagacggcttctcccaagagcatgccgaaagatgcacagatnatggcacaaatcctgaaggatatggggattacagaatatgagccaagagttataaatcagatnttggagtttgccttccgatatgtgaccacaattctngatgatgcaaaaatttattcnagccatgctaaaaaaacttctgttgatgcanattatgtgcgatggcatccantgccgcctgatcatcttttactctccnccccaaaaatttttttanatttgcaggcaaaatcaanccttgc

SEQ ID NO: 2652 - DNA, 550 bp, Homo sapiens
  misc_feature (173)..(173): n equals a,t,g, or c
  misc_feature (185)..(185): n equals a,t,g, or c
  misc_feature (189)..(189): n equals a,t,g, or c
  misc_feature (227)..(227): n equals a,t,g, or c
  misc_feature (240)..(240): n equals a,t,g, or c
  misc_feature (249)..(249): n equals a,t,g, or c
  misc_feature (251)..(251): n equals a,t,g, or c
  misc_feature (253)..(253): n equals a,t,g, or c
  misc_feature (267)..(267): n equals a,t,g, or c
  misc_feature (272)..(272): n equals a,t,g, or c
  misc_feature (281)..(281): n equals a,t,g, or c
  misc_feature (305)..(305): n equals a,t,g, or c
  misc_feature (317)..(318): n equals a,t,g, or c
  misc_feature (324)..(324): n equals a,t,g, or c
  misc_feature (329)..(329): n equals a,t,g, or c
  misc_feature (337)..(337): n equals a,t,g, or c
  misc_feature (346)..(346): n equals a,t,g, or c
  misc_feature (350)..(350): n equals a,t,g, or c
  misc_feature (364)..(364): n equals a,t,g, or c
  misc_feature (384)..(384): n equals a,t,g, or c
  misc_feature (388)..(388): n equals a,t,g, or c
  misc_feature (442)..(442): n equals a,t,g, or c
  misc_feature (458)..(458): n equals a,t,g, or c
  misc_feature (475)..(475): n equals a,t,g, or c
  misc_feature (479)..(479): n equals a,t,g, or c
  misc_feature (490)..(490): n equals a,t,g, or c
  misc_feature (493)..(493): n equals a,t,g, or c
ggtgatgtctcacagaaagttctccgctcccagacatgggtccctcggcttcctgcctcggaagcgcagcagcaggcatcgtgggaaggtgaagagcttccctaaggatgacccatccaagccggtccacctcacagccttcctgggatacaaggctggcatgactcacatcntgcgggaattcnacanggccggatccaaggtgaacaaaagagttgtttgaagcnttttacatttttnaaaaacccngngntttttggcttttgnccttnaaaaccccnaggcccgaaccttcaaaatttttntttaaccccttnnaatcanaaggntttttttnaaatggttntttnaaaaaagcttcccntttccaaatggggagaagangggnaacccggaagaatccccccaaaatttcttttccttttttcccccaaacccttcnttccaaaaaacctttnaacatttaaagctttcnaaanaaggcccaaanaanattcttacatttttgggaaaaaaatccgttaagggaggaagttccttttgccaaaac

SEQ ID NO: 2653 - DNA, 355 bp, Homo sapiens
  misc_feature (17)..(17): n equals a,t,g, or c
  misc_feature (21)..(21): n equals a,t,g, or c
  misc_feature (29)..(29): n equals a,t,g, or c
  misc_feature (31)..(31): n equals a,t,g, or c
  misc_feature (59)..(59): n equals a,t,g, or c
  misc_feature (329)..(329): n equals a,t,g, or c
  misc_feature (335)..(335): n equals a,t,g, or c
  misc_feature (339)..(339): n equals a,t,g, or c
  misc_feature (344)..(344): n equals a,t,g, or c
  misc_feature (349)..(349): n equals a,t,g, or c
cttctttacagcggccnactntgaactgncnacttcggactatagtgaaagctggtacncctgcaggtaccggtccggaattcccgggtcgacccacgcgtccgtggacagctgatgaaggggtcttcgacaattttgttctcaaaatcagagataccaaaaagcagtctgagccactggaaataaccctacttgcccccgaacgtaccagggacataacaggtctcagagaggctactgaatacgaaattgaactctatggaataagcaaaggaaggcgatcccagacagtctgttctctcctgtttatttacagtatctgttgttgntatagnactnactgnttttntatttt

SEQ ID NO: 2654 - DNA, 397 bp, Homo sapiens
  misc_feature (5)..(5): n equals a,t,g, or c
  misc_feature (7)..(7): n equals a,t,g, or c
  misc_feature (17)..(17): n equals a,t,g, or c
  misc_feature (27)..(27): n equals a,t,g, or c
  misc_feature (71)..(71): n equals a,t,g, or c
  misc_feature (159)..(159): n equals a,t,g, or c
  misc_feature (190)..(190): n equals a,t,g, or c
  misc_feature (199)..(199): n equals a,t,g, or c
  misc_feature (216)..(216): n equals a,t,g, or c
  misc_feature (229)..(229): n equals a,t,g, or c
  misc_feature (266)..(266): n equals a,t,g, or c
  misc_feature (273)..(273): n equals a,t,g, or c
  misc_feature (298)..(299): n equals a,t,g, or c
  misc_feature (309)..(309): n equals a,t,g, or c
  misc_feature (334)..(334): n equals a,t,g, or c
  misc_feature (354)..(354): n equals a,t,g, or c
  misc_feature (379)..(379): n equals a,t,g, or c
  misc_feature (395)..(395): n equals a,t,g, or c
atagntntctggactcnttataggganagctggtacgcctgcaggtaccggtccggaattcccgggtcganccacgcgtccgcggacgcgtgggcccagcctgggccggcaccctggggctcaccaaggcaacctggccttcggtcttcatagcaatgnaatagccagccctggaagccccagcctgggncgtcacctnggagggactggatctgnggttcccggcagnccctgcttggaccggcatgtggcctatggaggctatnctacccnggaggatcggagacccacactgtcnnggaagagcantgcctatggctaccaggctccttcnacgccatccttgcctgtctnccctgcctactaccctggactgagnagccctgacacctacnag

SEQ ID NO: 2655 - DNA, 250 bp, Homo sapiens
  misc_feature (199)..(199): n equals a,t,g, or c
  misc_feature (204)..(204): n equals a,t,g, or c
  misc_feature (214)..(214): n equals a,t,g, or c
  misc_feature (232)..(232): n equals a,t,g, or c
  misc_feature (243)..(243): n equals a,t,g, or c
ggtggaggccacatgcgcctgcctgcttgctcagggagaagaggccgagaaagaacactgctccaagtgcctggcagagcagatgatcctggaggaatttggaaggtgcttatcacagattctccacactgagtttaaatctaagggattgaaaatggagtagagtataaagtgtgaatgcatgttgattttgtcttantctanaaatctctantttagaaaggatgtttangggaacatgangctggct

SEQ ID NO: 2656 - DNA, 361 bp, Homo sapiens
  misc_feature (97)..(97): n equals a,t,g, or c
atcgtgactgttggtggagaagagagagtttcacggaaacccacagcagcgatgcgatgcatgtgccctctctatgaccctaacaggcagctttggntcgaactggcccctttaagcatgccgagaattaaccatggagttctctcagcagaaggatttttgtttgtattcgggggccaagatgaaaataagcagactcttagctcaggagaaaagtatgatccagatgcaaatacatggacagcattgccacctatgaacgaggcaagacataacttcggaattgtggagatagatgggatgctgtacattttgggaggagaggatggtgaaaaggagctgatttccatggagtgttacg

SEQ ID NO: 2657 - DNA, 260 bp, Homo sapiens
  misc_feature (7)..(8): n equals a,t,g, or c
  misc_feature (13)..(13): n equals a,t,g, or c
  misc_feature (17)..(18): n equals a,t,g, or c
  misc_feature (34)..(34): n equals a,t,g, or c
  misc_feature (42)..(42): n equals a,t,g, or c
  misc_feature (56)..(56): n equals a,t,g, or c
  misc_feature (241)..(241): n equals a,t,g, or c
gcaagcnncgccnccanncatcactaaaagggancaaaagcnttgagctccaccgnggtgcggcccgctctagaactagtggatcccccgggctgcaggaattcggcacgagggatatcgacgtcgtgatccagaagtccagagctgaggactgcctgtttgcagccaagttctatagaaattttagagtattcatcagatagtgaaaaagaagatgatttggaaaatgtcctactcattnattcagaaccccctcacaa

SEQ ID NO: 2658 - DNA, 421 bp, Homo sapiens
  misc_feature (347)..(347): n equals a,t,g, or c
  misc_feature (380)..(380): n equals a,t,g, or c
  misc_feature (388)..(388): n equals a,t,g, or c
  misc_feature (409)..(409): n equals a,t,g, or c
  misc_feature (411)..(411): n equals a,t,g, or c
gcccacgcgtccggtcccgggcgctagcccacctccgacccgcctcttggctcctctcctctaggccgtcgctttcgggttctctcatcgcttcgtcgttcgccaatgtttgaggagaaggccagcagtccttcagggaagatgggaggcgaggagaagccgattggtgctggtgaagagaagcaaaaggaaggaggcaaaaagaagaacaaagaaggatctggagatggaggtcgagctgagttgaatccttggcctgaatatatttacacacgtcttgagatgtataatatactaaaagcagaacatgattccattctggcagaaaaaaaaaaaaaaagggcggncgctctagaggatccaaagcttacgtacgcgtncatgcgangtcataagtttttctattagngncacctaaaat

SEQ ID NO: 2659 - DNA, 788 bp, Homo sapiens
  misc_feature (6)..(6): n equals a,t,g, or c
  misc_feature (14)..(14): n equals a,t,g, or c
  misc_feature (39)..(39): n equals a,t,g, or c
  misc_feature (566)..(566): n equals a,t,g, or c
  misc_feature (587)..(587): n equals a,t,g, or c
  misc_feature (669)..(669): n equals a,t,g, or c
  misc_feature (678)..(678): n equals a,t,g, or c
  misc_feature (681)..(681): n equals a,t,g, or c
  misc_feature (706)..(706): n equals a,t,g, or c
  misc_feature (740)..(740): n equals a,t,g, or c
  misc_feature (750)..(750): n equals a,t,g, or c
  misc_feature (783)..(783): n equals a,t,g, or c
attaanggaaatcncggtacgcctttaggtaccggtccngaattcccgggtcgacccacgcgtccggattccctcccgaacagttaaccggaagagtacagacagcccggtagagtgtatgggccaggagaaaggggaattcagagaaatattctacatcattggagctgtggtatttgtggtcatcatccttgtcatcatcctggctatatctctacacaagtgtagaaaggcaggagtggggcagagctggaaggagaactccccactgaatgtttcataaaggaagcactgttggagctactgcaaatgctatattgcactgtgaccgagaacttttaagaggatagaatacatggaaacgcaaatgagtatttcggagcatgaagaccctggagttcaaaaaactcttgatatgacctgttattaccattagcattctggttttgacatcagcattagtcactttgaaatgtaacaaatggtactacaaccaattccaaggtttaatttttaacaccatggcaccttttgcacataacatgctttaagattatatattccgnactcaagggagtaaccaggtngtccaagcaaaaaccaatgggaaaatggcttaaaaaatctgggtgggacttttgaaaagctttttttttttttttttttganacgggagcntgnttttgttggccaagctggaaggcantaagcaccgatcttgggttaattggaccttcggnttttgggttnaagcaaatggctggcctaaaccttccgagtagntggga

SEQ ID NO: 2660 - DNA, 378 bp, Homo sapiens
  misc_feature (6)..(6): n equals a,t,g, or c
  misc_feature (150)..(150): n equals a,t,g, or c
  misc_feature (237)..(237): n equals a,t,g, or c
  misc_feature (267)..(267): n equals a,t,g, or c
  misc_feature (278)..(278): n equals a,t,g, or c
  misc_feature (289)..(289): n equals a,t,g, or c
  misc_feature (313)..(313): n equals a,t,g, or c
  misc_feature (352)..(352): n equals a,t,g, or c
  misc_feature (365)..(365): n equals a,t,g, or c
  misc_feature (376)..(376): n equals a,t,g, or c
ggtganaagcgaatatccctctataaaactggtggtggagtggcaacttcaggatgacaaaaaccaaagtctcttctgctgggaaatcccagtacagatcgtttctcatctctaagtgcctcattgagttcggtgcatctggccaatgantctgctgagactcttgacagcacctccagctctgctgcttcaacaacagtgacttgctctccaatggtatccagtgattcgttgaanaggaggtgctctgtagcagaaactgagctncgggtggctgnttctcaatggntgctcatgtctcttttctgcttangtggttcattaaatgcaccacttggtagcaatgttaatntttttttaacacnttacttggggnct

SEQ ID NO: 2661 - DNA, 241 bp, Homo sapiens
  misc_feature (164)..(164): n equals a,t,g, or c
  misc_feature (173)..(173): n equals a,t,g, or c
  misc_feature (209)..(209): n equals a,t,g, or c
  misc_feature (220)..(220): n equals a,t,g, or c
  misc_feature (225)..(225): n equals a,t,g, or c
gcctcaagcagcggcggtcccttagtgacagtgtctacacccctccaccaagtgtcccccacgggcctggagcccagccacagcctgctgagtacagaagccaagctggtctcagcagctgggggccccctccccctgtcagcaccctgacagcactgcacagnttggagcanacatccccaggcctcaaccagcagccccagaacctnatcatggcctnacttnctggggtcatgaccat

SEQ ID NO: 2662 - DNA, 377 bp, Homo sapiens
  misc_feature (356)..(356): n equals a,t,g, or c
gacctgtcaaaacatatcaagacccaccagaataagaagggaggcccaggtgtagctctgagtgtgggcactttgcccctggacagtggggcaggttcagaaggcagtggcactgccactccttcagcccttattaccaccaatatggtagccatggaggccatctgtccagagggcattgcccgtcttgccaacagtggcatcaacgtcatgcaggtggcagatctgcagtccattaatatcagtggcaatggcttctgagatcaggcacccggggccagagacatatgggccataccccttaaccccgggatgcaaggtagcatgggtccaagagacatggaagagagagcccntgagattaaaatgcatggtgt

SEQ ID NO: 2663 - DNA, 496 bp, Homo sapiens
  misc_feature (10)..(10): n equals a,t,g, or c
  misc_feature (153)..(154): n equals a,t,g, or c
  misc_feature (175)..(175): n equals a,t,g, or c
  misc_feature (216)..(216): n equals a,t,g, or c
  misc_feature (281)..(281): n equals a,t,g, or c
  misc_feature (349)..(349): n equals a,t,g, or c
  misc_feature (387)..(387): n equals a,t,g, or c
  misc_feature (398)..(398): n equals a,t,g, or c
  misc_feature (404)..(404): n equals a,t,g, or c
  misc_feature (413)..(413): n equals a,t,g, or c
  misc_feature (420)..(420): n equals a,t,g, or c
  misc_feature (437)..(437): n equals a,t,g, or c
  misc_feature (447)..(447): n equals a,t,g, or c
  misc_feature (461)..(461): n equals a,t,g, or c
  misc_feature (477)..(477): n equals a,t,g, or c
  misc_feature (489)..(489): n equals a,t,g, or c
  misc_feature (494)..(495): n equals a,t,g, or c
aattcggcanagcagggtcactgtcaagcttgaggaggcaggtacaaaacatattatattaatcacagaaaatgagatcctggcacacagggtcagattgaggggtggtcacctgtagttctgcacgatgttccgagaaagcttccagctgtnnccccggacagcagcagatttngaggatcagtaacagtgaaaaagtgccgggctctgccaggnaaagtactttggtcccagcgaggttcctgggatgttgatgtctaaaggcaatttcacccattttntgcaggacagagattaagggttcagagcgggagtccaagggttccaaggggttccagttagggggaanttttggtggcccctgccctgggcccctgaggtttttcntcattcctttnaagagntcaaggtgnttagatntaggggaaagaaagagngttcagattnttactgggtctatnttgggaaggaaggccntaggggattccnttttnna

SEQ ID NO: 2664 - DNA, 498 bp, Homo sapiens
  misc_feature (10)..(10): n equals a,t,g, or c
  misc_feature (132)..(132): n equals a,t,g, or c
  misc_feature (373)..(373): n equals a,t,g, or c
  misc_feature (413)..(413): n equals a,t,g, or c
  misc_feature (440)..(440): n equals a,t,g, or c
  misc_feature (451)..(451): n equals a,t,g, or c
  misc_feature (474)..(474): n equals a,t,g, or c
  misc_feature (479)..(479): n equals a,t,g, or c
  misc_feature (494)..(494): n equals a,t,g, or c
aattcggcanagcctaaatacaacagggacactctggacaatgacatcatgctgatcaaactctcctcacctgccgtcatcaatgcccgcgtgtccaccatctctctgcccaccgcccctccagctgctggncactgagtgctgcatactccggctggggcaacactctgagctttggtgctgactacccagacgagctgaagtgcctggatgctccggtgctgacccaggctgagtgtaaagcctcctaccctgggaaagattaccaacagcatgttctgtgtggggcttccttgaggggaggcaaggattccttgccagcgtgactttggtggccctgtggtctgcaaggacagttccaaggggttgtctnctggggccagggtgtgctgggaagaacaggctggagtttncaccaggtttacaatttgtggattggnttagggcaacntggttgcaacattaagcccggtnccttngatttttaccataanggct

SEQ ID NO: 2665 - DNA, 336 bp, Homo sapiens
  misc_feature (194)..(194): n equals a,t,g, or c
  misc_feature (212)..(212): n equals a,t,g, or c
  misc_feature (235)..(235): n equals a,t,g, or c
  misc_feature (293)..(293): n equals a,t,g, or c
  misc_feature (311)..(312): n equals a,t,g, or c
  misc_feature (322)..(322): n equals a,t,g, or c
  misc_feature (336)..(336): n equals a,t,g, or c
gaacgcttctgtgagacttgataatagctcctctggtgcaagtgtggtagctattgacaacaaaatcgagcaagctatggatctagtgaaaagccatttgatgtatgcggtcagagaagaagtggaggtcctcaaagagcaaatcaaagaactaatagagaaaaattcccagctggagcaggagaacaatctgntgaagacactggccagtnctgagcagcttgcccagtttcangcccagctgcagactggctccccccctgccaccacccagtcacagggcaccacacagncccccgccagccagtatnntagggctcangaccaaccgcatan

SEQ ID NO: 2666 - DNA, 622 bp, Homo sapiens
  misc_feature (471)..(471): n equals a,t,g, or c
  misc_feature (503)..(503): n equals a,t,g, or c
  misc_feature (506)..(506): n equals a,t,g, or c
  misc_feature (514)..(514): n equals a,t,g, or c
  misc_feature (517)..(517): n equals a,t,g, or c
  misc_feature (594)..(594): n equals a,t,g, or c
  misc_feature (598)..(598): n equals a,t,g, or c
  misc_feature (603)..(603): n equals a,t,g, or c
  misc_feature (611)..(612): n equals a,t,g, or c
ggagaatacagactatgtgaacgcatcctttattgatggctaccggcagaaggactcctatatcgccagccagggccctcttctccacacaattgaggacttctggcgaatgatctgggagtggaaatcctgctctatcgtgatgctaacagaactggaggagagaggccaggagaagtgtgcccagtactggccatctgatggactggtgtcctatggagatattacagtggaactgaagaaggaggaggaatgtgagagctacaccgtccgagacctcctggtcaccaacaccagggagaataagagccggcagatccggcagttccacttccatggctggcctgaagtgggcatccccagtgacggaaagggcatgatcagcatcatcgccgccgtgcagaagcagcagcagcagtcagggaaccaccccatcacccgtgcactgcagcgcccggggcaggaaggacngggaccttctgtgccctgagcaccgtctgganccntgtgaaancanaggggattttggatgtcttccagactgtcagagcctgcggctttcagagggcacacatggtccagacactggaacantttnagttntggttccnnggtggtgcag

SEQ ID NO: 2667 - DNA, 497 bp, Homo sapiens
  misc_feature (463)..(463): n equals a,t,g, or c
gctcgccggggctgcggccgcccgaggctgccctgaggatctgtgtttggtgaaaaggagccaaattcacctgcagggcaggcggctctagcagcttcagaagcctggtgccctggcgacactggacctgccttggcttctttgatcccaaccccacccccgatttctgctctgctgactggggaagtcatcgtgccacccagaacctgagtgcgggcctctcagagctccttcatcgggactttgaacatgtcggggatcgccctcagcagactcgcccaggagaggaaagcatggaggaaagaccacccatttggtttcgtggctgtcccaacaaaaaatcccgatggcacgatgaacctcatgaactgggagtgcgccattccgggaaagaaagggactccgtgggaaggaggcttgtttaaactacggatgcttttcaaagatgattatccatcttcgncaccaaaatgtaaattcgaaccaccattatttca

SEQ ID NO: 2668 - DNA, 584 bp, Homo sapiens
  misc_feature (54)..(54): n equals a,t,g, or c
tgacaccaaccctcactaaagggaacaaaagctggagctccaccgcggtgcagnccgctctagaactagtggatcccccgggctgcaggaattcggcacgagggcagatcacctttcctttgtctccagctcttaacattgaagtggaacaaaatgggaaaccgtccctggttgatttgaatgaagaaatgcagcacatggatgtagaggaatcacagtgtcttagattatgtccatttttggaggatcataaagaagacattctatgtgggccagtatggcttgctagtggccttgatctatcagggcatgctggaatgttgacgttaacaagccccaaacttgttaaaggtatggcaggaggaaaatatcgttcgtttttaatccatgtcaaggcagtgaatgaaagaggaacagaagagatttgtaatggtggtatgcgtcctgtagtaaggcttccatccctaaaacaccagagtaacaagggttattcacttgcttcacttttggctaaagttgcagcaggcaaggaaaaatcatctaatgttaagaatgaaaatacaagtggcacccgtaaatctgaa

SEQ ID NO: 2669 - DNA, 358 bp, Homo sapiens
  misc_feature (354)..(358): n equals a,t,g, or c
gctgatatttgccggcaaacagctggaggatggccgcactctctcagactacaacatccagaaagagtccaccctgcacctggtgttgcgcctgcgaggtggcattattgagccttctctccgccagcttgcccagaaatacaactgcgacaagatgatctgccgcaagtgctatgctcgccttcaccctcgtgctgtcaactgccgcaagaagaagtgtggtcacaccaacaacctgcgtcccaagaagaaggtcaaataaggttgttctttccttgaagggcagcctcctgcccaggccccgtggccctggagcctcaataaagtgtccctttcattgactggaaaaaaaannnnn

SEQ ID NO: 2670 - DNA, 644 bp, Homo sapiens
  misc_feature (9)..(9): n equals a,t,g, or c
  misc_feature (588)..(588): n equals a,t,g, or c
  misc_feature (617)..(617): n equals a,t,g, or c
  misc_feature (619)..(620): n equals a,t,g, or c
  misc_feature (638)..(638): n equals a,t,g, or c
gcatttatngacaagagaaagcacaaagcatggagaccctccctccagggaaagtacggtggccagactttaaccaggaagcttatgttggagggacgatggtccgctccgggcaggacccttacgcccgcaacaagttcaaccaggtggagagtgataagcttcgaatggacagagccatccctgacacccggcatgaccagtgtcagcggaagcagtggcgggtggatctgccggccaccagcgtggtgatcacgtttcacaatgaagccaggtcggccctactcaggaccgtggtcagcgtgcttaagaaaagcccgccccatctcataaaagaaatcatcttggtggatgactacagcaatgatcctgaggacggggctctcttggggaaaattgagaaagtgcgagttcttagaaatgatcgacgagaaggcctcatgcgctcacgggttcggggggccgatgctgcccaagccaaggtcctgaccttcctggacagtcactgcgagtgtaatgagcactggctggagcccctcctggaaagggtggcggaggacaggactcgggttgggtcacccatcattngatgtcattaatattggaccaactttcantnntgtgggggcatctggctngacttt

SEQ ID NO: 2671 - DNA, 439 bp, Homo sapiens
  misc_feature (79)..(79): n equals a,t,g, or c
  misc_feature (207)..(207): n equals a,t,g, or c
  misc_feature (253)..(253): n equals a,t,g, or c
  misc_feature (268)..(268): n equals a,t,g, or c
  misc_feature (391)..(391): n equals a,t,g, or c
ttgttttattgccatcctgtttggaagcagcacaatatcactttcagacgaagcctctaggagatgttctgtacttttntccactctcagttctcagtcttgtaagcagttacgagtgtacctttctcctctaagtaaagaagccatagatgactccccgagacttttagcaaaactcttggccttaaaactatgctaccatatatncttagaagtcaaaggatgcaacacagagaatacatttttctatgangattaatacaagtgnatattagtggatataaccattaattgtttggactcagccttatcttacaaatgcaaggtcatttatctagatcagtacttaaaaacataaaattttactctaataaaatgcaatataaaagtnggtttaattttgatatgtgctttataggagtgaagctgaaaatattta

SEQ ID NO: 2672 - DNA, 300 bp, Homo sapiens
  misc_feature (29)..(29): n equals a,t,g, or c
  misc_feature (38)..(38): n equals a,t,g, or c
  misc_feature (150)..(150): n equals a,t,g, or c
  misc_feature (207)..(207): n equals a,t,g, or c
  misc_feature (258)..(258): n equals a,t,g, or c
  misc_feature (262)..(262): n equals a,t,g, or c
tgacaaaaagcctatacgatatgcaaganttgtatttnctcaatatcaaccatcacatttagaaaaccttcagaaagcatatgtacatagtatcttatgtgtaagtgaatgagaattttatgaataaactttttaagggaattaagacantacaatcgtctgtatctgaaataaagcagagacaaaggcaaagattatagctatggntgaggtgaactgagtatcaatacattctaaggataacatagagttaatganattnattaaatgatcaataccagtataataaatatcctggca

SEQ ID NO: 2673 - DNA, 455 bp, Homo sapiens
  misc_feature (11)..(11): n equals a,t,g, or c
  misc_feature (350)..(350): n equals a,t,g, or c
ctttaattgtnctcactcacttccaagtttgaataagacttttattgaggtatttacaaatccatatctgcatcccttctttctatgtttctaattgtcactttcacctatacatgctgactcctagaaaatagtttgttaaatagcaaggcatgagcaattattaataatccccaaattcaaatttttaaattcatatttttaatgacatgagcatttcccatgtcacctatattactttttaaattactccttttccctggcttgccttattccacatccacctaagtccatctgtctttcacatgctatcatatttatctttatgagtacagctttcattgaatttnactaaacctagaaattgcaagacacttgagaaacttctagtaacctaatatgtaatcacatgttaggtaatcaactttttgcaggttattttcaattactctcca

SEQ ID NO: 2674 - DNA, 412 bp, Homo sapiens
  misc_feature (64)..(64): n equals a,t,g, or c
  misc_feature (249)..(249): n equals a,t,g, or c
  misc_feature (288)..(288): n equals a,t,g, or c
taaaaactaagtttccaaggcagtatgctgtggtccttgaaaagtcctttagaagaattttctngaataaatttagagaaaacctaagtgtttcctaggggatgcttaccaactcctcgcccctcccccgcccgccctcttttattttaattgtgactcagggttaaatacaaactactagcagctgttggtggaaaagagcccaatcccaaactctggggttttcctttgttcccaagggaggccttnggaggaatgaatgatcctaaaggtaatgagcagacctgngggaatcctccaagtgccacctctgactaatattgggctgttgccaggaaaacccaactttgggatttcaagctattactttccgtgcaacccctggtgcttgactattcaaggggacagctct

SEQ ID NO: 2675 - DNA, 366 bp, Homo sapiens
agcagggtcggcagtgaagagcagagaaaggcagttggggatgttgccactgtcccccgagaccaccctgccatggagacgagggagctgtcccttcgcggaagggggctggccagcaagaaggacagagagtggactggccgaggaccgctgagctcaggacccaaggaggactcttctaggagacgagagagcgaacgccagggaccctgtgcaggcctgctcctccgtttgcaagcaggctccctccccgaggccgttcagaagcattcctcagcgggtcctacacgtttcctctcccatgtcaagtttagaagcagtgtcaagacccacagcagtcctgcaggagttttaagggatgcacgg

SEQ ID NO: 2676 - DNA, 453 bp, Homo sapiens
  misc_feature (331)..(331): n equals a,t,g, or c
gaattttaatagtaaaatcttataagtggatgaggagagtaattaatatatagaacattaccaattataaatacatatttaagtataatttagtgttttctggaaagaaatcaaatgtgtttctgtgggcattcacattttcttttttgtgaattttccaagctttctacaatagccatacattctgcaatatttatagtctataacttattatctctagttgacaaacatggttctttgtttcttaaattataaatgtctttaacctaaaaaaattaaatagtcattcagcttacaggtctgcttaaaaaacagaacattttttagcttnttttgaaccaatttttttaatgttcctgtgcaattagtactttttactttaaacatatgcacttaaagcatccattcacattttaggcactcatttcagtattttctttctgcttacattag

SEQ ID NO: 2677 - DNA, 479 bp, Homo sapiens
gagagaatagtgggtaggagttaaccaggaaagcaaggatgaaagcgtgttgcgtttagataaaggataggcttcaaggtcagggaacgttgctgggtggtgagatggaaccctgatgtggaggctcagcaggaagaagcaggaaggacactgggcccccggtggttttagttccagaaacaaatgtgggccccagggctctgcaatggtaaggctggaactactcaacataagagctccacctttaactgtgccccctaagagtacctgatgatccccctatctccttgtcaatgttgctgttcttctccagaatctatttcaacccttctctgatttcaaaccaccagtccctttacctctcagagaaaacagcaaccacaaaagcctctccacttcctactatcttaatattgacaacttccagatcagggagctgagatatctcaagctcaggtttctcttctgagcttcagacg

SEQ ID NO: 2678 - DNA, 450 bp, Homo sapiens
ccgcatcctagccgccgactcacacaaggcaggtgggtgaggaaatccaggtaaggctcctgacagcagctttagaagggtacttgctggagtgaattcgggcctctgattgctatataaagttgtaggcaatcaagcaacagagaactgcaagtttccaaaggcaatgaagtaggatacggaagggaaatcatggaatttccacaaaagtcttactggggcctttctttggctagagctggcacagtgtgacgttcccgagttagttcagagaaatgctttctcttttgcgaaacaaaatttccaagagtaggtgaatcctaggatttttcaagcctgggacagggtccagggattttcgtctcagtcaccatctaaagctttctttcccacgggctaaagcaaagccccataggcttctccactatgacacctcagctcggattgccc

SEQ ID NO: 2679 - DNA, 507 bp, Homo sapiens
cgctcccccatccctgctctgctctgaggtgccagccagagccgctcagggtcctccgtccggtttcccgtgggcctaacagcagggccctggggccaccacccgcacctccctgcctccatctcagaaactgaagcctgggagccccctgggccacctgagtctgggagacgcaagccaatcccggggacaggccccggccccttcctagtgaggggcacgctctggtcaatcgtggggcagagaaatttgctttttaacataaaacgtatcctttgtccctagaatggcaggctacctccctgccttattctgtgaagatgtagttcctttattagcagagcttactttgaaggtagaataacaataaatatataagcagttggagagtaaaatcactacagtattcaagtctaaatatattacaaatgccaagttttattggaaaattatatataaaattcttatatacattttagtaagcctccatcttagtatctaaaactt

SEQ ID NO: 2680 - DNA, 404 bp, Homo sapiens
tacaggcatgaaccaccatgcccaacctcatttacaatttttaaaaaaaatcttaagatctgtattttttatagtttataaaagtttttttgtgatcacaaaaatacatgcttttggtagaaacacaaacatacaaagatgttctataaaactgactttttatcgtacattttaagatatttaaaaatattttctgtaatttcatgaagagtactaaagccacagtcactgacattgtaaacacctctgttcattctctaacctgttaggtggttaagctatttttaattctagggggctcaggctgaacttgaggttggggaggagaatttgcctctgcttttagttgcaattttcaagtgaggtgaaattaagtaaaatttgtaagagcttttttggctttt

SEQ ID NO: 2681 - DNA, 414 bp, Homo sapiens
gaaactccttgttggctcaactgctcttcacagatgcataattttggagtccatacaccaccctggtcactctctttagaatacactccagttttgtacatttattctattttcaactgtatgttaattttaaagtacagcatgcaacatgaaaattaacatgcacacaatgagaggagctgtgttaggcgaaggagcttattgatgattactttgctttttcaaaaattgtgtttaatgttggcatataccccatcttccatagaaataaagtagggtgttcaggatctaatttcaaatgtagactagtaatctcaaagtgtaatgggacaattatatcccttgttcaggagacaaaattgctcccaaaccttcttttgttctgttttttcatggcatattttaagcttaaaa

SEQ ID NO: 2682 - DNA, 445 bp, Homo sapiens
cacgcaagcatggtaggacttgctggtgggggccgagtaacatccagcttaatctttcccccccttcgtcgcccgtgctatgccgggatgggtccaggctcctgtgtggactcgatatatcagagcaacccaatcttgccgggatcaaccctaaagggaccgggctacggggccaggaattgaagtgatgggttcaaagaggtagagttagccgggggtggagttaatgaggtctcttccctctttggggctcgacggagggaggaagctctgcttgaagcacatggggctggcccaccctgtagtcagaggtagcaagtaatgaggagtcctcctggagtgcctcagctttagctgggtaaggtagggcgttgtgccattgtggtcaaataacattgcacgttctgaactgtttctttactaggttaacgtccctaaaacccgc

SEQ ID NO: 2683 - DNA, 366 bp, Homo sapiens
  misc_feature (119)..(119): n equals a,t,g, or c
gcagactaggatggctgtatcactaacagcagctgaaactctggcccttcagggtacacagggacaagagaagatgatgatgatgggaccaaaggaagaggaacagtcttgtcccaggncctgcacatggacctgcacaggaagagccatgggagaagaaggaatctctgggagcagcccaggaagcactgagcatccagctccagcctaaggagacccagcctttcccaaagagtgaacaggtatatttacattttctgtcagttgttacagaagatggcccagagcccaaggacaaaggatcattgccacaaccacccattactgaagtggaatcacaggtgttctcagaaaaacttgctactg

SEQ ID NO: 2684 - DNA, 233 bp, Homo sapiens
  misc_feature (3)..(3): n equals a,t,g, or c
  misc_feature (23)..(23): n equals a,t,g, or c
  misc_feature (25)..(25): n equals a,t,g, or c
  misc_feature (27)..(27): n equals a,t,g, or c
  misc_feature (35)..(35): n equals a,t,g, or c
  misc_feature (42)..(42): n equals a,t,g, or c
  misc_feature (47)..(47): n equals a,t,g, or c
  misc_feature (51)..(51): n equals a,t,g, or c
  misc_feature (65)..(65): n equals a,t,g, or c
acnccctcataagggaacaaagntngngttccacnggtgagnccgtnttgnactatggatccccnggctgcagattcggcagagcagagacagagggagccagccgggccccaggtgtcctcggacgcctccgaaatctcctgcgtgtttgtttcttcggagcttcaccggagcctgactctggaaccggcctgtctgcctgctgcagtcttatgcattcttagaaaccagat

SEQ ID NO: 2685 - DNA, 547 bp, Homo sapiens
  misc_feature (4)..(4): n equals a,t,g, or c
  misc_feature (9)..(9): n equals a,t,g, or c
  misc_feature (26)..(26): n equals a,t,g, or c
  misc_feature (33)..(33): n equals a,t,g, or c
  misc_feature (56)..(56): n equals a,t,g, or c
gatngtatncaacccacactaaaggnaacatangctggagctccaccgcggtgcgnccgctctagaactagtggatcccccgggctgcaggaattcggcacgagcttttccattaaaaagaaggaggaaaagagaaggagagcaagagaaaaaaaaattaccttatatgtctgtcttcttatataagaaagtgacaccatacaaagaaacaactattcaggctggtgctagagggttggggagccgaggaatccctggggagcagtcacagggaattccatccaaaagtccaacatgcagtgaatatcccacaaatgttagtggtgcctctgcagaggtagcaatgttgaacgcctcgagtattcccggatgattttgattaatttcctcattccttttctcctgagtccagatatccccagcatagattgcttcccacatagtatctccaattttaagtaatatatagtctaatatctgtttctttattggctaagtgtctttctctgcgtctcctctatatcatcaatagtcctctgtcatcttt

SEQ ID NO: 2686 - DNA, 581 bp, Homo sapiens
  misc_feature (2)..(2): n equals a,t,g, or c
  misc_feature (26)..(26): n equals a,t,g, or c
  misc_feature (41)..(41): n equals a,t,g, or c
  misc_feature (44)..(44): n equals a,t,g, or c
ancctcactaagggaacaaagctggngctccaccgcggtgncgnccgctctagaactagtggatcccccgggctgcaggaattcggcacgagctagagagcaacatgatcaagctttgcctgtagaagagtaactgagcatcgtgtgcagaatggatgagagagaagcagcagagagacagcaaggccattcagcaagctcaggtggcaggtcccatctgatggaggagaatcaattcaaggagatgcccttcctttacagaacaccctttaacagcatccaggaggaacgagaggctgcaatactgaggctttcaaagtactcacgaggatgtccgagaatggctgtgatgccaggcttctggcaggttccagactccatcacaagcccagcatccctgcaccagatctgacatcgctgctgttgtgccagctgtttatgaagggcctgagtagctagcaggtttttatcaggagccctgctgggggcttagacaccaaaagagaagtctcatcctctgtagttcttcttgtgaatgtccttttagaaaaacaattagaaccaaccacaagcaccaaagt

SEQ ID NO: 2687 - DNA, 651 bp, Homo sapiens
  misc_feature (1)..(1): n equals a,t,g, or c
  misc_feature (3)..(3): n equals a,t,g, or c
  misc_feature (12)..(12): n equals a,t,g, or c
  misc_feature (27)..(27): n equals a,t,g, or c
  misc_feature (55)..(55): n equals a,t,g, or c
nanagccaaccngtcacttaaagggancaaaagctggagctccaccgcggtgcgnccgctctagaactagtggatcccccgggctgcaggaattcggcacgagggccaacgctggttctatccctgcttgttgctttttttttccctccgcttcttgcgacggagactgctgtccaggaagtgcgcagtagtgattctagagaggctggaagctctcctggcgacgctggggccgcgaagggctcacgtaatgactcctactcctggtgagcgcaggcgttgcggaactcaccgtcccacaggacgtgtttccgggggtacattaattgtggctggacgcagtggcgcggcagtttaattctccggcggctgcagattgacgggacgagatggtcctggcagggctcatcaggaaactcggtcatcagctggccgagatcagggagcgcgctctcaagagtattctctgcaagattgagcacaacttaatctgctacgctgatctcattcaggagaggcaactttttcttcatttgctggaatggttcaatttcccgtccgttccgatgaaggaagaggttctgaacctgttaagcagattggttaagtatcccccagcagtccaacatttggttgacgttggtgcagtag

SEQ ID NO: 2688 - DNA, 326 bp, Homo sapiens
  misc_feature (110)..(110): n equals a,t,g, or c
  misc_feature (122)..(122): n equals a,t,g, or c
  misc_feature (151)..(151): n equals a,t,g, or c
tgaacatgcagtatatgttcagatagaaaaaggaagtgccagaataacccagctttaaaaaggtcttcagaagaaaggaagtctcactttttaaaataaacaaatgaganagtgtttttgangaggagcagaaaatggagcaacttgattncagagcactcgctcccctcgtgatgttgccggccacacgcacctgcgacctcgtgcagaaacgtgcagcagtgctttccagctggtggcaggtgatgtacatggtacggagacagagggacgccatggtggcaggtgcagccgtggtggagagcacagggcgacactcggcttgg

SEQ ID NO: 2689 - DNA, 343 bp, Homo sapiens
ccatcctgtcctgccaagtgtacatctcgcagatcctggtggcctctgcccttgggggcgtggtcgacgccgtggggactgtccgcgtcatccccatggtggcctctgtgggctctttcctgggcttcctgacggccacattcctggtgatctatcccgacgtgtcagaggaggccaaggaggagcagaaaggcctgtcttccccgttggccggcgaaggcagggccggcgggaacagcgaaaagcccaccgtgctgaagctcacgcggaaggagggcctgcagggaccggtggagacagagtccgtggtctgagccgcactcccgtttacacacattccagc

SEQ ID NO: 2690 - DNA, 354 bp, Homo sapiens
  misc_feature (35)..(35): n equals a,t,g, or c
  misc_feature (37)..(37): n equals a,t,g, or c
  misc_feature (46)..(47): n equals a,t,g, or c
  misc_feature (181)..(181): n equals a,t,g, or c
  misc_feature (231)..(231): n equals a,t,g, or c
  misc_feature (288)..(288): n equals a,t,g, or c
  misc_feature (302)..(302): n equals a,t,g, or c
  misc_feature (318)..(318): n equals a,t,g, or c
  misc_feature (342)..(342): n equals a,t,g, or c
  misc_feature (347)..(347): n equals a,t,g, or c
gttttaagcatgtttattcataaaaacaagtcatngntgtattttnnatctttaagaatgcttaaaaaagctaatccctaaaatagttagatctttgtaaatgcatattaaataataaagtatgacccacattactttttatgggtgaaaataagacaaaaataatagttttagtgagganggtgctgagtaaacataaaaactgatttgctctcagctgatgtgtcctgnacacagtgggaagattttagtacacacttagtctaactcccccattatacagatttntcactatatatatnactagaaggggctaangcatattcaatgtattgagaaacnaaagnaaccaca

SEQ ID NO: 2691 - DNA, 156 bp, Homo sapiens
  misc_feature (9)..(10): n equals a,t,g, or c
  misc_feature (35)..(35): n equals a,t,g, or c
  misc_feature (71)..(71): n equals a,t,g, or c
  misc_feature (80)..(80): n equals a,t,g, or c
  misc_feature (119)..(119): n equals a,t,g, or c
  misc_feature (139)..(139): n equals a,t,g, or c
  misc_feature (144)..(144): n equals a,t,g, or c
tagtggatnnccgggctgcaggaattcggcagagnccaaaaaagtagtttagcaacttttgttggtagtcnaccatcgcnagggccatagtgtagagtgtgaaaagctaccgtgaaacncagtaatcctaccctgcaangtgantgccctgccaga

SEQ ID NO: 2692 - DNA, 219 bp, Homo sapiens
  misc_feature (9)..(9): n equals a,t,g, or c
  misc_feature (21)..(21): n equals a,t,g, or c
  misc_feature (32)..(32): n equals a,t,g, or c
  misc_feature (44)..(44): n equals a,t,g, or c
  misc_feature (60)..(60): n equals a,t,g, or c
  misc_feature (64)..(64): n equals a,t,g, or c
  misc_feature (74)..(74): n equals a,t,g, or c
  misc_feature (102)..(102): n equals a,t,g, or c
  misc_feature (138)..(138): n equals a,t,g, or c
  misc_feature (155)..(155): n equals a,t,g, or c
  misc_feature (174)..(174): n equals a,t,g, or c
  misc_feature (194)..(194): n equals a,t,g, or c
  misc_feature (199)..(200): n equals a,t,g, or c
  misc_feature (211)..(211): n equals a,t,g, or c
aggcctgcntccagggctggnctgaaggcctnacccctcctgcngaaaagctggccgccnaaanaatgtctctnagagactgcgagaacctttaattttttnccggctggttcggatttggggtggattttggttttnttccccctcctccaatntcccccaccccttccccgncctttttttttttttttttnaaaannggttttttatnttgaaatt

SEQ ID NO: 2693 - DNA, 280 bp, Homo sapiens
  misc_feature (267)..(267): n equals a,t,g, or c
  misc_feature (274)..(274): n equals a,t,g, or c
  misc_feature (278)..(280): n equals a,t,g, or c
cctgccgcccccagctttgcctggacactgacttcattcatggtcctcctacttcaggggcagcctcccagttcctctgcttccaaactatgcaacctccaacctgctccagttccagactgtataacctctgacctgcactggttctagaccacaacaccagattgtacccagatagctggggattggaagtgaggaggtttctcaccccacagataacccaagacacaaatgtgcaattaaaagtttattttagaccacaaaaanaaaaganaaannn

SEQ ID NO: 2694 - DNA, 378 bp, Homo sapiens
  misc_feature (253)..(253): n equals a,t,g, or c
  misc_feature (304)..(304): n equals a,t,g, or c
  misc_feature (330)..(330): n equals a,t,g, or c
  misc_feature (342)..(342): n equals a,t,g, or c
  misc_feature (358)..(358): n equals a,t,g, or c
  misc_feature (370)..(370): n equals a,t,g, or c
ggcacgaggaaaaagcccgcttcagaaaagcttgtcattatccataggatacgatacttaattttacgcttccttatttcttaggtggtccacaattagtgaaaatctgtttgcaaccactggttatcctggcaaaatggcaagccagtttcaaattcatcatttaggacaccctcagcccatcctcatgggttctgtagccgttggatctggactgtcctggcatcgaactctccctctgtgtgtaattggnagggagaccacaagctgttgttttgggtgactgaagtataaagtgttttcnagtaccttagattcacaaactttgtntttttagtacanatttggaagaattccnatagtaccacantttggaag

SEQ ID NO: 2695 - DNA, 428 bp, Homo sapiens
  misc_feature (176)..(176): n equals a,t,g, or c
  misc_feature (304)..(304): n equals a,t,g, or c
agagagagagagagagagaacagtctcgagtttttttttttttttttaaatgttaagattttatttacaaagcttttttgttgtacagaaagtaaaaatgctgttacaatctcagtgtaactggtagccacagacggttgactcaccaatcacagctatccacgctacagcaagantcttacacaaaaacctaacaacgcttacaatttttttggggtgaagtccacaagcttggtggtagattaccaagagggactacatggaaggaaggcggaatgtcacaggaactattctttggctcttngggtgggtgggtgtcctggggtttgtatcacagctaccttttttttttttttaaacagctacaaaatccatgagcagtccaaccaatactgaacagttctgtttctgcaggtcatctggggtct

SEQ ID NO: 2696 - DNA, 362 bp, Homo sapiens
  misc_feature (7)..(7): n equals a,t,g, or c
  misc_feature (24)..(24): n equals a,t,g, or c
  misc_feature (27)..(27): n equals a,t,g, or c
  misc_feature (45)..(45): n equals a,t,g, or c
  misc_feature (64)..(64): n equals a,t,g, or c
  misc_feature (298)..(298): n equals a,t,g, or c
  misc_feature (360)..(362): n equals a,t,g, or c
gtccggncacttatagggaaagcnggntacgccgtgcaggtaccnggtccgggaattcccgggntcgacccacgcgtccgcttcttttagtcaggctttctgaacattgagatatcctgaacttagagctcttcaatcctaagattttcatgaaaagcctctcacttgaacccaaaccagagtactcttactgcctcttttctaaatgttcaggaaaagcattgccagttcagtcttttcaaaatgagggagaaacatttgcctgccttgtaataacaagactcagtgcttatttttnaaactgcattttaaaaattggatagtataataacaataaggagtaagccaccttttataggnnn

SEQ ID NO: 2697 - DNA, 424 bp, Homo sapiens
  misc_feature (377)..(377): n equals a,t,g, or c
aaggagtctaacacgtgcgcgagtcgggggctcgcacgaaagccgccgtggcgcaatgaaggtgaaggccggcgcgctcgccggccgaggtgggatcccgaggcctctccagtccgccgagggcgcaccaccggcccgtctcgcccgccgcgccggggaggtggagcacgagcgcacgtgttaggacccgaaagatggtgaactatgcctgggcagggcgaacagaggaaactctggtggaggtccgtagcggtcctgacgtgcaaatcggtcgtccgacctgggtataggggcgaaagactaatcgaaccatctagtagctggttccctccgaagtttccctcaggatagctggcgctctcgcagacccgacgcanccccgccacgcattttatccggtaaagcgaatgattagaggtcttgg

SEQ ID NO: 2698 - DNA, 291 bp, Homo sapiens
  misc_feature (1)..(1): n equals a,t,g, or c
  misc_feature (3)..(3): n equals a,t,g, or c
  misc_feature (62)..(62): n equals a,t,g, or c
  misc_feature (80)..(80): n equals a,t,g, or c
  misc_feature (170)..(170): n equals a,t,g, or c
  misc_feature (178)..(178): n equals a,t,g, or c
  misc_feature (259)..(259): n equals a,t,g, or c
  misc_feature (277)..(277): n equals a,t,g, or c
  misc_feature (289)..(289): n equals a,t,g, or c
nancgagtggttatcttgcggtaagattatggatgatatgtatgtttttttcttcgtatttnctaccttaaacaaaaagntagaaaatatgttttaaaaagttatggatcatttgtttaactttaaaaagcagaaacaaaaccagaattaaccccaaaacatgttgattnagtcactnctatgtcactgtttggcataactctccttttcatgtcacatattcttgtcggttctagtgattgatcaaaggacacctctncactttcccttgtccctngggcaccctgtntt

SEQ ID NO: 2699 - DNA, 282 bp, Homo sapiens
  misc_feature (10)..(10): n equals a,t,g, or c
  misc_feature (26)..(26): n equals a,t,g, or c
  misc_feature (245)..(245): n equals a,t,g, or c
  misc_feature (253)..(253): n equals a,t,g, or c
  misc_feature (271)..(271): n equals a,t,g, or c
aattcggcanaggattggagtaaggnttgtattttgagggacatgaatgtccaaagtttggaccatgaagatgatagaatcccaaggaatagctgaattttaaaaggctttccccccaaaaatgggcatatatatagtagtaataattgctactgtgtacatttgttttaaaaaatcctagtgcttgtgcaagtgtaatgaattttgccttatgacatgactttgtggtgactatgcaatctgtncattgttncaaaaagttacacagtgncaaaggaacat

SEQ ID NO: 2700 - DNA, 504 bp, Homo sapiens
  misc_feature (64)..(64): n equals a,t,g, or c
  misc_feature (207)..(207): n equals a,t,g, or c
  misc_feature (229)..(229): n equals a,t,g, or c
  misc_feature (234)..(234): n equals a,t,g, or c
  misc_feature (258)..(258): n equals a,t,g, or c
  misc_feature (264)..(265): n equals a,t,g, or c
  misc_feature (290)..(291): n equals a,t,g, or c
  misc_feature (308)..(308): n equals a,t,g, or c
  misc_feature (321)..(321): n equals a,t,g, or c
  misc_feature (340)..(340): n equals a,t,g, or c
  misc_feature (344)..(344): n equals a,t,g, or c
  misc_feature (349)..(349): n equals a,t,g, or c
  misc_feature (352)..(354): n equals a,t,g, or c
  misc_feature (357)..(357): n equals a,t,g, or c
  misc_feature (359)..(359): n equals a,t,g, or c
  misc_feature (362)..(362): n equals a,t,g, or c
  misc_feature (365)..(365): n equals a,t,g, or c
  misc_feature (369)..(369): n equals a,t,g, or c
  misc_feature (376)..(376): n equals a,t,g, or c
  misc_feature (378)..(378): n equals a,t,g, or c
  misc_feature (385)..(385): n equals a,t,g, or c
  misc_feature (389)..(390): n equals a,t,g, or c
  misc_feature (397)..(397): n equals a,t,g, or c
  misc_feature (419)..(419): n equals a,t,g, or c
  misc_feature (426)..(426): n equals a,t,g, or c
  misc_feature (428)..(429): n equals a,t,g, or c
  misc_feature (432)..(432): n equals a,t,g, or c
  misc_feature (436)..(436): n equals a,t,g, or c
  misc_feature (439)..(440): n equals a,t,g, or c
  misc_feature (445)..(445): n equals a,t,g, or c
  misc_feature (448)..(448): n equals a,t,g, or c
  misc_feature (456)..(456): n equals a,t,g, or c
  misc_feature (462)..(462): n equals a,t,g, or c
  misc_feature (468)..(468): n equals a,t,g, or c
  misc_feature (472)..(472): n equals a,t,g, or c
  misc_feature (482)..(483): n equals a,t,g, or c
  misc_feature (485)..(485): n equals a,t,g, or c
  misc_feature (488)..(488): n equals a,t,g, or c
  misc_feature (495)..(495): n equals a,t,g, or c
  misc_feature (498)..(499): n equals a,t,g, or c
aattcggcacaggcgcaatctgcaagtcccaggtagccgactcgaggaagaagcaggcccggtnctgctgcagtgcccatcaccaccacgaactctctcagcgtcttctgttgctccgctgccgtcttcatcccatgcgcctccccacatccactactttcttatcatttctaaagcatccttgagtgggacttttgtctttctccngagaggggagcttagcgcttgnggttnttgaggatggtttaatagaggggnatgtgnntagctggaacccaaactcttgtgtnnttggtgtgacccttgtnttacacaatgttngtctatggtggattggttncacngaggnttnnngtntnatnagntttnaaattgntnattgtgntagnngaagttncaaaagtgtttttgaaggtaancagtaangnnggnttanaannggcanttntgtgacgngagagngtgttnttgngggggagggnntntgnatttttnggnnataaa

SEQ ID NO: 2701 - DNA, 502 bp, Homo sapiens
  misc_feature (246)..(246): n equals a,t,g, or c
  misc_feature (319)..(319): n equals a,t,g, or c
  misc_feature (336)..(337): n equals a,t,g, or c
  misc_feature (370)..(370): n equals a,t,g, or c
  misc_feature (373)..(373): n equals a,t,g, or c
  misc_feature (376)..(376): n equals a,t,g, or c
  misc_feature (396)..(396): n equals a,t,g, or c
  misc_feature (400)..(400): n equals a,t,g, or c
  misc_feature (420)..(420): n equals a,t,g, or c
  misc_feature (428)..(428): n equals a,t,g, or c
  misc_feature (438)..(438): n equals a,t,g, or c
  misc_feature (440)..(440): n equals a,t,g, or c
  misc_feature (451)..(451): n equals a,t,g, or c
  misc_feature (454)..(454): n equals a,t,g, or c
  misc_feature (457)..(457): n equals a,t,g, or c
  misc_feature (466)..(466): n equals a,t,g, or c
  misc_feature (470)..(470): n equals a,t,g, or c
  misc_feature (486)..(487): n equals a,t,g, or c
aattcggacgagaaaaaatagccctcttaggaaaagacataaaaagtgaacttacgttgctagagagaagcttgcacaccatcataagataaaaaacaggcctctggctccaccgtctcattgaagtgaatgctgtttatcctccccactaatctgcactcctcacatgggatcacagcccagacaacatggcagacagagaggcagatgcagagctgcactgactcagtgggaccagctggggtnggtcatttaaacagaccactcctgccaaacagcctgcggtgggtggaacaggaaggacttccttggcctcgtncacatgggagaaaaganntttttttttcccggagacatgttatagttggantanttnattacattattttgggttgnccantttttttaaaaaacagttancgggtttnaaaaatttananaaaatgggggnganttngtaaggttngggncatttgattatttcannaggtttaacccatgg

SEQ ID NO: 2702 - DNA, 502 bp, Homo sapiens
  misc_feature (10)..(10): n equals a,t,g, or c
  misc_feature (14)..(14): n equals a,t,g, or c
  misc_feature (272)..(272): n equals a,t,g, or c
  misc_feature (290)..(290): n equals a,t,g, or c
  misc_feature (310)..(310): n equals a,t,g, or c
  misc_feature (313)..(313): n equals a,t,g, or c
  misc_feature (318)..(318): n equals a,t,g, or c
  misc_feature (324)..(324): n equals a,t,g, or c
  misc_feature (350)..(350): n equals a,t,g, or c
  misc_feature (354)..(355): n equals a,t,g, or c
  misc_feature (366)..(366): n equals a,t,g, or c
  misc_feature (368)..(371): n equals a,t,g, or c
  misc_feature (394)..(395): n equals a,t,g, or c
  misc_feature (401)..(401): n equals a,t,g, or c
  misc_feature (406)..(406): n equals a,t,g, or c
  misc_feature (408)..(409): n equals a,t,g, or c
  misc_feature (427)..(428): n equals a,t,g, or c
  misc_feature (430)..(430): n equals a,t,g, or c
  misc_feature (440)..(440): n equals a,t,g, or c
  misc_feature (448)..(448): n equals a,t,g, or c
  misc_feature (452)..(452): n equals a,t,g, or c
  misc_feature (455)..(455): n equals a,t,g, or c
  misc_feature (463)..(463): n equals a,t,g, or c
  misc_feature (467)..(467): n equals a,t,g, or c
  misc_feature (472)..(472): n equals a,t,g, or c
  misc_feature (481)..(481): n equals a,t,g, or c
  misc_feature (488)..(488): n equals a,t,g, or c
  misc_feature (491)..(491): n equals a,t,g, or c
  misc_feature (500)..(500): n equals a,t,g, or c
aattcggcanagtnttcaaagcaagtatcatattaggagaattctgtttggatctcccatggatatggggcatgccatttattttcccaattataaaagagttttctcagtttgtatcttgggctttttaccttcaggtttttttttaatgtgattatcttcactctctggatatccaattttgttccttttaagataagagacagaaggcacatacagttggatttgttgatgacattttgttggacaacatttcttcatgaatgtttttnggcattgggtgattaggntcctacagaacaatattttncanatggncacacngttttaaaagcatgaacaacaaagtnatcnntggaaatacgnannnncaattatgggttttgtacatttnnaggttnccctngnnggggccatttgaataatnnangggttatatnttggggcntggnctngggggagncttncggtngcggacggnggccaanccnttttcgggntt

SEQ ID NO: 2703 - DNA, 498 bp, Homo sapiens
  misc_feature (10)..(10): n equals a,t,g, or c
  misc_feature (13)..(13): n equals a,t,g, or c
  misc_feature (272)..(272): n equals a,t,g, or c
  misc_feature (313)..(313): n equals a,t,g, or c
  misc_feature (330)..(330): n equals a,t,g, or c
  misc_feature (341)..(342): n equals a,t,g, or c
  misc_feature (351)..(351): n equals a,t,g, or c
  misc_feature (362)..(362): n equals a,t,g, or c
  misc_feature (370)..(370): n equals a,t,g, or c
  misc_feature (376)..(377): n equals a,t,g, or c
  misc_feature (387)..(387): n equals a,t,g, or c
  misc_feature (397)..(397): n equals a,t,g, or c
  misc_feature (407)..(407): n equals a,t,g, or c
  misc_feature (411)..(411): n equals a,t,g, or c
  misc_feature (426)..(426): n equals a,t,g, or c
  misc_feature (437)..(437): n equals a,t,g, or c
  misc_feature (439)..(439): n equals a,t,g, or c
  misc_feature (444)..(444): n equals a,t,g, or c
  misc_feature (451)..(451): n equals a,t,g, or c
  misc_feature (454)..(454): n equals a,t,g, or c
  misc_feature (459)..(459): n equals a,t,g, or c
  misc_feature (465)..(466): n equals a,t,g, or c
  misc_feature (472)..(472): n equals a,t,g, or c
  misc_feature (475)..(476): n equals a,t,g, or c
  misc_feature (478)..(478): n equals a,t,g, or c
aattcggcanagncttaaacaaaattccaagaataattcttgctttaggccttgcctaacgcaggaactcacagtgtcaccagaacccggtttctttcagttccgttcttacccatgttagttccttttgcaatagactctggcctaataagtggcaagacagctttatgcaacttcttatatcttctcagagtgcagtctggtggggaaagactgagggacccaggattctcatggtgtttcatagggtctgactgggtgatgtccccgtnttatgaaaccaattgttgtgggttgcaaaaatgtgggcagnttcccttggattcacanggattttcaanntgttaggangcaagtgggtngcaacatngaaggnnccttgggggncccagagttngggaaggggnggantttcccaaaggaaantttgggggttntntgccnagggggnggnatttntggggnngggaanaannangggaacctttttttttttgg

SEQ ID NO: 2704 - DNA, 494 bp, Homo sapiens
  misc_feature (167)..(167): n equals a,t,g, or c
  misc_feature (253)..(254): n equals a,t,g, or c
  misc_feature (274)..(274): n equals a,t,g, or c
  misc_feature (288)..(289): n equals a,t,g, or c
  misc_feature (297)..(297): n equals a,t,g, or c
  misc_feature (315)..(315): n equals a,t,g, or c
  misc_feature (319)..(319): n equals a,t,g, or c
  misc_feature (344)..(344): n equals a,t,g, or c
  misc_feature (356)..(357): n equals a,t,g, or c
  misc_feature (369)..(369): n equals a,t,g, or c
  misc_feature (387)..(387): n equals a,t,g, or c
  misc_feature (422)..(422): n equals a,t,g, or c
  misc_feature (432)..(432): n equals a,t,g, or c
  misc_feature (452)..(452): n equals a,t,g, or c
  misc_feature (475)..(475): n equals a,t,g, or c
  misc_feature (477)..(477): n equals a,t,g, or c
  misc_feature (479)..(479): n equals a,t,g, or c
  misc_feature (488)..(488): n equals a,t,g, or c
aattcggcacgagttcatgtttgccttctttaatttggaaaacagctgattgttatattgatgagattaatttgcttaggttagacatgggagtgtttttaatttgctaccgtctgcttgatcccagatcagagtctaactttttgcattagctcctctgactgggnattgaccaactttgtgaaataaaagcctgcccgctgctgcctctgagactcagttattagtacccatggaagggctttaggcaggnnagctcttcagggaactcagnggagagtcggtggnnatcatggntgatggcattcagtgggncagntagcccaggcacagggtgtttaaantacaaacatttnntcacccatatgngggaggttaaaaaaagtnaatttcgaaaacatttttttaatggccttaacttngggggttttnttttttaaaaaggggaacanggggggttttggaaacaatgggnantngttgggggnaaaaaa

SEQ ID NO: 2705 - DNA, 240 bp, Homo sapiens
  misc_feature (1)..(1): n equals a,t,g, or c
  misc_feature (5)..(6): n equals a,t,g, or c
  misc_feature (75)..(75): n equals a,t,g, or c
  misc_feature (220)..(220): n equals a,t,g, or c
  misc_feature (224)..(225): n equals a,t,g, or c
nagtnnacttggtagctgacttgagccatgcccttagaatcaggctctataaatacatatgggctaagccctcanaggccatgggaatgtggaaacgatatgttgggtcaagtgtagagtatcagtccatgatgagaactttttctagaccctcttctgggctagaatttggttttcagtgatagagacattctaagaatttgtggagctagaattaagnaagnngtttatattgggctt

SEQ ID NO: 2706 - DNA, 260 bp, Homo sapiens
  misc_feature (1)..(1): n equals a,t,g, or c
  misc_feature (41)..(41): n equals a,t,g, or c
  misc_feature (54)..(54): n equals a,t,g, or c
  misc_feature (56)..(56): n equals a,t,g, or c
  misc_feature (105)..(105): n equals a,t,g, or c
  misc_feature (209)..(210): n equals a,t,g, or c
  misc_feature (227)..(227): n equals a,t,g, or c
naggtcttctccccctatagcaggctagcttgggttccttnacacagtggtttnanttttccaagtgcagcaagagagcaagcaccaatgtgcaagtgaactttnaaagcttctgccttggcatcatgtttgcaactgtcctgttgaaccaaagcaaaagtttcatgaaccagcctaggttccaggggttggaagaataaacacctgtnnaaatggggggaagctgncattgttatgttggcgtgggtgtgagtggcacg

SEQ ID NO: 2707 - DNA, 140 bp, Homo sapiens
  misc_feature (73)..(73): n equals a,t,g, or c
  misc_feature (80)..(80): n equals a,t,g, or c
  misc_feature (124)..(124): n equals a,t,g, or c
aattcggcacagctgcagttgctaaaggtaaggttcaggctgtttaaccctctgttaatgaacgcaaacatgnatcaaanctgggtaggaattttacaggttattttcatttctgcccaaaggnagaaaaccatttcacc

SEQ ID NO: 2708 - DNA, 226 bp, Homo sapiens
  misc_feature (10)..(10): n equals a,t,g, or c
  misc_feature (29)..(29): n equals a,t,g, or c
  misc_feature (142)..(142): n equals a,t,g, or c
  misc_feature (200)..(200): n equals a,t,g, or c
  misc_feature (203)..(203): n equals a,t,g, or c
aattcggcanaaatcgttcagggtcccgnacattgccatcaacagctgaacagcctgcccgtgaagtggaagggctgggaagggccccgggtaaggagtgggaaatggtgagaattggggtagggggagctaagaggggttncagcccaaggtgtacttaacccagcacctagagaaacgccggagtcttaatgggtgtntcnataagatatctttcgactcttgg

SEQ ID NO: 2709 - DNA, 502 bp, Homo sapiens
  misc_feature (10)..(10): n equals a,t,g, or c
  misc_feature (139)..(139): n equals a,t,g, or c
  misc_feature (237)..(237): n equals a,t,g, or c
  misc_feature (265)..(265): n equals a,t,g, or c
  misc_feature (275)..(275): n equals a,t,g, or c
  misc_feature (279)..(279): n equals a,t,g, or c
  misc_feature (294)..(294): n equals a,t,g, or c
  misc_feature (315)..(315): n equals a,t,g, or c
  misc_feature (338)..(339): n equals a,t,g, or c
  misc_feature (348)..(349): n equals a,t,g, or c
  misc_feature (353)..(353): n equals a,t,g, or c
  misc_feature (355)..(355): n equals a,t,g, or c
  misc_feature (358)..(358): n equals a,t,g, or c
  misc_feature (367)..(367): n equals a,t,g, or c
  misc_feature (376)..(376): n equals a,t,g, or c
  misc_feature (380)..(380): n equals a,t,g, or c
  misc_feature (382)..(382): n equals a,t,g, or c
  misc_feature (395)..(395): n equals a,t,g, or c
  misc_feature (401)..(401): n equals a,t,g, or c
  misc_feature (406)..(406): n equals a,t,g, or c
  misc_feature (409)..(409): n equals a,t,g, or c
  misc_feature (414)..(414): n equals a,t,g, or c
  misc_feature (419)..(419): n equals a,t,g, or c
  misc_feature (423)..(423): n equals a,t,g, or c
  misc_feature (426)..(426): n equals a,t,g, or c
  misc_feature (432)..(432): n equals a,t,g, or c
  misc_feature (438)..(438): n equals a,t,g, or c
  misc_feature (445)..(445): n equals a,t,g, or c
  misc_feature (451)..(451): n equals a,t,g, or c
  misc_feature (454)..(454): n equals a,t,g, or c
  misc_feature (466)..(466): n equals a,t,g, or c
  misc_feature (469)..(469): n equals a,t,g, or c
  misc_feature (473)..(476): n equals a,t,g, or c
  misc_feature (484)..(484): n equals a,t,g, or c
  misc_feature (491)..(491): n equals a,t,g, or c
  misc_feature (493)..(495): n equals a,t,g, or c
  misc_feature (499)..(499): n equals a,t,g, or c
aattcggcanaggcttccctttagatatgtctgttccaatgatcctaaaaggtccagattgccctgagcgagtaggcatcaaaacaatgtctcctctgaaataaactcaggcattccacccaggaacatggccaaccgncgtaaccacaaggaatggggaccacagggaggaggttggagtaatgatgagcttaccacattgatcattccatcaaagtgggtacatatttaccaggnaggtggacttttactgctatttgcaagnatgttgaagnttgntgtggggtgtttcantggaaagtgcccaggagagancagttagtatgtggaccctgttnnttttggggnncttngnggntgggggagngcacttganccantntttgggtaaggcntaattncaagngtnggggntttantgtnttntaaggntttgtntctactntttttnggnatacagggtttnatngaannnnggttatgnttcaatncnnntttnaag

SEQ ID NO: 2710 - DNA, 494 bp, Homo sapiens
  misc_feature (10)..(10): n equals a,t,g, or c
  misc_feature (12)..(12): n equals a,t,g, or c
  misc_feature (73)..(73): n equals a,t,g, or c
  misc_feature (112)..(112): n equals a,t,g, or c
  misc_feature (114)..(114): n equals a,t,g, or c
  misc_feature (168)..(168): n equals a,t,g, or c
  misc_feature (178)..(178): n equals a,t,g, or c
  misc_feature (196)..(196): n equals a,t,g, or c
  misc_feature (215)..(216): n equals a,t,g, or c
  misc_feature (220)..(220): n equals a,t,g, or c
  misc_feature (232)..(232): n equals a,t,g, or c
  misc_feature (303)..(303): n equals a,t,g, or c
  misc_feature (310)..(310): n equals a,t,g, or c
  misc_feature (318)..(318): n equals a,t,g, or c
  misc_feature (320)..(320): n equals a,t,g, or c
  misc_feature (331)..(331): n equals a,t,g, or c
  misc_feature (353)..(353): n equals a,t,g, or c
  misc_feature (355)..(355): n equals a,t,g, or c
  misc_feature (359)..(359): n equals a,t,g, or c
  misc_feature (363)..(363): n equals a,t,g, or c
  misc_feature (385)..(385): n equals a,t,g, or c
  misc_feature (393)..(393): n equals a,t,g, or c
  misc_feature (397)..(397): n equals a,t,g, or c
  misc_feature (399)..(399): n equals a,t,g, or c
  misc_feature (405)..(405): n equals a,t,g, or c
  misc_feature (407)..(407): n equals a,t,g, or c
  misc_feature (412)..(412): n equals a,t,g, or c
  misc_feature (426)..(426): n equals a,t,g, or c
  misc_feature (429)..(429): n equals a,t,g, or c
  misc_feature (451)..(451): n equals a,t,g, or c
  misc_feature (460)..(461): n equals a,t,g, or c
  misc_feature (469)..(469): n equals a,t,g, or c
  misc_feature (476)..(476): n equals a,t,g, or c
  misc_feature (478)..(479): n equals a,t,g, or c
  misc_feature (481)..(482): n equals a,t,g, or c
  misc_feature (485)..(485): n equals a,t,g, or c
  misc_feature (492)..(492): n equals a,t,g, or c
  misc_feature (494)..(494): n equals a,t,g, or c
aattcggcanancccacccccaccatcaccaccatcaccatccaggcttaaaagcccctggctacccctcttnaccagtaactaccgcctctggtactaccttgcggttgcnancactgcaacctgaaggaggatgaacgatgaggatgaaaggaagatgaatgatgnacttatctgnagggcttatgaacagctncagaaaagggaactttctnnactncattgaatgatnccttatgaatgccagctaaacttcagaactcccagtgaaagattgcttgatggattgagaggcccccaggnatggggnccccattngntttgggggggnttgttgtgattttcaaattttnantttngggncctttgggatttatgaggaaangtggggangggngncagggngnggttnttggggggaagttnccnggattttccagggagggttganaaaggggannaaaaaagnaaaaaangnntnnccntagtttntn

SEQ ID NO: 2711 - DNA, 493 bp, Homo sapiens
  misc_feature (195)..(195): n equals a,t,g, or c
  misc_feature (227)..(227): n equals a,t,g, or c
  misc_feature (247)..(248): n equals a,t,g, or c
  misc_feature (251)..(251): n equals a,t,g, or c
  misc_feature (294)..(295): n equals a,t,g, or c
  misc_feature (320)..(320): n equals a,t,g, or c
  misc_feature (359)..(359): n equals a,t,g, or c
  misc_feature (363)..(364): n equals a,t,g, or c
  misc_feature (379)..(379): n equals a,t,g, or c
  misc_feature (383)..(384): n equals a,t,g, or c
  misc_feature (395)..(395): n equals a,t,g, or c
  misc_feature (398)..(398): n equals a,t,g, or c
  misc_feature (403)..(403): n equals a,t,g, or c
  misc_feature (414)..(414): n equals a,t,g, or c
  misc_feature (424)..(424): n equals a,t,g, or c
  misc_feature (429)..(429): n equals a,t,g, or c
  misc_feature (432)..(432): n equals a,t,g, or c
  misc_feature (436)..(436): n equals a,t,g, or c
  misc_feature (439)..(439): n equals a,t,g, or c
  misc_feature (450)..(450): n equals a,t,g, or c
  misc_feature (452)..(452): n equals a,t,g, or c
  misc_feature (458)..(458): n equals a,t,g, or c
  misc_feature (460)..(460): n equals a,t,g, or c
  misc_feature (462)..(462): n equals a,t,g, or c
  misc_feature (464)..(464): n equals a,t,g, or c
  misc_feature (481)..(481): n equals a,t,g, or c
  misc_feature (491)..(491): n equals a,t,g, or c
aattcggcacgagggaaaaatatttgttaagaagtatctctttggagccaagccacctgtcttggtttctttctactaagagccataaagtatagaaatacttctagttgttaagtgcttatatttgtacctaggatttagtcacacgcttttgaagaaaacatctagtatgttatgaatcagctattcctgagnagcttggttgttaatctatgatttctatttcntaagtggtagtcatctttgnntgnataagactaaaggatttctccacaggtttaaaaattttaatgnntacttttaaggggtaaaaattatgnaggttattggtttctgggttggggttttcctctaggctnaatnncatgatccccaaagnggtnnccaaaatgttnganttttncggtggccagnttggaattgnggggntgngggnccnggtacaacccncncggtangnancnccattgccctgtttttntccccggggnct

SEQ ID NO: 2712 - DNA, 500 bp, Homo sapiens
  misc_feature (10)..(10): n equals a,t,g, or c
  misc_feature (171)..(171): n equals a,t,g, or c
  misc_feature (281)..(281): n equals a,t,g, or c
  misc_feature (290)..(290): n equals a,t,g, or c
  misc_feature (292)..(292): n equals a,t,g, or c
  misc_feature (308)..(308): n equals a,t,g, or c
  misc_feature (311)..(311): n equals a,t,g, or c
  misc_feature (327)..(327): n equals a,t,g, or c
  misc_feature (338)..(338): n equals a,t,g, or c
  misc_feature (340)..(341): n equals a,t,g, or c
  misc_feature (345)..(345): n equals a,t,g, or c
  misc_feature (368)..(368): n equals a,t,g, or c
  misc_feature (370)..(370): n equals a,t,g, or c
  misc_feature (373)..(374): n equals a,t,g, or c
  misc_feature (384)..(384): n equals a,t,g, or c
  misc_feature (388)..(388): n equals a,t,g, or c
  misc_feature (390)..(390): n equals a,t,g, or c
  misc_feature (394)..(394): n equals a,t,g, or c
  misc_feature (403)..(403): n equals a,t,g, or c
  misc_feature (419)..(419): n equals a,t,g, or c
  misc_feature (421)..(421): n equals a,t,g, or c
  misc_feature (426)..(426): n equals a,t,g, or c
  misc_feature (431)..(431): n equals a,t,g, or c
  misc_feature (433)..(433): n equals a,t,g, or c
  misc_feature (435)..(435): n equals a,t,g, or c
  misc_feature (446)..(447): n equals a,t,g, or c
  misc_feature (459)..(459): n equals a,t,g, or c
  misc_feature (466)..(467): n equals a,t,g, or c
  misc_feature (497)..(498): n equals a,t,g, or c
  misc_feature (500)..(500): n equals a,t,g, or c
aattcggcanagactttaatagaataaggattgtggccacatttaataattgccagaaatatgtgttcattaagctttttaagaaatgtgatcgaaaaatgctgatgatacattgtgtttaatagctttaataaaaaactgataaagcatctaatacatctaatgactgtnggatttcctaaatcttttaagctgaaggagtttacttttgacaaaaatcctcattgaaaaagaatcttccggtaaaaacattgaactgaagatttgcataaatgcatggngtattactntntattaagttaaacttntgntcttttagaggcgtanaagtcagtctntnntctnacaatgaattggtttgggccttnanggnntttattaatnggtngngccnaccgtttanttgaaaggggcggttngncacgnggttntngnccggattggtnnaggtgggcttgnttagggnnggggaacagggtttttgcccttgggggggnnan

SEQ ID NO: 2713 - DNA, 502 bp, Homo sapiens
  misc_feature (17)..(17): n equals a,t,g, or c
  misc_feature (19)..(19): n equals a,t,g, or c
  misc_feature (115)..(115): n equals a,t,g, or c
  misc_feature (130)..(130): n equals a,t,g, or c
  misc_feature (189)..(189): n equals a,t,g, or c
  misc_feature (197)..(197): n equals a,t,g, or c
  misc_feature (243)..(244): n equals a,t,g, or c
  misc_feature (250)..(250): n equals a,t,g, or c
  misc_feature (256)..(256): n equals a,t,g, or c
  misc_feature (263)..(263): n equals a,t,g, or c
  misc_feature (269)..(269): n equals a,t,g, or c
  misc_feature (273)..(273): n equals a,t,g, or c
  misc_feature (276)..(276): n equals a,t,g, or c
  misc_feature (283)..(283): n equals a,t,g, or c
  misc_feature (308)..(308): n equals a,t,g, or c
  misc_feature (340)..(340): n equals a,t,g, or c
  misc_feature (352)..(352): n equals a,t,g, or c
  misc_feature (357)..(357): n equals a,t,g, or c
  misc_feature (364)..(364): n equals a,t,g, or c
  misc_feature (371)..(371): n equals a,t,g, or c
  misc_feature (377)..(377): n equals a,t,g, or c
  misc_feature (381)..(381): n equals a,t,g, or c
  misc_feature (383)..(383): n equals a,t,g, or c
  misc_feature (388)..(388): n equals a,t,g, or c
  misc_feature (398)..(398): n equals a,t,g, or c
  misc_feature (400)..(400): n equals a,t,g, or c
  misc_feature (404)..(404): n equals a,t,g, or c
  misc_feature (407)..(407): n equals a,t,g, or c
  misc_feature (412)..(413): n equals a,t,g, or c
  misc_feature (436)..(436): n equals a,t,g, or c
  misc_feature (452)..(452): n equals a,t,g, or c
  misc_feature (454)..(455): n equals a,t,g, or c
  misc_feature (464)..(464): n equals a,t,g, or c
  misc_feature (466)..(466): n equals a,t,g, or c
  misc_feature (470)..(470): n equals a,t,g, or c
  misc_feature (472)..(472): n equals a,t,g, or c
  misc_feature (477)..(478): n equals a,t,g, or c
  misc_feature (480)..(480): n equals a,t,g, or c
  misc_feature (488)..(488): n equals a,t,g, or c
  misc_feature (502)..(502): n equals a,t,g, or c
aattcggcacaggactntntccagccttatttttgctttctttgatttctgagttactcagaaactatttcagggcagtttaagaaggctgtacagtttagtgtaggtatatggnacatctttttttgtnttgtactatttcttttggacatatgtttgtgaagctaattaaacttttctgtttcactnggtcactngaggttcataggtttttctcttaaaagacagaataggactttgggnntgggtncactgnccacttngtttgnagtnatnttagggnagtgctccacagaaaggtctttttnatggtggggtcccaaaaaaatttaccccggtntttgatgttgcnagtgngcttttnagaatgncttttnacangngagtnggactgtttnanaggnaanggggnntgttggaagcaacaggaggcatngtgagtagaggacccngnnttttttagntngggngnaaacnnanggttcagnaagaggattcaggn

SEQ ID NO: 2714 - DNA, 279 bp, Homo sapiens
  misc_feature (62)..(62): n equals a,t,g, or c
  misc_feature (96)..(96): n equals a,t,g, or c
  misc_feature (118)..(118): n equals a,t,g, or c
  misc_feature (144)..(144): n equals a,t,g, or c
  misc_feature (209)..(209): n equals a,t,g, or c
  misc_feature (239)..(239): n equals a,t,g, or c
  misc_feature (246)..(246): n equals a,t,g, or c
aattcggcacagggaactccaccagcaaccctcacccaggaccgcagctctggagacgccanctaggccgagagctggccagctccccaagcacancaaagcctggagacgctccagnttgggctgggcccacaaaggggccanagcctcagggaagggctccaggagcagggtttccaagggaagccactttccctcttgtccacggnccaggcattgatgccccttttgggcagcanccagggncttccaaagtcgggtaagggtggggcatggggg

SEQ ID NO: 2715 - DNA, 496 bp, Homo sapiens
  misc_feature (9)..(9): n equals a,t,g, or c
  misc_feature (55)..(55): n equals a,t,g, or c
  misc_feature (257)..(257): n equals a,t,g, or c
  misc_feature (270)..(270): n equals a,t,g, or c
  misc_feature (283)..(283): n equals a,t,g, or c
  misc_feature (311)..(311): n equals a,t,g, or c
  misc_feature (318)..(318): n equals a,t,g, or c
  misc_feature (323)..(323): n equals a,t,g, or c
  misc_feature (333)..(333): n equals a,t,g, or c
  misc_feature (346)..(346): n equals a,t,g, or c
  misc_feature (350)..(350): n equals a,t,g, or c
  misc_feature (366)..(366): n equals a,t,g, or c
  misc_feature (403)..(403): n equals a,t,g, or c
  misc_feature (416)..(416): n equals a,t,g, or c
  misc_feature (418)..(418): n equals a,t,g, or c
  misc_feature (420)..(420): n equals a,t,g, or c
  misc_feature (425)..(425): n equals a,t,g, or c
  misc_feature (428)..(429): n equals a,t,g, or c
  misc_feature (433)..(433): n equals a,t,g, or c
  misc_feature (443)..(443): n equals a,t,g, or c
  misc_feature (446)..(446): n equals a,t,g, or c
  misc_feature (454)..(454): n equals a,t,g, or c
  misc_feature (458)..(458): n equals a,t,g, or c
  misc_feature (460)..(460): n equals a,t,g, or c
  misc_feature (465)..(465): n equals a,t,g, or c
  misc_feature (469)..(469): n equals a,t,g, or c
  misc_feature (473)..(473): n equals a,t,g, or c
  misc_feature (479)..(479): n equals a,t,g, or c
  misc_feature (485)..(485): n equals a,t,g, or c
  misc_feature (488)..(488): n equals a,t,g, or c
attcggcanagcttttcttcaatgtccagtatcacctggggctcctatgctatgntggcagtttgagctgctggagctgaggtttgggccccaggacccatcagtcctgtgggaccatctgtgaagactggctctgagacccagtgacctccatatctggggacagttctgtctccactggtttttgccactggatgggacagggttgaggtggcttcgtcttgctgcctgggcattcctctttaaaataccctggnctggccacactgntaagacccatttngcagatgaggaaaatgaaaggctaaggnaagatgnacaanttttgagggncctgtggcatcgnggcngtttttccagcccggncaaaagttgacccgatgtgaatgaaaggcccaggganttgggggaagcantngncaatnaannaggngtgtaatttnganccccaagngggncnatttncccnaatnaaaagnggtttnggnggtaaaaa

SEQ ID NO: 2716 - DNA, 501 bp, Homo sapiens
  misc_feature (100)..(100): n equals a,t,g, or c
  misc_feature (237)..(237): n equals a,t,g, or c
  misc_feature (277)..(277): n equals a,t,g, or c
  misc_feature (297)..(297): n equals a,t,g, or c
  misc_feature (310)..(310): n equals a,t,g, or c
  misc_feature (315)..(315): n equals a,t,g, or c
  misc_feature (319)..(320): n equals a,t,g, or c
  misc_feature (322)..(322): n equals a,t,g, or c
  misc_feature (338)..(338): n equals a,t,g, or c
  misc_feature (346)..(347): n equals a,t,g, or c
  misc_feature (358)..(358): n equals a,t,g, or c
  misc_feature (361)..(361): n equals a,t,g, or c
  misc_feature (376)..(376): n equals a,t,g, or c
  misc_feature (380)..(380): n equals a,t,g, or c
  misc_feature (389)..(389): n equals a,t,g, or c
  misc_feature (398)..(398): n equals a,t,g, or c
  misc_feature (409)..(409): n equals a,t,g, or c
  misc_feature (416)..(417): n equals a,t,g, or c
  misc_feature (436)..(436): n equals a,t,g, or c
  misc_feature (444)..(444): n equals a,t,g, or c
  misc_feature (461)..(461): n equals a,t,g, or c
  misc_feature (463)..(463): n equals a,t,g, or c
  misc_feature (480)..(480): n equals a,t,g, or c
  misc_feature (485)..(485): n equals a,t,g, or c
  misc_feature (492)..(492): n equals a,t,g, or c
  misc_feature (498)..(498): n equals a,t,g, or c
gaattcggcacagtgaccatttctcccattcctactccattattggtattatctcataaggattgttttgtgttttgagaatttattttttcctcaaagntccctcacctatttcctccaaacagacagaattcaaagaaagaatagcccttctttcatccattatgaaatgaatttttcatttgagcatgtcattttgcttttttgttccaatggagatcaaagggatacaggttnacccccagtgttcagcagttcttttcagttctggaccttnaaagaaaggggtctggttgnaattgttgcaganttagntctnntncaggcatgtggggacnccagatgnntgggtgtttgnggnagccgagtgcttgtnatgngtaacgtgntgttttaangaacgggtggnaagagcnnggaaattgggtgttttcanaacatttngtaggcaatggcccaangntacacatttttaagggnttaanttggggnggaaantaa

SEQ ID NO: 2717 - DNA, 501 bp, Homo sapiens
  misc_feature (10)..(10): n equals a,t,g, or c
  misc_feature (198)..(198): n equals a,t,g, or c
  misc_feature (207)..(207): n equals a,t,g, or c
  misc_feature (269)..(269): n equals a,t,g, or c
  misc_feature (298)..(298): n equals a,t,g, or c
  misc_feature (314)..(314): n equals a,t,g, or c
  misc_feature (330)..(330): n equals a,t,g, or c
  misc_feature (341)..(342): n equals a,t,g, or c
  misc_feature (351)..(351): n equals a,t,g, or c
  misc_feature (354)..(354): n equals a,t,g, or c
  misc_feature (358)..(358): n equals a,t,g, or c
  misc_feature (365)..(365): n equals a,t,g, or c
  misc_feature (379)..(379): n equals a,t,g, or c
  misc_feature (401)..(401): n equals a,t,g, or c
  misc_feature (406)..(406): n equals a,t,g, or c
  misc_feature (414)..(414): n equals a,t,g, or c
  misc_feature (421)..(421): n equals a,t,g, or c
  misc_feature (430)..(430): n equals a,t,g, or c
  misc_feature (433)..(433): n equals a,t,g, or c
  misc_feature (438)..(439): n equals a,t,g, or c
  misc_feature (444)..(444): n equals a,t,g, or c
  misc_feature (453)..(455): n equals a,t,g, or c
  misc_feature (477)..(478): n equals a,t,g, or c
  misc_feature (483)..(483): n equals a,t,g, or c
  misc_feature (495)..(495): n equals a,t,g, or c
  misc_feature (497)..(497): n equals a,t,g, or c
aattcggcanaggcttgaattgatgggtttaagaatagattttaacataataaaacaaatttaactcaattctatcagtgtacaaagtaaataaaacttaatagtaatttagattaaaaaatttatagaatttgctgactgcattgtgagctaaaatatgagctaaatttatgaatgagttgtttggcttcccaaggnaacttgtgnagaactgaaaatttgaagtatcagaaaaataacagtgtgaaatcatgaaaggattctcatanaatatatctgggtttgcagtttttgaaangggcagtgtagggggnaaccttattaaatctnaaattttccanngtgtacttncgnattnttagccnctaagggaaaggtnaaattgtggttggttatacagnggttnttaatggncccaatnaaattggcngcnaaatnnggatnacccgcttnnngtttggtatgggggcaaggtcnncctgncgttccaccggnantttg

SEQ ID NO: 2718 - DNA, 498 bp, Homo sapiens
  misc_feature (10)..(10): n equals a,t,g, or c
  misc_feature (13)..(13): n equals a,t,g, or c
  misc_feature (56)..(56): n equals a,t,g, or c
  misc_feature (78)..(78): n equals a,t,g, or c
  misc_feature (285)..(285): n equals a,t,g, or c
  misc_feature (374)..(374): n equals a,t,g, or c
  misc_feature (394)..(395): n equals a,t,g, or c
  misc_feature (405)..(405): n equals a,t,g, or c
  misc_feature (407)..(407): n equals a,t,g, or c
  misc_feature (409)..(411): n equals a,t,g, or c
  misc_feature (446)..(446): n equals a,t,g, or c
  misc_feature (450)..(450): n equals a,t,g, or c
  misc_feature (476)..(476): n equals a,t,g, or c
  misc_feature (489)..(489): n equals a,t,g, or c
aattcggcanagnttcaactcttgaatcaaacacacccttattaaatgtgcttttnacatcaacagtcagtgtctgtnattcagctctgggagagagccggctctggctctgggagagagcagcactgccgaagtgaagctgatgagagctcaccagggtatgctggaaggaggaggatgagacaagggtaatttgagaagtaagaagattgatatggtaatgcacacacggctacattttacttcccatattctcttggtgtatctatagaaaacaaaaaagangcaacactatggtaagaaactaactgaagttttttcttttccattgcctaagactttgttttggacttatatagtattattaattaccnccagttaacttccacatggnntttattgtcntngnnncggtagttttggggggggctcaaaatctggaggcnttgnggatttatggatttagtggggggctnggtaccctgggtnctttggttc

SEQ ID NO: 2719 - DNA, 495 bp, Homo sapiens
  misc_feature (10)..(10): n equals a,t,g, or c
  misc_feature (19)..(19): n equals a,t,g, or c
  misc_feature (206)..(206): n equals a,t,g, or c
  misc_feature (298)..(298): n equals a,t,g, or c
  misc_feature (330)..(330): n equals a,t,g, or c
  misc_feature (335)..(335): n equals a,t,g, or c
  misc_feature (343)..(343): n equals a,t,g, or c
  misc_feature (360)..(360): n equals a,t,g, or c
  misc_feature (380)..(380): n equals a,t,g, or c
  misc_feature (392)..(392): n equals a,t,g, or c
  misc_feature (398)..(398): n equals a,t,g, or c
  misc_feature (403)..(403): n equals a,t,g, or c
  misc_feature (406)..(407): n equals a,t,g, or c
  misc_feature (414)..(414): n equals a,t,g, or c
  misc_feature (416)..(416): n equals a,t,g, or c
  misc_feature (430)..(430): n equals a,t,g, or c
  misc_feature (433)..(434): n equals a,t,g, or c
  misc_feature (442)..(443): n equals a,t,g, or c
  misc_feature (446)..(447): n equals a,t,g, or c
  misc_feature (449)..(449): n equals a,t,g, or c
  misc_feature (465)..(467): n equals a,t,g, or c
  misc_feature (473)..(473): n equals a,t,g, or c
  misc_feature (476)..(476): n equals a,t,g, or c
  misc_feature (480)..(480): n equals a,t,g, or c
  misc_feature (483)..(483): n equals a,t,g, or c
  misc_feature (489)..(489): n equals a,t,g, or c
aattcggcanagcattttnaaatcctttatgaaagctataagatctgcttctgtgtgtttgtatgtctatatgtgttacgtgtatgtaataatattttgtaaataagctcgttcttaaatcgttagtaaaatagaaatggctttacaattatccattaaatataattagatatttgcttgatttaactgtgaagcttatgtctttngttgagagtttctgggattcagggggtcttggatagaggaccatgatgaagtatggagacatgttctcagtgcctagaccagcagctaaagnccagatccaggcccattcggccccttctttcngtggnttccccgnttttgcccttcggggtntttttaggggggggttgggnccccccggtttnggcctncaaanttnngtctttngnccccatgggcttcnggnnggcccggnnttnnangttttcccgggggccnnngggttnttngggnccnaaaatntttggg

SEQ ID NO: 2720 - DNA, 497 bp, Homo sapiens
  misc_feature (10)..(10): n equals a,t,g, or c
  misc_feature (65)..(65): n equals a,t,g, or c
  misc_feature (67)..(67): n equals a,t,g, or c
  misc_feature (87)..(87): n equals a,t,g, or c
  misc_feature (181)..(181): n equals a,t,g, or c
  misc_feature (201)..(201): n equals a,t,g, or c
  misc_feature (237)..(237): n equals a,t,g, or c
  misc_feature (240)..(240): n equals a,t,g, or c
  misc_feature (242)..(242): n equals a,t,g, or c
  misc_feature (288)..(288): n equals a,t,g, or c
  misc_feature (290)..(290): n equals a,t,g, or c
  misc_feature (295)..(295): n equals a,t,g, or c
  misc_feature (306)..(306): n equals a,t,g, or c
  misc_feature (342)..(342): n equals a,t,g, or c
  misc_feature (347)..(347): n equals a,t,g, or c
  misc_feature (349)..(349): n equals a,t,g, or c
  misc_feature (353)..(356): n equals a,t,g, or c
  misc_feature (358)..(358): n equals a,t,g, or c
  misc_feature (361)..(361): n equals a,t,g, or c
  misc_feature (368)..(369): n equals a,t,g, or c
  misc_feature (372)..(374): n equals a,t,g, or c
  misc_feature (377)..(378): n equals a,t,g, or c
  misc_feature (409)..(410): n equals a,t,g, or c
  misc_feature (417)..(418): n equals a,t,g, or c
  misc_feature (426)..(426): n equals a,t,g, or c
  misc_feature (435)..(436): n equals a,t,g, or c
  misc_feature (446)..(447): n equals a,t,g, or c
  misc_feature (450)..(450): n equals a,t,g, or c
  misc_feature (454)..(455): n equals a,t,g, or c
  misc_feature (464)..(464): n equals a,t,g, or c
  misc_feature (466)..(466): n equals a,t,g, or c
  misc_feature (476)..(476): n equals a,t,g, or c
  misc_feature (487)..(487): n equals a,t,g, or c
  misc_feature (495)..(496): n equals a,t,g, or c
aattcggcanagctgcatggcaccgtcctgcggcacgtggccaatccccgcggcgctgtcacgcngnagtacaccgtagccaatgtnatctctgtcggctcggggctgctggtgagcgcggcaggcaacccgggcgggggaccgggactcccggagagcccagcaggccaaaggctttgtntcttccacagagcgtttccntgggacttgtggccctcctggcgtccagaaaccttnttngncctccattgcactgggtcctgctggcattagctctggtgaacctgntnttgtncttgcctgttncctggggcttcttttgttgtgttaattattgtgggncaagntnggcnnnngnttnattgttnnatnnnaannaggattttttggatctttggtaacaatgggnngaggggnncgggaaanattgatttnncctttttaannccnaaannattttttgntnaaaatttggntttttgggaancttttttnnt

SEQ ID NO: 2721 - DNA, 194 bp, Homo sapiens
  misc_feature (1)..(1): n equals a,t,g, or c
  misc_feature (14)..(14): n equals a,t,g, or c
  misc_feature (22)..(22): n equals a,t,g, or c
  misc_feature (35)..(35): n equals a,t,g, or c
  misc_feature (122)..(122): n equals a,t,g, or c
  misc_feature (160)..(160): n equals a,t,g, or c
  misc_feature (166)..(166): n equals a,t,g, or c
naatgccgacgtgnatgtaccnagcctgtcccagnttacaggatgccccgtgtggagaactgcccagatgcagctctatgaacattatggaaaatgtgctggtaagaaaaggcagttggtgngaccaacgtttgcactagtttccagggcgtcctgggtngttttntgcaaagccccgggtggggggattttcc

SEQ ID NO: 2722 - DNA, 112 bp, Homo sapiens
  misc_feature (1)..(1): n equals a,t,g, or c
  misc_feature (4)..(4): n equals a,t,g, or c
  misc_feature (57)..(57): n equals a,t,g, or c
  misc_feature (78)..(78): n equals a,t,g, or c
  misc_feature (111)..(111): n equals a,t,g, or c
natnaattgactgtattcagaagatactatatttactctaggagttaactcccattntaagcaagctagcacaggtgnaaaattgggtgaagtttttgaataacttgtcant

SEQ ID NO: 2723 - DNA, 494 bp, Homo sapiens
  misc_feature (10)..(10): n equals a,t,g, or c
  misc_feature (13)..(13): n equals a,t,g, or c
  misc_feature (31)..(31): n equals a,t,g, or c
  misc_feature (168)..(168): n equals a,t,g, or c
  misc_feature (189)..(189): n equals a,t,g, or c
  misc_feature (228)..(228): n equals a,t,g, or c
  misc_feature (282)..(282): n equals a,t,g, or c
  misc_feature (298)..(298): n equals a,t,g, or c
  misc_feature (304)..(304): n equals a,t,g, or c
  misc_feature (309)..(309): n equals a,t,g, or c
  misc_feature (336)..(336): n equals a,t,g, or c
  misc_feature (338)..(338): n equals a,t,g, or c
  misc_feature (354)..(354): n equals a,t,g, or c
  misc_feature (361)..(362): n equals a,t,g, or c
  misc_feature (373)..(374): n equals a,t,g, or c
  misc_feature (382)..(382): n equals a,t,g, or c
  misc_feature (387)..(388): n equals a,t,g, or c
  misc_feature (413)..(413): n equals a,t,g, or c
  misc_feature (420)..(420): n equals a,t,g, or c
  misc_feature (436)..(436): n equals a,t,g, or c
  misc_feature (440)..(441): n equals a,t,g, or c
  misc_feature (449)..(449): n equals a,t,g, or c
  misc_feature (453)..(453): n equals a,t,g, or c
  misc_feature (460)..(460): n equals a,t,g, or c
  misc_feature (462)..(463): n equals a,t,g, or c
  misc_feature (472)..(472): n equals a,t,g, or c
  misc_feature (477)..(477): n equals a,t,g, or c
  misc_feature (487)..(487): n equals a,t,g, or c
  misc_feature (492)..(492): n equals a,t,g, or c
  misc_feature (494)..(494): n equals a,t,g, or c
aattcggcanagnttttcacagacccaagtnaggaatgaattctctaagcagtccttcactgtaatgtcacatgatgttgaaattatccatgggtgtttctatttaattgggaaaaattccctgttcttgttttactcatctttgggaaataatcctagcagctaggnatcaggtttgaataactaatnggatgattaagtgaaatatttttaaactaattcagcgtntactccttttagacaattccatactggaaaataatttccccacatattccattnaggcaagtaaggtggnccaatncctanataaacttagggggggtttcggtggtntnggtttttttacccttncccgggnnttttttttccnntttttatntcggnntttgcttttgggggaatttgccccnggggggnttctgttttcccggcntttnntttttttncaanctttttncnngggggtttnggggncccccttttnggaantn

SEQ ID NO: 2724 - DNA, 277 bp, Homo sapiens
  misc_feature (9)..(9): n equals a,t,g, or c
  misc_feature (12)..(12): n equals a,t,g, or c
  misc_feature (87)..(87): n equals a,t,g, or c
  misc_feature (160)..(160): n equals a,t,g, or c
  misc_feature (248)..(248): n equals a,t,g, or c
  misc_feature (268)..(268): n equals a,t,g, or c
  misc_feature (273)..(273): n equals a,t,g, or c
gaattcggncanagctaccgtcccagatgagctgcaggaagcgtttcgatgtcatgtggaggagccgccgagtgattgatgggcccnagcttgaatggaaagtccagattccagcaacacagcttaagagatgaaggttgcttgagcaggaaatccaccnatggcccaaagaggaaagatccgctttaaatgcctgggcatatacttccaagaaccagatgtggcctgttccttacaactccttgggntttagatgacagtttgaaantttgngggt

SEQ ID NO: 2725 - DNA, 496 bp, Homo sapiens
  misc_feature (216)..(216): n equals a,t,g, or c
  misc_feature (243)..(243): n equals a,t,g, or c
  misc_feature (318)..(318): n equals a,t,g, or c
  misc_feature (345)..(345): n equals a,t,g, or c
  misc_feature (352)..(352): n equals a,t,g, or c
  misc_feature (364)..(366): n equals a,t,g, or c
  misc_feature (372)..(372): n equals a,t,g, or c
  misc_feature (397)..(397): n equals a,t,g, or c
  misc_feature (402)..(402): n equals a,t,g, or c
  misc_feature (406)..(406): n equals a,t,g, or c
  misc_feature (411)..(411): n equals a,t,g, or c
  misc_feature (414)..(414): n equals a,t,g, or c
  misc_feature (419)..(419): n equals a,t,g, or c
  misc_feature (427)..(427): n equals a,t,g, or c
  misc_feature (430)..(431): n equals a,t,g, or c
  misc_feature (443)..(443): n equals a,t,g, or c
  misc_feature (449)..(449): n equals a,t,g, or c
  misc_feature (458)..(459): n equals a,t,g, or c
  misc_feature (467)..(467): n equals a,t,g, or c
  misc_feature (486)..(486): n equals a,t,g, or c
  misc_feature (489)..(489): n equals a,t,g, or c
  misc_feature (494)..(494): n equals a,t,g, or c
aattcggcacaggggttcaggtgtttcacatttgagtgacatctcctcagttctcttagttgtatgtctttggaacagttgggaaaatgtagttcttattttcagtcacattatagtgaacttttagttatggattacattagttaacttttaatttcttctgtttcttttgaaattttatttcatcttttagttgattgccttttcatgtatatnaggaagttattcaaattccacgtatgnaaaaagacaattctttagcacataaaaacttattacttcgtgaggatagaggaaagagaaaatgactaaagttantctaattagaggaatggggaagtggtntttgggnacaattaatccnnngctttnttgattttataggggaagggtcatnaggtntccnggaanccngtacngtagttgntcnntgtcaccagccntggccncaattggcnnccctgggntttggtaggaagccggatnccnttccncc

SEQ ID NO: 2726 - DNA, 489 bp, Homo sapiens
  misc_feature (10)..(10): n equals a,t,g, or c
  misc_feature (157)..(157): n equals a,t,g, or c
  misc_feature (160)..(160): n equals a,t,g, or c
  misc_feature (196)..(196): n equals a,t,g, or c
  misc_feature (248)..(248): n equals a,t,g, or c
  misc_feature (261)..(261): n equals a,t,g, or c
  misc_feature (294)..(294): n equals a,t,g, or c
  misc_feature (302)..(302): n equals a,t,g, or c
  misc_feature (318)..(318): n equals a,t,g, or c
  misc_feature (323)..(324): n equals a,t,g, or c
  misc_feature (329)..(331): n equals a,t,g, or c
  misc_feature (336)..(336): n equals a,t,g, or c
  misc_feature (340)..(340): n equals a,t,g, or c
  misc_feature (344)..(344): n equals a,t,g, or c
  misc_feature (346)..(347): n equals a,t,g, or c
  misc_feature (356)..(356): n equals a,t,g, or c
  misc_feature (360)..(361): n equals a,t,g, or c
  misc_feature (365)..(365): n equals a,t,g, or c
  misc_feature (367)..(367): n equals a,t,g, or c
  misc_feature (369)..(370): n equals a,t,g, or c
  misc_feature (372)..(373): n equals a,t,g, or c
  misc_feature (399)..(400): n equals a,t,g, or c
  misc_feature (407)..(407): n equals a,t,g, or c
  misc_feature (411)..(411): n equals a,t,g, or c
  misc_feature (420)..(423): n equals a,t,g, or c
  misc_feature (436)..(436): n equals a,t,g, or c
  misc_feature (443)..(443): n equals a,t,g, or c
  misc_feature (449)..(450): n equals a,t,g, or c
  misc_feature (458)..(459): n equals a,t,g, or c
  misc_feature (468)..(468): n equals a,t,g, or c
  misc_feature (473)..(475): n equals a,t,g, or c
  misc_feature (483)..(483): n equals a,t,g, or c
  misc_feature (487)..(487): n equals a,t,g, or c
aattcggcanagcaggaattcactttttctattgagattctggttagagggatatccagaaaagtatttaggaacgtggggttatggtgttttctgcatctgtttacgagatcatttcttcctcatttctctcagaactttggtgttaacagcctgnttncctcctttaggggatgactttgaacttagcagatgncttacatgacaaaggaaactgtgagtaactccttaaactctccactgtgggntgacttgcttatnatcaccaaattattattgttttcccaaaaacgnatctcctngtggatggtccatggnaaccnnttttnnnccagngggnaatntnngggggttangggnntttntngnntnntttttgggggattttttgggcccttnnttttggntttnccccccttnnnngggggtttttttnaaaaccncccagnntttggggnnggggggggnaattnnnccccccgncccnaa

SEQ ID NO: 2727 - DNA, 409 bp, Homo sapiens
  misc_feature (93)..(93): n equals a,t,g, or c
  misc_feature (305)..(305): n equals a,t,g, or c
  misc_feature (352)..(352): n equals a,t,g, or c
  misc_feature (365)..(365): n equals a,t,g, or c
  misc_feature (379)..(379): n equals a,t,g, or c
  misc_feature (382)..(382): n equals a,t,g, or c
  misc_feature (398)..(398): n equals a,t,g, or c
ggcagagctgaaccccggcgtgcgtgggccgtgggctcggggaaaggttccgtgcactcggggactccggtgaagcctgttcagccgtctgtntcatgtggccatcttgagtctactctgtcgctcttgtgccctagcaccccgagaactgtcagtttgagccagatggaagctgagctgaacacattacgatggatgatggaaacataagactatcaagaaatccaagtggtaatgggcgaatttattcagcatccggcaatggacttatcgtagtttggggaaacggggtgtttccgataatntcctggagttatcaggacaccttttttaaatttggggcctgattttngtaaaagtaattntttaaggtggtccnggnttaatttaattaaaangctttaattca

SEQ ID NO: 2728 - DNA, 374 bp, Homo sapiens
  misc_feature (30)..(30): n equals a,t,g, or c
  misc_feature (71)..(71): n equals a,t,g, or c
  misc_feature (125)..(125): n equals a,t,g, or c
  misc_feature (181)..(181): n equals a,t,g, or c
  misc_feature (206)..(206): n equals a,t,g, or c
  misc_feature (210)..(210): n equals a,t,g, or c
  misc_feature (284)..(284): n equals a,t,g, or c
  misc_feature (312)..(312): n equals a,t,g, or c
  misc_feature (355)..(355): n equals a,t,g, or c
  misc_feature (361)..(361): n equals a,t,g, or c
  misc_feature (365)..(365): n equals a,t,g, or c
ttttaaaaaaaagagttacttcattttttnattcctcttggaaatgcctaaaactacagcaagagaaattntagacttcttgattttaatgcagatgatttaaaccagatgatcataaccttttnatggaagtagtacgtatatttggcccccagggacctgagaatccccagtgctccanaggagacactctgcagaagaatgtntgtnttccagaaaagggagtaggtcctctggtggcagctgctactgtgccagtttatatggggccagttaagattagnggctgattggccagctcaaaaaagctgnttaaaacacaaaaaaaactcaagagagcttttgccagtgctcntttgtncccntgggaaccc

SEQ ID NO: 2729 - DNA, 322 bp, Homo sapiens
  misc_feature (34)..(34): n equals a,t,g, or c
  misc_feature (36)..(36): n equals a,t,g, or c
  misc_feature (38)..(38): n equals a,t,g, or c
  misc_feature (42)..(42): n equals a,t,g, or c
  misc_feature (73)..(73): n equals a,t,g, or c
  misc_feature (77)..(77): n equals a,t,g, or c
  misc_feature (82)..(82): n equals a,t,g, or c
  misc_feature (84)..(84): n equals a,t,g, or c
  misc_feature (96)..(96): n equals a,t,g, or c
  misc_feature (107)..(107): n equals a,t,g, or c
  misc_feature (205)..(205): n equals a,t,g, or c
  misc_feature (208)..(208): n equals a,t,g, or c
  misc_feature (234)..(234): n equals a,t,g, or c
  misc_feature (241)..(241): n equals a,t,g, or c
  misc_feature (300)..(300): n equals a,t,g, or c
  misc_feature (315)..(316): n equals a,t,g, or c
cggctagcccgcctgggaatgcccttggcctccntntncgtncccacatgcagggcagcacaaggagaatggncgtnatgantnatgtccaccggngcttcctccanttcctgatgacccatggggtgctaaaggaatgggaacgtgaaaggccttgcagaggcactgctacaaggtccatgaaccgcagtgcccaccgtagatnaanttggaggacttcatccaacaacattnaacagtnttttggaagtccttgtatattgagattaaagagaaggagtgcacggaaagatgatgggnagacccattttatgnnttggtg

SEQ ID NO: 2730 - DNA, 385 bp, Homo sapiens
  misc_feature (77)..(77): n equals a,t,g, or c
  misc_feature (83)..(83): n equals a,t,g, or c
  misc_feature (86)..(86): n equals a,t,g, or c
  misc_feature (122)..(122): n equals a,t,g, or c
  misc_feature (139)..(139): n equals a,t,g, or c
  misc_feature (183)..(183): n equals a,t,g, or c
  misc_feature (198)..(198): n equals a,t,g, or c
  misc_feature (212)..(212): n equals a,t,g, or c
  misc_feature (232)..(232): n equals a,t,g, or c
  misc_feature (240)..(240): n equals a,t,g, or c
  misc_feature (252)..(252): n equals a,t,g, or c
  misc_feature (257)..(257): n equals a,t,g, or c
  misc_feature (270)..(270): n equals a,t,g, or c
  misc_feature (310)..(310): n equals a,t,g, or c
  misc_feature (324)..(324): n equals a,t,g, or c
  misc_feature (338)..(338): n equals a,t,g, or c
  misc_feature (354)..(354): n equals a,t,g, or c
  misc_feature (368)..(368): n equals a,t,g, or c
ggcagagtgggatgtcaccggttcatgctgaagagaaattgtaaaggaactcctttgcctggctcaggccccatggncttctnttnatgttttgtccccgtccctttgtgagtcacagcagncagtggggctggctggnactgtgccaggcgaaggttcaagggatggaggtacagttgtgtngaaaggtggagcctngctgggaccggggnagcttttcctccaaggcctncgcctggncttatgaatggncgttnaggggttgagggngaaagctttcatcccaaaaatggcaccagttaacttgggnatgttcaagaatgnatggtttggctggnttcttcagggattggngttcaattttccancccaattgaacctttcc

SEQ ID NO: 2731 - DNA, 371 bp, Homo sapiens
  misc_feature (31)..(31): n equals a,t,g, or c
  misc_feature (81)..(81): n equals a,t,g, or c
  misc_feature (119)..(119): n equals a,t,g, or c
  misc_feature (215)..(215): n equals a,t,g, or c
  misc_feature (285)..(285): n equals a,t,g, or c
  misc_feature (312)..(312): n equals a,t,g, or c
  misc_feature (354)..(354): n equals a,t,g, or c
  misc_feature (358)..(358): n equals a,t,g, or c
  misc_feature (367)..(367): n equals a,t,g, or c
ggcacgagccacagtaagccaggctcaactnagacaacactgtcccctggcagcatcacaacttcatcttttgctcaagantttaccacccctcatagccaaccaggctcagctctgtnaacagtgtcacctgccagcaccacagtgccaggccttagtgaggaatctaccaccttctacagcagcccaggctcaactgaaaccacagcgttttntcacagcaacacttcagcctatcccagagaaaacggcacagggaacagtatgatgtgcctcaagagtgancgaaaggaaggcacccctggaatcttnccagaagacggccatctgggaaggaccagaatttgagggcgngccnatttcgggncttg

SEQ ID NO: 2732 - DNA, 472 bp, Homo sapiens
  misc_feature (10)..(10): n equals a,t,g, or c
  misc_feature (29)..(29): n equals a,t,g, or c
  misc_feature (44)..(44): n equals a,t,g, or c
  misc_feature (48)..(49): n equals a,t,g, or c
  misc_feature (67)..(67): n equals a,t,g, or c
  misc_feature (86)..(86): n equals a,t,g, or c
  misc_feature (88)..(88): n equals a,t,g, or c
  misc_feature (107)..(107): n equals a,t,g, or c
  misc_feature (123)..(123): n equals a,t,g, or c
  misc_feature (125)..(125): n equals a,t,g, or c
  misc_feature (129)..(129): n equals a,t,g, or c
  misc_feature (204)..(204): n equals a,t,g, or c
  misc_feature (207)..(207): n equals a,t,g, or c
  misc_feature (298)..(298): n equals a,t,g, or c
  misc_feature (315)..(315): n equals a,t,g, or c
  misc_feature (354)..(354): n equals a,t,g, or c
  misc_feature (379)..(379): n equals a,t,g, or c
  misc_feature (456)..(456): n equals a,t,g, or c
ggcacgaccncgtccaattcggcacagtnggcactttacaaggnattnntttcacaaacacattttnatcctccaacaacattttntnatggtccctgctgtggaanatagtaatgtaaaatntnactnacccccatcacacattgcaagcagcactcacttctttggaaagctgagctctgcatgcaacatgctgcccaaganggnaaggaagcagcactggagacctgtgtttcgtaactaaccaagataagggcatttttttccaaatgtctgtggagggggtcacacaattttnaactatttactgctgtnaaccccatttttaaaagtgtagtctgtgaagccatctgnaatcaaagttctcttgcaaaatccnggccaaaatccagacatactgaatcagagggtcaggtcccagattaggcattttgaacaaactcaggttcataaagnttgaaaagtttttggg

SEQ ID NO: 2733 - DNA, 416 bp, Homo sapiens
  misc_feature (46)..(46): n equals a,t,g, or c
  misc_feature (59)..(59): n equals a,t,g, or c
  misc_feature (351)..(351): n equals a,t,g, or c
  misc_feature (366)..(366): n equals a,t,g, or c
  misc_feature (373)..(373): n equals a,t,g, or c
  misc_feature (378)..(378): n equals a,t,g, or c
  misc_feature (405)..(405): n equals a,t,g, or c
ggcacgagtaatagatgctttcaataaatatttgttagtggaaagnagaaaggaatgantgcatgataactattggacgcaaaatctgtgttcacaaagaccatccaaatgcttttaaactatcaaatttcttttcctacatttggtaagggtgtggcattgataccctactgggattataaattggtaatggtttttggaaagcagtttggtaatatgcatcaaaaactgttgacatttttcattcacctttggcctagtaatttcatttctgagcatctcttctatgggaactattcctaaatattgggaaaagcttttatttatggcatgaagatgctccattggagntattatttataattnggggaanttaancccccagttgtcttaccaggggggggnttttttaaatt

SEQ ID NO: 2734 - DNA, 321 bp, Homo sapiens
  misc_feature (7)..(7): n equals a,t,g, or c
  misc_feature (54)..(54): n equals a,t,g, or c
  misc_feature (90)..(90): n equals a,t,g, or c
  misc_feature (128)..(128): n equals a,t,g, or c
  misc_feature (142)..(142): n equals a,t,g, or c
  misc_feature (168)..(168): n equals a,t,g, or c
  misc_feature (173)..(173): n equals a,t,g, or c
  misc_feature (243)..(243): n equals a,t,g, or c
  misc_feature (265)..(265): n equals a,t,g, or c
  misc_feature (276)..(276): n equals a,t,g, or c
  misc_feature (294)..(294): n equals a,t,g, or c
  misc_feature (303)..(303): n equals a,t,g, or c
ggcacanctgatatcagtagggcatgcactttttattgaaaccggaatcttttnttattatcaagagagcagtaaatgaattaaagcaanccatgctttcacattaagcacttggagactgtagtgtntgtctagatcatgnattacattgtagggattataatcggnaaatnaaggtaaataaaagtcaattctgctaaacagttgattactattcccaaagggaaaagtctcatttgactntctctctttttaaactgagttnaccagaaaggntgaaataccaaagaaggntaaattaanatggcattgctggggaaa

SEQ ID NO: 2735 - DNA, 346 bp, Homo sapiens
  misc_feature (156)..(156): n equals a,t,g, or c
  misc_feature (165)..(165): n equals a,t,g, or c
  misc_feature (265)..(265): n equals a,t,g, or c
  misc_feature (269)..(269): n equals a,t,g, or c
  misc_feature (304)..(304): n equals a,t,g, or c
  misc_feature (322)..(322): n equals a,t,g, or c
  misc_feature (338)..(338): n equals a,t,g, or c
ggcacgaggaaaaaaatacggatagtatcaccatggacttcattgcttctaactccctagtagataaaaacttggggcttataaaaagagcacctacacactaataaatttcagaatatatcagattaggcattctagtttgagaatgtgcttganttgcatttntgtttggatgacttattaaagaaacagcactctgccccaaccaaactaatttcctcatgccctgcaagtgccagtgtatccattcctgctttgggttttntctnatgtctcccaatttcccataatggctccttctaantcctttccagtgcatctnagaatcttctcttttncttttggc

SEQ ID NO: 2736 - DNA, 437 bp, Homo sapiens
  misc_feature (158)..(158): n equals a,t,g, or c
  misc_feature (171)..(171): n equals a,t,g, or c
  misc_feature (178)..(178): n equals a,t,g, or c
  misc_feature (189)..(189): n equals a,t,g, or c
  misc_feature (240)..(240): n equals a,t,g, or c
  misc_feature (354)..(354): n equals a,t,g, or c
  misc_feature (360)..(360): n equals a,t,g, or c
  misc_feature (405)..(405): n equals a,t,g, or c
  misc_feature (423)..(423): n equals a,t,g, or c
  misc_feature (426)..(426): n equals a,t,g, or c
ggcacgaggtactggttcatagccatcatcttccatcagtaccccagagattcactttgtctcttatgtgggatctgtttccagttagatgccattattttccttttccttggtttactcttccacatattggtaaagctcttccaatagcttttggnaaaggaaaaatgnaaaagtnaaatgttttgnaatctctgtgtgtttgacaatgtctttattttacccttatacctgattgcngttttggttggcaaggtatagggattctttagtggtctccatgcccagttttggaagacatctgctaagctttccagtggctgttgctgtgggagtctgaaaaatctgtccttnctgggnttccagggtggactactggaaattggaaggccattctgttccctncccctttggcaaaaaaanccntttttaaaccc

SEQ ID NO: 2737 - DNA, 476 bp, Homo sapiens
  misc_feature (19)..(19): n equals a,t,g, or c
  misc_feature (51)..(51): n equals a,t,g, or c
  misc_feature (272)..(272): n equals a,t,g, or c
  misc_feature (276)..(276): n equals a,t,g, or c
  misc_feature (301)..(301): n equals a,t,g, or c
  misc_feature (307)..(308): n equals a,t,g, or c
  misc_feature (318)..(318): n equals a,t,g, or c
  misc_feature (344)..(344): n equals a,t,g, or c
  misc_feature (347)..(347): n equals a,t,g, or c
  misc_feature (353)..(353): n equals a,t,g, or c
  misc_feature (372)..(373): n equals a,t,g, or c
  misc_feature (409)..(409): n equals a,t,g, or c
  misc_feature (412)..(412): n equals a,t,g, or c
  misc_feature (422)..(422): n equals a,t,g, or c
  misc_feature (430)..(430): n equals a,t,g, or c
  misc_feature (440)..(440): n equals a,t,g, or c
ggcagagcaggcatctttnatttggcagtcctacaataaaatgcagttgtnatggacttttccaaccattgctcctgagtagtgctgtgtagtgtggttcacatacccatctaggaagtctcatgaaggcagcggcttttggatattaaagaatgtaacagagttttagagagtgccaaacccaaggcatacggactttgaattttatctgaccggcactgacatgctgagactttcagattgggaaagccatttgtggttactgccatgtntgtncccaaattcttcccgtttagttttnaaaagnnccaaggaatnatctttgggtttaggttaggctttgngtnctaggngaattttgggatgggtttnnacattttcctggcccataagggttttttaaaagganggnccctttgttntcccaggntttacacggnatttggggggggggtaaagcccccctggcacaaaat

SEQ ID NO: 2738 - DNA, 384 bp, Homo sapiens
  misc_feature (131)..(131): n equals a,t,g, or c
  misc_feature (193)..(193): n equals a,t,g, or c
  misc_feature (223)..(223): n equals a,t,g, or c
  misc_feature (233)..(234): n equals a,t,g, or c
  misc_feature (250)..(250): n equals a,t,g, or c
  misc_feature (252)..(252): n equals a,t,g, or c
  misc_feature (265)..(266): n equals a,t,g, or c
  misc_feature (270)..(270): n equals a,t,g, or c
  misc_feature (281)..(281): n equals a,t,g, or c
  misc_feature (308)..(308): n equals a,t,g, or c
  misc_feature (312)..(312): n equals a,t,g, or c
  misc_feature (324)..(324): n equals a,t,g, or c
  misc_feature (368)..(369): n equals a,t,g, or c
ggcagagggtttctcctccctagtttctgtgtctgtcctgttcccactgtccctcttgcctggtgagctagagcacttaagttggcataaagtgctgctgcaaaaatgttaggggtataacaatttgtgantatgaaagctcgcattaatcttccagtgtgtccatctaagtaaatttttgtggttgcatttntgcttgggctgcaaaataaagctgattttnatttccaggnngtaccttttctccctntncaagtttattatnnttgngttttgcattntgtgtttaagaaacaaccaaccatttngacncatgtaactttnctttgcctcccccagttttttgggtctttggcaacccttgtggnncatgtgggccttgat

SEQ ID NO: 2739 - DNA, 326 bp, Homo sapiens
  misc_feature (57)..(57): n equals a,t,g, or c
  misc_feature (107)..(107): n equals a,t,g, or c
  misc_feature (180)..(180): n equals a,t,g, or c
  misc_feature (218)..(218): n equals a,t,g, or c
  misc_feature (245)..(245): n equals a,t,g, or c
  misc_feature (276)..(276): n equals a,t,g, or c
  misc_feature (283)..(283): n equals a,t,g, or c
  misc_feature (316)..(316): n equals a,t,g, or c
  misc_feature (326)..(326): n equals a,t,g, or c
ggggcgagggagcacatggcaagggaatgacaggccaaggtggggcccagaggctgnttaaggaggcacagactccctggtgggaggctggggccatgagacccgtnctgcactcaggaagccacattgcaggcagacttttttagatgaggaagcactgcccagagtgcctcgtttccntttttttgttggaattggaaatgaatgcttcccatcantcgcaagcttctgtacgttcactgtgncttgacattgtggacttctaaacattatttntccgtgnagcgaatcctttcaagcctggtaaggggacttnacagcttgtn

SEQ ID NO: 2740 - DNA, 385 bp, Homo sapiens
  misc_feature (22)..(22): n equals a,t,g, or c
  misc_feature (101)..(101): n equals a,t,g, or c
  misc_feature (171)..(171): n equals a,t,g, or c
  misc_feature (223)..(223): n equals a,t,g, or c
  misc_feature (231)..(231): n equals a,t,g, or c
  misc_feature (243)..(243): n equals a,t,g, or c
  misc_feature (285)..(285): n equals a,t,g, or c
  misc_feature (292)..(292): n equals a,t,g, or c
  misc_feature (331)..(331): n equals a,t,g, or c
  misc_feature (339)..(339): n equals a,t,g, or c
  misc_feature (365)..(366): n equals a,t,g, or c
ggcacgagcagttttagatttnatcagttggtctattttgggatttgaagattaagctgtaattcctctacctctcctctaagcgcataccttcctctctnattttcacagtagagtgcagttacatcacactttctggttaagttagcattcaatatttatactattttnactctgtaaatactattcacaactggaatgtgtggtatctgtaattatattncctttttnggtccaattttnggcttgagttttttggaattaataatactgccttattatttnatttgtntgagtgggtctatatagcagaagactgcttattatagtngtattttnaaacttcccagaacagaatgacatgnntttacactccaggctgtcc

SEQ ID NO: 2741 - DNA, 417 bp, Homo sapiens
  misc_feature (34)..(34): n equals a,t,g, or c
  misc_feature (47)..(47): n equals a,t,g, or c
  misc_feature (90)..(90): n equals a,t,g, or c
  misc_feature (246)..(246): n equals a,t,g, or c
  misc_feature (263)..(263): n equals a,t,g, or c
  misc_feature (371)..(371): n equals a,t,g, or c
  misc_feature (380)..(380): n equals a,t,g, or c
  misc_feature (383)..(383): n equals a,t,g, or c
  misc_feature (387)..(387): n equals a,t,g, or c
  misc_feature (404)..(404): n equals a,t,g, or c
ggcacgagagactgtctcctccctccccgcctgnaatgaaccctgtnaagggagacaggccaggaagtcccagaaatatttattcttgtnactctcacaaaatggaaaagggtctcaatttttgtttctttaaggaacttgtgttctgcgtctgtgtctacactgcctcctctcaccaaccaaattgtctagcccccctccagttacgctagaactctgctttatcttcaaggaagaaagggagtngggagaagttacctctnaaaccctccagcatggccatcaatttttttggaataatttgggagggtcaacatgcttttgggaaaagtgttttggaaaacggttttgggggggttgaaaaggaaatnttttgcctnaantggncctttaacttcacgggngtgacccattcaa

SEQ ID NO: 2742 - DNA, 343 bp, Homo sapiens
  misc_feature (74)..(74): n equals a,t,g, or c
  misc_feature (274)..(274): n equals a,t,g, or c
  misc_feature (296)..(296): n equals a,t,g, or c
  misc_feature (299)..(299): n equals a,t,g, or c
  misc_feature (332)..(332): n equals a,t,g, or c
  misc_feature (343)..(343): n equals a,t,g, or c
ggcacgagcggcacgaggcaaaactctgtctcaaaaagaaatgaaagggttacctgttgttaaatgatgacaancagtattcatgaacatttggtttatacaagatttacctttatacttaaccaaaatacttcttgatgtaattattatgtcggtaaaatttaattaggaaattttttaaattccaagaaaatattttcctgtagcttaagccattatatttggttcagtgcttataaaagcaaaagaataatttgtcattcattttttaaantagtgttttttccaaatttgancantaataccaacatttcatccaatgggttaccccnctctgctgggn

SEQ ID NO: 2743 - DNA, 496 bp, Homo sapiens
  misc_feature (62)..(62): n equals a,t,g, or c
  misc_feature (338)..(338): n equals a,t,g, or c
  misc_feature (478)..(478): n equals a,t,g, or c
  misc_feature (488)..(488): n equals a,t,g, or c
ggcacgagcaccgcgcctagccagttttattacactgctgtagtcagtgcctacaaattttnctcatcctgccctttttggccaacattagctttaatcattatcctaaaaccaggaagctcaatctaccatgctttcatccttgaaataaatttgggaagtgacactcaggtcagaataatttatggtggatggagacaggtgagcagcaatggaactgtcaagggggaggatttttccactaccctctggaggggttagtggagccctgttgtatgaaaggaacttttaaaaccatgtgtgtctctcaaaggggatacggctggataactagtggntaggcagatcgtccattaaagatgggatattagatgtctaaaattttaattcctaccagtaaaccctgtgatgatggggtattattaattccccatttttacaggccatttaattgaagggctcaggaaaggggttagtnggcttttttnttccaaag

SEQ ID NO: 2744 - DNA, 347 bp, Homo sapiens
  misc_feature (5)..(5): n equals a,t,g, or c
  misc_feature (9)..(9): n equals a,t,g, or c
  misc_feature (28)..(28): n equals a,t,g, or c
  misc_feature (269)..(269): n equals a,t,g, or c
  misc_feature (307)..(307): n equals a,t,g, or c
  misc_feature (315)..(315): n equals a,t,g, or c
  misc_feature (326)..(326): n equals a,t,g, or c
  misc_feature (332)..(332): n equals a,t,g, or c
ggcanaggnagaccagacccatcagaantccagacgacagccaagcatggccaagaaaggaagtgctctcaggcctatgcaacagcctggtgggatctcacagtgggatcctcctcaagacctcatttgcccctgcctacaaccacaaagaattcaaggcagttcctaccaggaaacaatgtgagatcccagagtcctgagactgggatggggttcttggaaagtggtctggactgcctcttgtggaagaccctgcccagagcccctgngtgtgaagcacaagcagaccaggacccaagcaattggntcccatgnaaacttttggngccccnattggttaagatttt

SEQ ID NO: 2745 - DNA, 501 bp, Homo sapiens
  misc_feature (26)..(26): n equals a,t,g, or c
  misc_feature (40)..(40): n equals a,t,g, or c
  misc_feature (46)..(46): n equals a,t,g, or c
  misc_feature (139)..(139): n equals a,t,g, or c
  misc_feature (355)..(355): n equals a,t,g, or c
  misc_feature (444)..(444): n equals a,t,g, or c
  misc_feature (447)..(447): n equals a,t,g, or c
  misc_feature (482)..(482): n equals a,t,g, or c
  misc_feature (489)..(489): n equals a,t,g, or c
ggcacgagcttggcctgtcagctgtncatctgtaattcancctgcnttattcataatgtaactgaagcttgggggtggggaggtaagaatagaaaaaacggattcatgttacagtgtggcaggtgcaggagatggaaantggcccagttcattgagacccttctggccttcccatactatttgaggaaggaagagcagttcatgtgaaaaattgaacaacaaacctgtcttccagactttctcaaacataccaaatcttatggggtgtgtgccatttctggcatgcagggaattctggatatgccaggtgtgtttggctgcttgactccacttgaaaggggaaatgggctctgcntttgtactgtgggcagttgggcaaaggactttgacctctgtgttccaattttgggacagggaaaagtgccagtctcaacatgcaggttnctnggcataaaccagcgggttggtagggaaaataaccncagtttntgtttagacact

SEQ ID NO: 2746 - DNA, 75 bp, Homo sapiens
  misc_feature (44)..(44): n equals a,t,g, or c
  misc_feature (65)..(67): n equals a,t,g, or c
  misc_feature (72)..(72): n equals a,t,g, or c
ggcacgagctgccatctaaaatttcatttgaaataagtattctnctgctttcaaaaaaaaaaaannnttttnaaa

SEQ ID NO: 2747 - DNA, 86 bp, Homo sapiens
  misc_feature (23)..(23): n equals a,t,g, or c
  misc_feature (32)..(32): n equals a,t,g, or c
  misc_feature (58)..(58): n equals a,t,g, or c
  misc_feature (69)..(69): n equals a,t,g, or c
  misc_feature (71)..(71): n equals a,t,g, or c
cggcagagccacaatgaacagtncacttaatnccctgggttttccaataaacagtttnaaggatataantnggtttaaaaaataat

SEQ ID NO: 2748 - DNA, 56 bp, Homo sapiens
  misc_feature (8)..(8): n equals a,t,g, or c
  misc_feature (25)..(25): n equals a,t,g, or c
  misc_feature (33)..(33): n equals a,t,g, or c
  misc_feature (42)..(42): n equals a,t,g, or c
  misc_feature (56)..(56): n equals a,t,g, or c
agaggggncgcatccatggttaatncacacccnctgtctatnaacttttggaatcn

SEQ ID NO: 2749 - DNA, 470 bp, Homo sapiens
  misc_feature (104)..(104): n equals a,t,g, or c
  misc_feature (347)..(347): n equals a,t,g, or c
  misc_feature (349)..(349): n equals a,t,g, or c
  misc_feature (362)..(362): n equals a,t,g, or c
  misc_feature (405)..(405): n equals a,t,g, or c
  misc_feature (422)..(422): n equals a,t,g, or c
  misc_feature (425)..(425): n equals a,t,g, or c
  misc_feature (430)..(430): n equals a,t,g, or c
  misc_feature (454)..(454): n equals a,t,g, or c
ggcagagcggcacgagcaggaatattgctgtcagtcctgagaggtggcatttactggcagatagacctcagacaagtaattttactcctgtaagcctgaatttntttatagtaccctaactcataagattggtgagatgtttacaaataacctaagagaagtttcctgggcaaagcctgacttacaggtgcaaggtaacatgaaattactgcactgagacagatttagttctgagtatgtttatgccacttagcctatttttgtatataaattgtacagaatactttatcaaacaagaatagagtatacattcttctcaagctcatacagaacatttcaccaggttngnccacattctgggncctaggttacaccttaaccaattttaaaccggttaaaagcttncaaagtttgttctcagnccncatgntatttaacctaaaattcaccaccnggaggttaccccgttt

SEQ ID NO: 2750 - DNA, 396 bp, Homo sapiens
  misc_feature (33)..(33): n equals a,t,g, or c
  misc_feature (65)..(65): n equals a,t,g, or c
  misc_feature (290)..(290): n equals a,t,g, or c
  misc_feature (335)..(335): n equals a,t,g, or c
  misc_feature (350)..(350): n equals a,t,g, or c
  misc_feature (354)..(354): n equals a,t,g, or c
  misc_feature (376)..(376): n equals a,t,g, or c
  misc_feature (387)..(387): n equals a,t,g, or c
ggcacgagcagctgtctaagaggttggaaaatnaactactcaagatagtcacgaaaatactgaantttgattttcctttccatatttgaattaatttttcctgtttgactggaaggggtttttgtataactaaaacctcagcgcataaaggagatttaaaaggagcacatgatttagtgggtgggccatgaaactagagatgggatttgggggtgaatttgtcaatatctggattttaatccagacatctctgctaacaagcctttggtaagtcacttcagatacttttncctcctttttacaaagagagggctggcttagttatttgcccaagnccctttccaggctgnattnccacaagtacggtttactgtantgtcttatcancctttcaag

SEQ ID NO: 2751 - DNA, 406 bp, Homo sapiens
  misc_feature (48)..(48): n equals a,t,g, or c
  misc_feature (51)..(51): n equals a,t,g, or c
  misc_feature (92)..(92): n equals a,t,g, or c
  misc_feature (235)..(235): n equals a,t,g, or c
  misc_feature (275)..(275): n equals a,t,g, or c
  misc_feature (323)..(323): n equals a,t,g, or c
  misc_feature (339)..(339): n equals a,t,g, or c
  misc_feature (342)..(342): n equals a,t,g, or c
  misc_feature (352)..(352): n equals a,t,g, or c
  misc_feature (391)..(391): n equals a,t,g, or c
aacatacgctgtagttttggtatagtttaggcttactgagccactttnatnagtcctgggaattgatgggaacactcctaaaatcttaaatnctcaaacacctgagaaacaagggccaaccttgtaaagcaggcctccaaggagagcagtcaagcctcctatgttaactcttctgtatgactatatataatagaaagtgaatgatgttgaaagtccattaagatttatccttgtnttgaaacctccatatctagaagtggaaacatgacaggggnattttgacgtaataaaagggaaaactattgaggtgatactgatacggntatatattgcatctgnggnaacagggggngttttccgttaagattacctggcaaccgttttttgggcnttatggtcccggaac

SEQ ID NO: 2752 - DNA, 85 bp, Homo sapiens
  misc_feature (32)..(32): n equals a,t,g, or c
  misc_feature (35)..(35): n equals a,t,g, or c
  misc_feature (81)..(81): n equals a,t,g, or c
ttcccagtccaccgtccccatcgtgggcattngtnctggcctggctgtcctagcagttgtggtgatcggagctgtggtcgntggc

SEQ ID NO: 2753 - DNA, 135 bp, Homo sapiens
  misc_feature (7)..(7): n equals a,t,g, or c
  misc_feature (19)..(19): n equals a,t,g, or c
  misc_feature (62)..(62): n equals a,t,g, or c
  misc_feature (67)..(67): n equals a,t,g, or c
  misc_feature (70)..(70): n equals a,t,g, or c
  misc_feature (120)..(120): n equals a,t,g, or c
  misc_feature (129)..(129): n equals a,t,g, or c
ggcagancgggcacgagcntgggggtacccagcaaggaggccacggtgcctgacctcaagcncaaanctntggaccagatcatggtgacagtttaggcagggcccccaagggagtggcanggagattgnggccct

SEQ ID NO: 2754 - DNA, 75 bp, Homo sapiens
  misc_feature (5)..(5): n equals a,t,g, or c
  misc_feature (23)..(23): n equals a,t,g, or c
  misc_feature (29)..(29): n equals a,t,g, or c
  misc_feature (55)..(55): n equals a,t,g, or c
  misc_feature (62)..(62): n equals a,t,g, or c
ggcanaggggaagccattaatgnactaantcgttttgaccacatatataccaagnccctagncttagagataccc

SEQ ID NO: 2755 - DNA, 226 bp, Homo sapiens
  misc_feature (12)..(12): n equals a,t,g, or c
  misc_feature (20)..(20): n equals a,t,g, or c
  misc_feature (102)..(102): n equals a,t,g, or c
  misc_feature (153)..(153): n equals a,t,g, or c
  misc_feature (181)..(181): n equals a,t,g, or c
  misc_feature (187)..(187): n equals a,t,g, or c
  misc_feature (200)..(200): n equals a,t,g, or c
  misc_feature (226)..(226): n equals a,t,g, or c
gggttgtttgtncatgtttntttctccccgtttcctgcctttccgtagatataaagggcgttctggtgtcactaaaaatgactatagtgtccagtgtctctnatttccatgtgaatctacaattggggacccccctccaaaaaaggaaaagtnaaggcaggatgagggaaaggaaagaggnaaaatntgactgcataggncccaaagggtttcctctaattagaan

SEQ ID NO: 2756 - DNA, 363 bp, Homo sapiens
  misc_feature (10)..(10): n equals a,t,g, or c
  misc_feature (96)..(96): n equals a,t,g, or c
  misc_feature (151)..(151): n equals a,t,g, or c
  misc_feature (279)..(279): n equals a,t,g, or c
  misc_feature (321)..(321): n equals a,t,g, or c
  misc_feature (336)..(336): n equals a,t,g, or c
  misc_feature (354)..(354): n equals a,t,g, or c
  misc_feature (359)..(359): n equals a,t,g, or c
ggcacgaggnagaagcaggaggtcattaaagaagaccatcgtctttggggtttgggaattggcacaaggcatataacccactgattctctgatgtntgacaggtgagtagctcaggccaagtgaactggcttcctcatccatctggtctgnggctgagctgggactacagccaagtttccacactctgtttaaatacctaagagaaagagatcaccctgcacggaatgagttgacctaagaggagtgaaagagataaacaaagggatctttgttcctgnatttccctggaagggaagccaaatggcaataggggagatgtngggtatggacacatnccccagagcagccagcangtggncacc

SEQ ID NO: 2757 - DNA, 54 bp, Homo sapiens
  misc_feature (13)..(14): n equals a,t,g, or c
  misc_feature (36)..(36): n equals a,t,g, or c
cctgtcctaatgnntttaaaggtaggggatcaaaancctgggcttaatgtataa

SEQ ID NO: 2758 - DNA, 157 bp, Homo sapiens
  misc_feature (6)..(6): n equals a,t,g, or c
  misc_feature (28)..(28): n equals a,t,g, or c
  misc_feature (36)..(36): n equals a,t,g, or c
  misc_feature (42)..(42): n equals a,t,g, or c
  misc_feature (99)..(99): n equals a,t,g, or c
  misc_feature (127)..(127): n equals a,t,g, or c
  misc_feature (137)..(137): n equals a,t,g, or c
  misc_feature (149)..(149): n equals a,t,g, or c
  misc_feature (153)..(153): n equals a,t,g, or c
aatttnccttttaaaagcctgtggaganctagaggngaaaanctttaaaaggtgatgctggggcagtaagtggggggatggggagctgggttccccggnttcaaagggggtgtttttagagacatgnatgttttggncacaaagggcancaangggt

SEQ ID NO: 2759 - DNA, 344 bp, Homo sapiens
  misc_feature (81)..(81): n equals a,t,g, or c
  misc_feature (133)..(133): n equals a,t,g, or c
  misc_feature (152)..(152): n equals a,t,g, or c
  misc_feature (209)..(209): n equals a,t,g, or c
  misc_feature (213)..(213): n equals a,t,g, or c
  misc_feature (243)..(243): n equals a,t,g, or c
  misc_feature (293)..(293): n equals a,t,g, or c
  misc_feature (305)..(305): n equals a,t,g, or c
  misc_feature (321)..(321): n equals a,t,g, or c
  misc_feature (324)..(324): n equals a,t,g, or c
  misc_feature (326)..(326): n equals a,t,g, or c
ggcacgagcaagagtgagttttaggtactttacctaactttcagagattggagcattagtctagcagtatttttgtaagcnagtttttatttgatgttgtttgctattattgctgtctgtcatataaggtcgnaatctaataaaatatctgngggtaagggaagctgggagaaccttggagtcttatatatctagtgaatatcaaatgnggantttgagaatgtcacatcaaattttgtgtantaaatacattggttcatatttaacccattacataggttgatttttagggngctatggattgnaccatttgaaattttnatnanggaaaaccatgggccgga

SEQ ID NO: 2760 - DNA, 382 bp, Homo sapiens
  misc_feature (5)..(5): n equals a,t,g, or c
  misc_feature (18)..(18): n equals a,t,g, or c
  misc_feature (104)..(104): n equals a,t,g, or c
  misc_feature (150)..(150): n equals a,t,g, or c
  misc_feature (248)..(248): n equals a,t,g, or c
  misc_feature (301)..(301): n equals a,t,g, or c
  misc_feature (320)..(320): n equals a,t,g, or c
  misc_feature (368)..(368): n equals a,t,g, or c
  misc_feature (370)..(370): n equals a,t,g, or c
  misc_feature (380)..(380): n equals a,t,g, or c
ggcanagcggcacgagcnacaacacctctttcataaagagacttgtgtattcagcaaaataatttgaatttaatcctgaccacttaggaagcttgatgcttgancttgcgaactttaagggctggatatgggagggaaaagaagaataancataaaaatgaatcctacagtaaaaacacaggacccaaaaaatctttttatttaaaaaaattaaaatgtttgtcccattataagtttctgggcttgtntttctttccgtgaaatataaactttttggccagcttttaagcagttgccagtnaaaatgggggggttaaaangggaatttgggtttagtgccaaagagttgggggtttgggaatgggggngnttggaagggnaa

SEQ ID NO: 2761 - DNA, 235 bp, Homo sapiens
  misc_feature (5)..(5): n equals a,t,g, or c
  misc_feature (16)..(16): n equals a,t,g, or c
  misc_feature (18)..(18): n equals a,t,g, or c
  misc_feature (81)..(81): n equals a,t,g, or c
  misc_feature (107)..(107): n equals a,t,g, or c
  misc_feature (119)..(119): n equals a,t,g, or c
  misc_feature (123)..(123): n equals a,t,g, or c
  misc_feature (160)..(160): n equals a,t,g, or c
  misc_feature (181)..(181): n equals a,t,g, or c
  misc_feature (193)..(193): n equals a,t,g, or c
  misc_feature (212)..(212): n equals a,t,g, or c
  misc_feature (215)..(215): n equals a,t,g, or c
ggcanagtagctgcangntgaacagcagcacctactttattaccatcttactgtcattcaaagaaggcagagctgaatgcnggagaaaaactgagtactagcaacantttttgaaaccntggnatactgtcataactgaggctagtaattaatccctggnacttgtttgccactgaaaatntccttgttttgnttaccctggttttcagctnggnaccctggatcacttggaagg

SEQ ID NO: 2762 - DNA, 301 bp, Homo sapiens
  misc_feature (15)..(15): n equals a,t,g, or c
  misc_feature (40)..(40): n equals a,t,g, or c
  misc_feature (100)..(100): n equals a,t,g, or c
  misc_feature (122)..(122): n equals a,t,g, or c
  misc_feature (140)..(140): n equals a,t,g, or c
  misc_feature (159)..(159): n equals a,t,g, or c
  misc_feature (195)..(195): n equals a,t,g, or c
  misc_feature (207)..(207): n equals a,t,g, or c
  misc_feature (246)..(246): n equals a,t,g, or c
  misc_feature (248)..(248): n equals a,t,g, or c
  misc_feature (270)..(270): n equals a,t,g, or c
  misc_feature (299)..(299): n equals a,t,g, or c
ggcagaggttttttnaacagcatctgacaagaaaattgtntctctatggtacactcctaagagtagtgcctttaaggagagtcagactatcacatatctntccccgctacttttcccacctntccaagcaggcttcattnatgtttacttaggtttcanatccattcacaggggcacagactcagtcctcagtgnaatcttgaaagnttactggttcattattgcacacttttattagtgcctgtnantctgtttgaagaatggtttttnattaaacactccctttgggtaaatggccngt

SEQ ID NO: 2763 - DNA, 292 bp, Homo sapiens
  misc_feature (83)..(83): n equals a,t,g, or c
  misc_feature (183)..(183): n equals a,t,g, or c
  misc_feature (191)..(191): n equals a,t,g, or c
  misc_feature (218)..(218): n equals a,t,g, or c
  misc_feature (221)..(221): n equals a,t,g, or c
  misc_feature (230)..(230): n equals a,t,g, or c
  misc_feature (234)..(234): n equals a,t,g, or c
  misc_feature (276)..(276): n equals a,t,g, or c
cagcccatcaaagagagaggctctcctagggcgtccagggctggccatctttaaacggggagctttctggagtggctcctctntgtaggagcagaagcccggcctggacacccctcggcctgggacacccctcgaaggagagggcgcttccttgaagtaggtgggctccccttggcccttccntccctatnactccatactgggggtgggctggaggnggncacaggcangctnattgtaaaaacctttttattttagtaaaaattatacagaagnttaaaaaaaaaaaaaa

SEQ ID NO: 2764 - DNA, 121 bp, Homo sapiens
  misc_feature (9)..(9): n equals a,t,g, or c
  misc_feature (17)..(17): n equals a,t,g, or c
  misc_feature (43)..(43): n equals a,t,g, or c
  misc_feature (68)..(68): n equals a,t,g, or c
  misc_feature (95)..(95): n equals a,t,g, or c
  misc_feature (102)..(102): n equals a,t,g, or c
  misc_feature (104)..(104): n equals a,t,g, or c
cagttcctnccgtgatnatccctacccttttccacattttctntaaatgtggggttttttttttgttngcttggttttgaggggtagaggggaancccctcncngattgcccctttaaaaa

SEQ ID NO: 2765 - DNA, 97 bp, Homo sapiens
  misc_feature (9)..(9): n equals a,t,g, or c
  misc_feature (67)..(67): n equals a,t,g, or c
  misc_feature (79)..(79): n equals a,t,g, or c
  misc_feature (88)..(88): n equals a,t,g, or c
  misc_feature (96)..(96): n equals a,t,g, or c
ggcacaggnagagagagaactagtctccagtttttttttttttttttttttaaaaattgggggggantcctggggtttnaaaagggtntggggccnt

SEQ ID NO: 2766 - DNA, 195 bp, Homo sapiens
  misc_feature (20)..(20): n equals a,t,g, or c
  misc_feature (45)..(45): n equals a,t,g, or c
  misc_feature (54)..(54): n equals a,t,g, or c
  misc_feature (62)..(62): n equals a,t,g, or c
  misc_feature (89)..(89): n equals a,t,g, or c
  misc_feature (91)..(91): n equals a,t,g, or c
  misc_feature (123)..(123): n equals a,t,g, or c
  misc_feature (142)..(142): n equals a,t,g, or c
  misc_feature (172)..(172): n equals a,t,g, or c
  misc_feature (185)..(185): n equals a,t,g, or c
  misc_feature (190)..(190): n equals a,t,g, or c
ggcagacctgtccccaaggnctcttccttattatggcagggagtngggattggncctacttnctttctctggaaaggaaagcctccaanantccatgtccttgggcagctttagaaggcgttnagaaccacgcctagcaggnagaccttgaagctcacctttagtctatctncagagggattcanttccngcaca

SEQ ID NO: 2767 - DNA, 52 bp, Homo sapiens
  misc_feature (28)..(28): n equals a,t,g, or c
  misc_feature (33)..(33): n equals a,t,g, or c
  misc_feature (37)..(37): n equals a,t,g, or c
  misc_feature (41)..(41): n equals a,t,g, or c
  misc_feature (50)..(50): n equals a,t,g, or c
ggcacgaggttttttttttttttttttnatttnaatngggntttattttntt

SEQ ID NO: 2768 - DNA, 70 bp, Homo sapiens
  misc_feature (40)..(40): n equals a,t,g, or c
  misc_feature (43)..(43): n equals a,t,g, or c
  misc_feature (52)..(52): n equals a,t,g, or c
  misc_feature (67)..(67): n equals a,t,g, or c
  misc_feature (69)..(69): n equals a,t,g, or c
ggcagagctcgagttttttttttttttttttcaaaggggnggngaggttaancggggtttatcgttnana

SEQ ID NO: 2769 - DNA, 392 bp, Homo sapiens
  misc_feature (276)..(276): n equals a,t,g, or c
  misc_feature (289)..(289): n equals a,t,g, or c
  misc_feature (329)..(329): n equals a,t,g, or c
  misc_feature (338)..(338): n equals a,t,g, or c
  misc_feature (367)..(367): n equals a,t,g, or c
  misc_feature (381)..(381): n equals a,t,g, or c
  misc_feature (390)..(390): n equals a,t,g, or c
ggcacgagcggcacgagaaattaaggaactacaccaaacattcttatgaaatttcaggacaccaggataatcagaaaatatcccaaagccttccaaagagagaaaaaaaaagtcacatacaaaggatcaggaatttaaatggcgctgaaattctcaaagcaaattttgaagtccgagcacagaggaagcaagagcttctgaattctgagggcaaacaatttctaagttgacttttctatccagctagaacttcgtgcagtgtgaagttagaatgangtatgttcagacngtgagttcttgaaaatatcacctcccttgcccttttttcnggcagttanttaggttgtgctccaaccaaacagggggnaaaccagggaaatngggcacagnaa

SEQ ID NO: 2770 - DNA, 307 bp, Homo sapiens
  misc_feature (5)..(5): n equals a,t,g, or c
  misc_feature (19)..(19): n equals a,t,g, or c
  misc_feature (22)..(22): n equals a,t,g, or c
  misc_feature (29)..(29): n equals a,t,g, or c
  misc_feature (46)..(46): n equals a,t,g, or c
  misc_feature (50)..(50): n equals a,t,g, or c
  misc_feature (53)..(53): n equals a,t,g, or c
  misc_feature (81)..(81): n equals a,t,g, or c
  misc_feature (87)..(87): n equals a,t,g, or c
  misc_feature (100)..(100): n equals a,t,g, or c
  misc_feature (107)..(108): n equals a,t,g, or c
  misc_feature (129)..(129): n equals a,t,g, or c
  misc_feature (137)..(137): n equals a,t,g, or c
  misc_feature (146)..(146): n equals a,t,g, or c
  misc_feature (163)..(163): n equals a,t,g, or c
  misc_feature (180)..(180): n equals a,t,g, or c
  misc_feature (191)..(191): n equals a,t,g, or c
  misc_feature (195)..(195): n equals a,t,g, or c
  misc_feature (258)..(258): n equals a,t,g, or c
  misc_feature (261)..(261): n equals a,t,g, or c
  misc_feature (273)..(273): n equals a,t,g, or c
  misc_feature (280)..(280): n equals a,t,g, or c
  misc_feature (305)..(305): n equals a,t,g, or c
ggcanagccaatccaaatnatntccaggntttaggagctacccaanctcnggntatatggtgttggtttccatattttgtntgtttncttatttccaaantagcctnncttggtactacatggtaaagntcaagctntttttctancccgatcagggatgtanctcttccccgtgtcttnacagtgtcccnaagnaagttttttggcagcactctctggtagctgcaggggtagtgaaatttggtccagagaaggcgnganggaaatagtttncctgttncctagctctccgaggtcgggttttnct

SEQ ID NO: 2771 - DNA, 405 bp, Homo sapiens
  misc_feature (131)..(131): n equals a,t,g, or c
  misc_feature (340)..(340): n equals a,t,g, or c
  misc_feature (353)..(353): n equals a,t,g, or c
  misc_feature (363)..(363): n equals a,t,g, or c
  misc_feature (392)..(392): n equals a,t,g, or c
  misc_feature (397)..(397): n equals a,t,g, or c
ggcagagcgttattttactattctaggtttaatgataacaggttgctatgtctaagctttgatattttgcagatttctaaatgcattttattgcatttagaagggaattttgtagtattgagaaaatgcangcaaaaaatgaagtagagatacaatgtccatttaactcagaacaaaacaaccttatttccccatagttgaaatggagggcggggaagtcaggcagtggtttctgaaagccaagaacttagtagcactgtgccattctcttgcctgatccagtgccattcccttcacttgatatctgtttactttagaggaggcagtttttgagaaaggntcctaaatatccngggcccatgnccccaggggctttggaccaggcaaaggancatantgccctgg

SEQ ID NO: 2772 - DNA, 478 bp, Homo sapiens
  misc_feature (71)..(71): n equals a,t,g, or c
  misc_feature (251)..(251): n equals a,t,g, or c
  misc_feature (288)..(288): n equals a,t,g, or c
  misc_feature (290)..(290): n equals a,t,g, or c
  misc_feature (298)..(298): n equals a,t,g, or c
  misc_feature (320)..(320): n equals a,t,g, or c
  misc_feature (324)..(324): n equals a,t,g, or c
  misc_feature (338)..(338): n equals a,t,g, or c
  misc_feature (342)..(342): n equals a,t,g, or c
  misc_feature (350)..(350): n equals a,t,g, or c
  misc_feature (352)..(353): n equals a,t,g, or c
  misc_feature (362)..(362): n equals a,t,g, or c
  misc_feature (365)..(365): n equals a,t,g, or c
  misc_feature (405)..(405): n equals a,t,g, or c
  misc_feature (413)..(413): n equals a,t,g, or c
  misc_feature (417)..(417): n equals a,t,g, or c
  misc_feature (422)..(422): n equals a,t,g, or c
  misc_feature (475)..(475): n equals a,t,g, or c
atattcagcaaaaatattcttcaaaaacaaatgtgaagtaaacacatttttagtcaaacaaacgctgtggnaaattcctcataagaagacctgtactacaagatacatgtttttacatcagtacatggaacattctcgaagatagaccatatgataggccacaaaacaagtctcagtaaatttaagaaaatcaaaattatattaagtactctatcagagcacattgggattaaaattagaaaacaactctnaaaaggaacccttcaaaaccataaaatatgtgccagngncacacatnggcttcaaattaaggggttganggangttctaccagccgntggnaagcaaanannggccggggnttncaagcccgggttctgttaaaaccggcttttaacccaccangttccaangggnccagncctttccttatggttaagggggttccttttaaccagggggggttacttttccncgg

SEQ ID NO: 2773 - DNA, 443 bp, Homo sapiens
  misc_feature (5)..(5): n equals a,t,g, or c
  misc_feature (130)..(130): n equals a,t,g, or c
  misc_feature (203)..(203): n equals a,t,g, or c
  misc_feature (341)..(341): n equals a,t,g, or c
  misc_feature (353)..(353): n equals a,t,g, or c
  misc_feature (376)..(376): n equals a,t,g, or c
  misc_feature (379)..(379): n equals a,t,g, or c
  misc_feature (403)..(403): n equals a,t,g, or c
  misc_feature (441)..(441): n equals a,t,g, or c
ggcanagcctacttcaactatctgaagagattcttcaaggtggaggatacagtggttatattagttactctcacccttgttattatggaaggtaaaattcctggatcctagatttaattttaaaatagtnaatttaataatgtctggtggaaacctcttaaaaaaaacactttgcagcacatctctggtagccctgtgcttgngaatgacttttaggctgccagttcagaagatggaagatattaaactgtgttgatggagttggtttttccagtgggaccctgttaggttcctttttaaaaaaaataataattttttataatgggtatgtcttcgtgagnccctcacaaccntgaggtttttacttgtttgggcngancaagggacatgaacgttttaaagnccgttccactaacatttacgggagggggcttaaagggngc

SEQ ID NO: 2774 - DNA, 51 bp, Homo sapiens
  misc_feature (42)..(42): n equals a,t,g, or c
  misc_feature (46)..(46): n equals a,t,g, or c
  misc_feature (50)..(50): n equals a,t,g, or c
ggcagagaaaaagagtggaatcatgtaaaattctcagttaanccancaang

SEQ ID NO: 2775 - DNA, 117 bp, Homo sapiens
  misc_feature (2)..(2): n equals a,t,g, or c
  misc_feature (12)..(12): n equals a,t,g, or c
  misc_feature (22)..(22): n equals a,t,g, or c
  misc_feature (27)..(27): n equals a,t,g, or c
  misc_feature (73)..(73): n equals a,t,g, or c
  misc_feature (104)..(104): n equals a,t,g, or c
  misc_feature (116)..(116): n equals a,t,g, or c
gngaaagacctntttcctgggnctctncctgtgtagtctccttcaggacttattgtgctcagtgaacatccantgctgggtgcagctccatgcaccctgttgtntgtttacatgtnt

SEQ ID NO: 2776 - DNA, 396 bp, Homo sapiens
  misc_feature (185)..(185): n equals a,t,g, or c
  misc_feature (208)..(208): n equals a,t,g, or c
  misc_feature (247)..(247): n equals a,t,g, or c
  misc_feature (347)..(347): n equals a,t,g, or c
  misc_feature (359)..(359): n equals a,t,g, or c
  misc_feature (363)..(363): n equals a,t,g, or c
  misc_feature (375)..(375): n equals a,t,g, or c
  misc_feature (393)..(393): n equals a,t,g, or c
ggcagagcgcattcaactttctaaacatccctcagactgacccacatctttctatccacttttaacatcttgcttgaatgacttccccaggcccagccagtctcccgcctccagctccgcccccttctgaactccctttatgtggtacaatcagagagcccttcccaaagcacaaatctgctttnactgctttgcttcaagccctttngtggctcctatttccagctggatgaggtccaagcctgtnaacgtgctgtacgtgttacatggcctgaccccccgttaatttgaccagccaagttttcttacatagcgttgtggtcttttgtttccttcctgcctagaantgtcctttcccntttnattttggttttnaggggtgttgccaaattncta

SEQ ID NO: 2777 - DNA, 409 bp, Homo sapiens
  misc_feature (5)..(5): n equals a,t,g, or c
  misc_feature (8)..(8): n equals a,t,g, or c
  misc_feature (261)..(261): n equals a,t,g, or c
  misc_feature (333)..(333): n equals a,t,g, or c
  misc_feature (363)..(363): n equals a,t,g, or c
  misc_feature (384)..(384): n equals a,t,g, or c
  misc_feature (400)..(400): n equals a,t,g, or c
  misc_feature (402)..(402): n equals a,t,g, or c
ggcanagncaataagggctgctttagaattaggttatatggcaaacattttttctaaatttagtgagctaaatctcaagttccaaggttatgctataagtaagagaaaaagcactttatcaagaaatatagtactggcaaatatacattacaaattatcactattttgaattttcctactgagtgtttaacatttgatgagtgaaagagaaacaggtataatcaacaattatatggtaaatcttagtgaagccctttttgntatacttttcaggagccaggaataggaaaggctgcataacagactttcacaagtccaggtgtttttaatccngtgcttttcaacaaaactgaggcattaccncatttgggttaacagctgttnggtcttccggaaattngnccggtga

SEQ ID NO: 2778 - DNA, 417 bp, Homo sapiens
  misc_feature (128)..(128): n equals a,t,g, or c
  misc_feature (257)..(257): n equals a,t,g, or c
  misc_feature (273)..(273): n equals a,t,g, or c
  misc_feature (369)..(369): n equals a,t,g, or c
  misc_feature (381)..(381): n equals a,t,g, or c
  misc_feature (393)..(393): n equals a,t,g, or c
  misc_feature (401)..(401): n equals a,t,g, or c
  misc_feature (417)..(417): n equals a,t,g, or c
ggcagagccatggagcttttcaagtatgaactttgaaatataagttaaattaattccagcttaattaactggaacttaccattcattctgctttgctaaattactacgctactgcttagtggattttnctaataccattataaatgctttggaattctcctgcccctagaaaagataaattgatctggaatctcttatagtttgtttgtgcctgtatgtgggaagttctgggatgacctttggactgtatcaacgtngattataatcgaggantataaaattacagctgaggggggaaaagtgggttactcctggtaggatccatcttggatggccttcagggaggacagaattcaccaaattaacttngagtctagtttnagggatttattnaggccgtngttagggggggtaacn

SEQ ID NO: 2779 - DNA, 292 bp, Homo sapiens
  misc_feature (40)..(40): n equals a,t,g, or c
  misc_feature (181)..(181): n equals a,t,g, or c
  misc_feature (238)..(238): n equals a,t,g, or c
  misc_feature (264)..(264): n equals a,t,g, or c
  misc_feature (270)..(270): n equals a,t,g, or c
  misc_feature (281)..(281): n equals a,t,g, or c
  misc_feature (285)..(285): n equals a,t,g, or c
ggcagaggctaaccctcagcaattctgatttttgccatgncaaaaatataaatttttaggtgaaatctcttcattttttcaattagcaataattcaaaaaattaaaaattctctgcaggtcaaacaaaacatatctgtgaattaaatgttgaagtcattcatttgaaacctctgcttggcntgtttttctccactgagtttagccagctgagcagggttggcacataccataagggtnggaaaagggttgttccaagaggtccngttggngttggggtccngccntaggctt

SEQ ID NO: 2780 - DNA, 261 bp, Homo sapiens
  misc_feature (5)..(5): n equals a,t,g, or c
  misc_feature (52)..(52): n equals a,t,g, or c
  misc_feature (131)..(131): n equals a,t,g, or c
  misc_feature (135)..(135): n equals a,t,g, or c
  misc_feature (137)..(137): n equals a,t,g, or c
  misc_feature (148)..(148): n equals a,t,g, or c
  misc_feature (150)..(150): n equals a,t,g, or c
  misc_feature (153)..(153): n equals a,t,g, or c
  misc_feature (156)..(156): n equals a,t,g, or c
  misc_feature (183)..(183): n equals a,t,g, or c
  misc_feature (189)..(189): n equals a,t,g, or c
  misc_feature (194)..(194): n equals a,t,g, or c
  misc_feature (225)..(225): n equals a,t,g, or c
  misc_feature (256)..(256): n equals a,t,g, or c
ggcanagccattagtggagtattaagccgtaccctaagattataaactgcangatgtgcaaagttggctaagggctggtgtatttggcagggctctatacttatacattgtcacttttttttttttggggncagngnaagcccccatntnttntangaaaaaaagccaggaaggaaaggaaangaaaangaaanttttttcccacatctggctctgttaagctgngagagattgggcccccccgtttttttcccanagcct

SEQ ID NO: 2781 - DNA, 362 bp, Homo sapiens
  misc_feature (5)..(5): n equals a,t,g, or c
  misc_feature (7)..(7): n equals a,t,g, or c
  misc_feature (11)..(11): n equals a,t,g, or c
  misc_feature (17)..(17): n equals a,t,g, or c
  misc_feature (24)..(24): n equals a,t,g, or c
  misc_feature (27)..(27): n equals a,t,g, or c
  misc_feature (34)..(34): n equals a,t,g, or c
  misc_feature (43)..(43): n equals a,t,g, or c
  misc_feature (46)..(46): n equals a,t,g, or c
  misc_feature (53)..(53): n equals a,t,g, or c
  misc_feature (73)..(73): n equals a,t,g, or c
  misc_feature (81)..(82): n equals a,t,g, or c
  misc_feature (87)..(87): n equals a,t,g, or c
  misc_feature (92)..(92): n equals a,t,g, or c
  misc_feature (178)..(178): n equals a,t,g, or c
  misc_feature (256)..(256): n equals a,t,g, or c
  misc_feature (290)..(291): n equals a,t,g, or c
  misc_feature (323)..(323): n equals a,t,g, or c
  misc_feature (327)..(327): n equals a,t,g, or c
  misc_feature (347)..(347): n equals a,t,g, or c
cagtngngtanttcaangaagatngtntcctaancacaaagantgngcatganggccaggtaggccatcattnccttaggnncaatnggccntttcattgaagcagttttaaaacaagaaggatgagtacgtatacattttataaaatccattctgctaacagtgtacaaaacaaagngacctcagattagatgcagggagtcccattaaatggctattggtgtaacccagggcaaaaaattgtggtagtttggancagaattatgggcagtagatttggagagactggnntagagttggggaggaccagaaagtaaaatggncagnaatatctttaaatttactgnaaatttacttgggtt

SEQ ID NO: 2782 - DNA, 374 bp, Homo sapiens
  misc_feature (209)..(209): n equals a,t,g, or c
  misc_feature (307)..(308): n equals a,t,g, or c
  misc_feature (341)..(341): n equals a,t,g, or c
  misc_feature (350)..(350): n equals a,t,g, or c
  misc_feature (370)..(370): n equals a,t,g, or c
ggcacgagcctaaacaagactcttccatcaaaagattccatatatcccatttatccagctgactcccttgttgtgagcccagatctaccattgcaattctctgattatagtttggattcctaggctctctatggaagaaaaatggtctctggtgattgtgtacttcactataaattgtgaagttaagtgttacggtttatacatcagtntctgttacattgattaatgtgagtctactactacagatgcattgcattggaaaagccaggggatctggaatccataggacagggagccaaaatatagnncaggttatatttgtgcaaggtaatggccattgntatggttcntcttagatttgtttttgcantcct

SEQ ID NO: 2783 - DNA, 121 bp, Homo sapiens
  misc_feature (4)..(4): n equals a,t,g, or c
  misc_feature (41)..(41): n equals a,t,g, or c
  misc_feature (49)..(49): n equals a,t,g, or c
  misc_feature (60)..(60): n equals a,t,g, or c
  misc_feature (64)..(64): n equals a,t,g, or c
  misc_feature (121)..(121): n equals a,t,g, or c
ccanttctttggaacgaggaggtccccccggaccgaggctnaacaaggnaagcccctggngctncctgtaaataagaatgtggttggcaagatgcaaactgtgggatggatccatcacctn

SEQ ID NO: 2784 - DNA, 348 bp, Homo sapiens
  misc_feature (6)..(6): n equals a,t,g, or c
  misc_feature (14)..(14): n equals a,t,g, or c
  misc_feature (31)..(31): n equals a,t,g, or c
  misc_feature (41)..(41): n equals a,t,g, or c
  misc_feature (65)..(65): n equals a,t,g, or c
  misc_feature (104)..(104): n equals a,t,g, or c
  misc_feature (115)..(115): n equals a,t,g, or c
  misc_feature (117)..(117): n equals a,t,g, or c
  misc_feature (163)..(163): n equals a,t,g, or c
  misc_feature (173)..(173): n equals a,t,g, or c
  misc_feature (206)..(206): n equals a,t,g, or c
  misc_feature (257)..(257): n equals a,t,g, or c
  misc_feature (271)..(271): n equals a,t,g, or c
  misc_feature (318)..(318): n equals a,t,g, or c
  misc_feature (329)..(329): n equals a,t,g, or c
  misc_feature (336)..(336): n equals a,t,g, or c
ggcacngggaaaantaaggcacacataaaancaatagatgntacacacagaattttaagcagcanatttatcttactaattatgtattgcagaggccactattntaaagtctttnantcctctcacacacacacctactaactatagagacaggtaacctagnaagcctgctnaaagggtatagtgaagccacctgggctgttttnaaaaccattcacaaacaatatggaatgtttgtgtctgacaatcggttgggntaccccttgacccngtggaaccctgccagtgctttgggttccccgtgaaagcaggctcagnggaaggaattntactttncagaagtttatt

SEQ ID NO: 2785 - DNA, 458 bp, Homo sapiens
  misc_feature (42)..(42): n equals a,t,g, or c
  misc_feature (192)..(192): n equals a,t,g, or c
  misc_feature (310)..(310): n equals a,t,g, or c
  misc_feature (347)..(347): n equals a,t,g, or c
  misc_feature (390)..(390): n equals a,t,g, or c
  misc_feature (392)..(392): n equals a,t,g, or c
  misc_feature (403)..(403): n equals a,t,g, or c
  misc_feature (427)..(427): n equals a,t,g, or c
  misc_feature (449)..(449): n equals a,t,g, or c
ggcagagtactctttttccttagccatagtggaatggttgtncataggcattccctggcccagccttacctgcttaggatgctggactaaaagaggcaggttttgcaccaagaaagaaggctgttgagaagaggggaattgtcgcagattttattgtctttttacttaacagatatcttctctccatatttnccctccaatttaaataacatttattggacacttcttacaaggttcacttagactaacgttttttaaataccgagggagaaaaatgtgttccatgctcaagcgtaggagttggtagggnttgttttaaaatgaaggctcgttatgtgggtgggatntaataagggaccttacaccggtggtacttgggcatcatttaangngaccttttttnatgagggcttttgaggcaattttnatgtgaaagggcccattttttncccccaggg

SEQ ID NO: 2786 - DNA, 162 bp, Homo sapiens
  misc_feature (12)..(12): n equals a,t,g, or c
  misc_feature (18)..(18): n equals a,t,g, or c
  misc_feature (40)..(40): n equals a,t,g, or c
  misc_feature (47)..(47): n equals a,t,g, or c
  misc_feature (85)..(85): n equals a,t,g, or c
  misc_feature (102)..(102): n equals a,t,g, or c
  misc_feature (112)..(112): n equals a,t,g, or c
  misc_feature (120)..(120): n equals a,t,g, or c
  misc_feature (152)..(152): n equals a,t,g, or c
cctcccgtttantatcangactagacgaacttaagcgganaactccncagatgcgcataggccacttttagccatgtaaacttangattaagttcacaagtncaacttttgnttttaccngtccagtatctctttaggacacaaagcagtgntggagttaat

SEQ ID NO: 2787 - DNA, 333 bp, Homo sapiens
  misc_feature (31)..(31): n equals a,t,g, or c
  misc_feature (38)..(38): n equals a,t,g, or c
  misc_feature (64)..(64): n equals a,t,g, or c
  misc_feature (66)..(66): n equals a,t,g, or c
  misc_feature (89)..(89): n equals a,t,g, or c
  misc_feature (91)..(91): n equals a,t,g, or c
  misc_feature (197)..(197): n equals a,t,g, or c
  misc_feature (260)..(260): n equals a,t,g, or c
  misc_feature (265)..(265): n equals a,t,g, or c
  misc_feature (296)..(296): n equals a,t,g, or c
  misc_feature (300)..(300): n equals a,t,g, or c
  misc_feature (316)..(316): n equals a,t,g, or c
ggcagagcctgcctggccacacctgcttgcncatggcnttggttgcccagctgaggcacttgcngncagctactggcatagctcttttntnagaatatccatcctcacagagagcttctgtaggagttgtgaactgaattacaactcaaaactctggaaataaatgcaaaatgcaactgaaggattctgaaaaagtnaagcaacagcaggtcagattgggtagggaagtcaaaatttgaagaccaacaggtatggctgantttanctgttttgtatccacctttcttaaacctccngggntttttaacttttttangggtttagttccccggg

SEQ ID NO: 2788 - DNA, 251 bp, Homo sapiens
  misc_feature (1)..(1): n equals a,t,g, or c
  misc_feature (8)..(8): n equals a,t,g, or c
  misc_feature (41)..(41): n equals a,t,g, or c
  misc_feature (43)..(43): n equals a,t,g, or c
  misc_feature (71)..(71): n equals a,t,g, or c
  misc_feature (125)..(125): n equals a,t,g, or c
  misc_feature (146)..(146): n equals a,t,g, or c
  misc_feature (161)..(161): n equals a,t,g, or c
  misc_feature (202)..(202): n equals a,t,g, or c
  misc_feature (222)..(222): n equals a,t,g, or c
  misc_feature (244)..(244): n equals a,t,g, or c
  misc_feature (249)..(249): n equals a,t,g, or c
ntggcgtncttttctcaggtaatggaagtgggcagagaatnancctttccctaggctccagtgtgtaaganttaaagaaagaggaaagaaacacaatggcttgatggtcgaggacaggtttattntaaagaaaacaaacccaagantggcttctggctganttagatcagaggcatgccctcttacagactaagagtttttnaaggattcagggtgggagantttatcagaggcttggacctgnttctntg

SEQ ID NO: 2789 - DNA, 63 bp, Homo sapiens
  misc_feature (16)..(16): n equals a,t,g, or c
  misc_feature (57)..(57): n equals a,t,g, or c
  misc_feature (60)..(60): n equals a,t,g, or c
tagaagcccgaaaggngcctttaaaaagcctttttaaatccacagggcaagaagggnctntaa

SEQ ID NO: 2790 - DNA, 495 bp, Homo sapiens
  misc_feature (41)..(41): n equals a,t,g, or c
  misc_feature (145)..(146): n equals a,t,g, or c
  misc_feature (320)..(320): n equals a,t,g, or c
  misc_feature (326)..(326): n equals a,t,g, or c
  misc_feature (346)..(346): n equals a,t,g, or c
  misc_feature (375)..(376): n equals a,t,g, or c
  misc_feature (400)..(400): n equals a,t,g, or c
  misc_feature (462)..(462): n equals a,t,g, or c
  misc_feature (466)..(466): n equals a,t,g, or c
  misc_feature (486)..(486): n equals a,t,g, or c
  misc_feature (492)..(492): n equals a,t,g, or c
gagccactgtacccagcctcctttgtttctttttaaatgtnaggtatcaaagcccaaccaacccttctccactgcctcaataattaagagcacagaaacagatgtcctgagtttgaatatgaaccatgacatctttagctatttnntctttgatatgaattcccatacctataagaatagtgtttacctcaagggattttatgagaattattttaggtttaattttattgatgaggcctttacaagaaaagaaactcttttgtatttggctgatgtttcggttcagtttagaattcagcagaattttctttaattttgtnaaagtncaatacgtattagtgttaangcttggtacgtgtattaccccatatggtnntagtttaggacttacataacagtntactggcatttatataagtgtgaagcagcttacatgatcaggttattaattggggagtccancatnattgtccaatagggaaaagncatcgnaaa

SEQ ID NO: 2791 - DNA, 114 bp, Homo sapiens
  misc_feature (26)..(26): n equals a,t,g, or c
  misc_feature (69)..(69): n equals a,t,g, or c
  misc_feature (74)..(74): n equals a,t,g, or c
  misc_feature (78)..(78): n equals a,t,g, or c
  misc_feature (92)..(92): n equals a,t,g, or c
agggtgcaaaggccccgaggaagganttgcttgattttttcaaacaatagccaggaggccaggtggctncagtnagtnaaggagaggagatnttgaagggaataacggggcggg

SEQ ID NO: 2792 - DNA, 398 bp, Homo sapiens
  misc_feature (14)..(14): n equals a,t,g, or c
  misc_feature (30)..(30): n equals a,t,g, or c
  misc_feature (42)..(42): n equals a,t,g, or c
  misc_feature (49)..(49): n equals a,t,g, or c
  misc_feature (68)..(68): n equals a,t,g, or c
  misc_feature (101)..(101): n equals a,t,g, or c
  misc_feature (105)..(107): n equals a,t,g, or c
  misc_feature (113)..(113): n equals a,t,g, or c
  misc_feature (123)..(123): n equals a,t,g, or c
  misc_feature (129)..(129): n equals a,t,g, or c
  misc_feature (133)..(133): n equals a,t,g, or c
  misc_feature (191)..(191): n equals a,t,g, or c
  misc_feature (214)..(214): n equals a,t,g, or c
  misc_feature (241)..(241): n equals a,t,g, or c
  misc_feature (256)..(256): n equals a,t,g, or c
  misc_feature (265)..(265): n equals a,t,g, or c
  misc_feature (270)..(270): n equals a,t,g, or c
  misc_feature (282)..(282): n equals a,t,g, or c
  misc_feature (294)..(294): n equals a,t,g, or c
  misc_feature (297)..(297): n equals a,t,g, or c
  misc_feature (360)..(360): n equals a,t,g, or c
  misc_feature (388)..(388): n equals a,t,g, or c
  misc_feature (391)..(392): n equals a,t,g, or c
  misc_feature (398)..(398): n equals a,t,g, or c
ttgcaggctgtccnacctggcctgcaagcntacaagcaggcncgtttanatgaagctgcagaggagtnggggggctgctccacccccagccaagggctctntcgnnnccaagnaggccgaggntggggntgcnacggcagggcccagccgggaacagctcaaggttgacctggatgatttggtggccgctnagtgtttgtactgtggggagctnatgatccgctctatcgaccggccgttnatcgaccccaagcgntacgaggtnggagnagctcatttggntgtaggagggtnttnaccttttaatggggggtgggcaatggggagcatggattaaaacccattgaaaaaggctgcctnctaagttcttactcaataaacttgcaanttnncacacn

SEQ ID NO: 2793 - DNA, 112 bp, Homo sapiens
  misc_feature (33)..(33): n equals a,t,g, or c
  misc_feature (40)..(40): n equals a,t,g, or c
  misc_feature (47)..(47): n equals a,t,g, or c
  misc_feature (82)..(82): n equals a,t,g, or c
  misc_feature (109)..(109): n equals a,t,g, or c
gcggcacgagggggggcccggtacccaattcgncctatantgagtcntattacaattcactggccgtcgttttacaacgtcntgactgggaaaacccaggggtcgcctnaca

SEQ ID NO: 2794 - DNA, 438 bp, Homo sapiens
  misc_feature (90)..(90): n equals a,t,g, or c
  misc_feature (122)..(122): n equals a,t,g, or c
  misc_feature (151)..(151): n equals a,t,g, or c
  misc_feature (165)..(165): n equals a,t,g, or c
  misc_feature (188)..(188): n equals a,t,g, or c
  misc_feature (209)..(209): n equals a,t,g, or c
  misc_feature (221)..(221): n equals a,t,g, or c
  misc_feature (224)..(224): n equals a,t,g, or c
  misc_feature (234)..(234): n equals a,t,g, or c
  misc_feature (238)..(238): n equals a,t,g, or c
  misc_feature (243)..(243): n equals a,t,g, or c
  misc_feature (245)..(245): n equals a,t,g, or c
  misc_feature (248)..(248): n equals a,t,g, or c
  misc_feature (256)..(256): n equals a,t,g, or c
  misc_feature (261)..(261): n equals a,t,g, or c
  misc_feature (268)..(269): n equals a,t,g, or c
  misc_feature (272)..(272): n equals a,t,g, or c
  misc_feature (277)..(277): n equals a,t,g, or c
  misc_feature (284)..(284): n equals a,t,g, or c
  misc_feature (310)..(310): n equals a,t,g, or c
  misc_feature (323)..(323): n equals a,t,g, or c
  misc_feature (329)..(329): n equals a,t,g, or c
  misc_feature (331)..(331): n equals a,t,g, or c
  misc_feature (337)..(337): n equals a,t,g, or c
  misc_feature (344)..(344): n equals a,t,g, or c
  misc_feature (355)..(355): n equals a,t,g, or c
  misc_feature (360)..(360): n equals a,t,g, or c
  misc_feature (368)..(368): n equals a,t,g, or c
  misc_feature (406)..(406): n equals a,t,g, or c
gtcgtggcccacaggaaaagatcctacagggaatggatcctgatgatatttggcagctgtcctccaaatcttaaaaaggtttgaatgaanaaattacacctttgaaagctgaccttccatcnagttggggaaaaacaaaagcaagcaagcngggaaagcccgaanttccccaaaagttcccattggcntaaatttttttttgaaccacnagttggggaaanccngggttcattnggantgccntnttnaaccctgnaaaanttttccnnggnttccnattgaanaagttcttttggccctttaaaaaaangaaaaaaatttanaatttnanccccantttcctnaaaaaattttnccccnccctttcncccccctgggaaatctttggtttaaaatttaatttggncttttggggggggtttggggggaaaaaatttt

SEQ ID NO: 2795 - DNA, 72 bp, Homo sapiens
  misc_feature (6)..(6): n equals a,t,g, or c
  misc_feature (17)..(17): n equals a,t,g, or c
  misc_feature (37)..(37): n equals a,t,g, or c
  misc_feature (53)..(53): n equals a,t,g, or c
gcggcncgagcggcacnagggggggcccggtacccanttcgccctataatgantcgtattacaattcactgg

SEQ ID NO: 2796 - DNA, 417 bp, Homo sapiens
  misc_feature (35)..(35): n equals a,t,g, or c
  misc_feature (231)..(231): n equals a,t,g, or c
  misc_feature (254)..(254): n equals a,t,g, or c
  misc_feature (270)..(270): n equals a,t,g, or c
  misc_feature (340)..(340): n equals a,t,g, or c
  misc_feature (360)..(360): n equals a,t,g, or c
  misc_feature (363)..(363): n equals a,t,g, or c
  misc_feature (396)..(396): n equals a,t,g, or c
  misc_feature (413)..(413): n equals a,t,g, or c
gcctctattcccgctctttgcttaatgcatcctancaggggttgggaacatggtggtgggtatggctggagctcacaccacgaagctcttggggcctgatccttctggtgacacttcacttgtcccattggttaacatctgggtgggtctattacttactgtgatgactgctgtctcagtgggcatggtgttgatccacggggttactgtgataaccaccatggatacatnttggtggcccactgggtactgtnaggactggctacattnaatggatgttattggctaatccactgcatggtttgatggccaccatctccgttgggccctttgggttttnatgggtgaatagcatttcanttnacatcttccttttggcccccccccaataaggtngctgttgcccacttccntttt

SEQ ID NO: 2797 - DNA, 508 bp, Homo sapiens
  misc_feature (82)..(82): n equals a,t,g, or c
  misc_feature (147)..(147): n equals a,t,g, or c
  misc_feature (224)..(224): n equals a,t,g, or c
  misc_feature (249)..(249): n equals a,t,g, or c
  misc_feature (290)..(290): n equals a,t,g, or c
  misc_feature (309)..(309): n equals a,t,g, or c
  misc_feature (326)..(326): n equals a,t,g, or c
  misc_feature (347)..(347): n equals a,t,g, or c
  misc_feature (358)..(358): n equals a,t,g, or c
  misc_feature (367)..(367): n equals a,t,g, or c
  misc_feature (457)..(457): n equals a,t,g, or c
  misc_feature (463)..(463): n equals a,t,g, or c
  misc_feature (466)..(466): n equals a,t,g, or c
  misc_feature (469)..(469): n equals a,t,g, or c
  misc_feature (471)..(471): n equals a,t,g, or c
gtgattttggaatcagaacacaagcaccatactgaaggactagcagccaaataactgcctagggatactgatggttgtgaanactgtttcaaatgattggatctttggaaagcttcagcgtgccttagtttctaggatcagaattanttttcctctcacttgggccttgcagctaaatggagaaatgtttcaatttctttgaatacttggcacatttcaataantcctttcccgagttataaccactcnaggggggagcaaatttgggatgggatttacgactttcacanggcattgtgagggaaagancatttttcccaaaggcntgttttttgaattaccccctnggggtgaatanaacaattgnaacccctccccacactttaccttttgaacaattttcacaattgcacctggttacttccataatttcccccctcccaaaattccgtttccntatccnggnttncnggccccatccccgggggaaatcctaaaggaaaaataa

SEQ ID NO: 2798 - DNA, 154 bp, Homo sapiens
  misc_feature (6)..(7): n equals a,t,g, or c
  misc_feature (46)..(46): n equals a,t,g, or c
  misc_feature (53)..(53): n equals a,t,g, or c
  misc_feature (73)..(73): n equals a,t,g, or c
  misc_feature (77)..(77): n equals a,t,g, or c
  misc_feature (84)..(84): n equals a,t,g, or c
  misc_feature (92)..(92): n equals a,t,g, or c
  misc_feature (111)..(111): n equals a,t,g, or c
gcggcnngatgtgaactgcctcaagagtgggtgggctgaagatctnggatctnctcacgctatttggaacacngacnatcctanccttgccntagttggactatttttatnctttcatacctccccccgccctcttggcacttcggcaaaactg

SEQ ID NO: 2799 - DNA, 99 bp, Homo sapiens
  misc_feature (16)..(16): n equals a,t,g, or c
  misc_feature (26)..(26): n equals a,t,g, or c
  misc_feature (29)..(30): n equals a,t,g, or c
  misc_feature (51)..(51): n equals a,t,g, or c
  misc_feature (59)..(59): n equals a,t,g, or c
  misc_feature (65)..(65): n equals a,t,g, or c
  misc_feature (81)..(81): n equals a,t,g, or c
tcgatttccctccacnagtgggaganatnncgggagctccacagaggtggngcgttcgntctagnactagggacatccccngggtgtgacgcgaatatc

SEQ ID NO: 2800 - DNA, 116 bp, Homo sapiens
  misc_feature (110)..(112): n equals a,t,g, or c
  misc_feature (114)..(114): n equals a,t,g, or c
  misc_feature (116)..(116): n equals a,t,g, or c
gcggcacgagggcacgagggggggcccggtacccaattcgccctatagtgagtcgtattacaattcactggccgtcgttttacaacgtcgtgactgggaaacccaaaagnnngngn

SEQ ID NO: 2801 - DNA, 117 bp, Homo sapiens
  misc_feature (8)..(8): n equals a,t,g, or c
  misc_feature (46)..(46): n equals a,t,g, or c
  misc_feature (52)..(52): n equals a,t,g, or c
  misc_feature (80)..(80): n equals a,t,g, or c
  misc_feature (101)..(101): n equals a,t,g, or c
  misc_feature (107)..(107): n equals a,t,g, or c
gcggcacnatggcacgacggggggcccggtacccaattcgccctanagtgantcgtattacaattcactggccgtcgttntacaacgtcgtgactgggatnacccanttcttccctc

SEQ ID NO: 2802 - DNA, 418 bp, Homo sapiens
  misc_feature (298)..(298): n equals a,t,g, or c
  misc_feature (301)..(301): n equals a,t,g, or c
  misc_feature (335)..(335): n equals a,t,g, or c
  misc_feature (351)..(351): n equals a,t,g, or c
  misc_feature (378)..(378): n equals a,t,g, or c
  misc_feature (412)..(412): n equals a,t,g, or c
  misc_feature (414)..(414): n equals a,t,g, or c
gctgtctcctgtattccatttcttgctctttcttggtccattccctcatttttgtggtgttaactccctgatagtttcctgagaaagcttgcatgagtggtaaatgttttagactttgcatatctgaaaatgtctttatgtttccctcatacttgattagtaatttgagtaaagaatctggttggaaataatttttctatagaattgtactttgcctccattttacttcactttcccatttccagtgttttgctgtttgggtaaaactgattccattccaatttcctaatcccttggncanaactgcttttacccctgaaaaaactttcaaggtntccttccccctttatncctgggaattccctgaaaatttccctnataatcctgcccttggatgggtttttcctttttncntgcc

SEQ ID NO: 2803 - DNA, 217 bp, Homo sapiens
  misc_feature (8)..(8): n equals a,t,g, or c
  misc_feature (47)..(47): n equals a,t,g, or c
  misc_feature (68)..(68): n equals a,t,g, or c
  misc_feature (94)..(94): n equals a,t,g, or c
  misc_feature (104)..(104): n equals a,t,g, or c
  misc_feature (110)..(110): n equals a,t,g, or c
  misc_feature (128)..(128): n equals a,t,g, or c
  misc_feature (162)..(162): n equals a,t,g, or c
  misc_feature (187)..(187): n equals a,t,g, or c
  misc_feature (196)..(196): n equals a,t,g, or c
  misc_feature (217)..(217): n equals a,t,g, or c
gtcagctntttattgaattcttaatatatgctaggcatggtgcttcnttgcttctactacatcttctngtttgatccttatagcaaccttgtangaaatttggntgccanagattttaagtgacttcngcgttacacagttactaaattgccaagctcgganttctctgggacagggaaatctggangaaaacccntaacttggattctgaatatcn

SEQ ID NO: 2804 - DNA, 240 bp, Homo sapiens
  misc_feature (204)..(204): n equals a,t,g, or c
  misc_feature (214)..(214): n equals a,t,g, or c
  misc_feature (220)..(220): n equals a,t,g, or c
  misc_feature (232)..(232): n equals a,t,g, or c
  misc_feature (238)..(238): n equals a,t,g, or c
gggaaagctaatgcttctgaaaaattgggtgtggtaagagaattcattttctttcattgtcataaagctgatttctaattttattagatattacattatgaaaatttacttttaggtatttttgggtattttgattaaattgacatagctgtgataaaaaaagcaataaatggacaagttgtattgataattatttgcttcatnctgatctatnattgtnaacctgtacatncaattnac

SEQ ID NO: 2805 - DNA, 437 bp, Homo sapiens
  misc_feature (367)..(367): n equals a,t,g, or c
  misc_feature (384)..(384): n equals a,t,g, or c
  misc_feature (392)..(393): n equals a,t,g, or c
  misc_feature (420)..(420): n equals a,t,g, or c
  misc_feature (436)..(436): n equals a,t,g, or c
gaatagccagtagttattaaccactgtctgtttcaaatgaaggaagcacaactcagtcaggtagcactggaattagaggttaaaacatccttgggatcgttgggactctgtcttctgtgtttctcaagcctgcttggtttccctttgcttcattctcagtggtgaatacttgttctctaagtggtggcaagatgggctccagcagctactggtgtccatgctccttcaagcttgtgaaccagaatccctccatcaccacatttccagtctcttggtgggactggatttggactgttttatatgtgtgtctgctcttgcaccaatcctgtatgggtgccatgatatttcatgcaagtctgggtctgtnttccattttccatgaancccccctnnggaatgaatttattttttacaaattcncaaattccctggctcna

SEQ ID NO: 2806 - DNA, 415 bp, Homo sapiens
  misc_feature (198)..(198): n equals a,t,g, or c
  misc_feature (292)..(292): n equals a,t,g, or c
  misc_feature (305)..(305): n equals a,t,g, or c
  misc_feature (348)..(348): n equals a,t,g, or c
  misc_feature (360)..(360): n equals a,t,g, or c
  misc_feature (379)..(379): n equals a,t,g, or c
  misc_feature (393)..(393): n equals a,t,g, or c
  misc_feature (405)..(405): n equals a,t,g, or c
gcttgcctccacaaactggaacctctgaacttcagcagttgttcctatcagtagggttattgtgagacctaaaatgtaattgaagtttttgcatgtgaccctgcccttaattcagttgctttaaaaacgtttgaacatagtagaaaatgtaacagtgttgctcttagtgtttctcatatatagggaataaaagaagangttttataatagcacttgtctcacaagatttatgagcgatttgaattttacagatctattcctaagcaaaagaccttaagtctttttttttttnctttaaaaaaaantaacaattactttccgttctgttgtatcgtgccttccaaaaanatttgcgctgcncaaataatgggttgggttnaaccctaaattacncaattctccctnctgaattggt

SEQ ID NO: 2807 - DNA, 449 bp, Homo sapiens
  misc_feature (4)..(4): n equals a,t,g, or c
  misc_feature (43)..(43): n equals a,t,g, or c
  misc_feature (50)..(50): n equals a,t,g, or c
  misc_feature (57)..(57): n equals a,t,g, or c
  misc_feature (59)..(59): n equals a,t,g, or c
  misc_feature (64)..(64): n equals a,t,g, or c
  misc_feature (68)..(68): n equals a,t,g, or c
  misc_feature (81)..(81): n equals a,t,g, or c
  misc_feature (85)..(85): n equals a,t,g, or c
  misc_feature (89)..(89): n equals a,t,g, or c
  misc_feature (96)..(96): n equals a,t,g, or c
  misc_feature (99)..(99): n equals a,t,g, or c
  misc_feature (103)..(103): n equals a,t,g, or c
  misc_feature (137)..(137): n equals a,t,g, or c
  misc_feature (140)..(140): n equals a,t,g, or c
  misc_feature (142)..(143): n equals a,t,g, or c
  misc_feature (146)..(146): n equals a,t,g, or c
  misc_feature (151)..(151): n equals a,t,g, or c
  misc_feature (182)..(183): n equals a,t,g, or c
  misc_feature (185)..(185): n equals a,t,g, or c
  misc_feature (197)..(197): n equals a,t,g, or c
  misc_feature (208)..(208): n equals a,t,g, or c
  misc_feature (214)..(214): n equals a,t,g, or c
  misc_feature (220)..(220): n equals a,t,g, or c
  misc_feature (241)..(241): n equals a,t,g, or c
  misc_feature (275)..(275): n equals a,t,g, or c
  misc_feature (296)..(296): n equals a,t,g, or c
  misc_feature (309)..(309): n equals a,t,g, or c
  misc_feature (323)..(323): n equals a,t,g, or c
  misc_feature (337)..(337): n equals a,t,g, or c
  misc_feature (366)..(366): n equals a,t,g, or c
  misc_feature (370)..(370): n equals a,t,g, or c
  misc_feature (382)..(382): n equals a,t,g, or c
  misc_feature (402)..(402): n equals a,t,g, or c
  misc_feature (405)..(405): n equals a,t,g, or c
  misc_feature (417)..(417): n equals a,t,g, or c
  misc_feature (422)..(422): n equals a,t,g, or c
  misc_feature (433)..(433): n equals a,t,g, or c
  misc_feature (436)..(436): n equals a,t,g, or c
  misc_feature (447)..(447): n equals a,t,g, or c
gctnaaacacaccaaaagcaatggggcaacatacaagcctaanacattanggagcananattgngggnattcctcataatnttanaganccttcanaanaggnaaagaccttttcccttgggccaacccaagggccnaanannaanaaggnaaaaaaaacctttgggttcccaaattcccanngnaaaggatttggnaaaaacccaanaaaggncccaanagccgcctttaacccaacggnaaaaatttggggggggaagcaaaagacaattttntttcttgggccaaaaattccnccaattccttggnaaccaaaaaaaggnggggcttaaaattnatttccttaaggaaccttccttaccaaanaggnaaatttttaaanaaccacatattttttaccanagngaaaaaaaaaanaccangccccttggtncanaaaaaagttgngg

SEQ ID NO: 2808 - DNA, 447 bp, Homo sapiens
  misc_feature (4)..(4): n equals a,t,g, or c
  misc_feature (60)..(60): n equals a,t,g, or c
  misc_feature (68)..(68): n equals a,t,g, or c
  misc_feature (70)..(70): n equals a,t,g, or c
  misc_feature (77)..(77): n equals a,t,g, or c
  misc_feature (79)..(79): n equals a,t,g, or c
  misc_feature (93)..(93): n equals a,t,g, or c
  misc_feature (98)..(98): n equals a,t,g, or c
  misc_feature (103)..(103): n equals a,t,g, or c
  misc_feature (120)..(120): n equals a,t,g, or c
  misc_feature (137)..(137): n equals a,t,g, or c
  misc_feature (143)..(143): n equals a,t,g, or c
  misc_feature (150)..(150): n equals a,t,g, or c
  misc_feature (172)..(172): n equals a,t,g, or c
  misc_feature (179)..(179): n equals a,t,g, or c
  misc_feature (181)..(181): n equals a,t,g, or c
  misc_feature (190)..(190): n equals a,t,g, or c
  misc_feature (215)..(215): n equals a,t,g, or c
  misc_feature (226)..(226): n equals a,t,g, or c
  misc_feature (237)..(237): n equals a,t,g, or c
  misc_feature (240)..(240): n equals a,t,g, or c
  misc_feature (261)..(261): n equals a,t,g, or c
  misc_feature (272)..(272): n equals a,t,g, or c
  misc_feature (279)..(279): n equals a,t,g, or c
  misc_feature (288)..(288): n equals a,t,g, or c
  misc_feature (326)..(327): n equals a,t,g, or c
  misc_feature (349)..(350): n equals a,t,g, or c
  misc_feature (362)..(362): n equals a,t,g, or c
  misc_feature (386)..(386): n equals a,t,g, or c
  misc_feature (395)..(396): n equals a,t,g, or c
gcgnctacttcccctatcatagaagagcttatcacctttcatggatcacgaccctcagtnaatcattntntccttantnctgactatcctagntcccnggttntgccctttgtcctgaancaactcaacaaccaaanactaancttaatnacgtaggcattcttcagaacgnctccagngnaaaattagnaaaaccggtcctgaaacttattccntggcccggccnatcaatccctnagntccctgcaaacgacccctccnccatcgccctnaacgacnatccctttnttaccattagacaaggacgggaagggtccaaaacggannccccttccccttttacccaatnnaagattcagatntgggggccacccaaattgggttancttggaaanncttaccggaaggttacacccgaacttaccgggcgaggacttaaaatctttc

SEQ ID NO: 2809 - DNA, 124 bp, Homo sapiens
  misc_feature (2)..(2): n equals a,t,g, or c
  misc_feature (6)..(6): n equals a,t,g, or c
  misc_feature (41)..(41): n equals a,t,g, or c
  misc_feature (52)..(52): n equals a,t,g, or c
  misc_feature (72)..(72): n equals a,t,g, or c
  misc_feature (103)..(103): n equals a,t,g, or c
  misc_feature (118)..(118): n equals a,t,g, or c
tnattnaatgaccaactactgatactgatcacaatggtcangatagattctnatgtagttggaaagttctanatcactttcttatacaagcatgtggaaagtntaaggatacaatccnaatata

SEQ ID NO: 2810 - DNA, 193 bp, Homo sapiens
  misc_feature (5)..(5): n equals a,t,g, or c
  misc_feature (17)..(17): n equals a,t,g, or c
  misc_feature (52)..(52): n equals a,t,g, or c
  misc_feature (64)..(64): n equals a,t,g, or c
  misc_feature (79)..(79): n equals a,t,g, or c
  misc_feature (125)..(125): n equals a,t,g, or c
  misc_feature (129)..(129): n equals a,t,g, or c
  misc_feature (135)..(135): n equals a,t,g, or c
  misc_feature (150)..(150): n equals a,t,g, or c
  misc_feature (152)..(152): n equals a,t,g, or c
  misc_feature (162)..(162): n equals a,t,g, or c
  misc_feature (171)..(171): n equals a,t,g, or c
  misc_feature (182)..(182): n equals a,t,g, or c
ccggntttggttccggngggggaaatttttggggacccttgggggaacccgngggcccaccggnttaaaagcccttgcnttgggggttcccaaccttgggcccgaaaaaccgggccccctttggnttantttttnaagggccggcgggtnanaatttccaanggaatttcnaaaaccttggnccgcaaaagcc

SEQ ID NO: 2811 - DNA, 103 bp, Homo sapiens
  misc_feature (27)..(27): n equals a,t,g, or c
  misc_feature (37)..(37): n equals a,t,g, or c
  misc_feature (50)..(50): n equals a,t,g, or c
  misc_feature (81)..(81): n equals a,t,g, or c
  misc_feature (84)..(84): n equals a,t,g, or c
agtgtggggcaagttaaccttcctttnccaaaattcnaaggccccaagcnaagttaagggccgcccgttccgggttaaggnttnaaaaccaagggccccaagt

SEQ ID NO: 2812 - DNA, 443 bp, Homo sapiens
  misc_feature (34)..(34): n equals a,t,g, or c
  misc_feature (50)..(50): n equals a,t,g, or c
  misc_feature (345)..(345): n equals a,t,g, or c
  misc_feature (411)..(411): n equals a,t,g, or c
gaccgcctcctcccagagtccttcagacgattgntctggtttccagtggnagccgaggctgaaacttagtggcttccctcccaccttttcacccaaaggtgaaatcgcgatgagatttgcgaccgcgggctcacccagtgttagaaatctccgtctctgctacccctggtgccttggtgctgtttttctgacggtcatttagaccgtggagggttagatgttctctacaaaaacgagaaacctctctggttttttaggattgtaggaccgaaattattttatggctcggtgggaagtagtatttcttggctaatttattattagcttttaaccttcatccacttnaccttttaaaccttgcatgcctctgctattgactggtcttgccaacgaaaagcttacgcattgcanatacagtatttgcttctgagtggatcttgaaa

SEQ ID NO: 2813 - DNA, 448 bp, Homo sapiens
  misc_feature (2)..(2): n equals a,t,g, or c
  misc_feature (10)..(10): n equals a,t,g, or c
  misc_feature (17)..(17): n equals a,t,g, or c
  misc_feature (20)..(20): n equals a,t,g, or c
  misc_feature (28)..(28): n equals a,t,g, or c
  misc_feature (39)..(39): n equals a,t,g, or c
  misc_feature (45)..(45): n equals a,t,g, or c
  misc_feature (47)..(47): n equals a,t,g, or c
  misc_feature (52)..(52): n equals a,t,g, or c
  misc_feature (77)..(77): n equals a,t,g, or c
  misc_feature (104)..(104): n equals a,t,g, or c
  misc_feature (129)..(129): n equals a,t,g, or c
  misc_feature (131)..(131): n equals a,t,g, or c
  misc_feature (139)..(139): n equals a,t,g, or c
  misc_feature (146)..(146): n equals a,t,g, or c
  misc_feature (151)..(151): n equals a,t,g, or c
  misc_feature (161)..(161): n equals a,t,g, or c
  misc_feature (207)..(208): n equals a,t,g, or c
  misc_feature (220)..(220): n equals a,t,g, or c
  misc_feature (227)..(227): n equals a,t,g, or c
  misc_feature (248)..(248): n equals a,t,g, or c
  misc_feature (269)..(269): n equals a,t,g, or c
  misc_feature (297)..(297): n equals a,t,g, or c
  misc_feature (309)..(309): n equals a,t,g, or c
  misc_feature (365)..(365): n equals a,t,g, or c
  misc_feature (384)..(384): n equals a,t,g, or c
gnaaaacatnacatttntgntacccaancccatcccaantttagncntttantggttttaaaccttggaaccaaagnccttccccaattttttaaaaaacccanggaattggtttccccaattcccaangnaaattggnaacccanaaggnaaaaaaaagngggccttgggcccttgggtttaacccttgggaaaaagggtttatannagagcccaaaanaacccanaatttaaccccttgggaaaanttggccttccttgggttaagnccccttaaaaaacttccccaaaaaccantccccttccttncccaataattggggaatcccaccttggggcttggggacaaaaaactggcacccaantttggctggccttccaatntttattaccttccaattttttccacttggtgtcccaagggtgggtacttttggggcttcgtttg

SEQ ID NO: 2814 - DNA, 445 bp, Homo sapiens
  misc_feature (3)..(3): n equals a,t,g, or c
  misc_feature (42)..(42): n equals a,t,g, or c
  misc_feature (52)..(52): n equals a,t,g, or c
  misc_feature (55)..(55): n equals a,t,g, or c
  misc_feature (58)..(58): n equals a,t,g, or c
  misc_feature (80)..(80): n equals a,t,g, or c
  misc_feature (83)..(83): n equals a,t,g, or c
  misc_feature (89)..(89): n equals a,t,g, or c
  misc_feature (97)..(97): n equals a,t,g, or c
  misc_feature (103)..(103): n equals a,t,g, or c
  misc_feature (108)..(108): n equals a,t,g, or c
  misc_feature (116)..(116): n equals a,t,g, or c
  misc_feature (132)..(132): n equals a,t,g, or c
  misc_feature (136)..(136): n equals a,t,g, or c
  misc_feature (152)..(152): n equals a,t,g, or c
  misc_feature (158)..(158): n equals a,t,g, or c
  misc_feature (180)..(180): n equals a,t,g, or c
  misc_feature (198)..(198): n equals a,t,g, or c
  misc_feature (233)..(233): n equals a,t,g, or c
  misc_feature (235)..(235): n equals a,t,g, or c
  misc_feature (239)..(239): n equals a,t,g, or c
  misc_feature (265)..(265): n equals a,t,g, or c
  misc_feature (274)..(274): n equals a,t,g, or c
  misc_feature (276)..(276): n equals a,t,g, or c
  misc_feature (292)..(292): n equals a,t,g, or c
  misc_feature (327)..(327): n equals a,t,g, or c
  misc_feature (360)..(360): n equals a,t,g, or c
ggnacaaccttagccaaaccatttacccaaattaaagttatnagggcgcatnagnaanatttggaaaacccttggggcgncanattagnattattanggttancccgnccaaaagnggggaaaaagcattgnaaanaaaaattttattaaanccccanagggccaattaaaattaattanggccacaaggggaacttnaaaccccccccttaattaaccccttttccttggcnanttanaattggaaattttaaaaccttaagcnaaaaaattnanaccttttttggccaanagggggaagaaagaccccaaaaaggcctttaaagngaacccccccccggaaaaaaccccaggaaccgnaaggcttaaccccttaaagggaaaccaggcctttaaaaaaaggaaggccaccaaccccccggttccttaattgggttaaggccaa

SEQ ID NO: 2815 - DNA, 453 bp, Homo sapiens
  misc_feature (7)..(7): n equals a,t,g, or c
  misc_feature (17)..(17): n equals a,t,g, or c
  misc_feature (32)..(32): n equals a,t,g, or c
  misc_feature (50)..(50): n equals a,t,g, or c
  misc_feature (52)..(52): n equals a,t,g, or c
  misc_feature (69)..(69): n equals a,t,g, or c
  misc_feature (81)..(81): n equals a,t,g, or c
  misc_feature (86)..(86): n equals a,t,g, or c
  misc_feature (94)..(94): n equals a,t,g, or c
  misc_feature (103)..(103): n equals a,t,g, or c
  misc_feature (111)..(111): n equals a,t,g, or c
  misc_feature (114)..(114): n equals a,t,g, or c
  misc_feature (143)..(143): n equals a,t,g, or c
  misc_feature (156)..(156): n equals a,t,g, or c
  misc_feature (159)..(159): n equals a,t,g, or c
  misc_feature (168)..(168): n equals a,t,g, or c
  misc_feature (190)..(191): n equals a,t,g, or c
  misc_feature (194)..(194): n equals a,t,g, or c
  misc_feature (219)..(219): n equals a,t,g, or c
  misc_feature (221)..(221): n equals a,t,g, or c
  misc_feature (237)..(237): n equals a,t,g, or c
  misc_feature (254)..(255): n equals a,t,g, or c
  misc_feature (264)..(264): n equals a,t,g, or c
  misc_feature (279)..(279): n equals a,t,g, or c
  misc_feature (312)..(312): n equals a,t,g, or c
  misc_feature (317)..(317): n equals a,t,g, or c
  misc_feature (322)..(322): n equals a,t,g, or c
  misc_feature (337)..(337): n equals a,t,g, or c
  misc_feature (350)..(350): n equals a,t,g, or c
  misc_feature (375)..(375): n equals a,t,g, or c
  misc_feature (393)..(393): n equals a,t,g, or c
  misc_feature (446)..(446): n equals a,t,g, or c
gcattgnccccatgtgnaagttcacttggtgncccagccccaaggaaacnancttggggttccttccgnggggccccccgnaagcnaaaaaggnaaccccttncccccttnttnttgtcttccccccacggggggcctttttntttaaagaagggnttnaaattaccnaaaccccccaaaccctttgaannaanaaggaatttccccttcccccccaangnggggggggggcccaancccccaaattttttggnnaaaaaaaanttcccccctttgggnaaggatttgcaaattgggtttggccaaaggccnttggnaattnccaacaaggcaaccnttgggggaaaggnaacccaaaaaagcttgggggggaanaccccaaggccggaaaangccccaacccggcctttggcctttggaaaccaattgggccttccaaaccaatncatcccc

SEQ ID NO: 2816 - DNA, 139 bp, Homo sapiens
  misc_feature (23)..(23): n equals a,t,g, or c
  misc_feature (58)..(58): n equals a,t,g, or c
  misc_feature (72)..(72): n equals a,t,g, or c
  misc_feature (89)..(89): n equals a,t,g, or c
  misc_feature (94)..(94): n equals a,t,g, or c
  misc_feature (134)..(134): n equals a,t,g, or c
gcggcacgagggggggccctggntacccaattcgcccttatcagcttgcagttcggtnatctatcatatttncaacttgggtcccggtncgatnttttcaccaaaccgctccggttgtaacttggggggaaaanacccc

SEQ ID NO: 2817 - DNA, 113 bp, Homo sapiens
  misc_feature (15)..(15): n equals a,t,g, or c
  misc_feature (17)..(17): n equals a,t,g, or c
  misc_feature (42)..(42): n equals a,t,g, or c
  misc_feature (52)..(52): n equals a,t,g, or c
  misc_feature (72)..(72): n equals a,t,g, or c
  misc_feature (110)..(110): n equals a,t,g, or c
taccaaaggaccttngncaaaaaaaggggggctttccttaanaaaaaccaanaaaatttgggaaattaaggntttttaatttttaaccaattcccgggttccccttcccnttg

SEQ ID NO: 2818 - DNA, 141 bp, Homo sapiens
  misc_feature (1)..(1): n equals a,t,g, or c
  misc_feature (16)..(16): n equals a,t,g, or c
  misc_feature (85)..(85): n equals a,t,g, or c
  misc_feature (90)..(90): n equals a,t,g, or c
  misc_feature (102)..(102): n equals a,t,g, or c
  misc_feature (125)..(125): n equals a,t,g, or c
  misc_feature (135)..(135): n equals a,t,g, or c
naaaaggggacccccnttagggaaaaaactggagctccaccgcggtggcggccgctctacaactaactggatcccccgggctgcnggaanactgcacgaggnagctgagtggtatgtgtggtcgncgtctcgcgnaaaacc

SEQ ID NO: 2819 - DNA, 75 bp, Homo sapiens
  misc_feature (3)..(3): n equals a,t,g, or c
  misc_feature (8)..(8): n equals a,t,g, or c
  misc_feature (22)..(22): n equals a,t,g, or c
  misc_feature (25)..(25): n equals a,t,g, or c
agncgcgnagtggggctcgggnagnaggtagtggcacgccgctggccaggatggtgctggagagcgtggcccgta

SEQ ID NO: 2820 - DNA, 450 bp, Homo sapiens
  misc_feature (24)..(24): n equals a,t,g, or c
  misc_feature (49)..(49): n equals a,t,g, or c
  misc_feature (74)..(74): n equals a,t,g, or c
  misc_feature (78)..(78): n equals a,t,g, or c
  misc_feature (91)..(91): n equals a,t,g, or c
  misc_feature (107)..(107): n equals a,t,g, or c
  misc_feature (111)..(111): n equals a,t,g, or c
  misc_feature (114)..(114): n equals a,t,g, or c
  misc_feature (123)..(123): n equals a,t,g, or c
  misc_feature (135)..(135): n equals a,t,g, or c
  misc_feature (147)..(147): n equals a,t,g, or c
  misc_feature (150)..(150): n equals a,t,g, or c
  misc_feature (162)..(162): n equals a,t,g, or c
  misc_feature (185)..(185): n equals a,t,g, or c
  misc_feature (280)..(280): n equals a,t,g, or c
  misc_feature (294)..(294): n equals a,t,g, or c
  misc_feature (297)..(297): n equals a,t,g, or c
  misc_feature (305)..(305): n equals a,t,g, or c
  misc_feature (403)..(403): n equals a,t,g, or c
  misc_feature (409)..(409): n equals a,t,g, or c
gctcgtgccgaattcggcacgagnattatatcttatgaagctgcttggnaatggggttttcccctctgtaacanaatnaatttcctggatncatcccattatccccnttanagnaaccaccgngaattttcctgnggggggcccagnggnaagagttaaagnatgtctaatcctggaacaaaagncctttccctggggtggttcaaacccactttggccaatcatgtttgggtccagatggctggggcccctggcctgggggttcttattaggaaattgnagccttccttttgntcntggaacgnctccttgtttggccatcccccttttcttccaatcaagcctttggtagccaagtacctgggggaacctggcatccctggtgggaaaaggatggggaggnaacagnatggacatcttccaagttcaagcttcgttaatataacctga

SEQ ID NO: 2821 - DNA, 438 bp, Homo sapiens
  misc_feature (12)..(12): n equals a,t,g, or c
  misc_feature (25)..(25): n equals a,t,g, or c
  misc_feature (29)..(29): n equals a,t,g, or c
  misc_feature (32)..(32): n equals a,t,g, or c
  misc_feature (39)..(39): n equals a,t,g, or c
  misc_feature (41)..(41): n equals a,t,g, or c
  misc_feature (48)..(48): n equals a,t,g, or c
  misc_feature (52)..(52): n equals a,t,g, or c
  misc_feature (61)..(61): n equals a,t,g, or c
  misc_feature (72)..(72): n equals a,t,g, or c
  misc_feature (81)..(81): n equals a,t,g, or c
  misc_feature (83)..(83): n equals a,t,g, or c
  misc_feature (85)..(85): n equals a,t,g, or c
  misc_feature (109)..(109): n equals a,t,g, or c
  misc_feature (117)..(117): n equals a,t,g, or c
  misc_feature (142)..(142): n equals a,t,g, or c
  misc_feature (145)..(145): n equals a,t,g, or c
  misc_feature (154)..(154): n equals a,t,g, or c
  misc_feature (164)..(164): n equals a,t,g, or c
  misc_feature (167)..(167): n equals a,t,g, or c
  misc_feature (170)..(170): n equals a,t,g, or c
  misc_feature (183)..(183): n equals a,t,g, or c
  misc_feature (187)..(187): n equals a,t,g, or c
  misc_feature (197)..(197): n equals a,t,g, or c
  misc_feature (200)..(200): n equals a,t,g, or c
  misc_feature (207)..(207): n equals a,t,g, or c
  misc_feature (210)..(210): n equals a,t,g, or c
  misc_feature (228)..(228): n equals a,t,g, or c
  misc_feature (238)..(238): n equals a,t,g, or c
  misc_feature (255)..(255): n equals a,t,g, or c
  misc_feature (258)..(258): n equals a,t,g, or c
  misc_feature (266)..(266): n equals a,t,g, or c
  misc_feature (287)..(287): n equals a,t,g, or c
  misc_feature (294)..(294): n equals a,t,g, or c
  misc_feature (312)..(312): n equals a,t,g, or c
  misc_feature (336)..(336): n equals a,t,g, or c
  misc_feature (340)..(340): n equals a,t,g, or c
gagcttcctggnagttacctcagcnaganagnactaagnanatttagnaagnaaaaaaagnggggaaaaagnaaccctctntntnccttttccctcaagggtttaaaanggtttggnttcccaaaaagggttttaacccaanggnaaatttggnccctttcccnttnttntttggggaaaccntttntttaaatttnggnaaaattnggngggggggggggttttttnaaatttgggnttttcccccccccaaanggnttttaaanaagaaaaccccccccccaaanttttttngggggggaaaaaaaaggnttttcccaaaaaaaaattttgggncccnaattttttttttaaaaaatttaaaacccccccccccctttgggaaaacctttgggggggaaacccaaacccccaaacccaaagggcccttttttaaag

SEQ ID NO: 2822 - DNA, 370 bp, Homo sapiens
  misc_feature (2)..(2): n equals a,t,g, or c
  misc_feature (27)..(27): n equals a,t,g, or c
  misc_feature (37)..(37): n equals a,t,g, or c
  misc_feature (46)..(46): n equals a,t,g, or c
  misc_feature (70)..(70): n equals a,t,g, or c
  misc_feature (98)..(98): n equals a,t,g, or c
  misc_feature (103)..(103): n equals a,t,g, or c
  misc_feature (123)..(123): n equals a,t,g, or c
  misc_feature (255)..(255): n equals a,t,g, or c
  misc_feature (274)..(274): n equals a,t,g, or c
  misc_feature (320)..(320): n equals a,t,g, or c
  misc_feature (348)..(348): n equals a,t,g, or c
  misc_feature (356)..(356): n equals a,t,g, or c
gnacacttgaaagatcattaggactancaaatataancaagatcanggagtggtcttgggctttgaagancacataccaagaacatcaagagaactcnatatnaattcaatataaaagctacnattcaaggccaattatctcttttgagttagaaaagcccaatggagagccactcacgcaaatcaataccctttccttctctcagttgggagccagacatctctaactatcctctgaattaaactggatttttnaaatgtttttctgtccctnaactctttggatcctgaagtcatcctttctttgttccatcaatctngctccataataccattactccaacttgnttgaacanttattgggcatatg

SEQ ID NO: 2823 - DNA, 54 bp, Homo sapiens
  misc_feature (21)..(21): n equals a,t,g, or c
  misc_feature (47)..(47): n equals a,t,g, or c
  misc_feature (49)..(49): n equals a,t,g, or c
  misc_feature (53)..(53): n equals a,t,g, or c
ggtttttttttttttttttgnatttgaaaaatgcaatattttccccngntttnt

SEQ ID NO: 2824 - DNA, 99 bp, Homo sapiens
  misc_feature (12)..(12): n equals a,t,g, or c
  misc_feature (24)..(24): n equals a,t,g, or c
  misc_feature (36)..(36): n equals a,t,g, or c
  misc_feature (41)..(41): n equals a,t,g, or c
  misc_feature (96)..(96): n equals a,t,g, or c
tgctcgtagctnccctctattaanggaacaaatgcnggctnctccaccgaaagtggcggccgttctagaactagtggatcccccgggctgcagganttc

SEQ ID NO: 2825 - DNA, 545 bp, Homo sapiens
  misc_feature (186)..(186): n equals a,t,g, or c
  misc_feature (319)..(321): n equals a,t,g, or c
  misc_feature (327)..(327): n equals a,t,g, or c
  misc_feature (331)..(331): n equals a,t,g, or c
  misc_feature (419)..(419): n equals a,t,g, or c
  misc_feature (438)..(438): n equals a,t,g, or c
  misc_feature (452)..(452): n equals a,t,g, or c
  misc_feature (463)..(463): n equals a,t,g, or c
  misc_feature (476)..(476): n equals a,t,g, or c
  misc_feature (504)..(504): n equals a,t,g, or c
  misc_feature (518)..(518): n equals a,t,g, or c
  misc_feature (538)..(538): n equals a,t,g, or c
gctcctctaggctgaaattacctggagaagcatcacagcaggtactctctgttccaggaaacagaaggtagcccagattgtttgagaactgctgacatccacagatcctcacagttaggttaaaaattgttgaaaaggcactacttggagaatgtgctgtgtttctgctgcatgtgtgatcagaangcagctgcagcttatgaaccagaaaaatagggttagtggctaagtaaaaggtgtgtggagcaaccacaaaatgattcagggttatacttctcccaaaggacggtaaaattaaatcgagaacaaaatcaaatcnnnaagaanaaanaagtatctccagtacatattgtgggatcacagctacaaaagcattagatggtaaaattatcctttcctgctttttgtgttttaagatntctccccgttccaatgttnttggcctgggcacnggaattatacncctacaattacanctgaaaaattctggttatcactcatggncttgacatgcaaancctccttttcacatattgantgctaat

SEQ ID NO: 2826 - DNA, 118 bp, Homo sapiens
  misc_feature (2)..(2): n equals a,t,g, or c
  misc_feature (8)..(8): n equals a,t,g, or c
  misc_feature (11)..(11): n equals a,t,g, or c
  misc_feature (36)..(36): n equals a,t,g, or c
  misc_feature (44)..(44): n equals a,t,g, or c
  misc_feature (104)..(104): n equals a,t,g, or c
  misc_feature (112)..(112): n equals a,t,g, or c
  misc_feature (114)..(114): n equals a,t,g, or c
angctcgntanatcccctattataaagggaacaaangcgggccnctccaccgaaagtggcggccgttctagaactagtggatcccccgggctgcaggaattcgncacgagtntnattc

SEQ ID NO: 2827 - DNA, 351 bp, Homo sapiens
  misc_feature (281)..(281): n equals a,t,g, or c
gccagatttggtcccaaaggatacgactgttagcaaaaaccaaatttacctgctaaaggatgagctatttaaaaggaatgtgtcacttgctgtgtaactgcattccaacaaggagttacataaatgttttgagacagcagcatctttggagtaagtgccaagcctccagaggaaccctggtaaagggaagcagtggtctcatttggatatgcaggttcttgcatttttgttataaaatctactctcctttgaagttacctcttgtattgtaatctctatantaatccattctgtatttcagacataaattctctttttctgggccatccttcctatctgtgttcacaaatc

SEQ ID NO: 2828 - DNA, 238 bp, Homo sapiens
  misc_feature (9)..(9): n equals a,t,g, or c
  misc_feature (14)..(15): n equals a,t,g, or c
  misc_feature (64)..(64): n equals a,t,g, or c
  misc_feature (122)..(122): n equals a,t,g, or c
  misc_feature (125)..(125): n equals a,t,g, or c
  misc_feature (130)..(130): n equals a,t,g, or c
  misc_feature (136)..(136): n equals a,t,g, or c
  misc_feature (185)..(185): n equals a,t,g, or c
  misc_feature (196)..(196): n equals a,t,g, or c
  misc_feature (199)..(199): n equals a,t,g, or c
  misc_feature (220)..(220): n equals a,t,g, or c
  misc_feature (223)..(223): n equals a,t,g, or c
tgcgcgttngcgtnnctccttaccaaaggaacaaattcggctcctccaccgaaagtggcggccnttctagaactagtggatcccccgggctgcaggagttccccacgagcagcaaaacaacnacnaaggntctgtntttgcagaggggtctatcatgcttttaagaaataagaagagtaccgganagaaattcatnatngacattagagtattttggatntcnttaaactttgtccat

SEQ ID NO: 2829 - DNA, 113 bp, Homo sapiens
  misc_feature (102)..(102): n equals a,t,g, or c
  misc_feature (110)..(113): n equals a,t,g, or c
gcggcacgagcggcacgagggggggcccggtacccaattcgccctatagtgagtcgtattacaattcactggccgtcgttttacaacgtcgtgactgggaancccaaacnnnn

SEQ ID NO: 2830 - DNA, 132 bp, Homo sapiens
  misc_feature (1)..(1): n equals a,t,g, or c
  misc_feature (29)..(29): n equals a,t,g, or c
  misc_feature (81)..(81): n equals a,t,g, or c
  misc_feature (108)..(108): n equals a,t,g, or c
  misc_feature (110)..(110): n equals a,t,g, or c
  misc_feature (113)..(113): n equals a,t,g, or c
  misc_feature (128)..(128): n equals a,t,g, or c
nttccccaccaacagaaggaactattaanttcaatgtttgggaaacagcccgggcaaggaagaaattcccgggggaatganaaaatggtattatttcccaaccccatntnccntcctaatgtttgaanttac

SEQ ID NO: 2831 - DNA, 106 bp, Homo sapiens
  misc_feature (79)..(79): n equals a,t,g, or c
  misc_feature (84)..(84): n equals a,t,g, or c
  misc_feature (102)..(104): n equals a,t,g, or c
gcggcacgagggggggcccggtacccaattcgccctatagtgagtcgtattacaattcactggccgtcgttttacaacntcgtnactgggaaacccaaagannnat

SEQ ID NO: 2832 - DNA, 132 bp, Homo sapiens
  misc_feature (3)..(3): n equals a,t,g, or c
  misc_feature (5)..(5): n equals a,t,g, or c
  misc_feature (16)..(16): n equals a,t,g, or c
  misc_feature (86)..(86): n equals a,t,g, or c
  misc_feature (93)..(93): n equals a,t,g, or c
  misc_feature (102)..(102): n equals a,t,g, or c
  misc_feature (107)..(107): n equals a,t,g, or c
  misc_feature (128)..(128): n equals a,t,g, or c
tgntnttaactcgtanggcaaagtaactcactggtggggcgctctaaatagtggatccgggggctgcaggattcggcacgagctcntgcccanctccgttanatacnaccacctgcttcctccttgcnatcc

SEQ ID NO: 2833 - DNA, 101 bp, Homo sapiens
  misc_feature (93)..(94): n equals a,t,g, or c
  misc_feature (96)..(97): n equals a,t,g, or c
  misc_feature (101)..(101): n equals a,t,g, or c
gctcgtgcccggtacccaattcgccctatagtgagtcgtattacaattcactggccgtcgttttacaacgtcgtgactgggaaaaaccccaanngnnaatn

SEQ ID NO: 2834 - DNA, 70 bp, Homo sapiens
  misc_feature (42)..(42): n equals a,t,g, or c
  misc_feature (46)..(46): n equals a,t,g, or c
  misc_feature (56)..(56): n equals a,t,g, or c
  misc_feature (58)..(58): n equals a,t,g, or c
  misc_feature (66)..(66): n equals a,t,g, or c
gctcgtgccgaattcggcacgaggtttttttttttttttttngggnctttatttgntnaaataacnctaa

SEQ ID NO: 2835 - DNA, 102 bp, Homo sapiens
  misc_feature (11)..(11): n equals a,t,g, or c
  misc_feature (22)..(22): n equals a,t,g, or c
  misc_feature (38)..(38): n equals a,t,g, or c
  misc_feature (57)..(57): n equals a,t,g, or c
  misc_feature (73)..(73): n equals a,t,g, or c
cctattcatanaccgggacttnggtgctcataactgcntggtggacatagatctctnctgtgaaaatatctcnactttggagtgaccaggtcatgttcctga

SEQ ID NO: 2836 - DNA, 308 bp, Homo sapiens
  misc_feature (18)..(18): n equals a,t,g, or c
  misc_feature (26)..(26): n equals a,t,g, or c
  misc_feature (34)..(35): n equals a,t,g, or c
  misc_feature (62)..(62): n equals a,t,g, or c
  misc_feature (73)..(73): n equals a,t,g, or c
  misc_feature (110)..(110): n equals a,t,g, or c
  misc_feature (121)..(121): n equals a,t,g, or c
  misc_feature (146)..(146): n equals a,t,g, or c
  misc_feature (149)..(149): n equals a,t,g, or c
  misc_feature (176)..(176): n equals a,t,g, or c
  misc_feature (178)..(178): n equals a,t,g, or c
  misc_feature (246)..(246): n equals a,t,g, or c
  misc_feature (276)..(276): n equals a,t,g, or c
gctggatggtgctactgncaacagtnagtgttcnnggtgactgctactgctgtgcaatgctnagcgccacatnccatgggaccacgtgtcctttaataaacatattcagngtgcgcttatngaactcatggcttctaaagcacaangantatgtttcaaacatagtgctatctctnancaccatttgttagcctccatctgctcagtgggattcctaccaagctcacttatgaccggattatattnaaaaaagcttccacctgaaacttacctganactttctcttctctgtttataaatcctaaatc

SEQ ID NO: 2837 - DNA, 319 bp, Homo sapiens
  misc_feature (220)..(220): n equals a,t,g, or c
gagtattaatactgtgctgcattagagaagcctcttccatgtgggaaagctgcttgcaatttcagtttcttgtgtgtatgcctatgtaactgagtgtttaaaatttcttcaaaaactatcaaaacagaagcacacagaagtacacctattaggcgaggatatcgttggtctaatcatctatcctgggactctgagaaatgagatggaagctggtaatgangatggaatgcaaatttgatgctttttaacatttttcaccacatttcccaaacttcttgaccctacttctgtttttaatgcatggcacaatcttgaaccc

SEQ ID NO: 2838 - DNA, 113 bp, Homo sapiens
  misc_feature (104)..(104): n equals a,t,g, or c
  misc_feature (109)..(112): n equals a,t,g, or c
gcggcacgagcggcacgagggggggcccggtacccaattcgccctatagtgagtcgtattacaattcactggccgtcgttttacaacgtcgtgactgggaaaancaaannnnc

SEQ ID NO: 2839 - DNA, 283 bp, Homo sapiens
  misc_feature (53)..(53): n equals a,t,g, or c
  misc_feature (65)..(65): n equals a,t,g, or c
  misc_feature (98)..(98): n equals a,t,g, or c
  misc_feature (145)..(145): n equals a,t,g, or c
  misc_feature (227)..(227): n equals a,t,g, or c
  misc_feature (241)..(241): n equals a,t,g, or c
  misc_feature (253)..(253): n equals a,t,g, or c
  misc_feature (263)..(263): n equals a,t,g, or c
  misc_feature (283)..(283): n equals a,t,g, or c
gcaccaccgtgcggacaccacccctgcagaatcatctgtgaaaacaaccccangcccagacatangggccaactaagcttcgtagccctcgaaatacngggagtgccccctctggaccctcgagcccacagtccatccaccacanaggtgtctgctgctcatcagatagttcctaccaagaaaatgctgtgtgaacccatctgtgtggcaaaccggcacggggaganagctgacttccaangacgtctaccanctgtcacttngaaaccagaactgggctctn

SEQ ID NO: 2840 - DNA, 101 bp, Homo sapiens
  misc_feature (7)..(7): n equals a,t,g, or c
  misc_feature (14)..(14): n equals a,t,g, or c
  misc_feature (30)..(30): n equals a,t,g, or c
  misc_feature (49)..(49): n equals a,t,g, or c
  misc_feature (63)..(63): n equals a,t,g, or c
gggggtntttctancaactagtggatcccncgggctggatgaatgcggnccgagttatggganagttcctcatccgcctccttgctcgccggagccgccac

SEQ ID NO: 2841 - DNA, 419 bp, Homo sapiens
  misc_feature (220)..(221): n equals a,t,g, or c
  misc_feature (414)..(414): n equals a,t,g, or c
gctggtgtggaggcagttgggagctgtgttcctttggtccccagactccccctgaatctgctgtctgcgcgttcattgatgtccccttgctatgccatgtgctttcacaagccgttgctgctgcctgcagtgccctttttttcattctggagcctgacgagcttctgactgtagactctgtcatttccttcaggatgcctgccccatgtccttgcagttnngtcttctctgtgctcccttaacccttagcaaatatcactagaataggatttgttttttaaatggcgaaagcctacttacttaactgtattaattcagtctttcagtatacacttatttattttttaagctcttataaccaggggcttagagagatgtttcagtaaagaaactaggaaattagtagttaggtcnctata

SEQ ID NO: 2842 - DNA, 159 bp, Homo sapiens
  misc_feature (8)..(8): n equals a,t,g, or c
  misc_feature (10)..(10): n equals a,t,g, or c
  misc_feature (54)..(54): n equals a,t,g, or c
  misc_feature (101)..(101): n equals a,t,g, or c
  misc_feature (104)..(104): n equals a,t,g, or c
  misc_feature (127)..(128): n equals a,t,g, or c
  misc_feature (158)..(158): n equals a,t,g, or c
caatttcntnccttgtttacgtaaattttgaaagattgcatgatttcttgacanaaatcgatcttgatgctgtggaagtagtttgaggaacatcctatganttntcttaaaatgtataaaggttgtnncccctccatcttcaaataaaaaaatgaccnc

SEQ ID NO: 2843 - DNA, 130 bp, Homo sapiens
  misc_feature (14)..(14): n equals a,t,g, or c
  misc_feature (19)..(19): n equals a,t,g, or c
  misc_feature (54)..(54): n equals a,t,g, or c
  misc_feature (63)..(63): n equals a,t,g, or c
  misc_feature (65)..(65): n equals a,t,g, or c
  misc_feature (104)..(104): n equals a,t,g, or c
  misc_feature (106)..(106): n equals a,t,g, or c
tcttgtcgaatgcncctanacttaaagggaacaaaagctggctcctccaccgcnagtggcggntnctctagaactagtggatcccccgggctgcaggaattcgncncgagccatcttccagtaattcgcc

SEQ ID NO: 2844 - DNA, 99 bp, Homo sapiens
  misc_feature (7)..(7): n equals a,t,g, or c
  misc_feature (32)..(32): n equals a,t,g, or c
  misc_feature (36)..(36): n equals a,t,g, or c
  misc_feature (40)..(40): n equals a,t,g, or c
  misc_feature (52)..(52): n equals a,t,g, or c
  misc_feature (56)..(56): n equals a,t,g, or c
  misc_feature (71)..(71): n equals a,t,g, or c
  misc_feature (90)..(90): n equals a,t,g, or c
  misc_feature (98)..(98): n equals a,t,g, or c
gtaaatntaatggggggttggatttgaatttngtanaaangggtttgggggncgcncccccaaaaaaatcnttttttttctcggagttantgggatcnc

SEQ ID NO: 2845 - DNA, 326 bp, Homo sapiens
  misc_feature (131)..(131): n equals a,t,g, or c
  misc_feature (184)..(184): n equals a,t,g, or c
  misc_feature (191)..(191): n equals a,t,g, or c
  misc_feature (218)..(218): n equals a,t,g, or c
  misc_feature (226)..(226): n equals a,t,g, or c
  misc_feature (229)..(229): n equals a,t,g, or c
  misc_feature (239)..(239): n equals a,t,g, or c
  misc_feature (252)..(252): n equals a,t,g, or c
  misc_feature (296)..(296): n equals a,t,g, or c
  misc_feature (306)..(306): n equals a,t,g, or c
ggagcaccctggtcacctgggggttgtggttagagtgccctccagccaagcctgcagcccagaccgagctagactggaaggggtagaagggcattcaggtagggacacagcctgggcaaaggggccctganctttggcagctgcgggaagatgagcccacctgaaagggaagctgcattgaatncagtcangacctgggctgtagggctcacctctanacagcatnacncaaagggttnggggggtctcctnccggccttaataaaaggccaaaattttccaccgttccagaaatncgggttgccnctttaattggaaaccacccc

SEQ ID NO: 2846 - DNA, 104 bp, Homo sapiens
  misc_feature (93)..(93): n equals a,t,g, or c
  misc_feature (95)..(95): n equals a,t,g, or c
  misc_feature (102)..(104): n equals a,t,g, or c
gcggcacgagggggggcccggtacccaattcgccctatagtgagtcgtattacaattcactggccgtcgttttacaacgtcgtgactgggaancncaaaaannn

SEQ ID NO: 2847 - DNA, 296 bp, Homo sapiens
  misc_feature (147)..(147): n equals a,t,g, or c
  misc_feature (231)..(231): n equals a,t,g, or c
  misc_feature (246)..(246): n equals a,t,g, or c
  misc_feature (258)..(258): n equals a,t,g, or c
  misc_feature (280)..(281): n equals a,t,g, or c
gttttcttttcttttctccaactgcttgataatgccttgccctatggttgggcccagaagcacagcaagttctggggctcatttttgagccaattcttggtagaagggtggggcatcccagttcttaaaaggatttcctatgcaganattgtcattgtcatcctcaccaccagaagaccagcattgattattttatcctcctttttgcaaatgttccatcttggaccacantgattttacaaaganaacttaaaaaangcttgaaatcccaaacttcttnntttcacaaaaactaa

SEQ ID NO: 2848 - DNA, 96 bp, Homo sapiens
  misc_feature (92)..(93): n equals a,t,g, or c
gcggcacgagggggggcccggtacccaattcgccctatagtgagtcgtattacaattcactggccgtcgttttacaacgtcgtgactgaccnnaaa

SEQ ID NO: 2849 - DNA, 338 bp, Homo sapiens
  misc_feature (249)..(249): n equals a,t,g, or c
  misc_feature (296)..(296): n equals a,t,g, or c
  misc_feature (306)..(306): n equals a,t,g, or c
  misc_feature (308)..(308): n equals a,t,g, or c
  misc_feature (330)..(330): n equals a,t,g, or c
ggatggatggattttaatccagttttcataatgatacaatgggttgattgcagcattttgatgtggggaatataaagatattataaaggaagatttatttttaaattacaatttttgaaagttataatagattctgtagtacattcaattgtcattaaccactgggtttcctctgtaatatttgtctatcaaatgatcaattttcaattcagatgaattatcaagaatacatttttttaaaaaacatcnaaaactataaaaaataaatttcttgaaaacattgcatccttgtttcntattaaaccntnggcttaataaataaaaagtganattggcca

SEQ ID NO: 2850 - DNA, 303 bp, Homo sapiens
  misc_feature (215)..(215): n equals a,t,g, or c
  misc_feature (241)..(242): n equals a,t,g, or c
  misc_feature (252)..(252): n equals a,t,g, or c
  misc_feature (302)..(302): n equals a,t,g, or c
gttcactcacgcatacacatatttgaagaaaatactcagatccttccttaatgaacatagttccaagtatgtcaatactagatatcactggccacagagttttggaccatagtttgtaatccttaattcatgttagagtatctgagtttattcatctgagtgaatttagaaactttactttgaagctgaattttcattatattcaggcggttgtngaatttttttctgaaagtctaatttnnttcttaattntgaaaataccaatagtgtcttctataaatgcacttataaaatattgtacnc

SEQ ID NO: 2851 - DNA, 98 bp, Homo sapiens
  misc_feature (92)..(94): n equals a,t,g, or c
gcggcacgagggggggcccggtacccaattcgccctatagtgagtcgtattacaattcactggccgtcgttttacaacgtcgtgactgaccnnnaaaa

SEQ ID NO: 2852 - DNA, 60 bp, Homo sapiens
  misc_feature (43)..(43): n equals a,t,g, or c
  misc_feature (45)..(45): n equals a,t,g, or c
  misc_feature (48)..(48): n equals a,t,g, or c
  misc_feature (52)..(53): n equals a,t,g, or c
gctcgagttttttttttttttttggggggtccaaaattttatnanctntttnnaaaaaaa

SEQ ID NO: 2853 - DNA, 360 bp, Homo sapiens
  misc_feature (192)..(192): n equals a,t,g, or c
  misc_feature (271)..(271): n equals a,t,g, or c
  misc_feature (299)..(299): n equals a,t,g, or c
  misc_feature (314)..(314): n equals a,t,g, or c
  misc_feature (318)..(318): n equals a,t,g, or c
  misc_feature (337)..(337): n equals a,t,g, or c
gttttagtatcttgatgctcctgtcaaaagggaaatgaggcttttaaaaataaagtaccttaattctttattgactttttgccctaaattgctaggtgtgacccagcaatcttttaggaagagattttacagtggtgctttatttatatcaataatccagtatagttaggctgttcattcctcataatagantacataacagaaaattggactttcacattttcatatttagccttcccatttaatcccaaaatctctgtattctcatctnaaaaacgatccccattccaattatggtnccaacccccttggtntaanattaaattacctttattanttttcttaaacatttggaatttg

SEQ ID NO: 2854 - DNA, 176 bp, Homo sapiens
  misc_feature (1)..(1): n equals a,t,g, or c
  misc_feature (18)..(18): n equals a,t,g, or c
  misc_feature (63)..(63): n equals a,t,g, or c
  misc_feature (110)..(110): n equals a,t,g, or c
  misc_feature (145)..(145): n equals a,t,g, or c
  misc_feature (150)..(150): n equals a,t,g, or c
  misc_feature (160)..(160): n equals a,t,g, or c
  misc_feature (175)..(175): n equals a,t,g, or c
ncggctcgaggctggaanaggatcttgggcgccgccagtctttaacaccaattggtgtaaganttgaagacctacttcacagtagttctgtggacaatcacaatgggaanccaaggaagggtctgtcctgtttcgggctgctgcncgtcntggctgtctnctgccattcaggtcnt

SEQ ID NO: 2855 - DNA, 111 bp, Homo sapiens
  misc_feature (102)..(102): n equals a,t,g, or c
  misc_feature (104)..(104): n equals a,t,g, or c
  misc_feature (106)..(106): n equals a,t,g, or c
  misc_feature (109)..(110): n equals a,t,g, or c
gcggcacgagggggggcccggtacccaattcgccctatagtgagtcgtattacaattcactggccgtcgttttacaacgtcgtgactgggaaaccaaacttncncnccnnc

SEQ ID NO: 2856 - DNA, 272 bp, Homo sapiens
  misc_feature (4)..(4): n equals a,t,g, or c
  misc_feature (131)..(131): n equals a,t,g, or c
  misc_feature (239)..(239): n equals a,t,g, or c
  misc_feature (241)..(241): n equals a,t,g, or c
  misc_feature (251)..(251): n equals a,t,g, or c
  misc_feature (257)..(257): n equals a,t,g, or c
  misc_feature (264)..(264): n equals a,t,g, or c
gggnaatctggggttttgtaaagcacgttagttcagatttgaaatttaagataacgtgactatcctggacagaggtgtgccagagcagatactgcattaccatattactggtgttaacagtattcaccttncttaatgggaagcctaccggatattttcttaagttgcctttataaagcaacttaatgtgatcagttcttccgaatggtgatcagttattttaaatatcttctttgatntntgcccctttncccttntgccccnggaaaaca

SEQ ID NO: 2857 - DNA, 99 bp, Homo sapiens
  misc_feature (28)..(28): n equals a,t,g, or c
  misc_feature (37)..(37): n equals a,t,g, or c
  misc_feature (54)..(54): n equals a,t,g, or c
  misc_feature (62)..(62): n equals a,t,g, or c
  misc_feature (68)..(68): n equals a,t,g, or c
  misc_feature (81)..(81): n equals a,t,g, or c
  misc_feature (98)..(98): n equals a,t,g, or c
cccccccccttttttttgggaaaattcncctatccgnccccccccccctttttntttcccgnaaaaanaaaattttttaanaacccccgccttccccna

SEQ ID NO: 2858 - DNA, 540 bp, Homo sapiens
  misc_feature (93)..(93): n equals a,t,g, or c
  misc_feature (137)..(137): n equals a,t,g, or c
  misc_feature (140)..(140): n equals a,t,g, or c
  misc_feature (148)..(148): n equals a,t,g, or c
  misc_feature (165)..(165): n equals a,t,g, or c
  misc_feature (213)..(214): n equals a,t,g, or c
  misc_feature (240)..(240): n equals a,t,g, or c
  misc_feature (282)..(282): n equals a,t,g, or c
  misc_feature (298)..(298): n equals a,t,g, or c
  misc_feature (308)..(308): n equals a,t,g, or c
  misc_feature (329)..(329): n equals a,t,g, or c
  misc_feature (337)..(337): n equals a,t,g, or c
  misc_feature (339)..(339): n equals a,t,g, or c
  misc_feature (353)..(353): n equals a,t,g, or c
  misc_feature (385)..(385): n equals a,t,g, or c
  misc_feature (389)..(389): n equals a,t,g, or c
  misc_feature (391)..(391): n equals a,t,g, or c
  misc_feature (395)..(395): n equals a,t,g, or c
  misc_feature (407)..(407): n equals a,t,g, or c
  misc_feature (413)..(414): n equals a,t,g, or c
  misc_feature (423)..(423): n equals a,t,g, or c
  misc_feature (437)..(437): n equals a,t,g, or c
  misc_feature (450)..(451): n equals a,t,g, or c
  misc_feature (457)..(457): n equals a,t,g, or c
  misc_feature (491)..(491): n equals a,t,g, or c
  misc_feature (494)..(495): n equals a,t,g, or c
gcagcaacttggaggcataccctgtggtataattgtgtagatgggggtccttgtgactgccaaacgcctgagatctgtccccactccagtgantttcccagggcgagggcgcctgtcaaggcgagaaagaaaagcangcnatggtganaaagttatgagaggtangaaagaagatactgaaacactgaaggtggaacccgtttggacacagtnnaaggaaagcctcagaattagcatganggaaaaggaaaagaaacgaatttccagaattgttttgcattnccttttggttaaggcnccagggaatngccattgaaaaaccccccctnaaaaaaantnctttaaaaagggcncccccccattcccctcttgggccccccttttncccncncccntaaaaaagtttnattttnnttcccccgnaaaataaacctganaaaatttcccctnnaacccngggagggccctttaaattttccaatttaattttnggnnaaaatacctttttgaataccccaaaaccttttaaaaaaaaaaaaa

SEQ ID NO: 2859 - DNA, 376 bp, Homo sapiens
  misc_feature (98)..(98): n equals a,t,g, or c
  misc_feature (305)..(305): n equals a,t,g, or c
  misc_feature (311)..(311): n equals a,t,g, or c
  misc_feature (326)..(326): n equals a,t,g, or c
  misc_feature (344)..(344): n equals a,t,g, or c
  misc_feature (371)..(371): n equals a,t,g, or c
gtggagctccaagcggaaaccgcgggagccgagcccagctaggaatgcagacctcctgaaaaccaagccgaggactgcggggtccggtgtccacgcanagtgtcagcttcctctggtgcaaccagcaagtcttccagtatgaatcccacagaaaccaagtctttacacaggggaaaggaaaggaatgagaaattaattttattaatggaaaccttcgctgaaaaaaaccttcactgaaaaaatgttaaacacaaactggaaatatctgcttaggaccttagaatgctgtaaaaacagaacctganaagaantcacagtccaccaanctgtctgtggttcatganaaaaaaatcccagaaaggaaagcccanagaac

SEQ ID NO: 2860 - DNA, 76 bp, Homo sapiens
  misc_feature (15)..(15): n equals a,t,g, or c
  misc_feature (19)..(19): n equals a,t,g, or c
  misc_feature (25)..(25): n equals a,t,g, or c
  misc_feature (34)..(34): n equals a,t,g, or c
  misc_feature (48)..(48): n equals a,t,g, or c
gtttaaataaatgcntctntattanatacccccnatttaatatataanggactgaatttttgcctattatgtgccc

SEQ ID NO: 2861 - DNA, 99 bp, Homo sapiens
  misc_feature (92)..(95): n equals a,t,g, or c
  misc_feature (97)..(97): n equals a,t,g, or c
gggggggcccggtacccaattcgccctatagtgagtcgtattacaattcactggccgtcgttttacaacgtcgtgactgggaaacccaaaannnntntt

SEQ ID NO: 2862 - DNA, 118 bp, Homo sapiens
  misc_feature (101)..(101): n equals a,t,g, or c
  misc_feature (103)..(104): n equals a,t,g, or c
  misc_feature (111)..(111): n equals a,t,g, or c
  misc_feature (114)..(114): n equals a,t,g, or c
gcggcacgagggggggcccggtacccaattcgccctatagtgagtcgtattacaattcactggccgtcgttttacaacgtcgtgactgggtaaaacccaantnntcttttnttncccc

SEQ ID NO: 2863 - DNA, 100 bp, Homo sapiens
  misc_feature (92)..(92): n equals a,t,g, or c
  misc_feature (96)..(96): n equals a,t,g, or c
gcggcacgagggggggcccggtacccaattcgccctatagtgagtcgtattacaattcactggccgtcgttttacaacgtcgtgactgggancccnaaaa

SEQ ID NO: 2864 - DNA, 50 bp, Homo sapiens
  misc_feature (21)..(21): n equals a,t,g, or c
  misc_feature (26)..(26): n equals a,t,g, or c
  misc_feature (39)..(39): n equals a,t,g, or c
  misc_feature (47)..(47): n equals a,t,g, or c
ggaaagcgtccaactgcttcnatatnaacctgtaacatntcctgccnagc

SEQ ID NO: 2865 - DNA, 132 bp, Homo sapiens
  misc_feature (44)..(44): n equals a,t,g, or c
  misc_feature (53)..(53): n equals a,t,g, or c
  misc_feature (68)..(68): n equals a,t,g, or c
  misc_feature (73)..(73): n equals a,t,g, or c
  misc_feature (131)..(131): n equals a,t,g, or c
taacctcactaaaggaacaaaactgaacttccaccgcggtggcngggccgtcntaaaattattggatnccccngggctgcaaggaattccggaacaaccaaaaatggcggaagttcaagttctgggttgcnt

SEQ ID NO: 2866 - DNA, 130 bp, Homo sapiens
  misc_feature (102)..(102): n equals a,t,g, or c
  misc_feature (117)..(117): n equals a,t,g, or c
  misc_feature (122)..(122): n equals a,t,g, or c
  misc_feature (126)..(126): n equals a,t,g, or c
  misc_feature (129)..(129): n equals a,t,g, or c
gcggcacgagggggggcccggtacccaattcgccctatagtgagtcgtattacaattcactggccgtcgttttacaacgtcgtgactgggaaaacccaaacnttttcattccccctntatcntccnacnc

SEQ ID NO: 2867 - DNA, 631 bp, Homo sapiens
  misc_feature (18)..(18): n equals a,t,g, or c
  misc_feature (20)..(20): n equals a,t,g, or c
  misc_feature (154)..(154): n equals a,t,g, or c
  misc_feature (297)..(297): n equals a,t,g, or c
  misc_feature (307)..(307): n equals a,t,g, or c
  misc_feature (337)..(337): n equals a,t,g, or c
  misc_feature (350)..(350): n equals a,t,g, or c
  misc_feature (367)..(367): n equals a,t,g, or c
  misc_feature (439)..(439): n equals a,t,g, or c
  misc_feature (480)..(480): n equals a,t,g, or c
  misc_feature (488)..(489): n equals a,t,g, or c
  misc_feature (491)..(491): n equals a,t,g, or c
  misc_feature (543)..(543): n equals a,t,g, or c
  misc_feature (575)..(575): n equals a,t,g, or c
  misc_feature (607)..(607): n equals a,t,g, or c
tcacgcgggggcgtctanantatggatcccggctgcagattcggacgagcaacaatgactaatcaactaacctcaaaacaaatgataaccatacacaacactaaaagggacgaaacctgaatctctttattactaagttatccctttaaatcanttttttaatttggcccaacaaacttaaaaccctccctccggggaaatttccctgggcccttccaacttccaattttttaaccaacccaaaaccccaaccccccaaaacctttatttcttttattttaaaaacccctttaaagnccccaattgngggggcccaattcccccccccctttttaantttgaaaaaccgnggggggggggccccaantttttgaaatttttattttgggggggtttttttcccggcctttccttataaagaaaatttttaaaaaaaaantttgccccccttaaagcccccccaccttttcctttttaaanccaaccannangggggaacaacccctttacccccccccccttttattcccccccataacttanttttatttaattcgaaaaaaccatttaagccntacttccatttccaaacccaattaagcccttngggcggtaacgcccttaaccgcct

SEQ ID NO: 2868 - DNA, 207 bp, Homo sapiens
  misc_feature (19)..(19): n equals a,t,g, or c
  misc_feature (32)..(32): n equals a,t,g, or c
  misc_feature (37)..(37): n equals a,t,g, or c
  misc_feature (52)..(52): n equals a,t,g, or c
  misc_feature (97)..(97): n equals a,t,g, or c
  misc_feature (102)..(102): n equals a,t,g, or c
  misc_feature (104)..(104): n equals a,t,g, or c
  misc_feature (139)..(139): n equals a,t,g, or c
  misc_feature (173)..(173): n equals a,t,g, or c
  misc_feature (188)..(188): n equals a,t,g, or c
  misc_feature (191)..(192): n equals a,t,g, or c
gctcgtgccgcttttactncccagtctccaantgctnacacataaacacatncatgtctgactgttgcagaactgttcgaactcctaattcaatgtnacctngnttttaatcgcagcaaccctctcccctaccccttgnccgcccacgtttttctcactcttccgggttgtgnaaataactctcccanccnntggtcctttccacaa

SEQ ID NO: 2869 - DNA, 105 bp, Homo sapiens
  misc_feature (23)..(23): n equals a,t,g, or c
  misc_feature (62)..(62): n equals a,t,g, or c
  misc_feature (64)..(64): n equals a,t,g, or c
  misc_feature (72)..(72): n equals a,t,g, or c
  misc_feature (91)..(91): n equals a,t,g, or c
tcctcccctctggccagtgggtnggtcaccagagcactgtgctgtgggcccatcttggtctngncttctcancggcacggtggaaaggccnagctcttctaaatg

SEQ ID NO: 2870 - DNA, 301 bp, Homo sapiens
  misc_feature (5)..(5): n equals a,t,g, or c
  misc_feature (16)..(16): n equals a,t,g, or c
  misc_feature (36)..(36): n equals a,t,g, or c
  misc_feature (44)..(44): n equals a,t,g, or c
  misc_feature (67)..(67): n equals a,t,g, or c
  misc_feature (114)..(114): n equals a,t,g, or c
  misc_feature (125)..(125): n equals a,t,g, or c
  misc_feature (141)..(141): n equals a,t,g, or c
  misc_feature (143)..(143): n equals a,t,g, or c
  misc_feature (159)..(159): n equals a,t,g, or c
  misc_feature (164)..(164): n equals a,t,g, or c
  misc_feature (166)..(167): n equals a,t,g, or c
  misc_feature (174)..(174): n equals a,t,g, or c
  misc_feature (187)..(187): n equals a,t,g, or c
  misc_feature (196)..(197): n equals a,t,g, or c
  misc_feature (200)..(200): n equals a,t,g, or c
  misc_feature (209)..(209): n equals a,t,g, or c
  misc_feature (235)..(236): n equals a,t,g, or c
  misc_feature (289)..(289): n equals a,t,g, or c
  misc_feature (301)..(301): n equals a,t,g, or c
ctacntggattaaacnggactccacgccgtggcggncgctctanaatagtggatcccccgggctgcnggaattcggcacgagcggaacgaacaagcctttgttatgaattttantcattacattncaaagtgaaattttcntncatgattctattggcngttananntagaatntcagttactgtantgctcacannggnttcctgganaacatctgcccgtatactaagtcccnnctctgctgcctagaaaactgaccgggtctcacccctcgtgaaaatcttggtgntctacgaagtcn

SEQ ID NO: 2871 - DNA, 159 bp, Homo sapiens
  misc_feature (29)..(30): n equals a,t,g, or c
  misc_feature (38)..(38): n equals a,t,g, or c
  misc_feature (40)..(40): n equals a,t,g, or c
  misc_feature (57)..(57): n equals a,t,g, or c
  misc_feature (118)..(118): n equals a,t,g, or c
  misc_feature (131)..(131): n equals a,t,g, or c
  misc_feature (138)..(138): n equals a,t,g, or c
  misc_feature (145)..(145): n equals a,t,g, or c
  misc_feature (158)..(158): n equals a,t,g, or c
ggggggggccgcttggggggccggggggnnccggcatnanaattaaaagaaaaaacnttaaagtttggggggaaattctctcccccccgggggggggcttgggcaaaggggggaaaantttcccgggggcnaaacggnaaagggngggaaaaaatccnt

SEQ ID NO: 2872 - DNA, 115 bp, Homo sapiens
  misc_feature (2)..(2): n equals a,t,g, or c
  misc_feature (46)..(46): n equals a,t,g, or c
  misc_feature (54)..(54): n equals a,t,g, or c
  misc_feature (62)..(62): n equals a,t,g, or c
  misc_feature (87)..(87): n equals a,t,g, or c
  misc_feature (108)..(108): n equals a,t,g, or c
angtactggggacacattcaacattctctttggctatcaacacccntaaaccgncacccatnggctcaggaattaatggggctcttnctacggctgtatgcaagggcntctcgct

SEQ ID NO: 2873 - DNA, 185 bp, Homo sapiens
  misc_feature (1)..(1): n equals a,t,g, or c
  misc_feature (15)..(15): n equals a,t,g, or c
  misc_feature (21)..(21): n equals a,t,g, or c
  misc_feature (53)..(53): n equals a,t,g, or c
  misc_feature (65)..(65): n equals a,t,g, or c
  misc_feature (133)..(133): n equals a,t,g, or c
  misc_feature (151)..(151): n equals a,t,g, or c
  misc_feature (153)..(153): n equals a,t,g, or c
  misc_feature (159)..(159): n equals a,t,g, or c
  misc_feature (185)..(185): n equals a,t,g, or c
ntttattcgaattancccctncctggattaaaactggagctccaccgccgtgncggccgctctanaataatggatcccccgggctgcaggaaattcggcacgagctaaggctcagggtctcacctctcagatnaaggctctgagttcatananccctgntggatctcctggtttttttctgacan

SEQ ID NO: 2874 - DNA, 105 bp, Homo sapiens
  misc_feature (11)..(11): n equals a,t,g, or c
  misc_feature (21)..(21): n equals a,t,g, or c
  misc_feature (33)..(33): n equals a,t,g, or c
  misc_feature (80)..(80): n equals a,t,g, or c
  misc_feature (88)..(88): n equals a,t,g, or c
atcactcaaanaaattacaanaattttatcganctctatccctaaaactggggtaagaagcccaaaaggttcaacaccanaatatatnttattatcaaccacaat

SEQ ID NO: 2875 - DNA, 99 bp, Homo sapiens
  misc_feature (9)..(9): n equals a,t,g, or c
  misc_feature (11)..(11): n equals a,t,g, or c
  misc_feature (19)..(19): n equals a,t,g, or c
  misc_feature (27)..(27): n equals a,t,g, or c
  misc_feature (32)..(32): n equals a,t,g, or c
  misc_feature (36)..(36): n equals a,t,g, or c
  misc_feature (40)..(40): n equals a,t,g, or c
  misc_feature (86)..(86): n equals a,t,g, or c
ggggggggntnattactcnaattccgngccgngggngganggaaagctggactccaccgccgtggcagccgctctaaaactaatgnatcccccgggctg

SEQ ID NO: 2876 - DNA, 121 bp, Homo sapiens
  misc_feature (12)..(12): n equals a,t,g, or c
  misc_feature (20)..(20): n equals a,t,g, or c
  misc_feature (26)..(26): n equals a,t,g, or c
  misc_feature (35)..(35): n equals a,t,g, or c
  misc_feature (85)..(85): n equals a,t,g, or c
  misc_feature (117)..(118): n equals a,t,g, or c
cgcggtggcggncgctctanaactantggatcccncgggctgtatcaattctgcacgagccaacgtgcaacttccctacggatcntcccttaatcccggttcatccgataccatccnnctc

SEQ ID NO: 2877 - DNA, 405 bp, Homo sapiens
  misc_feature (93)..(93): n equals a,t,g, or c
  misc_feature (133)..(133): n equals a,t,g, or c
  misc_feature (183)..(183): n equals a,t,g, or c
  misc_feature (218)..(218): n equals a,t,g, or c
  misc_feature (252)..(252): n equals a,t,g, or c
  misc_feature (295)..(295): n equals a,t,g, or c
  misc_feature (327)..(327): n equals a,t,g, or c
  misc_feature (367)..(367): n equals a,t,g, or c
  misc_feature (391)..(391): n equals a,t,g, or c
  misc_feature (395)..(396): n equals a,t,g, or c
ggtcatgaaaattatttttaaagttaagtgctgagcttatcaatatgtttttacactcttctaattactattactcacagatgaccaatgatnaacattataccctttttattaataggcgacaacctggtanagctttcagagacattcctggggtttgagcattgggctccatagcactgnaatactacaatatagaacctttaacggagctgttnaagttctgaaactttactttatcagtaaaattantatggtaatgcatatctcagagttgtcatgactatgaatgatngagtatgaagtcctagaatgttgtgggacttnccctaaattttttcattttcccttctctcctattactaanggcatctactaccattgtgtgatnaaannaaatgaaac

SEQ ID NO: 2878 - DNA, 428 bp, Homo sapiens
  misc_feature (20)..(20): n equals a,t,g, or c
  misc_feature (264)..(264): n equals a,t,g, or c
  misc_feature (308)..(308): n equals a,t,g, or c
  misc_feature (331)..(331): n equals a,t,g, or c
  misc_feature (360)..(360): n equals a,t,g, or c
  misc_feature (391)..(391): n equals a,t,g, or c
  misc_feature (398)..(398): n equals a,t,g, or c
  misc_feature (417)..(417): n equals a,t,g, or c
gatttttaagaaagacaggnaagcaaattaagtgaacctcattattgttgcatctaactgccttgagagagtttccaggccattgcataggggaacagggaatcctcacgggagcctgttggatcccttgagttgagggagatggagcttagagtctaggggatataaaggtacctgggaatttgctggtcagagagggagagagaggagagagctgcacagaaagcaaactccagagatttgcagaagattcctcttggagtnttcaacatagtatgcaactaatgttcataggggcatcctacctnaggtttagggggaactatacccnaaaggatagaaggaatagtgccttgcacncccataggactgaaagaaagtgactatttcngcccgtncagactggaaaaaaatctncatgattccct

SEQ ID NO: 2879 - DNA, 202 bp, Homo sapiens
  misc_feature (10)..(10): n equals a,t,g, or c
  misc_feature (14)..(14): n equals a,t,g, or c
  misc_feature (52)..(52): n equals a,t,g, or c
  misc_feature (59)..(59): n equals a,t,g, or c
  misc_feature (137)..(137): n equals a,t,g, or c
  misc_feature (151)..(151): n equals a,t,g, or c
  misc_feature (161)..(161): n equals a,t,g, or c
  misc_feature (182)..(182): n equals a,t,g, or c
  misc_feature (200)..(200): n equals a,t,g, or c
ggggggtttnattnactctaatgcccctcctttaatggaaaaaactggactncccgccntggcggacgctctagaatagtggatcccccgggctgcagggaattcggcacgagcctgagctccctgtctctcctcantggacatcgtctgnaaaccctggngtggcaatccctgacgcaccnccgtgatgcccaaggaanac

SEQ ID NO: 2880 - DNA, 446 bp, Homo sapiens
  misc_feature (56)..(56): n equals a,t,g, or c
  misc_feature (78)..(78): n equals a,t,g, or c
  misc_feature (175)..(175): n equals a,t,g, or c
  misc_feature (243)..(243): n equals a,t,g, or c
  misc_feature (270)..(270): n equals a,t,g, or c
  misc_feature (307)..(307): n equals a,t,g, or c
  misc_feature (340)..(340): n equals a,t,g, or c
  misc_feature (359)..(359): n equals a,t,g, or c
  misc_feature (374)..(374): n equals a,t,g, or c
  misc_feature (381)..(381): n equals a,t,g, or c
  misc_feature (393)..(393): n equals a,t,g, or c
  misc_feature (404)..(404): n equals a,t,g, or c
  misc_feature (432)..(432): n equals a,t,g, or c
gattccagggaagtggtatgtggtagcctggcaggaatgcaattctcagagaaganaagaccgcaaaagagtatgccncatctatgactgaaagaagacagagctacaatgtccctccgtcctgtttagaaaaagaatgtgactacggatcagattttgtccagttgccagccgngagtcacctgggcacttagattacctgattacgattactcctccgattgtgacacaactacacacatntatgtttctcaaaattctcaacagatnctcaaaccctctcggaaacagactatcgactaagaantctcctcccatttggctcctaaacctcgctccntcatcacatttcacgtatnccgttcccgttcccnccaaacntaggatggaacnccctgccctgnttcccggccctaggcccttttatattcncgccaaaaaaaaac

SEQ ID NO: 2881 - DNA, 252 bp, Homo sapiens
  misc_feature (6)..(6): n equals a,t,g, or c
  misc_feature (43)..(43): n equals a,t,g, or c
  misc_feature (195)..(195): n equals a,t,g, or c
  misc_feature (222)..(222): n equals a,t,g, or c
  misc_feature (237)..(237): n equals a,t,g, or c
  misc_feature (240)..(240): n equals a,t,g, or c
  misc_feature (245)..(245): n equals a,t,g, or c
gcttanagtctggttgccaaacagatttgcagatcaaggaganccagagtttcaaagaacgctagtaagtctctgagatccttgcactagctacatcctcaggtagagaagatgcttccagaacatgcggctgctcctattgcgagctgcctggccaaaacagatcctggtgattctcatgagaccactgtgccnggatgtttacacagtccatgctatgtnctcggaactgagacngtngatcnaccattc

SEQ ID NO: 2882 - DNA, 116 bp, Homo sapiens
  misc_feature (4)..(4): n equals a,t,g, or c
  misc_feature (6)..(6): n equals a,t,g, or c
  misc_feature (44)..(44): n equals a,t,g, or c
  misc_feature (54)..(55): n equals a,t,g, or c
  misc_feature (63)..(63): n equals a,t,g, or c
  misc_feature (116)..(116): n equals a,t,g, or c
cggnangagtcgctctacttaatgtctatgatttgttctatganttaagaagtnngatggtcnaggagtaacttgatgtgagcagtatcaacctgtgttagatatcatactgttgn

SEQ ID NO: 2883 - DNA, 104 bp, Homo sapiens
  misc_feature (96)..(96): n equals a,t,g, or c
  misc_feature (101)..(104): n equals a,t,g, or c
gcggcacgagggggggcccggtacccaattcgccctatagtgagtcgtattacaattcactggccgtcgttttacaacgtcgtgactgggaccccnaaaannnn

SEQ ID NO: 2884 - DNA, 330 bp, Homo sapiens
  misc_feature (107)..(107): n equals a,t,g, or c
  misc_feature (161)..(161): n equals a,t,g, or c
  misc_feature (209)..(209): n equals a,t,g, or c
  misc_feature (211)..(211): n equals a,t,g, or c
  misc_feature (289)..(289): n equals a,t,g, or c
  misc_feature (293)..(293): n equals a,t,g, or c
  misc_feature (299)..(299): n equals a,t,g, or c
  misc_feature (316)..(316): n equals a,t,g, or c
  misc_feature (323)..(323): n equals a,t,g, or c
ttcggcacgagttcattctgagtactgtggcagccctgggaagtttgtacacagaggatattgtcattttggaaagacccttggctgcttagtaagaaggcttcaanaggcagaaggacagactacgaagggctgcttcagagtccaattaagaagagagnctgggcatcaaaagaaagaaccggattggtggctgtatcttcatcccncntttaagcagtggagatcctgaccagattcaaacacttggcactatgaatcctctctccaaaaattaaacacagttatngccntgtccncttatcccaacttgagncagcgcnaccagtc

SEQ ID NO: 2885 - DNA, 226 bp, Homo sapiens
  misc_feature (23)..(23): n equals a,t,g, or c
  misc_feature (42)..(42): n equals a,t,g, or c
  misc_feature (62)..(62): n equals a,t,g, or c
  misc_feature (65)..(65): n equals a,t,g, or c
  misc_feature (74)..(74): n equals a,t,g, or c
  misc_feature (80)..(81): n equals a,t,g, or c
  misc_feature (91)..(91): n equals a,t,g, or c
  misc_feature (109)..(109): n equals a,t,g, or c
  misc_feature (123)..(123): n equals a,t,g, or c
  misc_feature (147)..(147): n equals a,t,g, or c
  misc_feature (165)..(165): n equals a,t,g, or c
  misc_feature (186)..(186): n equals a,t,g, or c
  misc_feature (197)..(197): n equals a,t,g, or c
  misc_feature (218)..(218): n equals a,t,g, or c
gccagactacgctcttccggtanaacgctcccggcctgacanaccatggagctgcactgganccnttcacgtgntgttanntgacacaatngtctaaaactgtctagtntataaacgtgcaanaatgtcccacacaacacgcgttgnattcttttgaatcatgtncgataatggatcagtatccancctgacccccnaccagaagcagtaatgccagnctgattca

SEQ ID NO: 2886 - DNA, 382 bp, Homo sapiens
  misc_feature (8)..(8): n equals a,t,g, or c
  misc_feature (51)..(51): n equals a,t,g, or c
  misc_feature (171)..(171): n equals a,t,g, or c
  misc_feature (195)..(195): n equals a,t,g, or c
  misc_feature (208)..(208): n equals a,t,g, or c
  misc_feature (226)..(226): n equals a,t,g, or c
  misc_feature (244)..(244): n equals a,t,g, or c
  misc_feature (255)..(255): n equals a,t,g, or c
  misc_feature (279)..(279): n equals a,t,g, or c
  misc_feature (332)..(332): n equals a,t,g, or c
  misc_feature (350)..(350): n equals a,t,g, or c
  misc_feature (360)..(360): n equals a,t,g, or c
  misc_feature (368)..(368): n equals a,t,g, or c
  misc_feature (380)..(380): n equals a,t,g, or c
gttatgangaaccattgcacatttttttctgaaacagccagtcaagcaganattaatctccaatgcaaggctgatctatttatcattttggaggtgggtactttattcttcttcgtcaccttttcatgttcccccggatctattagttttattttttagatactccatatnacatacgtttatgctttaatacantgctttaaaaganatggacattgtctgctanaattgatttagtctatanatatagaaatnatcacgggttattcaaatttctanatcctgtgtccattataagtattaagcactgtcctgctatttatatggatacngtcccagagtccttcagnccttaaagantgattttncaaatttgcatncc

SEQ ID NO: 2887 - DNA, 357 bp, Homo sapiens
  misc_feature (6)..(6): n equals a,t,g, or c
  misc_feature (71)..(71): n equals a,t,g, or c
  misc_feature (81)..(81): n equals a,t,g, or c
  misc_feature (207)..(207): n equals a,t,g, or c
  misc_feature (221)..(221): n equals a,t,g, or c
  misc_feature (232)..(232): n equals a,t,g, or c
  misc_feature (314)..(314): n equals a,t,g, or c
  misc_feature (316)..(316): n equals a,t,g, or c
  misc_feature (327)..(327): n equals a,t,g, or c
  misc_feature (352)..(352): n equals a,t,g, or c
  misc_feature (354)..(354): n equals a,t,g, or c
gtttanctgtgtataataaaaaaatggaaaataatggtggctttgaagatcgtttctaccccaggtaaaanaaacctggangtaagcagcccggggttggcatgacagcttcagggtcatcaagtcctggttttctcttgacctattctttgtcaaacctggagtaagtccttgtcctcagggtctaatacagctgccatgctccanctatcacattccangttagcaaganttgaagagaagaaaaaggtatgcctttcccttttaaaggacagtgcctgacctaacacttctattccaaaaatcactgggcnanaaccttaggcntttggccccagccctactgccaaananatt

SEQ ID NO: 2888 - DNA, 103 bp, Homo sapiens
  misc_feature (3)..(3): n equals a,t,g, or c
  misc_feature (13)..(13): n equals a,t,g, or c
  misc_feature (15)..(15): n equals a,t,g, or c
  misc_feature (28)..(28): n equals a,t,g, or c
  misc_feature (55)..(55): n equals a,t,g, or c
  misc_feature (103)..(103): n equals a,t,g, or c
ggngggtatgatncnccttcaattaacncctaaaggacaaaacggacccccgcgngggccgctctaactatggaccccggctgcagaattcggcacgaggggn

SEQ ID NO: 2889 - DNA, 104 bp, Homo sapiens
  misc_feature (10)..(10): n equals a,t,g, or c
  misc_feature (101)..(104): n equals a,t,g, or c
gcggcacganggggggcccggtacccaattcgccctatagtgagtcgtattacaattcactggccgtcgttttacaacgtcgtgactgggatccccaaaannnn

SEQ ID NO: 2890 - DNA, 237 bp, Homo sapiens
  misc_feature (36)..(36): n equals a,t,g, or c
  misc_feature (44)..(44): n equals a,t,g, or c
  misc_feature (52)..(52): n equals a,t,g, or c
  misc_feature (55)..(55): n equals a,t,g, or c
  misc_feature (62)..(62): n equals a,t,g, or c
  misc_feature (69)..(73): n equals a,t,g, or c
  misc_feature (75)..(76): n equals a,t,g, or c
  misc_feature (95)..(95): n equals a,t,g, or c
  misc_feature (109)..(109): n equals a,t,g, or c
  misc_feature (123)..(123): n equals a,t,g, or c
  misc_feature (127)..(127): n equals a,t,g, or c
  misc_feature (130)..(130): n equals a,t,g, or c
  misc_feature (142)..(142): n equals a,t,g, or c
  misc_feature (144)..(144): n equals a,t,g, or c
  misc_feature (178)..(178): n equals a,t,g, or c
  misc_feature (214)..(214): n equals a,t,g, or c
  misc_feature (226)..(226): n equals a,t,g, or c
ggggcgccggctccaagccccgggatgagaatcctnggctactntatcctcnctngaagcgnggctacnnnnncnngaggaagtggggaagggcngacttgggacctgnggtgtctgatgttnaagngtngtgatcactgtngnacatctgtactcctgaaaatgtcaggaatcaganctcgtgactgtaattgtcgcttcgttaccgacaccngactctctatcnagtccatctct

SEQ ID NO: 2891 - DNA, 99 bp, Homo sapiens
  misc_feature (6)..(6): n equals a,t,g, or c
  misc_feature (16)..(16): n equals a,t,g, or c
  misc_feature (19)..(19): n equals a,t,g, or c
  misc_feature (29)..(29): n equals a,t,g, or c
  misc_feature (38)..(38): n equals a,t,g, or c
  misc_feature (45)..(45): n equals a,t,g, or c
  misc_feature (48)..(48): n equals a,t,g, or c
  misc_feature (64)..(64): n equals a,t,g, or c
  misc_feature (87)..(87): n equals a,t,g, or c
tggggncatcgtgctnttnggaaccaggnccctaaaanaataaantanactcacccggtgccgnccctctaaactattggatccccngggctcaagaat

SEQ ID NO: 2892 - DNA, 253 bp, Homo sapiens
  misc_feature (4)..(4): n equals a,t,g, or c
  misc_feature (96)..(96): n equals a,t,g, or c
  misc_feature (100)..(100): n equals a,t,g, or c
  misc_feature (203)..(203): n equals a,t,g, or c
  misc_feature (216)..(216): n equals a,t,g, or c
  misc_feature (218)..(218): n equals a,t,g, or c
  misc_feature (221)..(221): n equals a,t,g, or c
  misc_feature (230)..(230): n equals a,t,g, or c
gaanatcgaaaggagaaaaaaagccgagatgtagtctctaagaaagaggaacgtaagcgtacaaaaaagaaaaggaacaaagccaagaaaggacanagangaaatgctttgggaccagtctattcttggattttgaactttcaaattggttctcccaagttaaattgaaaaatagtgagacttggttttatgaatcgtgttcntacactttcttantnatnggtcctttnctcctaccaaggctattaacaat

SEQ ID NO: 2893 - DNA, 102 bp, Homo sapiens
  misc_feature (95)..(95): n equals a,t,g, or c
  misc_feature (99)..(102): n equals a,t,g, or c
gctagtctcgagggggggcccggtacccaattcgccctatagtgagtcgtattacaattcactggccgtcgttttaaacgtcgtgactggaaccnaaannnn

SEQ ID NO: 2894 - DNA, 135 bp, Homo sapiens
  misc_feature (9)..(9): n equals a,t,g, or c
  misc_feature (20)..(20): n equals a,t,g, or c
  misc_feature (33)..(33): n equals a,t,g, or c
  misc_feature (100)..(100): n equals a,t,g, or c
  misc_feature (111)..(111): n equals a,t,g, or c
  misc_feature (113)..(113): n equals a,t,g, or c
  misc_feature (115)..(115): n equals a,t,g, or c
  misc_feature (120)..(120): n equals a,t,g, or c
ggggggggngggttgatacncgtcaattacccntaaaggacaaacggactcacgggggggcgctctagaatatggaccccggctgcagattcgcagagcnggagtagaganancnctttnccctgagtgccatgt

SEQ ID NO: 2895 - DNA, 101 bp, Homo sapiens
  misc_feature (88)..(88): n equals a,t,g, or c
  misc_feature (92)..(92): n equals a,t,g, or c
  misc_feature (96)..(96): n equals a,t,g, or c
  misc_feature (98)..(99): n equals a,t,g, or c
gcggcacgaggggggcccggtacccaattcgccctatagtgagtcgtattacaattcactggccgtcgttttaaacgtcgtgactggncccnaaantnntt

SEQ ID NO: 2896 - DNA, 255 bp, Homo sapiens
  misc_feature (3)..(3): n equals a,t,g, or c
  misc_feature (12)..(12): n equals a,t,g, or c
  misc_feature (19)..(20): n equals a,t,g, or c
  misc_feature (32)..(32): n equals a,t,g, or c
  misc_feature (101)..(101): n equals a,t,g, or c
  misc_feature (103)..(103): n equals a,t,g, or c
  misc_feature (107)..(107): n equals a,t,g, or c
  misc_feature (122)..(122): n equals a,t,g, or c
  misc_feature (124)..(124): n equals a,t,g, or c
  misc_feature (144)..(144): n equals a,t,g, or c
  misc_feature (164)..(164): n equals a,t,g, or c
  misc_feature (169)..(169): n equals a,t,g, or c
  misc_feature (191)..(191): n equals a,t,g, or c
  misc_feature (249)..(249): n equals a,t,g, or c
  misc_feature (253)..(253): n equals a,t,g, or c
tcncccaattancaaaaanntcaggctgtgtnctcaggataaccgattgggaaacagcagcaccagggtggcaaaaacccaaactcacctcttgggattgnancacnaaattgcaatcaatnantttccctgcggattactgcntgaggaatttgcattactgnctccntcgggggttccccacgctcganactcatgtccgtgtagacccattctcatatatcgcgccacgcggaaaactatatgtgnctcnca

SEQ ID NO: 2897 - DNA, 193 bp, Homo sapiens
  misc_feature (29)..(29): n equals a,t,g, or c
  misc_feature (47)..(47): n equals a,t,g, or c
  misc_feature (142)..(142): n equals a,t,g, or c
  misc_feature (168)..(168): n equals a,t,g, or c
  misc_feature (172)..(172): n equals a,t,g, or c
  misc_feature (176)..(176): n equals a,t,g, or c
  misc_feature (183)..(183): n equals a,t,g, or c
gcggcacgagccttgccccggagaactcnggagataactgtcacganctcctctgcactggtccggaatcgtgaacagctgcgtctctccccaaaaaatctacttgaaggtctggaaaaattcctcccactaatacctgctncatgaaaaaacgggttctcctcctcngccnagcncccctcnaaaataattt

SEQ ID NO: 2898 - DNA, 281 bp, Homo sapiens
  misc_feature (42)..(42): n equals a,t,g, or c
  misc_feature (104)..(104): n equals a,t,g, or c
  misc_feature (194)..(194): n equals a,t,g, or c
  misc_feature (212)..(212): n equals a,t,g, or c
  misc_feature (238)..(238): n equals a,t,g, or c
  misc_feature (262)..(262): n equals a,t,g, or c
  misc_feature (273)..(273): n equals a,t,g, or c
gaaaaatcaagcggctggaagagaaagtctccagagtcggantgaggtggaatatacccgggaccaaactcacgaccactcgagcctgcaaaccttcctgggangacagcagccaatgccctccctgggaatgctcccactgtgctgtgaagaactgattttggtttttcaccactctggatcgaatatgctcnctcccacctctcttgatncacctgggttaactattatactcatntttctttttgtgctctcaaccatntcaaataatcnaacctccc

SEQ ID NO: 2899 - DNA, 273 bp, Homo sapiens
  misc_feature (27)..(27): n equals a,t,g, or c
  misc_feature (94)..(94): n equals a,t,g, or c
  misc_feature (101)..(101): n equals a,t,g, or c
  misc_feature (129)..(129): n equals a,t,g, or c
  misc_feature (148)..(148): n equals a,t,g, or c
  misc_feature (159)..(159): n equals a,t,g, or c
  misc_feature (229)..(229): n equals a,t,g, or c
  misc_feature (265)..(265): n equals a,t,g, or c
  misc_feature (268)..(268): n equals a,t,g, or c
  misc_feature (270)..(270): n equals a,t,g, or c
  misc_feature (273)..(273): n equals a,t,g, or c
gaaaatagatattcctcattgagtaanaataacctgataccaccagttcaactcaaatatttactgggcaaatattattgcgagcgaagaaacncttacgnttatattctgaccattaggcacttacanagaaaacatacaactcttnaatatttgacnaactggaagactcatacttctggtgctaagttgcaactgcgccatctttttctagctgtccgatccatcntttaattgaatttaaggtgtatgttcgatacaaacntanantcn

SEQ ID NO: 2900 - DNA, 155 bp, Homo sapiens
  misc_feature (12)..(12): n equals a,t,g, or c
  misc_feature (17)..(17): n equals a,t,g, or c
  misc_feature (24)..(24): n equals a,t,g, or c
  misc_feature (38)..(38): n equals a,t,g, or c
  misc_feature (47)..(47): n equals a,t,g, or c
  misc_feature (49)..(49): n equals a,t,g, or c
  misc_feature (65)..(65): n equals a,t,g, or c
  misc_feature (80)..(80): n equals a,t,g, or c
  misc_feature (86)..(86): n equals a,t,g, or c
  misc_feature (107)..(107): n equals a,t,g, or c
  misc_feature (109)..(109): n equals a,t,g, or c
gctcgtgccgantcggnacgagtnttattgtccactanatgctcgtntnaattgaagataatagngattttagaaaaganttgaanggatgttgtttttacaattangnaagcacagaaagacacaaaccccagacatctagctctccacgtaca

SEQ ID NO: 2901 - DNA, 216 bp, Homo sapiens
  misc_feature (11)..(12): n equals a,t,g, or c
  misc_feature (38)..(38): n equals a,t,g, or c
  misc_feature (44)..(44): n equals a,t,g, or c
  misc_feature (52)..(52): n equals a,t,g, or c
  misc_feature (64)..(64): n equals a,t,g, or c
  misc_feature (148)..(148): n equals a,t,g, or c
  misc_feature (169)..(169): n equals a,t,g, or c
  misc_feature (189)..(189): n equals a,t,g, or c
  misc_feature (193)..(193): n equals a,t,g, or c
  misc_feature (199)..(199): n equals a,t,g, or c
gaaaacactanngtgcttctttaatataccaaaattancccaanacttgacnaaattaagcatncactgggagcttagggaaccaatccttttagtgccctattaatgaggtaaatatcacagcccatccatcttaacaaagggtatnaaaatgacgatgtgcatgttntgtgatgccacaaccctatntatnagaatntatactaaagaaaaaat

SEQ ID NO: 2902 - DNA, 410 bp, Homo sapiens
  misc_feature (11)..(11): n equals a,t,g, or c
  misc_feature (115)..(115): n equals a,t,g, or c
  misc_feature (220)..(220): n equals a,t,g, or c
  misc_feature (363)..(363): n equals a,t,g, or c
  misc_feature (377)..(378): n equals a,t,g, or c
  misc_feature (394)..(394): n equals a,t,g, or c
  misc_feature (404)..(404): n equals a,t,g, or c
ttgataccccntcaattaacccctaaaggacaaactggactccccgggggggcgctctaaatatggatcccccgggctgcagaattcggcacgacggcacgaggcaaggaaaganaaaaattataaccaagcataatatagcaagactaacccctataccttctgcataatgaattaactagaataacttgcaagagagcaaagctaagaccccgaaacnacgagctactaagaacactaaaagacacaccgtctatgtgcaaatatgggaagattatagtaagcacaactacgagctgtgatactggtgtcaagataatctattcactttaattgcccaaacctctaatccctgttatttangttgtccaagaganngtcttgacctagaaanctgttaaatnaaattg

SEQ ID NO: 2903 - DNA, 342 bp, Homo sapiens
  misc_feature (24)..(24): n equals a,t,g, or c
  misc_feature (29)..(29): n equals a,t,g, or c
  misc_feature (262)..(262): n equals a,t,g, or c
  misc_feature (272)..(272): n equals a,t,g, or c
  misc_feature (289)..(289): n equals a,t,g, or c
  misc_feature (304)..(304): n equals a,t,g, or c
  misc_feature (329)..(329): n equals a,t,g, or c
gggggggggggggttgataccccntcganttaacccctaaaggacaaacggacccccgcgggggccgctctaactatggaccccgggctgcagaattcggcacgagctcagactgggaagaccaggcacaatgataaacatactggctgttgtggtgacaatgaccaattgagtgtgtgaattggaagcaagtagtgcaagagtgaatattggctgaaattctagctatggctatgattgacaagggaaccgatggaaatcnttgccattantgatgacctgatcaccnatttatgattcatantcaacgctgaactgctctaaactcntgatgtttaaggt

SEQ ID NO: 2904 - DNA, 280 bp, Homo sapiens
  misc_feature (1)..(1): n equals a,t,g, or c
  misc_feature (9)..(9): n equals a,t,g, or c
  misc_feature (47)..(47): n equals a,t,g, or c
  misc_feature (58)..(58): n equals a,t,g, or c
  misc_feature (69)..(69): n equals a,t,g, or c
  misc_feature (129)..(129): n equals a,t,g, or c
  misc_feature (133)..(133): n equals a,t,g, or c
  misc_feature (149)..(149): n equals a,t,g, or c
  misc_feature (210)..(210): n equals a,t,g, or c
  misc_feature (231)..(231): n equals a,t,g, or c
  misc_feature (245)..(245): n equals a,t,g, or c
  misc_feature (261)..(261): n equals a,t,g, or c
  misc_feature (276)..(276): n equals a,t,g, or c
ntggcatcnctgtgccatcgttaccggtttctggtctctatgcgatncgtggtctctngtctgctgatnccatctcggactacgtgtatacatcatcaacgaattgtgttcaactgctgggcttctggncctngactccactgccgggncatgctgacgacccgggcatgccaaagaatgcactaagatcaccagattacgttagctggnagtgttacatgcccaatctgngctcagccacgaancacatgatttgtacgnctcgaaatgacacangtcc

SEQ ID NO: 2905 - DNA, 158 bp, Homo sapiens
  misc_feature (1)..(1): n equals a,t,g, or c
  misc_feature (10)..(10): n equals a,t,g, or c
  misc_feature (12)..(13): n equals a,t,g, or c
  misc_feature (42)..(42): n equals a,t,g, or c
  misc_feature (119)..(119): n equals a,t,g, or c
  misc_feature (128)..(128): n equals a,t,g, or c
  misc_feature (143)..(143): n equals a,t,g, or c
  misc_feature (152)..(152): n equals a,t,g, or c
  misc_feature (158)..(158): n equals a,t,g, or c
nctaaagaanannactggactccccgcggggcgccgctctanaatatggatccccaggctgcatgaattcgcacgagcatgctcgtggtcccaataactctgaagcgggtggcattccnacattgganctggattaattaccngtgtgtatntctttn

SEQ ID NO: 2906 - DNA, 455 bp, Homo sapiens
  misc_feature (268)..(268): n equals a,t,g, or c
  misc_feature (320)..(320): n equals a,t,g, or c
  misc_feature (367)..(367): n equals a,t,g, or c
  misc_feature (407)..(407): n equals a,t,g, or c
  misc_feature (420)..(420): n equals a,t,g, or c
  misc_feature (425)..(425): n equals a,t,g, or c
  misc_feature (443)..(443): n equals a,t,g, or c
ggagaatagtaatgagtttgagtgggaaggtaaatgtttcactgtttttaatctgatctttattaatgtactaagggattttgtttgaaatacatcattctttctaaagttcatatatttgttactaagataggaaattgtgctaacccttgaatattctcaaggacttaaaaagtgtgtatagagtacaccagtggcttttttgccctcttatttgcccactgctctcatgtttttttcatagctgtttcaaaaaatattcttgatnattatggcatgctctttttcagtcatcaattaaaacttttgaaaaacatatnttacatttgtgggaaggattctgaaaggagcattggggtacttttantagtgcctaattgcctcttgtgaatgacacttaattattncttacccacttanctatnttatcagattcttctgantctatcaattcc

SEQ ID NO: 2907 - DNA, 366 bp, Homo sapiens
  misc_feature (205)..(205): n equals a,t,g, or c
  misc_feature (239)..(239): n equals a,t,g, or c
  misc_feature (254)..(254): n equals a,t,g, or c
  misc_feature (309)..(309): n equals a,t,g, or c
  misc_feature (316)..(316): n equals a,t,g, or c
  misc_feature (341)..(341): n equals a,t,g, or c
  misc_feature (359)..(359): n equals a,t,g, or c
  misc_feature (366)..(366): n equals a,t,g, or c
ggagaaaaatatatcagaatggggcatacttagaaaaatgattaatactgcccaggaatacaaaaaggagtcaaaatcttataatatgtcacttttacatatttatcatagtagtttgttttgttttgttttagatgatgcaaaattgaggggccttgcagcccccagtaacctttctatggaatcagactcttgaaggtcatantggtgatccattcaatttcttttaagttcatgtntggaatggtatttangcatttaggaaattcccctacttgatgccagaaaatgtccaccatttttaaattnatggggnaatatttaccaggtaccagaatgcncctttggaatttaccaantggggan

SEQ ID NO: 2908 - DNA, 390 bp, Homo sapiens
  misc_feature (1)..(1): n equals a,t,g, or c
  misc_feature (247)..(247): n equals a,t,g, or c
  misc_feature (257)..(257): n equals a,t,g, or c
  misc_feature (319)..(319): n equals a,t,g, or c
  misc_feature (343)..(343): n equals a,t,g, or c
  misc_feature (360)..(360): n equals a,t,g, or c
  misc_feature (368)..(368): n equals a,t,g, or c
  misc_feature (390)..(390): n equals a,t,g, or c
ncggcacgagataacactgaaaaaaataacataaccatggctttccttggagtatttaaaaatattctttgtccatttacgatgacccggaatttcacaccatctgctggacgtgaaatgaaacccagaaagtgaaaggggaagagacgacggtctgcaggcttcagggcccagccgtgggcccaggtccatgtggctgctgccttccctttccgtgctgtgcgtagcctcctcttctctgaccggntaccccgcanccccctcctcattttcctcccctacttttcccaagggggttctccacttttattttgggatnaacttttcctggggggaaaatttnggttggggtttaccccnaaaaccanaaggcacttttccagccattgn

SEQ ID NO: 2909 - DNA, 423 bp, Homo sapiens
  misc_feature (194)..(194): n equals a,t,g, or c
  misc_feature (211)..(211): n equals a,t,g, or c
  misc_feature (216)..(216): n equals a,t,g, or c
  misc_feature (219)..(219): n equals a,t,g, or c
  misc_feature (222)..(222): n equals a,t,g, or c
  misc_feature (277)..(277): n equals a,t,g, or c
  misc_feature (316)..(316): n equals a,t,g, or c
  misc_feature (339)..(339): n equals a,t,g, or c
  misc_feature (358)..(358): n equals a,t,g, or c
  misc_feature (386)..(386): n equals a,t,g, or c
  misc_feature (395)..(395): n equals a,t,g, or c
  misc_feature (397)..(397): n equals a,t,g, or c
gcttgagcctttccctgctggaatgccttttcctgacaagctgtagccctaaagtccctcaaggcacaactctgatgttgaactgcaagtggatcatgggataaactgggttttactttaatacataatagtatttcttcctcagttttcccctttcctactctcagattcctttgttgtaggtgggcccaaanaaggacccaccccactnttccnggnatnccagggggaaaacccgggggtggggcaggaaaaaataggccaaatgattgctgangaaaatcatggaaaatccacaggataagaaggttcctcnccttcttactttttggctccccncccattaaaactcaaaaanttcccccccccccttaaatcctcttccncccggggangnaaaaaaaaaattttagtggagggaat

SEQ ID NO: 2910 - DNA, 423 bp, Homo sapiens
  misc_feature (59)..(59): n equals a,t,g, or c
  misc_feature (189)..(189): n equals a,t,g, or c
  misc_feature (192)..(192): n equals a,t,g, or c
  misc_feature (217)..(217): n equals a,t,g, or c
  misc_feature (224)..(225): n equals a,t,g, or c
  misc_feature (241)..(241): n equals a,t,g, or c
  misc_feature (266)..(266): n equals a,t,g, or c
  misc_feature (296)..(296): n equals a,t,g, or c
  misc_feature (310)..(310): n equals a,t,g, or c
  misc_feature (316)..(316): n equals a,t,g, or c
  misc_feature (340)..(340): n equals a,t,g, or c
  misc_feature (342)..(342): n equals a,t,g, or c
  misc_feature (377)..(377): n equals a,t,g, or c
  misc_feature (400)..(400): n equals a,t,g, or c
  misc_feature (404)..(404): n equals a,t,g, or c
aattttgaaggctctctccgcaagcctctcaattggaagtccctggctgccttgagcanaatttccgttaatgtctctaaggaacttatgctgtgctatttgattaaaccctctactatgactgacaaggaaatggagtcaccagaaatgtttgaaaaggattaaagttcaggaggtgattctgagtcnatnggtttcttcacgagagaggagtganccaagannaatctttaacaattcnacctcgaaatttctaatttcaaccnaaccaaactattttatttgaagagggctanggttcaaaaaagtncctttnttagtttgttaaatccctccccantnaaattccaataaagttttttttaaaaggggcatgngtggctccccccagcaacccagnaaanaacttatcccgattgtttt

SEQ ID NO: 2911 - DNA, 325 bp, Homo sapiens
  misc_feature (265)..(265): n equals a,t,g, or c
  misc_feature (280)..(280): n equals a,t,g, or c
  misc_feature (298)..(298): n equals a,t,g, or c
  misc_feature (321)..(321): n equals a,t,g, or c
  misc_feature (324)..(324): n equals a,t,g, or c
gttttcctgcacaaagccttgcttttagagaatgcccaataaggcaagaaaaagcatagtaacttgtgctttgagagctcaatatttgtatcttatcagtacagaagaaatatttctgtgtaacttgatcttctgtctagtacttgtcttataggtaaccaacactgaaaactttgtagtgatgactaccaaagaaaatacatagtaaaacaaccttttatttccaaattgttaaagagccagccattggatgctgctacatganttccatgctcaaganccattgttagaaattaangggtttctaagtttttgggtganttnt

SEQ ID NO: 2912 - DNA, 312 bp, Homo sapiens
  misc_feature (69)..(69): n equals a,t,g, or c
  misc_feature (72)..(72): n equals a,t,g, or c
  misc_feature (193)..(193): n equals a,t,g, or c
  misc_feature (242)..(242): n equals a,t,g, or c
  misc_feature (257)..(257): n equals a,t,g, or c
  misc_feature (285)..(285): n equals a,t,g, or c
  misc_feature (288)..(288): n equals a,t,g, or c
  misc_feature (291)..(291): n equals a,t,g, or c
gttgttctttaatacatgtgttcctgttaatattatgtccaatcacaagtgcctgattggctggtctanaanagttggagaagaaagatacaggtcttgtttaatatccatttcatgttcagctctcaaaatattcatttaaaagaatctggaatgtaaaagtaggtgtctattcataccaaattcagaactnctccaaaattatatccaacccagtattttaaaattctctgaaaaaccanaaataaatatctccnatttgaaaaaatgaacttacgatttcanggnttncagcattccattagaaaatac

SEQ ID NO: 2913 - DNA, 538 bp, Homo sapiens
  misc_feature (47)..(47): n equals a,t,g, or c
  misc_feature (52)..(52): n equals a,t,g, or c
  misc_feature (85)..(85): n equals a,t,g, or c
  misc_feature (129)..(129): n equals a,t,g, or c
  misc_feature (136)..(136): n equals a,t,g, or c
  misc_feature (153)..(153): n equals a,t,g, or c
  misc_feature (228)..(228): n equals a,t,g, or c
  misc_feature (265)..(265): n equals a,t,g, or c
  misc_feature (276)..(276): n equals a,t,g, or c
  misc_feature (279)..(279): n equals a,t,g, or c
  misc_feature (295)..(295): n equals a,t,g, or c
  misc_feature (324)..(324): n equals a,t,g, or c
  misc_feature (330)..(330): n equals a,t,g, or c
  misc_feature (333)..(333): n equals a,t,g, or c
  misc_feature (337)..(337): n equals a,t,g, or c
  misc_feature (378)..(378): n equals a,t,g, or c
  misc_feature (397)..(397): n equals a,t,g, or c
  misc_feature (404)..(404): n equals a,t,g, or c
  misc_feature (414)..(414): n equals a,t,g, or c
  misc_feature (421)..(422): n equals a,t,g, or c
  misc_feature (425)..(425): n equals a,t,g, or c
  misc_feature (431)..(431): n equals a,t,g, or c
  misc_feature (436)..(437): n equals a,t,g, or c
  misc_feature (475)..(475): n equals a,t,g, or c
  misc_feature (492)..(492): n equals a,t,g, or c
  misc_feature (500)..(500): n equals a,t,g, or c
  misc_feature (533)..(533): n equals a,t,g, or c
gggactgcttcgtatcaattcccattttatactcttgtagttggaanaatangaatcaagcattgtccatcttgccaaagactgntgtttgtgattccagttttcagtggcttttcagcatcccatcangcagaanaccacatttgtcttcantactcccctccagctggaccgttaggtgtttgttttacagtcccttctccatacgggtttgggatggccctaaancatccagttccttgaacaacattgtgcttgacacaanaattgaacatnaanatctccttgttgctancctgcactgcatccttgtttaccaaattntcccanggncttnttgaacccccaaaaaagttttaaaattccccccccttttanaaaaaacaattttttcccnaaaattnccccctgttnaaaaatnnaanccccanttttnngggcccccaaaaaaatccaaaaaaaaaaaccccccttnttttccccccccggcantttttttnttaaaaggggggaaaaaattcttctccccaatnttctt

SEQ ID NO: 2914 - DNA, 367 bp, Homo sapiens
  misc_feature (218)..(218): n equals a,t,g, or c
  misc_feature (228)..(228): n equals a,t,g, or c
  misc_feature (274)..(274): n equals a,t,g, or c
  misc_feature (329)..(329): n equals a,t,g, or c
  misc_feature (363)..(364): n equals a,t,g, or c
  misc_feature (366)..(366): n equals a,t,g, or c
gcagtaatgtagtcatgcaattcagatttcaattgggatcttacaaacaaactcattgttttgtgtttgtcaaatatgaatacatttatcaacttagtgaaaaataacttgatttctgcatggaaaatatccaaggttatatatcactattcctttactctagagaaggtcatttagttttatgtaaatatgtggcagatctcagtttcagtgacttncgtgctccanctttaaaagtgtttttgaatgcttggaaggaaaatgtgatattcanagagagcaatatctttataagttaagtttccttgaatgaatctatgttgattacnttgaataaagttgaaatgcccagttttttccccnncnc

SEQ ID NO: 2915 - DNA, 55 bp, Homo sapiens
  misc_feature (7)..(7): n equals a,t,g, or c
  misc_feature (13)..(13): n equals a,t,g, or c
  misc_feature (16)..(16): n equals a,t,g, or c
  misc_feature (21)..(21): n equals a,t,g, or c
  misc_feature (48)..(48): n equals a,t,g, or c
gctggantttgcnctntctcnctgtcatggccatgattcgcggtcaanaagcaaa

SEQ ID NO: 2916 - DNA, 238 bp, Homo sapiens
  misc_feature (181)..(183): n equals a,t,g, or c
  misc_feature (193)..(193): n equals a,t,g, or c
  misc_feature (214)..(214): n equals a,t,g, or c
gaaaaagtagctgagatattgatttctggcatgacagagtgaggaggttgatgaaacctcttcccaaaaaaacagctagaaagctggaagaaaactgtcaaaaacatccatttcagctccctaaaaattgaccaaatatatgcaataaattgagacgcatttgttcatgaaaaactattannncctgggttangaaccagaacaatctttgggnttccttgcctatcatcactccctt

SEQ ID NO: 2917 - DNA, 105 bp, Homo sapiens
  misc_feature (101)..(105): n equals a,t,g, or c
gcggcacgagggggggcccggtacccaattcgccctatagtgagtcgtattacaattcactggccgtcgttttacaacgtcgtgactgggaaacccaaaannnnn

SEQ ID NO: 2918 - DNA, 381 bp, Homo sapiens
  misc_feature (35)..(35): n equals a,t,g, or c
  misc_feature (136)..(136): n equals a,t,g, or c
  misc_feature (279)..(279): n equals a,t,g, or c
  misc_feature (313)..(313): n equals a,t,g, or c
  misc_feature (355)..(355): n equals a,t,g, or c
  misc_feature (372)..(372): n equals a,t,g, or c
  misc_feature (377)..(378): n equals a,t,g, or c
gctcgtgccgaattcggcacgagctttggctccanacggattggactgcctgttctagctcttctcagaatatgacattttcttggtcacttctgtaactagcgtccgaccacacatgccattctgtcttcagatncctgcagttagtgtgctttctccctcgtttgaaccctgcagtgtttagtttctgcctctcttatgacatgtactagtgttgtgggctctgtgttactctgagccacattatccagcgaataatgttcacatttatcgctaaanaaatttgcctcatgccgaacactccctcccctcntgccccccgccccggtgtttcctttagaaaaggcaagggaantggcctttactaatccncaggnnagg

SEQ ID NO: 2919 - DNA, 236 bp, Homo sapiens
  misc_feature (169)..(169): n equals a,t,g, or c
  misc_feature (174)..(174): n equals a,t,g, or c
  misc_feature (183)..(183): n equals a,t,g, or c
  misc_feature (199)..(199): n equals a,t,g, or c
  misc_feature (231)..(231): n equals a,t,g, or c
gattaccttcatggatattgaaatgctcaagaattatgccagaagtagctattagagatagagccagtgacttaggatatgaaatcttcagaggatggtagaaagagaaaggtaaatgccataagaaattagagtacttgtggtcattgaaaccatggaatttactccnggggngtgtttatntgagaaatccaggttnctaaaattttgaaccctaacttttcttttaangggga

SEQ ID NO: 2920 - DNA, 63 bp, Homo sapiens
  misc_feature (14)..(14): n equals a,t,g, or c
  misc_feature (38)..(38): n equals a,t,g, or c
  misc_feature (49)..(49): n equals a,t,g, or c
  misc_feature (57)..(58): n equals a,t,g, or c
ggttcatttatgantgctgtgctttaacggtgcctatnataatcctcanatatcacnnagtca

SEQ ID NO: 2921 - DNA, 58 bp, Homo sapiens
  misc_feature (33)..(33): n equals a,t,g, or c
  misc_feature (35)..(35): n equals a,t,g, or c
  misc_feature (37)..(37): n equals a,t,g, or c
  misc_feature (42)..(42): n equals a,t,g, or c
  misc_feature (57)..(57): n equals a,t,g, or c
gaactagtctcgagttttttttttttttttaancntnggacntggatttgattgacnt

SEQ ID NO: 2922 - DNA, 472 bp, Homo sapiens
  misc_feature (3)..(3): n equals a,t,g, or c
  misc_feature (12)..(12): n equals a,t,g, or c
  misc_feature (24)..(24): n equals a,t,g, or c
  misc_feature (67)..(67): n equals a,t,g, or c
  misc_feature (350)..(350): n equals a,t,g, or c
  misc_feature (361)..(361): n equals a,t,g, or c
  misc_feature (367)..(367): n equals a,t,g, or c
  misc_feature (381)..(381): n equals a,t,g, or c
  misc_feature (397)..(397): n equals a,t,g, or c
  misc_feature (422)..(422): n equals a,t,g, or c
  misc_feature (462)..(462): n equals a,t,g, or c
  misc_feature (471)..(471): n equals a,t,g, or c
atntcatattgnttcagcagacanaatgtacttcccttaactttcattaatagtgtttacatctttngtcagcacagcaaacttttagaaagtaatagttttacttatttttatcttctgttttctctttgtactgctttgtcttgcattgtgttccaacacatgagacttactgctcactgaattttggagtcttttagaggtaaattgtggactcaggattttttgaaacttggtgtgtaactctaaatcttgtatatgcatctttgttgcttattacatatttacacacacaaccacaaattttaaacttatgatgaaaatttacaataacctgaaaagatccaganatttttgagancatttngtacttgttattcngtttactaaatttgangtgaaatatttaaaagaaaaggacnttaggaaatgaaatctccccttccaatatccttgaataantaaatggang

SEQ ID NO: 2923 - DNA, 73 bp, Homo sapiens
  misc_feature (15)..(16): n equals a,t,g, or c
  misc_feature (35)..(35): n equals a,t,g, or c
  misc_feature (51)..(51): n equals a,t,g, or c
  misc_feature (63)..(63): n equals a,t,g, or c
gtaaacaccataccnngcactaggcttagaggaanaacatgtcagattgtnctgtcactggcnatgtacccag

SEQ ID NO: 2924 - DNA, 108 bp, Homo sapiens
  misc_feature (37)..(37): n equals a,t,g, or c
  misc_feature (54)..(54): n equals a,t,g, or c
  misc_feature (57)..(57): n equals a,t,g, or c
  misc_feature (100)..(100): n equals a,t,g, or c
  misc_feature (106)..(106): n equals a,t,g, or c
ggggaactgctcctccaggagactgctgattttggcnggaaactgctcctccangantctcctggaggaacagttccaacagtctcctggaggaacaatntcctgntg

SEQ ID NO: 2925 - DNA, 99 bp, Homo sapiens
  misc_feature (22)..(22): n equals a,t,g, or c
  misc_feature (31)..(31): n equals a,t,g, or c
  misc_feature (47)..(47): n equals a,t,g, or c
  misc_feature (71)..(72): n equals a,t,g, or c
  misc_feature (78)..(78): n equals a,t,g, or c
  misc_feature (81)..(81): n equals a,t,g, or c
  misc_feature (84)..(84): n equals a,t,g, or c
  misc_feature (95)..(95): n equals a,t,g, or c
tacgcgctttcgaaattaaccntcactaaanggaacaaaagctgganctccaccgggggggggggcggttnnaaaatnatnggntccccggggtngaag

SEQ ID NO: 2926 - DNA, 256 bp, Homo sapiens
  misc_feature (143)..(143): n equals a,t,g, or c
  misc_feature (184)..(184): n equals a,t,g, or c
  misc_feature (214)..(214): n equals a,t,g, or c
  misc_feature (222)..(222): n equals a,t,g, or c
  misc_feature (251)..(251): n equals a,t,g, or c
  misc_feature (254)..(254): n equals a,t,g, or c
gctcgtgccgaattcggcacgagtatctccaggcattcaggcattcagagcaacaggtcctctgaattactggcctgagctgcccacccttcctgtgcagagattgtggtgttatgggggccctttgcactccaagtccagcnagatctccaaacacttgctgcactaactctcctgggtttangaatttaagctggccctcatgccagtgcanaaaaactngcggttaggggttttctcaactccatgcnttnaa

SEQ ID NO: 2927 - DNA, 576 bp, Homo sapiens
  misc_feature (1)..(1): n equals a,t,g, or c
  misc_feature (21)..(21): n equals a,t,g, or c
  misc_feature (24)..(24): n equals a,t,g, or c
  misc_feature (68)..(69): n equals a,t,g, or c
  misc_feature (206)..(206): n equals a,t,g, or c
  misc_feature (315)..(315): n equals a,t,g, or c
  misc_feature (317)..(317): n equals a,t,g, or c
  misc_feature (333)..(333): n equals a,t,g, or c
  misc_feature (340)..(340): n equals a,t,g, or c
  misc_feature (358)..(358): n equals a,t,g, or c
  misc_feature (380)..(380): n equals a,t,g, or c
  misc_feature (410)..(410): n equals a,t,g, or c
  misc_feature (418)..(418): n equals a,t,g, or c
  misc_feature (459)..(459): n equals a,t,g, or c
  misc_feature (462)..(462): n equals a,t,g, or c
  misc_feature (472)..(472): n equals a,t,g, or c
  misc_feature (490)..(490): n equals a,t,g, or c
  misc_feature (492)..(492): n equals a,t,g, or c
  misc_feature (496)..(496): n equals a,t,g, or c
  misc_feature (501)..(501): n equals a,t,g, or c
  misc_feature (505)..(505): n equals a,t,g, or c
  misc_feature (533)..(533): n equals a,t,g, or c
  misc_feature (563)..(563): n equals a,t,g, or c
  misc_feature (569)..(569): n equals a,t,g, or c
nctagtggatcccccgggctncanaaatgcggcaggagggaaaaatatggataattaaataactgatnnattctatttgaccagaaatttacttttgtaaacattatacataaaataataaagcataagcacatgctaatctgaatcattttcaagaaaatgtgttaaatatattattaggtcatattaaatatttatttgtttantttataaatcatgatgtcttaaaataacattacatatgttcaaaaaataacctggtagaaaaaatattcttctctcattacatataaatttgagcaaatttaacattgnantttatgttagctagtngactctnagatcagaaagaaaaatnaaaactaagtcctgaatttttnaactatggggaaaaattaatcttgattgtnactcacantgccaccctatctctgttttgctttgtctttccctcaaatnacnagaaatgccnggaacccagactgcttcncnattnggccngatngtttcaccttccgtggttattaattccnccaaaattgcaaaatcccattctgggaatnaacctntctgcct

SEQ ID NO: 2928 - DNA, 472 bp, Homo sapiens
  misc_feature (29)..(29): n equals a,t,g, or c
  misc_feature (110)..(112): n equals a,t,g, or c
  misc_feature (114)..(114): n equals a,t,g, or c
  misc_feature (198)..(198): n equals a,t,g, or c
  misc_feature (327)..(327): n equals a,t,g, or c
  misc_feature (346)..(346): n equals a,t,g, or c
  misc_feature (351)..(351): n equals a,t,g, or c
  misc_feature (355)..(355): n equals a,t,g, or c
  misc_feature (367)..(367): n equals a,t,g, or c
  misc_feature (431)..(431): n equals a,t,g, or c
  misc_feature (468)..(468): n equals a,t,g, or c
gattttaagctaagaatataactatatcntcttctcagcccaaatcaggtgtatatgtggtttgacaagtattatagtatattgatgggtatattaatgcaaagaatttnnntnggaattgtcctagaaatatataagataaagaccgtatgtctaatatgaaccagaacatcactgatgaagtagagtgaaataacnttttatttccatacatatctgtaactgagctctctaatattctttagtgtctgtcaattatcagagaaaaattttagaatggtctttatttgactcattaaaatatcctatctttgaactgttttaaanctgtttgaattggtccaanatctnattnattgaaatttcnccctattgtcccaaaaacccccgtggtcctttaacctttggttggaggtgaacccgtttttaantgacaaatgagtcttttgaaggcaaaccccaccaccnaacc

SEQ ID NO: 2929 - DNA, 113 bp, Homo sapiens
  misc_feature (103)..(103): n equals a,t,g, or c
  misc_feature (105)..(105): n equals a,t,g, or c
  misc_feature (108)..(108): n equals a,t,g, or c
  misc_feature (110)..(111): n equals a,t,g, or c
gcggcacgagggggggcccggtacccaattcgccctatagtgagtcgtattacaattcactggccgtcgttttacaacgtcgtgactgggaaaacccaaattntngtncnntc

SEQ ID NO: 2930 - DNA, 531 bp, Homo sapiens
  misc_feature (144)..(145): n equals a,t,g, or c
  misc_feature (186)..(186): n equals a,t,g, or c
  misc_feature (189)..(189): n equals a,t,g, or c
  misc_feature (206)..(206): n equals a,t,g, or c
  misc_feature (208)..(208): n equals a,t,g, or c
  misc_feature (217)..(217): n equals a,t,g, or c
  misc_feature (237)..(237): n equals a,t,g, or c
  misc_feature (240)..(240): n equals a,t,g, or c
  misc_feature (249)..(249): n equals a,t,g, or c
  misc_feature (261)..(261): n equals a,t,g, or c
  misc_feature (267)..(267): n equals a,t,g, or c
  misc_feature (280)..(280): n equals a,t,g, or c
  misc_feature (291)..(291): n equals a,t,g, or c
  misc_feature (312)..(312): n equals a,t,g, or c
  misc_feature (325)..(325): n equals a,t,g, or c
  misc_feature (341)..(341): n equals a,t,g, or c
  misc_feature (347)..(347): n equals a,t,g, or c
  misc_feature (355)..(356): n equals a,t,g, or c
  misc_feature (362)..(362): n equals a,t,g, or c
  misc_feature (376)..(376): n equals a,t,g, or c
  misc_feature (387)..(387): n equals a,t,g, or c
  misc_feature (391)..(391): n equals a,t,g, or c
  misc_feature (396)..(396): n equals a,t,g, or c
  misc_feature (400)..(401): n equals a,t,g, or c
  misc_feature (407)..(408): n equals a,t,g, or c
  misc_feature (423)..(423): n equals a,t,g, or c
  misc_feature (442)..(442): n equals a,t,g, or c
  misc_feature (466)..(466): n equals a,t,g, or c
  misc_feature (468)..(468): n equals a,t,g, or c
  misc_feature (477)..(477): n equals a,t,g, or c
  misc_feature (479)..(479): n equals a,t,g, or c
  misc_feature (488)..(488): n equals a,t,g, or c
  misc_feature (501)..(501): n equals a,t,g, or c
  misc_feature (530)..(530): n equals a,t,g, or c
gccaaaggtgtctgaagaccctgggtagccttccaggtcacagacatgaacacaacctgagggacttgggggacatatcaaaagaaccaacatacacattttataagagtcccagtaggggaaagaaagagaaaaatgagaaanngaaatttttgaaaaaattatgttgaaattttcccaattcanatnaaaaaacttgatcttcncncccaaaaancttaatgaactggataaacnccntaaaatttnccctaaaacctnttcccntttttttttaaantctccaaaatnaaaaatctttttggaatattngggggaaaaaacncccccctttttgtggncccccnaaaaaaanngggttntttttttaaccacnggggggggggnggtntttanaacnncccccnnaaaaaaaaaaaaccnccccccttttttttaaccnccccccccaaaaaaaaaaaatttntntccccaaancnggggggttnccccaaacccccnttttttttttttcccccaaattttttttnc

SEQ ID NO: 2931 - DNA, 423 bp, Homo sapiens
  misc_feature (310)..(310): n equals a,t,g, or c
  misc_feature (344)..(344): n equals a,t,g, or c
  misc_feature (347)..(347): n equals a,t,g, or c
  misc_feature (353)..(353): n equals a,t,g, or c
  misc_feature (368)..(368): n equals a,t,g, or c
  misc_feature (420)..(420): n equals a,t,g, or c
acagaaatctcattgatcctcatctctaaagcttggtttatcttaccaagcctacctaccctctctataccttaggaagctaccactcatgtagtcaacaaagttaaaaaaaattgtcattgtcatcagtcttctctgaacacgtttcattgacaaccaagcctgtctctgattttcatctctaaagttgtcccttgaatatctctctctcttgttagtcctatggctactgatgatccttgccttctcccactttgactttgttttaaagaaaaattttgaaccaaataatataccagtttattttganccaattacattccatgaatccagggcacactccnatnccccanaaatcccgaaaaccnccgttccaaccattatgggggggggggtttcatagggggaaagttggaaggngaa

SEQ ID NO: 2932 - DNA, 397 bp, Homo sapiens
  misc_feature (166)..(166): n equals a,t,g, or c
  misc_feature (180)..(180): n equals a,t,g, or c
  misc_feature (197)..(197): n equals a,t,g, or c
  misc_feature (273)..(273): n equals a,t,g, or c
  misc_feature (325)..(325): n equals a,t,g, or c
  misc_feature (335)..(335): n equals a,t,g, or c
  misc_feature (350)..(350): n equals a,t,g, or c
  misc_feature (362)..(362): n equals a,t,g, or c
  misc_feature (381)..(381): n equals a,t,g, or c
gctgaggagttgagaagggggcggagacttccaggtctacctgtccatggtaaagcacttgaacattagtgtaaggacaatgggaagccattggcaggttttatggaagatggtgttttaaatagatgtttctggaagtgtaaggtggacaatggattaaagttanacaccacactgaangcatggtgactatttangcagctgtttagcagcagtctggacaaggtatgatggtttcttggactaaggttaaatccaggaaaaaaatgaatngattgtgttaccttgaacaatttacttcccccccctgaacctatttaacttntttccttccngttttggcctacctntcctaagaaaancccggtttttggccccccnaaatttcctgccggcc

SEQ ID NO: 2933 - DNA, 310 bp, Homo sapiens
  misc_feature (192)..(192): n equals a,t,g, or c
  misc_feature (228)..(228): n equals a,t,g, or c
  misc_feature (253)..(253): n equals a,t,g, or c
  misc_feature (263)..(263): n equals a,t,g, or c
  misc_feature (273)..(273): n equals a,t,g, or c
  misc_feature (295)..(295): n equals a,t,g, or c
gcggcgcgcaccttccccggcgcagtctcttgccagccggcgatcacgcagagctgaaccccgcagctaggcgcgcaggaagggctgcacagagtttgaagacacggcagctgtaagctggcgtgaggaagccaaaggagcgcgcagactgcaagcaaagggcggtggggcctgggacctgaattgagtggncgaccgcagcactcaaggtgccatctgcctggcctntgaagtgtgtccctccaaactgaanaagctatgantcaagggttnggactttatgggaaaaaaaaanaaattttattaaaaa

SEQ ID NO: 2934 - DNA, 159 bp, Homo sapiens
  misc_feature (4)..(4): n equals a,t,g, or c
  misc_feature (10)..(11): n equals a,t,g, or c
  misc_feature (15)..(15): n equals a,t,g, or c
  misc_feature (78)..(78): n equals a,t,g, or c
  misc_feature (107)..(107): n equals a,t,g, or c
  misc_feature (119)..(119): n equals a,t,g, or c
  misc_feature (125)..(125): n equals a,t,g, or c
  misc_feature (140)..(140): n equals a,t,g, or c
gggncccccnngtcnttgataaactatttccaaagaaccagaatatgtcctggtcatggacattcaagccagtacttnccgtaatacctaactatggcaagagtgtnagagagcaaatnattctncctaagaacgagatnccatgcaggaagccagagt

SEQ ID NO: 2935 - DNA, 256 bp, Homo sapiens
  misc_feature (5)..(6): n equals a,t,g, or c
  misc_feature (12)..(12): n equals a,t,g, or c
  misc_feature (27)..(27): n equals a,t,g, or c
  misc_feature (33)..(33): n equals a,t,g, or c
  misc_feature (60)..(60): n equals a,t,g, or c
  misc_feature (67)..(67): n equals a,t,g, or c
  misc_feature (69)..(69): n equals a,t,g, or c
  misc_feature (71)..(71): n equals a,t,g, or c
  misc_feature (75)..(76): n equals a,t,g, or c
  misc_feature (79)..(79): n equals a,t,g, or c
  misc_feature (85)..(85): n equals a,t,g, or c
  misc_feature (92)..(92): n equals a,t,g, or c
  misc_feature (133)..(133): n equals a,t,g, or c
  misc_feature (156)..(156): n equals a,t,g, or c
  misc_feature (232)..(232): n equals a,t,g, or c
  misc_feature (240)..(240): n equals a,t,g, or c
  misc_feature (243)..(243): n equals a,t,g, or c
  misc_feature (249)..(249): n equals a,t,g, or c
  misc_feature (252)..(252): n equals a,t,g, or c
gagannctaaantacgaaaagggtacnaggaanatgtgcgcgtgtgttaatcctacgttnacctcangncnccannacnactggnaattctntatcttcctacctccaatctcgtacccaaaacaaaacaaangacctttctctattatctcatanaatatccaatactgtccttgtggaatattcctaaattcactatgacttttaacacacaaagggtcaacattaaagncgtataanaangtactnggnaccc

SEQ ID NO: 2936 - DNA, 559 bp, Homo sapiens
  misc_feature (20)..(20): n equals a,t,g, or c
  misc_feature (49)..(50): n equals a,t,g, or c
  misc_feature (52)..(52): n equals a,t,g, or c
  misc_feature (58)..(58): n equals a,t,g, or c
  misc_feature (64)..(65): n equals a,t,g, or c
  misc_feature (70)..(70): n equals a,t,g, or c
  misc_feature (77)..(77): n equals a,t,g, or c
  misc_feature (85)..(85): n equals a,t,g, or c
  misc_feature (89)..(89): n equals a,t,g, or c
  misc_feature (107)..(107): n equals a,t,g, or c
  misc_feature (123)..(123): n equals a,t,g, or c
  misc_feature (155)..(155): n equals a,t,g, or c
  misc_feature (182)..(182): n equals a,t,g, or c
  misc_feature (198)..(198): n equals a,t,g, or c
  misc_feature (203)..(203): n equals a,t,g, or c
  misc_feature (205)..(205): n equals a,t,g, or c
  misc_feature (207)..(207): n equals a,t,g, or c
  misc_feature (214)..(214): n equals a,t,g, or c
  misc_feature (218)..(218): n equals a,t,g, or c
  misc_feature (226)..(226): n equals a,t,g, or c
  misc_feature (229)..(229): n equals a,t,g, or c
  misc_feature (245)..(245): n equals a,t,g, or c
  misc_feature (266)..(266): n equals a,t,g, or c
  misc_feature (272)..(272): n equals a,t,g, or c
  misc_feature (319)..(320): n equals a,t,g, or c
  misc_feature (335)..(335): n equals a,t,g, or c
  misc_feature (408)..(408): n equals a,t,g, or c
  misc_feature (420)..(420): n equals a,t,g, or c
  misc_feature (440)..(440): n equals a,t,g, or c
  misc_feature (453)..(453): n equals a,t,g, or c
  misc_feature (460)..(460): n equals a,t,g, or c
  misc_feature (464)..(464): n equals a,t,g, or c
  misc_feature (470)..(470): n equals a,t,g, or c
  misc_feature (480)..(480): n equals a,t,g, or c
  misc_feature (489)..(489): n equals a,t,g, or c
  misc_feature (496)..(496): n equals a,t,g, or c
  misc_feature (501)..(501): n equals a,t,g, or c
  misc_feature (550)..(550): n equals a,t,g, or c
ctcgtgccgctcgtgccganttcggcacaaacggcacgaggaacaggtnntnaatctntctttnntgtgnaatactnctcccgtntgtntatcaacctgcaagctancacgatgtttgctttngtacaggtttatatcacagaccactgtacatncttgtcttccaagggaacttcaagatngaattacttttgatcnctcantntntatacantgtntaaaggtntanaacttcaactttctcnataatattcaactcttcaatnactctnccatcacttcctacttcaatctgaatttaaactaccgtaaagtctcnnaactttcctttgaantactactacccaggttcaacttttcttctttgtaaattggtaaggaataaattttttacgaacaatttttcanaagccttctttnaaaggaaccaatttactccnaattcttcttacncctgccntaanaaattnccaataactncctgtcaangtttttnccctnaagccaagggacaaaaaacaatccaaaatcctgaacagaaaaaaaaacntctttttcc

SEQ ID NO: 2937 - DNA, 189 bp, Homo sapiens
  misc_feature (45)..(45): n equals a,t,g, or c
  misc_feature (117)..(117): n equals a,t,g, or c
  misc_feature (128)..(128): n equals a,t,g, or c
  misc_feature (130)..(130): n equals a,t,g, or c
  misc_feature (148)..(148): n equals a,t,g, or c
  misc_feature (158)..(158): n equals a,t,g, or c
gcctacttaaaaggaccaaaagttggggcccccccgcggtaaaangacgatttttaactagtggatcccccgggctgcaggaattcggggggacccccctccctgaaaaaacagtangtgtgtaaccncnaattaccaaatggctgcntgactgtatntcaaatttaatcccacttagccactcaggat

SEQ ID NO: 2938 - DNA, 490 bp, Homo sapiens
  misc_feature (16)..(16): n equals a,t,g, or c
  misc_feature (132)..(132): n equals a,t,g, or c
  misc_feature (344)..(344): n equals a,t,g, or c
  misc_feature (358)..(358): n equals a,t,g, or c
  misc_feature (364)..(364): n equals a,t,g, or c
  misc_feature (375)..(375): n equals a,t,g, or c
  misc_feature (387)..(387): n equals a,t,g, or c
  misc_feature (419)..(419): n equals a,t,g, or c
  misc_feature (437)..(437): n equals a,t,g, or c
  misc_feature (445)..(445): n equals a,t,g, or c
  misc_feature (479)..(479): n equals a,t,g, or c
  misc_feature (487)..(487): n equals a,t,g, or c
gcaattactagctatnaatatattactttttaattgtgtatcaaaacacccaagcactgagttaatatatcctgtgcaaatatactaaacctacttagtctatccaaatatgtaactggatacactacgtangtttcttctactgaggaaatttgtctttcatatggtaactaggtatgaatatttgctgttgaagcaagcttttcccaatcttcaagttgaagttttaattagcaaacaatgtttacaacatgtaggccaagtattagaattttcttggggtcactcatgatttatctccatgctatatgtccccaacaaatagtctcccaagaatggaacanccaaggccattggncatgtngcaaggtgcanaaacgggctcancatcctctgaaatttcgctttgtgaacatatncctaacaaactccaatcnggccatgnttttcccttgaaacttaaacccccacctgttgcnggggggtnact

SEQ ID NO: 2939 - DNA, 99 bp, Homo sapiens
  misc_feature (19)..(19): n equals a,t,g, or c
  misc_feature (37)..(37): n equals a,t,g, or c
  misc_feature (68)..(68): n equals a,t,g, or c
  misc_feature (85)..(85): n equals a,t,g, or c
  misc_feature (87)..(87): n equals a,t,g, or c
  misc_feature (98)..(98): n equals a,t,g, or c
cctcttaaaaggaaaaaantgggccccccgcggaagngggcgctttttaactagtggatcccccgggntgcagggaattcggggngnccccccctgcnt

SEQ ID NO: 2940 - DNA, 537 bp, Homo sapiens
  misc_feature (287)..(287): n equals a,t,g, or c
  misc_feature (295)..(295): n equals a,t,g, or c
  misc_feature (347)..(347): n equals a,t,g, or c
  misc_feature (402)..(402): n equals a,t,g, or c
  misc_feature (417)..(417): n equals a,t,g, or c
  misc_feature (424)..(424): n equals a,t,g, or c
  misc_feature (426)..(426): n equals a,t,g, or c
  misc_feature (465)..(465): n equals a,t,g, or c
  misc_feature (478)..(478): n equals a,t,g, or c
  misc_feature (484)..(484): n equals a,t,g, or c
  misc_feature (524)..(524): n equals a,t,g, or c
  misc_feature (530)..(530): n equals a,t,g, or c
  misc_feature (537)..(537): n equals a,t,g, or c
gaacatattgggcatttaacttaaaaattctaagtcatgttttctttttccactataagattgtactaggtgatataaagttcatgtcacttaaaattcaacgactgtgtaagtagctctttcagcttttcattaagttcatttttggaaatgtgcacatctatgccatcattgggcagttataatttggggatttaaacacctggcagtgattgaccactgtgactttgcttattccctttctctcctcagttaccgagctgatacccagacataccagccttatnacaaagantgggattaaagaaaaaatctacgtgctccttccgtccgcaggcccaacaagntggggaaattaattgtttttggaaacacttggggggggtttggggttgggctttnaaaaaacaagttttnttcaacntnctgttatggaaattttgtttcataattatcccgtttccnctttgttataccntaccanaatgacgtttaaataaattttagaactgttcaaccgaaancccttnccccctn

SEQ ID NO: 2941 - DNA, 458 bp, Homo sapiens
  misc_feature (6)..(6): n equals a,t,g, or c
  misc_feature (262)..(262): n equals a,t,g, or c
  misc_feature (446)..(446): n equals a,t,g, or c
gaaccnattatagcagctttatttttcctttttaagattacatttcaagtttctgaatctagtcctaaaggtaattttctcatatgaatggtacatggtgattatatcaactgggctgtagaaaatgggcactgatttctcaactgtgttgattctagattggtaagtgacatgctccaagtatagttgactgcatttctgatcttgctttgtttttatgggaattaaactcagaatagcccttcttaataggtcttttcanaaatttggtagaagagaaattggtgtgttaatcaacataagattttagaatgcatttctatttcaattttctctcctactaatcctgttactgtggttaataatcaatgtgttaataatgaatatctgttctttactctgttccagggtaagacaaatatatatgggactctgccttttgaaantactttagaaat

SEQ ID NO: 2942 - DNA, 51 bp, Homo sapiens
  misc_feature (12)..(12): n equals a,t,g, or c
  misc_feature (14)..(14): n equals a,t,g, or c
  misc_feature (36)..(36): n equals a,t,g, or c
  misc_feature (48)..(48): n equals a,t,g, or c
  misc_feature (50)..(50): n equals a,t,g, or c
gcggcacgaacntnccccgagtctgtctcttgccanccggaaatcacncnt

SEQ ID NO: 2943 - DNA, 436 bp, Homo sapiens
  misc_feature (391)..(391): n equals a,t,g, or c
  misc_feature (423)..(423): n equals a,t,g, or c
gctcgtgccgaattcggcacgagcccaaatgaattgctggacccagactgtgtgcacagatggctgaaacagtcagacctacacctaggagatgagatcattcaggttcaccgtgacccagccgcgctggatggatctggatgtgctactctcacggttgtcatgaggtaatatggataggctattaagaaagccgtgacgacgcactcccctgagacacggtctgcttgttttgctgcatgtagtaaacagctctctcactagatctgacagcacttggtggtgatattcttttcccttcagactgactgaagaagattcagaagtactacagcattaagccttttgctgttaggatgttataatttgtgtgttttgttgcataaagatnaatttttgccatgttgctgttaaaaacttctnaagaaaggagatc

SEQ ID NO: 2944 - DNA, 239 bp, Homo sapiens
  misc_feature (6)..(6): n equals a,t,g, or c
  misc_feature (68)..(68): n equals a,t,g, or c
  misc_feature (86)..(86): n equals a,t,g, or c
  misc_feature (123)..(123): n equals a,t,g, or c
  misc_feature (167)..(167): n equals a,t,g, or c
  misc_feature (181)..(181): n equals a,t,g, or c
  misc_feature (206)..(206): n equals a,t,g, or c
  misc_feature (209)..(209): n equals a,t,g, or c
  misc_feature (230)..(230): n equals a,t,g, or c
gcggcncgagggaatgtttgataccattatgaacaaatgagctaattattttatgttttattgaaaanttatctgttgccttatgncatgttgaaaattttagagattagttgaaagggaatnagaatgattaaaagtttggaaggctgaatttatgaagaaaaatnttaaaaaggcaaantctaatcatgatcttccaataaaangtntgtggtttggtgggaaaggancagttggga

SEQ ID NO: 2945 - DNA, 99 bp, Homo sapiens
  misc_feature (1)..(1): n equals a,t,g, or c
  misc_feature (6)..(6): n equals a,t,g, or c
  misc_feature (26)..(26): n equals a,t,g, or c
  misc_feature (39)..(39): n equals a,t,g, or c
  misc_feature (55)..(55): n equals a,t,g, or c
  misc_feature (95)..(95): n equals a,t,g, or c
  misc_feature (97)..(97): n equals a,t,g, or c
  misc_feature (99)..(99): n equals a,t,g, or c
nccctnttaaaaggacaaaagctggncccccaccgcggnaagcggccgcttttanaactagtggatcccccgggctgcaggaaattcggggacgncncn

SEQ ID NO: 2946 - DNA, 700 bp, Homo sapiens
  misc_feature (54)..(54): n equals a,t,g, or c
  misc_feature (71)..(71): n equals a,t,g, or c
  misc_feature (81)..(81): n equals a,t,g, or c
  misc_feature (95)..(95): n equals a,t,g, or c
  misc_feature (237)..(237): n equals a,t,g, or c
  misc_feature (260)..(260): n equals a,t,g, or c
  misc_feature (426)..(426): n equals a,t,g, or c
  misc_feature (464)..(464): n equals a,t,g, or c
  misc_feature (511)..(511): n equals a,t,g, or c
  misc_feature (546)..(546): n equals a,t,g, or c
  misc_feature (550)..(550): n equals a,t,g, or c
  misc_feature (666)..(666): n equals a,t,g, or c
  misc_feature (677)..(677): n equals a,t,g, or c
  misc_feature (692)..(692): n equals a,t,g, or c
  misc_feature (696)..(697): n equals a,t,g, or c
gcccaaacccactccaccttactaccagacaaccttagccaaaccatttacccnaataaagtataggcganagaaattganacctggcgcaatanatatagtaccgcaagggaaagatgaaaaattataaccaagcataatatagcaaggactaacccctataccttctgcataatgaattaactagaaataactttgcaaggagagccaaagctaagacccccgaaaccagacganctaccttggaacagcttaaagancacacccctctatgtggcagaatagtgggaagatttataggttgaggcgacaaacctaccgagcctggtgatagctggttgtccaagatagaatcttagttcaactttgaatttgcccacagaaccctctaaatccccttgtaaatttaactgttagtccaaagangaacagctctttggacactaggaaaaaaccttgtaganagagtaaaaaatttaacacccatggtaggcctaaaagcagccaccanttgagaaagcgttcaagctcaacacccactacctnaaanatcccaaacatattactgaactcctcacaccccattgggaccaatctttcaccctatagaaaaaacttatgtttgttataagttacattgaaaaacatttctcctcccgcattaanccttgcgtccnaagggatagggggcncganncaa

SEQ ID NO: 2947 - DNA, 102 bp, Homo sapiens
  misc_feature (9)..(9): n equals a,t,g, or c
  misc_feature (14)..(14): n equals a,t,g, or c
  misc_feature (44)..(44): n equals a,t,g, or c
  misc_feature (71)..(71): n equals a,t,g, or c
  misc_feature (73)..(73): n equals a,t,g, or c
ggcgccctnattanacggctttccgcttctttacaatggggaanttcccccatccccaatttttttttctncnaaggggcccaacctaacagtcccctttaa

SEQ ID NO: 2948 - DNA, 664 bp, Homo sapiens
  misc_feature (277)..(277): n equals a,t,g, or c
  misc_feature (279)..(279): n equals a,t,g, or c
  misc_feature (553)..(554): n equals a,t,g, or c
  misc_feature (631)..(631): n equals a,t,g, or c
  misc_feature (635)..(635): n equals a,t,g, or c
  misc_feature (648)..(648): n equals a,t,g, or c
  misc_feature (653)..(653): n equals a,t,g, or c
  misc_feature (661)..(661): n equals a,t,g, or c
gatccccttcactttccccttttccatcacgaccatctccccaattataaactgactaatttcaaaacattcaaatcactgtaaaaattgtttccttttacaattttatttcacaggtcttccaagtgtaaaatattatctcactaatagatgtattctcataaaaatttttacatgtttgcatatacatgtacctgcatcttccaaattaataacttgatttaaaaattatcttcagaaaatatcaaagttcatggaaattaattaaattttttgncnaattgcaacttcagccctttgacaaaaatatatagtaaattcttatttagcagcagcatttaaatactacaacatttcaaaaatcttcaaagttccaccttacctgtaaggcatgtggaaacccaacttctccagaaccagacttagtggtcaattatcttgaacctccaaataagtcaacctggaagcaagacacaacatatggaaccatttgcagaccataccagcccccagatacaattatctcccacttcaattgccttccactgaaggnnggttttactaagaataaaatggttctcccttaagcactggaaaaaaacaatgtttcctccaaaaaaaaaaaaaaacncaanggggggcccggtnccatncccctaanttg

SEQ ID NO: 2949 - DNA, 719 bp, Homo sapiens
  misc_feature (237)..(237): n equals a,t,g, or c
  misc_feature (245)..(245): n equals a,t,g, or c
  misc_feature (248)..(248): n equals a,t,g, or c
  misc_feature (298)..(298): n equals a,t,g, or c
  misc_feature (370)..(370): n equals a,t,g, or c
  misc_feature (399)..(399): n equals a,t,g, or c
  misc_feature (413)..(413): n equals a,t,g, or c
  misc_feature (438)..(438): n equals a,t,g, or c
  misc_feature (450)..(450): n equals a,t,g, or c
  misc_feature (455)..(455): n equals a,t,g, or c
  misc_feature (461)..(461): n equals a,t,g, or c
  misc_feature (481)..(481): n equals a,t,g, or c
  misc_feature (533)..(533): n equals a,t,g, or c
  misc_feature (542)..(542): n equals a,t,g, or c
  misc_feature (566)..(566): n equals a,t,g, or c
  misc_feature (605)..(605): n equals a,t,g, or c
  misc_feature (633)..(633): n equals a,t,g, or c
  misc_feature (641)..(641): n equals a,t,g, or c
  misc_feature (643)..(643): n equals a,t,g, or c
  misc_feature (646)..(646): n equals a,t,g, or c
  misc_feature (650)..(650): n equals a,t,g, or c
  misc_feature (653)..(653): n equals a,t,g, or c
  misc_feature (662)..(662): n equals a,t,g, or c
  misc_feature (684)..(684): n equals a,t,g, or c
gttttagcatgatagtttgggaaactcttgtctaataagccagtgcttttgattcggttttctttataatggttgaatagtttgtcatcctatgaatatgctgctgtttagattatctttgctttcttgatagacatttgtttccaggattttgttcttggaatagtagcctttttatatctgtacacatatattactgtatatcagattcttaaaaatggaattaccgaagcaaangctatgtncantttaaattctgatatatactactaaatgtttctcttaaaagactacctanaaataaatattacaaatattggtgagctactggaatcttaatgaaagacataaagttagatctgaattaacnaaatgaaacaatgttttttctggattganacatccctgttgtngaatttactaattttcccccagtcngtgtctccaatnttgtnttgttnaaaacttgacttttgattanaaaacctacttaataaatgattccacaaattttggaaaaaaaaagccgttcnggaaacttnttaaaattccaatccttttaaacnaccctccttccggaacccgggaagtccaaaactctttcntttttggcctttattatttttaaccccntttttttncnttncggnttntcccatttnccatttatttattccccccttnccccttaaattaccctttccccccccttttggggg

SEQ ID NO: 2950 - DNA, 736 bp, Homo sapiens
  misc_feature (48)..(48): n equals a,t,g, or c
  misc_feature (65)..(65): n equals a,t,g, or c
  misc_feature (113)..(113): n equals a,t,g, or c
  misc_feature (162)..(162): n equals a,t,g, or c
  misc_feature (296)..(296): n equals a,t,g, or c
  misc_feature (490)..(490): n equals a,t,g, or c
  misc_feature (522)..(522): n equals a,t,g, or c
  misc_feature (585)..(585): n equals a,t,g, or c
  misc_feature (599)..(599): n equals a,t,g, or c
  misc_feature (629)..(629): n equals a,t,g, or c
  misc_feature (645)..(645): n equals a,t,g, or c
  misc_feature (662)..(662): n equals a,t,g, or c
  misc_feature (694)..(694): n equals a,t,g, or c
  misc_feature (710)..(710): n equals a,t,g, or c
  misc_feature (732)..(732): n equals a,t,g, or c
gacacggcagagatcagcaagttttgtctcaagtcagacaaggtctangtggccttggccttatncaaagtgggtgacatatttgattatatttccctttacctccatagtantcaggccagcagcatggactgcaagaacctaagggagcaacatacttanctgcaaagtgagcaaatgaattgagcctaggaatatgtgatgaaaatgcatggctgatgtttcctgatctccaaggagactcccatttgctgaagttttgcatgcttagaaatccactaccgcaaaaaatacangaatacctttaagttgattattggcaatcttattcatatattagcaagaaaaagggagagatgcttactggtggatgctatacagtcctctgtttttaaaagtaccatgagccgctgtgcccggcccatttaatactgtttatatgctgcaacagtgtttgaaactgttttacccacattccaatgaacttganaaagcccaaaagaaaatttggattttagccancaagattatggatgggtgaaatttcctctttagttctttaaacaagttatctgttcatactanatttccatatctanttaaattactaactccatgaatattttcanatatttcctttataanctatttctgctgaaccntccctcccgtatgttccctgtgacttccaaanaaaaaaaaaaactttnttttttctttttaaaccattcnacca

SEQ ID NO: 2951 - DNA, 648 bp, Homo sapiens
  misc_feature (182)..(182): n equals a,t,g, or c
  misc_feature (399)..(399): n equals a,t,g, or c
  misc_feature (407)..(407): n equals a,t,g, or c
  misc_feature (579)..(579): n equals a,t,g, or c
  misc_feature (584)..(584): n equals a,t,g, or c
  misc_feature (632)..(632): n equals a,t,g, or c
  misc_feature (641)..(641): n equals a,t,g, or c
  misc_feature (646)..(646): n equals a,t,g, or c
gggattacaggcgtgagccgccattcctggccaaaacaaaatattttagagaaaaattttagaaacttatgagtttgaattaaaaaaattactcttccttttcaaatagaagcttcactttgaattttatttttggtctttatttcaaaatatctaaatatatgaagccatacttgcagtanatttcgtttggatttcgtcttactcttttctggaattctgaaaattagtattaaagaattccaggtcaaaagggaaaacatcttagaggttatttagtctaattctcaagggaaaagaataattcttagatggtgttcttaaaacattttaacactttcttattcgtttgactgcacaaaggagcacctttatatttggctgtaatacatccagttnaggcatanggattgctctaccttcatatttattttttaaatttatcttgggttaactaaattagaaatatactgccattcccatctttgttatcctaacgcaatccaagggaataacctcttcagtagatcttaaaattttagtgtcctgtcaaattaacctcttcaattaatatatgtnttaantttgaaggcaatgaattttccttcctccttcctgtttttttttttttnaaattcccnttctntc

SEQ ID NO: 2952 - DNA, 526 bp, Homo sapiens
  misc_feature (1)..(1): n equals a,t,g, or c
  misc_feature (24)..(24): n equals a,t,g, or c
  misc_feature (38)..(38): n equals a,t,g, or c
  misc_feature (63)..(63): n equals a,t,g, or c
  misc_feature (111)..(111): n equals a,t,g, or c
  misc_feature (162)..(162): n equals a,t,g, or c
  misc_feature (166)..(166): n equals a,t,g, or c
  misc_feature (177)..(177): n equals a,t,g, or c
  misc_feature (187)..(187): n equals a,t,g, or c
  misc_feature (204)..(204): n equals a,t,g, or c
  misc_feature (231)..(231): n equals a,t,g, or c
  misc_feature (246)..(246): n equals a,t,g, or c
  misc_feature (253)..(253): n equals a,t,g, or c
  misc_feature (304)..(304): n equals a,t,g, or c
  misc_feature (320)..(320): n equals a,t,g, or c
  misc_feature (322)..(322): n equals a,t,g, or c
  misc_feature (327)..(327): n equals a,t,g, or c
  misc_feature (332)..(332): n equals a,t,g, or c
  misc_feature (344)..(344): n equals a,t,g, or c
  misc_feature (364)..(364): n equals a,t,g, or c
  misc_feature (371)..(371): n equals a,t,g, or c
  misc_feature (383)..(383): n equals a,t,g, or c
  misc_feature (415)..(415): n equals a,t,g, or c
  misc_feature (471)..(471): n equals a,t,g, or c
  misc_feature (474)..(474): n equals a,t,g, or c
  misc_feature (478)..(478): n equals a,t,g, or c
  misc_feature (486)..(486): n equals a,t,g, or c
  misc_feature (517)..(517): n equals a,t,g, or c
naagggaaagcatacccgtaccantatgtggtctgaangaccccgaccggcatggccactcanacacaagtccacaccacagcactaccgtcccatccgttctcatgaatntttaaatcgaaaaagcaaaacaactactcttaaaactttttttatgtctcnagtnaaatggctgancattgcaganaacaaaaaaattccccnctttttattttttaaaaaccatccttncaatttcttttggtnaccgaanctactctcttttccttttaaaatcacttctctggcctctggtttctctctnctttctttctggcatnantaatntaaanggcgctttctcncgctttgcccattctacttncttagtnaaacatgacctntgcgtgaatggaatagtctggaccccttggtnggggatgcttgggaaaaccaaggaaggccctgaactccccactgcccaggagggcnttnggcnggctcccncattggaattaaaaccccccccaaaaatgantccttaccc

SEQ ID NO: 2953 - DNA, 266 bp, Homo sapiens
  misc_feature (196)..(196): n equals a,t,g, or c
  misc_feature (198)..(198): n equals a,t,g, or c
  misc_feature (212)..(212): n equals a,t,g, or c
  misc_feature (216)..(216): n equals a,t,g, or c
  misc_feature (234)..(234): n equals a,t,g, or c
gaaaaagtaacctgccaactcagttttctcaaaaagtctcctaattctctccaagaaaagggacatatgtttcctaaagggaggacctaaaataaataggtattttttttcttgatattctgttcatcttggtttgtactgaaatgtttaacaatttggaatgtgaaattgctacacgtactccaaagcaaatcanangttaaaagtggacnggtnaaaaacatcattccggtngggcactgccctcacttttgtgctggcggcaa

SEQ ID NO: 2954 - DNA, 659 bp, Homo sapiens
  misc_feature (210)..(210): n equals a,t,g, or c
  misc_feature (280)..(280): n equals a,t,g, or c
  misc_feature (323)..(323): n equals a,t,g, or c
  misc_feature (345)..(345): n equals a,t,g, or c
  misc_feature (348)..(348): n equals a,t,g, or c
  misc_feature (364)..(364): n equals a,t,g, or c
  misc_feature (370)..(370): n equals a,t,g, or c
  misc_feature (373)..(373): n equals a,t,g, or c
  misc_feature (375)..(375): n equals a,t,g, or c
  misc_feature (387)..(387): n equals a,t,g, or c
  misc_feature (392)..(392): n equals a,t,g, or c
  misc_feature (395)..(395): n equals a,t,g, or c
  misc_feature (402)..(402): n equals a,t,g, or c
  misc_feature (415)..(415): n equals a,t,g, or c
  misc_feature (440)..(440): n equals a,t,g, or c
  misc_feature (478)..(478): n equals a,t,g, or c
  misc_feature (492)..(492): n equals a,t,g, or c
  misc_feature (505)..(505): n equals a,t,g, or c
  misc_feature (511)..(511): n equals a,t,g, or c
  misc_feature (516)..(516): n equals a,t,g, or c
  misc_feature (518)..(518): n equals a,t,g, or c
  misc_feature (536)..(536): n equals a,t,g, or c
  misc_feature (539)..(539): n equals a,t,g, or c
  misc_feature (543)..(543): n equals a,t,g, or c
  misc_feature (580)..(580): n equals a,t,g, or c
  misc_feature (601)..(601): n equals a,t,g, or c
  misc_feature (615)..(615): n equals a,t,g, or c
  misc_feature (647)..(647): n equals a,t,g, or c
  misc_feature (653)..(653): n equals a,t,g, or c
gggacagggccctttccaagtctgaagcctggaccacagttggggaatctgtcacgtgaatgaagatctgccctccaattgacttttccaggtcttgggccccactggggtttcacagacgcctgcctgaatctcaacgctgacacaaagaccattttgtccgtgggtggctgtgaaattattgttgctatttggggacacaagctgaanggcctcctatttcatcttgctgctgtcattctcgcattattataatgttatcattggtgatttgatgatnagtcagctttttttgagttttatgaattctggcagtaaaaaanttccaaaatgtctttcactganctnaattccaggtttttancaaaanctntnttccttctgganattanatnagaccanaataccttttttnaaaaaattgtttacttggtttgatnccaatcccggctcctccattatatactgtttgaatttnggtccacatacctncccatcttttttntcctanccttnanaaaagaattatatattantgntccncaataaaattttgaagaattaattaatttaaaaattnccaacccttttttcaattccncaaaacctaacccncctaaacctttccgtccaccctttaaattttncccctngaaaac

SEQ ID NO: 2955 - DNA, 438 bp, Homo sapiens
  misc_feature (12)..(12): n equals a,t,g, or c
  misc_feature (71)..(71): n equals a,t,g, or c
  misc_feature (77)..(77): n equals a,t,g, or c
  misc_feature (105)..(105): n equals a,t,g, or c
  misc_feature (108)..(108): n equals a,t,g, or c
  misc_feature (119)..(119): n equals a,t,g, or c
  misc_feature (127)..(127): n equals a,t,g, or c
  misc_feature (141)..(141): n equals a,t,g, or c
  misc_feature (143)..(143): n equals a,t,g, or c
  misc_feature (148)..(148): n equals a,t,g, or c
  misc_feature (156)..(156): n equals a,t,g, or c
  misc_feature (160)..(160): n equals a,t,g, or c
  misc_feature (168)..(168): n equals a,t,g, or c
  misc_feature (184)..(184): n equals a,t,g, or c
  misc_feature (212)..(212): n equals a,t,g, or c
  misc_feature (236)..(236): n equals a,t,g, or c
  misc_feature (239)..(239): n equals a,t,g, or c
  misc_feature (303)..(303): n equals a,t,g, or c
  misc_feature (382)..(383): n equals a,t,g, or c
  misc_feature (393)..(393): n equals a,t,g, or c
  misc_feature (428)..(428): n equals a,t,g, or c
  misc_feature (436)..(436): n equals a,t,g, or c
gcctgccttgtntggattggcactgtttgccattctctgggttggctgtggcatctaccctccctccctgntgccanaaccagcatcctccacttgttcaggggnttntcttaatactnaacgtagnataagggcttctgnancccanaatatganacantttccccncctcaagatcattcantgtttttcctttaaaaaaatggtcaatnaagctcctttggcaaaatcccccnaanaaacaagggtttctttttcccatcccctacccttctgggaattttttaacccccctttccaacnacttcccctattcctaccctggcccttttttctaggaatccttagaagaattaaaaaaagttaatattgattccttacnnaataaatttncccccaaaggaaaaaggaatcctccccttaattanttggtttntt

SEQ ID NO: 2956 - DNA, 391 bp, Homo sapiens
  misc_feature (5)..(5): n equals a,t,g, or c
  misc_feature (27)..(27): n equals a,t,g, or c
  misc_feature (34)..(34): n equals a,t,g, or c
  misc_feature (42)..(42): n equals a,t,g, or c
  misc_feature (46)..(46): n equals a,t,g, or c
  misc_feature (52)..(53): n equals a,t,g, or c
  misc_feature (58)..(58): n equals a,t,g, or c
  misc_feature (64)..(64): n equals a,t,g, or c
  misc_feature (72)..(73): n equals a,t,g, or c
  misc_feature (76)..(76): n equals a,t,g, or c
  misc_feature (85)..(85): n equals a,t,g, or c
  misc_feature (92)..(92): n equals a,t,g, or c
  misc_feature (100)..(100): n equals a,t,g, or c
  misc_feature (135)..(135): n equals a,t,g, or c
  misc_feature (138)..(138): n equals a,t,g, or c
  misc_feature (142)..(142): n equals a,t,g, or c
  misc_feature (151)..(151): n equals a,t,g, or c
  misc_feature (159)..(160): n equals a,t,g, or c
  misc_feature (167)..(167): n equals a,t,g, or c
  misc_feature (175)..(175): n equals a,t,g, or c
  misc_feature (192)..(192): n equals a,t,g, or c
  misc_feature (244)..(244): n equals a,t,g, or c
  misc_feature (247)..(247): n equals a,t,g, or c
  misc_feature (285)..(285): n equals a,t,g, or c
  misc_feature (288)..(288): n equals a,t,g, or c
  misc_feature (312)..(312): n equals a,t,g, or c
  misc_feature (321)..(321): n equals a,t,g, or c
  misc_feature (365)..(365): n equals a,t,g, or c
  misc_feature (372)..(372): n equals a,t,g, or c
  misc_feature (378)..(378): n equals a,t,g, or c
atccnaattgttatatattgtgagganatagggnacgaaatntatntgtatnngatgnacgcantctctaanntcntttcttgtnaaactcnttcacttnacttcttataacgatggaatctatttttctcgctnttnaatnctttatccncttcagcnnttgtacngtgatctncatctactcttaacaanctggaaaactttccatattgtgttgatcactaattatctctcttgcttattngtnaccttaatatatatctgcagattttctccataaaccanacntctgggatcatttccttcccacanattctgcanccttcacctccccatacagtccaattcatgtctcactggacccnaaactgntctctnttctgaaccagct

SEQ ID NO: 2957 - DNA, 401 bp, Homo sapiens
  misc_feature (2)..(2): n equals a,t,g, or c
  misc_feature (52)..(52): n equals a,t,g, or c
  misc_feature (56)..(56): n equals a,t,g, or c
  misc_feature (63)..(63): n equals a,t,g, or c
  misc_feature (66)..(66): n equals a,t,g, or c
  misc_feature (69)..(69): n equals a,t,g, or c
  misc_feature (79)..(79): n equals a,t,g, or c
  misc_feature (85)..(85): n equals a,t,g, or c
  misc_feature (149)..(149): n equals a,t,g, or c
  misc_feature (154)..(154): n equals a,t,g, or c
  misc_feature (179)..(179): n equals a,t,g, or c
  misc_feature (187)..(187): n equals a,t,g, or c
  misc_feature (191)..(191): n equals a,t,g, or c
  misc_feature (207)..(207): n equals a,t,g, or c
  misc_feature (229)..(229): n equals a,t,g, or c
  misc_feature (262)..(262): n equals a,t,g, or c
  misc_feature (267)..(268): n equals a,t,g, or c
  misc_feature (292)..(292): n equals a,t,g, or c
  misc_feature (321)..(321): n equals a,t,g, or c
  misc_feature (343)..(343): n equals a,t,g, or c
  misc_feature (351)..(351): n equals a,t,g, or c
  misc_feature (367)..(367): n equals a,t,g, or c
  misc_feature (383)..(383): n equals a,t,g, or c
angtggaaatgttcatgccattcagtgtgactctgcaagttcacggaggtcncctnctcctcntanggnccacagactnttctangctggttggaaatgggcccaagatgatctggaaacttccattgctaataatccaaatagtttcnatctnctaagtattaaaggaagacacttanatctgatntctnattaccaactgatctncaaaatggtcagtatttagatngtctccctttctacctgcttttccttttacaanaaatnnagcaaggaacaagcatcatgatantgaaaatctatttcatcaatatgttcatnttcacctttcatcttttccatnaccctttngaatatcggtgccttnaaaatctctccttaancaaattgcagttctgtcc

SEQ ID NO: 2958 - DNA, 424 bp, Homo sapiens
  misc_feature (247)..(247): n equals a,t,g, or c
  misc_feature (262)..(262): n equals a,t,g, or c
  misc_feature (311)..(311): n equals a,t,g, or c
  misc_feature (342)..(342): n equals a,t,g, or c
  misc_feature (354)..(354): n equals a,t,g, or c
  misc_feature (382)..(382): n equals a,t,g, or c
  misc_feature (394)..(394): n equals a,t,g, or c
  misc_feature (420)..(420): n equals a,t,g, or c
ggcataatcagtgtgatctttagctaaccatggttttcaattttacctatttttaaaaaaacttttaaattaacattagctcagcttcatctttattaactaatttttgttaaagatttgatgtcttcctatggtatatactattgtcagtttatagcaatggtagctttgacctatgaatctcccaaaatcaaactttgatcaaactttaatacacgaaagttctcccaaaccgttacttttatantgagaagttcattantaaatttctgtccttaaagtttggcttttttattaatttgaaatgtatnctcaggataaccatactaaatcattgggatntttgaaattatntaaaaaaaattatttttaacccgttttnctcttaaaattntattaaatacggccgggccctgtggnccat

SEQ ID NO: 2959 - DNA, 644 bp, Homo sapiens
  misc_feature (257)..(257): n equals a,t,g, or c
  misc_feature (275)..(275): n equals a,t,g, or c
  misc_feature (371)..(371): n equals a,t,g, or c
  misc_feature (387)..(387): n equals a,t,g, or c
  misc_feature (453)..(453): n equals a,t,g, or c
  misc_feature (458)..(458): n equals a,t,g, or c
  misc_feature (468)..(468): n equals a,t,g, or c
  misc_feature (481)..(481): n equals a,t,g, or c
  misc_feature (517)..(518): n equals a,t,g, or c
  misc_feature (539)..(539): n equals a,t,g, or c
  misc_feature (551)..(551): n equals a,t,g, or c
  misc_feature (579)..(579): n equals a,t,g, or c
  misc_feature (603)..(603): n equals a,t,g, or c
  misc_feature (621)..(621): n equals a,t,g, or c
  misc_feature (644)..(644): n equals a,t,g, or c
gagagagggggcagaacatgaccctgcctgttgaccccaactgtgacacttctgaaaccaatcttaggaaagcctctcatgggaatggcatttccaagattaggggtaaagtgggacctccctgttgaaaagttgtcctgccctctgtcagctagacatgccataagcaagggaaagaatgacttttaatgacaggggtagaaattgggagcaagaggctgaacacatggaacagaattttttgaagtgccttgttnaatggaaagtagatgtangaaaatttgaaatgctggtatttcagatgggcccaggcctatcacctattattccacctggagaaggtagacttatattactcctcctttttccanaaacagtttgtgtgtnaaagccctaaagggccacattcccttgatcccttttattaaccaaattgttctttgcaacaaggtngggtnttggccacanaactcctttaaanattggaacctggaagccgggaagtttggcttatttnntttttccttttgggctccttnccattctttatnctggatgaacccctttcttttatttctnggccaaaaaaaaaaaaaaacccanggggggccggtccccttnccccttttttttttttaaatccn

SEQ ID NO: 2960 - DNA, 705 bp, Homo sapiens
  misc_feature (98)..(98): n equals a,t,g, or c
  misc_feature (109)..(109): n equals a,t,g, or c
  misc_feature (114)..(114): n equals a,t,g, or c
  misc_feature (126)..(126): n equals a,t,g, or c
  misc_feature (128)..(128): n equals a,t,g, or c
  misc_feature (134)..(134): n equals a,t,g, or c
  misc_feature (147)..(147): n equals a,t,g, or c
  misc_feature (152)..(152): n equals a,t,g, or c
  misc_feature (164)..(164): n equals a,t,g, or c
  misc_feature (170)..(170): n equals a,t,g, or c
  misc_feature (174)..(174): n equals a,t,g, or c
  misc_feature (188)..(188): n equals a,t,g, or c
  misc_feature (190)..(190): n equals a,t,g, or c
  misc_feature (206)..(206): n equals a,t,g, or c
  misc_feature (212)..(212): n equals a,t,g, or c
  misc_feature (216)..(216): n equals a,t,g, or c
  misc_feature (225)..(225): n equals a,t,g, or c
  misc_feature (232)..(232): n equals a,t,g, or c
  misc_feature (235)..(235): n equals a,t,g, or c
  misc_feature (241)..(241): n equals a,t,g, or c
  misc_feature (244)..(244): n equals a,t,g, or c
  misc_feature (253)..(253): n equals a,t,g, or c
  misc_feature (258)..(258): n equals a,t,g, or c
  misc_feature (283)..(283): n equals a,t,g, or c
  misc_feature (297)..(297): n equals a,t,g, or c
  misc_feature (312)..(312): n equals a,t,g, or c
  misc_feature (319)..(319): n equals a,t,g, or c
  misc_feature (321)..(321): n equals a,t,g, or c
  misc_feature (325)..(326): n equals a,t,g, or c
  misc_feature (328)..(328): n equals a,t,g, or c
  misc_feature (333)..(333): n equals a,t,g, or c
  misc_feature (338)..(338): n equals a,t,g, or c
  misc_feature (354)..(355): n equals a,t,g, or c
  misc_feature (362)..(363): n equals a,t,g, or c
  misc_feature (368)..(368): n equals a,t,g, or c
  misc_feature (377)..(377): n equals a,t,g, or c
  misc_feature (385)..(385): n equals a,t,g, or c
  misc_feature (390)..(391): n equals a,t,g, or c
  misc_feature (399)..(399): n equals a,t,g, or c
  misc_feature (401)..(401): n equals a,t,g, or c
  misc_feature (409)..(409): n equals a,t,g, or c
  misc_feature (422)..(422): n equals a,t,g, or c
  misc_feature (453)..(453): n equals a,t,g, or c
  misc_feature (455)..(455): n equals a,t,g, or c
  misc_feature (458)..(458): n equals a,t,g, or c
  misc_feature (466)..(466): n equals a,t,g, or c
  misc_feature (475)..(475): n equals a,t,g, or c
  misc_feature (478)..(478): n equals a,t,g, or c
  misc_feature (496)..(496): n equals a,t,g, or c
  misc_feature (503)..(503): n equals a,t,g, or c
  misc_feature (507)..(507): n equals a,t,g, or c
  misc_feature (519)..(519): n equals a,t,g, or c
  misc_feature (528)..(528): n equals a,t,g, or c
  misc_feature (549)..(549): n equals a,t,g, or c
  misc_feature (552)..(552): n equals a,t,g, or c
  misc_feature (555)..(555): n equals a,t,g, or c
  misc_feature (566)..(566): n equals a,t,g, or c
  misc_feature (580)..(580): n equals a,t,g, or c
  misc_feature (595)..(595): n equals a,t,g, or c
  misc_feature (597)..(597): n equals a,t,g, or c
  misc_feature (601)..(601): n equals a,t,g, or c
  misc_feature (635)..(635): n equals a,t,g, or c
  misc_feature (651)..(651): n equals a,t,g, or c
  misc_feature (675)..(675): n equals a,t,g, or c
  misc_feature (679)..(679): n equals a,t,g, or c
  misc_feature (691)..(691): n equals a,t,g, or c
gtaataataatggttggaactactgctttatacgatcttaatgtccttaatctttatctgggaatgtctggttttgccttgattcttttttttttttnaaggatatttngctgnatttaaaatttntncctaanaacttttcctttnacccnctttaaatttcnccccantgcncccggattcccatnantttgggtgcaaattcncctttnaatnattttgggnccccttngtntaattnttnccccccctnctttngggcttttttttcctgggccttttnttttaaacattttnactaaaacttttttnggtttgnanctcnnanttttnacccnacttgggtttgttttnnttggttnnggttngtttaaacncctcgganatatnntttttttnanaaaatttnaaaaattttgggnccttatttcttaattcatttttctgcccctngnccntcctttanaccccttangcntttttgggtaaattcccnttccccnggtnccgggccttttnttttttccntctttcccccccccttccccngtnttnttcttaaaatnccccaacccccaangtttccccccaaccncngggntttttttcccaatttaaattcccccccggtcccntgggtccccaattttncccctttaaaaaccttcccggaanaaantttctttataanaaaacccttaaaaa

SEQ ID NO: 2961 - DNA, 475 bp, Homo sapiens
  misc_feature (267)..(267): n equals a,t,g, or c
  misc_feature (372)..(372): n equals a,t,g, or c
  misc_feature (407)..(407): n equals a,t,g, or c
  misc_feature (432)..(432): n equals a,t,g, or c
  misc_feature (445)..(445): n equals a,t,g, or c
  misc_feature (455)..(455): n equals a,t,g, or c
  misc_feature (471)..(471): n equals a,t,g, or c
gcaggaagacatggtgagagaacagcatgcctgagagagaaaattcatgcttgccagtctgagataagccagtatcatcttctttcaggtgcaagttttgaaactgcttttgaatttgtctgaaaatccagccatgacagaaggacttctccgtgcccaagtaaatagcttatatatttattttgtaaatatacacatatatacatttgaacagacagacagatctggaaagattaagcctaaaatgttacagggattctctctgangagcagtattaaaggtggttttttaaattcattttgtatgtatgaatttcctaaattttttgcaatgagcctcttttacttttgaaaaacatttttaaaaattcnccctagcacaattaattatacttttttctctaccnattttgggttcaattgtgcctcccntattttatacttnaactgtttgnttttacatgtttcttnattt

SEQ ID NO: 2962 - DNA, 494 bp, Homo sapiens
  misc_feature (260)..(260): n equals a,t,g, or c
  misc_feature (317)..(317): n equals a,t,g, or c
  misc_feature (355)..(355): n equals a,t,g, or c
  misc_feature (412)..(412): n equals a,t,g, or c
  misc_feature (419)..(419): n equals a,t,g, or c
  misc_feature (441)..(441): n equals a,t,g, or c
  misc_feature (460)..(460): n equals a,t,g, or c
  misc_feature (485)..(485): n equals a,t,g, or c
gcggcacgagaattaatgaagtcaccttcaaatttccagagccatacatgtatatattgtcagaatctgtccatgacaaacacaaaactgaagagctgttttcaaagaaaaaagattatttcacttaattattttgttggataattgtctagttagaacttccaaaaagatacttacaaacataattcacaaatttgaaataatttctgaagttgattagctatctcatatcttttatcaggtcattttttatatatgtnggcacaaacaataagtatgttctcttctgtttgggaaaataatttggaataaaatanaaattagattatgaaaccaaaaaccttctcaaatttangccttatttactcatgactggtttctatgcacaagaaaatactaaaccaaatatatngtaggantgttattctcttctgcatcttnatccccattttgtttctgnctttatttgttaaaattgtctttantttaatggt

SEQ ID NO: 2963 - DNA, 103 bp, Homo sapiens
  misc_feature (99)..(103): n equals a,t,g, or c
gcggcacgagggggggcccggtacccaattcgccctatagtgagtcgtattacaattcactggccgtcgttttacaacgtcgtgactgggaaaaccaannnnn

SEQ ID NO: 2964 - DNA, 487 bp, Homo sapiens
  misc_feature (155)..(155): n equals a,t,g, or c
  misc_feature (157)..(157): n equals a,t,g, or c
  misc_feature (201)..(201): n equals a,t,g, or c
  misc_feature (221)..(221): n equals a,t,g, or c
  misc_feature (260)..(260): n equals a,t,g, or c
  misc_feature (267)..(267): n equals a,t,g, or c
  misc_feature (269)..(269): n equals a,t,g, or c
  misc_feature (273)..(273): n equals a,t,g, or c
  misc_feature (277)..(277): n equals a,t,g, or c
  misc_feature (279)..(279): n equals a,t,g, or c
  misc_feature (333)..(333): n equals a,t,g, or c
  misc_feature (373)..(373): n equals a,t,g, or c
  misc_feature (375)..(375): n equals a,t,g, or c
  misc_feature (386)..(386): n equals a,t,g, or c
  misc_feature (405)..(405): n equals a,t,g, or c
  misc_feature (427)..(427): n equals a,t,g, or c
  misc_feature (463)..(463): n equals a,t,g, or c
  misc_feature (471)..(471): n equals a,t,g, or c
  misc_feature (486)..(486): n equals a,t,g, or c
gtctggcttgccgcccacacctgtctggattcatcccgactcgagcacctcctcctaactggtcccacgggcctgtccctgccactttccaatctgtcctccacttgacatttggagtaattttttaaaacagcaaatctgattaggaaactcanangcccagggaagccagtgacttgccctctggcaccctgtcctganggtagagcttcctggcacanggtcagtgagccccgaggccacctccctggaagctgcangaaggtnancgtngtcnanaacaacaattttcattgtttcatgtgtcattgcctattttacgaacttcgcaantgccctcaatttgcttaatttactttggccaccccctccntnaaaagtcaaantcgttaattccaactcccncccggcaccgggttctgcaccngttattccaacaggctggacaaaaggctaaattgantttgaaanccaataattatttcnt

SEQ ID NO: 2965 - DNA, 349 bp, Homo sapiens
  misc_feature (103)..(103): n equals a,t,g, or c
  misc_feature (169)..(169): n equals a,t,g, or c
  misc_feature (217)..(217): n equals a,t,g, or c
  misc_feature (231)..(231): n equals a,t,g, or c
  misc_feature (237)..(237): n equals a,t,g, or c
  misc_feature (242)..(242): n equals a,t,g, or c
  misc_feature (245)..(245): n equals a,t,g, or c
  misc_feature (256)..(256): n equals a,t,g, or c
  misc_feature (299)..(299): n equals a,t,g, or c
  misc_feature (311)..(311): n equals a,t,g, or c
  misc_feature (335)..(335): n equals a,t,g, or c
  misc_feature (338)..(338): n equals a,t,g, or c
gccaagtcagacttctctgaatttggagccaagaggaagttcacccagagctttatgaggtctgaagaagagggagagaaagagaggacagaaaacagagaanaagggaggtttgcatctggacggcggtcccagtatcggagaagcactgacagggaggaagaggaanaaatggacgatgaagccatcattgctgcttggagacgccggcgagaanaaaccaggaccaanctgcanaaaanganggaggactganctggggaaaatctgaaaacactgaaagaaaccactcacgttancataaggctcanggcacacgttgccaccactcatcncangatgaagatac

SEQ ID NO: 2966 - DNA, 393 bp, Homo sapiens
  misc_feature (23)..(23): n equals a,t,g, or c
  misc_feature (214)..(214): n equals a,t,g, or c
  misc_feature (239)..(239): n equals a,t,g, or c
  misc_feature (271)..(271): n equals a,t,g, or c
  misc_feature (282)..(282): n equals a,t,g, or c
  misc_feature (319)..(319): n equals a,t,g, or c
  misc_feature (362)..(362): n equals a,t,g, or c
  misc_feature (366)..(366): n equals a,t,g, or c
  misc_feature (374)..(374): n equals a,t,g, or c
  misc_feature (391)..(391): n equals a,t,g, or c
gctcgtgccgaattcggcacganatttttttaattgttggagtgggtgatttaagtatttgaactttgcttatctcttgtctaattaatacagattctggaattttccagttttacgtatagataagttttgaaagtatgatttaagaagatatgaaatgtttgtattggctatacttgaatttttttattgcaaaaatgtctgattttctganactggttttctaactatttataaanaaaattggttgtggtctctttggaaaatgtanaaaaaatgtanttgtgtgttctaatgccttggccagatagcttgctantctttattgaaatttaatgtatcctgacatgaataccatactnatanggctaaanttgtatgtttgttgctntt

SEQ ID NO: 2967 - DNA, 325 bp, Homo sapiens
  misc_feature (235)..(235): n equals a,t,g, or c
  misc_feature (291)..(292): n equals a,t,g, or c
  misc_feature (304)..(304): n equals a,t,g, or c
  misc_feature (312)..(312): n equals a,t,g, or c
gctagcagagaaccgctggcctagaggaaggcagagaaacgagggattcctgagttcctgcacggagcagagcagcccggggaccaacctggaatactcagttcagactactgaggaagacaaaataaacttttatgcttttaaaaaaaattatggacagaacaatattagaacaaaaacttttatgattttccagcttctggggtttgtctacggttaccagcagccttgcccngctattgtttttattctgttccaggctggctgttaacaaaataccaataacgggtnnttcttaacaacnttttctanaatttcctggggg

SEQ ID NO: 2968 - DNA, 494 bp, Homo sapiens
  misc_feature (236)..(236): n equals a,t,g, or c
  misc_feature (306)..(306): n equals a,t,g, or c
  misc_feature (312)..(312): n equals a,t,g, or c
  misc_feature (324)..(324): n equals a,t,g, or c
  misc_feature (343)..(343): n equals a,t,g, or c
  misc_feature (354)..(354): n equals a,t,g, or c
  misc_feature (375)..(375): n equals a,t,g, or c
  misc_feature (412)..(412): n equals a,t,g, or c
  misc_feature (439)..(439): n equals a,t,g, or c
  misc_feature (458)..(458): n equals a,t,g, or c
  misc_feature (465)..(465): n equals a,t,g, or c
  misc_feature (472)..(472): n equals a,t,g, or c
gtgtaggcaccctcctaatgttggttgccctccttttaaagtcagagcaagagaagtagcaggaatctatatcctaaggaggaacataaagggtgaaaagcacagtggaagggatgcctaaaagagcaaaggctgaatcagggttttaatggcctgaaatgaccaattttctaaaacttgacaggttagatgttaaaatcagacatataggttccaaacaatcgattgcaaaggancacttgttcaaaacactggctgggaatctgctcatgttgatgaaaaaccccagggtttaaagttaatttnaggtcntttttgaatccngaataacctggctgaaaanaatcccaaccnaacccgaaagaaacaaccctnccggaacccttaccccccctttgtggaaaagagggtnaaaaattccccccttatcccttgcccncaatttttttccccttttntttcttnttttttnccacccctttaaaaaaactttt

SEQ ID NO: 2969 - DNA, 149 bp, Homo sapiens
  misc_feature (27)..(27): n equals a,t,g, or c
  misc_feature (35)..(35): n equals a,t,g, or c
  misc_feature (38)..(38): n equals a,t,g, or c
  misc_feature (40)..(40): n equals a,t,g, or c
  misc_feature (62)..(62): n equals a,t,g, or c
  misc_feature (115)..(115): n equals a,t,g, or c
  misc_feature (120)..(120): n equals a,t,g, or c
  misc_feature (132)..(132): n equals a,t,g, or c
  misc_feature (137)..(137): n equals a,t,g, or c
aactattggatcccccgggctgtatgnaattcggnacnanctcgtgccgaattcggtacganagataactagtctcgagtttctttttttttttcctaatatcgtctcccttttnaatancttatttaatanacttngtgcaaatttaa

SEQ ID NO: 2970 - DNA, 309 bp, Homo sapiens
  misc_feature (192)..(192): n equals a,t,g, or c
  misc_feature (252)..(252): n equals a,t,g, or c
  misc_feature (290)..(290): n equals a,t,g, or c
  misc_feature (303)..(303): n equals a,t,g, or c
  misc_feature (305)..(306): n equals a,t,g, or c
gcggcacgagcctccatcctagatagaccatcttgagtctgctgtctggaggctagatagggaacacccaggaatgaacaggccgggttgccattatacagatgctggttgctgaaagtcttcaactgtaaactaggtggatttggagattgataggtaaccccgtcttacaatagcatcatcatatctatnatttaagaatttgtaagggacagtagtttcataaaaactcttgggttttcccaaattaanaaaaaataaggtcccccaaatttatttattaattttanggtttttttgggntnnccg

SEQ ID NO: 2971 - DNA, 531 bp, Homo sapiens
  misc_feature (272)..(272): n equals a,t,g, or c
  misc_feature (303)..(303): n equals a,t,g, or c
  misc_feature (313)..(313): n equals a,t,g, or c
  misc_feature (330)..(330): n equals a,t,g, or c
  misc_feature (417)..(417): n equals a,t,g, or c
  misc_feature (421)..(421): n equals a,t,g, or c
  misc_feature (428)..(428): n equals a,t,g, or c
  misc_feature (439)..(439): n equals a,t,g, or c
  misc_feature (497)..(497): n equals a,t,g, or c
  misc_feature (518)..(518): n equals a,t,g, or c
  misc_feature (521)..(521): n equals a,t,g, or c
  misc_feature (523)..(523): n equals a,t,g, or c
gatcatttgttgttttagaagattgtcttcatctaaacaaaaacactaagaaatcagtagatcactagataatgagtcagtgtttttagcatcacattttacaatttacagtttttgtttgattctgtagcccatttttcttgaaggttagaataagaatcttcttgtatttgaaaaccatctgccctaaattacatttaactacaagaaatggctctctgctggagaaatttaagcttgtcttagttgtttggtagtggctatggaatganaagtgttgagtcttgtgccccttccatgttnttatttgctnacttactatattactanggcctttaattccagcacagcatgtcttctggtctatgaaaattgtgttgaagactaaggcaaatgcctgttccctgccactctccnccanaaaatcntatccgaaaantgactttgaattccggtcctggtaaccaaacactgtaatcctccctttgcaatccccngaaccaaaggctacgtccccngtncncccttaaa

SEQ ID NO: 2972 - DNA, 122 bp, Homo sapiens
  misc_feature (116)..(116): n equals a,t,g, or c
gcggcacgagctcgtgccgaattcggcacgagggggggcccggtacccaattcgccctatagtgagtcgtattacaattcactggccgtcgttttacaacgtcgtgactggacccnaaaaaa

SEQ ID NO: 2973 - DNA, 494 bp, Homo sapiens
  misc_feature (174)..(174): n equals a,t,g, or c
  misc_feature (177)..(177): n equals a,t,g, or c
  misc_feature (237)..(237): n equals a,t,g, or c
  misc_feature (247)..(247): n equals a,t,g, or c
  misc_feature (276)..(276): n equals a,t,g, or c
  misc_feature (284)..(284): n equals a,t,g, or c
  misc_feature (291)..(291): n equals a,t,g, or c
  misc_feature (298)..(298): n equals a,t,g, or c
  misc_feature (300)..(300): n equals a,t,g, or c
  misc_feature (313)..(313): n equals a,t,g, or c
  misc_feature (340)..(340): n equals a,t,g, or c
  misc_feature (358)..(358): n equals a,t,g, or c
  misc_feature (386)..(386): n equals a,t,g, or c
  misc_feature (394)..(394): n equals a,t,g, or c
  misc_feature (433)..(433): n equals a,t,g, or c
  misc_feature (436)..(436): n equals a,t,g, or c
  misc_feature (469)..(469): n equals a,t,g, or c
  misc_feature (473)..(473): n equals a,t,g, or c
  misc_feature (489)..(489): n equals a,t,g, or c
gccgaaggcccagttcttcgaaagcctgtggccggagctggactcacaggattcggggtccgtacagcgcgcacgtggtaccgcatcttcggcagcggcgcccctaatgcccagccccgccctgcttcctttgccgggcctgaacggtgtcagcattgaaggttggacgccgantcncggcgaattggtcccttgcggttataaacttggggcttccctaagggcggtgcccggatngatgggggcncctcttccacctgcaactccccccacgcnaaaacgcnaaaattncacatcncnggccaacccgtcncctccgggtttttcaaggggggccccngggcaaaaagaacttaanaattgttttggtttttaaaaaccatttncatttggnatgggtttctttttgcccctaaaggtttcaaccccgggnttntggttcattgggcccatttttcaaaaaaccccncccnaattttgttttttccnaaaac

SEQ ID NO: 2974 - DNA, 540 bp, Homo sapiens
  misc_feature (4)..(4): n equals a,t,g, or c
  misc_feature (16)..(16): n equals a,t,g, or c
  misc_feature (59)..(59): n equals a,t,g, or c
  misc_feature (76)..(76): n equals a,t,g, or c
  misc_feature (116)..(116): n equals a,t,g, or c
  misc_feature (137)..(137): n equals a,t,g, or c
  misc_feature (149)..(150): n equals a,t,g, or c
  misc_feature (170)..(170): n equals a,t,g, or c
  misc_feature (175)..(175): n equals a,t,g, or c
  misc_feature (177)..(177): n equals a,t,g, or c
  misc_feature (184)..(184): n equals a,t,g, or c
  misc_feature (187)..(187): n equals a,t,g, or c
  misc_feature (191)..(191): n equals a,t,g, or c
  misc_feature (195)..(195): n equals a,t,g, or c
  misc_feature (202)..(202): n equals a,t,g, or c
  misc_feature (224)..(224): n equals a,t,g, or c
  misc_feature (235)..(235): n equals a,t,g, or c
  misc_feature (242)..(242): n equals a,t,g, or c
  misc_feature (247)..(247): n equals a,t,g, or c
  misc_feature (250)..(250): n equals a,t,g, or c
  misc_feature (254)..(254): n equals a,t,g, or c
  misc_feature (272)..(272): n equals a,t,g, or c
  misc_feature (274)..(274): n equals a,t,g, or c
  misc_feature (317)..(317): n equals a,t,g, or c
  misc_feature (321)..(322): n equals a,t,g, or c
  misc_feature (333)..(333): n equals a,t,g, or c
  misc_feature (357)..(357): n equals a,t,g, or c
  misc_feature (369)..(369): n equals a,t,g, or c
  misc_feature (372)..(372): n equals a,t,g, or c
  misc_feature (389)..(389): n equals a,t,g, or c
  misc_feature (397)..(397): n equals a,t,g, or c
  misc_feature (413)..(413): n equals a,t,g, or c
  misc_feature (420)..(420): n equals a,t,g, or c
  misc_feature (425)..(425): n equals a,t,g, or c
  misc_feature (427)..(427): n equals a,t,g, or c
  misc_feature (431)..(431): n equals a,t,g, or c
  misc_feature (486)..(486): n equals a,t,g, or c
  misc_feature (496)..(497): n equals a,t,g, or c
  misc_feature (502)..(502): n equals a,t,g, or c
  misc_feature (504)..(504): n equals a,t,g, or c
agtnttaccttcgccnttcgaaagccccggccctaaaaggaataaaagctggagctccnccgcggtggcggtcgcnctagaactattggatcccccgggctgcatgaattcggcangagctgcttcctctcctggantccagagtcccnntgctccgtcgggatattcantaaancnctgggantcnggcngtanggacgcngcgcgccctcccccgacggtanggaaatccgtngtggtcngcggnggnatcncaggcgtcacttgtgcgnancagtcggctactctctttccatcggaagatattctcttggtcncggnntctccggttantaatgaattccaaatttcgagcanatttctatattnttngaacaattcgatgtttnaataacantcaagttccatgtttnagaatangcctncncccncatggaaggttctagaaacctggcgttaacgctacctgaaaaaaattttaaaaanacttgcgttnnttacnanaaaaatgggcatccacaccttttttttaaaaactct

SEQ ID NO: 2975 - DNA, 293 bp, Homo sapiens
  misc_feature (5)..(5): n equals a,t,g, or c
  misc_feature (67)..(67): n equals a,t,g, or c
  misc_feature (235)..(235): n equals a,t,g, or c
  misc_feature (247)..(247): n equals a,t,g, or c
  misc_feature (256)..(257): n equals a,t,g, or c
  misc_feature (265)..(265): n equals a,t,g, or c
gcggnacgagctttcttacagctggctactgaagttttgggatactagaaatatcacttttatccanagacttactgaggcttgtactactcttcaagctttgtggtttagactttgagtcatgaatttcacccttctctgaatgtcttttaaagtttatgccattctttgaatatggttcttggactcctacattactgctgccaaccccacccagaaattttcttatttgccnagtatttttttnggtcttttnnaattcaanggtcatcattctccataattttggctat

SEQ ID NO: 2976 - DNA, 61 bp, Homo sapiens
  misc_feature (31)..(31): n equals a,t,g, or c
  misc_feature (38)..(39): n equals a,t,g, or c
  misc_feature (46)..(46): n equals a,t,g, or c
  misc_feature (48)..(48): n equals a,t,g, or c
gtcgagtttttttttttttttttaaaaaatngtttaannaaaatcncncccaacactttca

SEQ ID NO: 2977 - DNA, 187 bp, Homo sapiens
  misc_feature (11)..(11): n equals a,t,g, or c
  misc_feature (33)..(33): n equals a,t,g, or c
  misc_feature (35)..(35): n equals a,t,g, or c
  misc_feature (46)..(46): n equals a,t,g, or c
  misc_feature (58)..(58): n equals a,t,g, or c
  misc_feature (122)..(122): n equals a,t,g, or c
  misc_feature (153)..(153): n equals a,t,g, or c
  misc_feature (174)..(174): n equals a,t,g, or c
  misc_feature (177)..(177): n equals a,t,g, or c
  misc_feature (185)..(185): n equals a,t,g, or c
atgattttcangctcgaattccccttcgaaatncngcctcactaangggaaaaaagcnggagctccaccgcggtggaggccgctctacaactagtggatcccccgggctgcaggaattcggnacgagtggcaacctggtgatggcagtggtantggaacatcctgcctttgcanccntccctccntc

SEQ ID NO: 2978 - DNA, 432 bp, Homo sapiens
  misc_feature (276)..(276): n equals a,t,g, or c
  misc_feature (364)..(364): n equals a,t,g, or c
  misc_feature (395)..(395): n equals a,t,g, or c
  misc_feature (399)..(399): n equals a,t,g, or c
  misc_feature (411)..(411): n equals a,t,g, or c
  misc_feature (424)..(424): n equals a,t,g, or c
gcccaaacccactccaccttactaccagacaaccttagccaaaccatttacccaaataaagtataggcgatagaaattgaaacctggcgcaatagatatagtaccgcaagggaaagatgaaaaattataaccaagcataatatagcaaggactaacccctataccttctgcataatgaattaactagaaataactttgcaaggagagccaaagctaagacccccgaaaccagacgagctaccttagaacagcttaaagagcacacccgtctatgtngcaaaatagtggggaagatttataggttgaagcgacaaacctaccgagcctggtgatactggttgtccaagatagaatctttagttcnacttttaaattttgcccccagaaaccctctnaatnccccttgttaantttaacttgtttngtcccaaa

SEQ ID NO: 2979 - DNA, 211 bp, Homo sapiens
  misc_feature (11)..(11): n equals a,t,g, or c
  misc_feature (54)..(54): n equals a,t,g, or c
  misc_feature (82)..(82): n equals a,t,g, or c
  misc_feature (96)..(96): n equals a,t,g, or c
  misc_feature (111)..(111): n equals a,t,g, or c
  misc_feature (126)..(126): n equals a,t,g, or c
  misc_feature (164)..(164): n equals a,t,g, or c
  misc_feature (179)..(180): n equals a,t,g, or c
  misc_feature (210)..(210): n equals a,t,g, or c
aatacaatgtnatttaaaaaagtatgcgtcataaaaacctttaattctataggnttatatctgattcaatgatatttagtanagtaattgtcaganagatgtgtaatgtantaattgagactgaantttataagggccaagtcacatgtcaatgtgacatgtanagacatatttatttnnaaacttggatgtttctaaatttgtattacna

SEQ ID NO: 2980 - DNA, 96 bp, Homo sapiens
  misc_feature (17)..(17): n equals a,t,g, or c
  misc_feature (19)..(19): n equals a,t,g, or c
  misc_feature (21)..(21): n equals a,t,g, or c
  misc_feature (56)..(56): n equals a,t,g, or c
  misc_feature (65)..(65): n equals a,t,g, or c
tttttttttttttttangnanttttccccttaaaaaattttttccatttccccccnttcccccgnggtttccttttttaaacatttccaagccctt

SEQ ID NO: 2981 - DNA, 157 bp, Homo sapiens
  misc_feature (105)..(105): n equals a,t,g, or c
  misc_feature (109)..(109): n equals a,t,g, or c
  misc_feature (124)..(124): n equals a,t,g, or c
  misc_feature (131)..(131): n equals a,t,g, or c
  misc_feature (143)..(143): n equals a,t,g, or c
ggtgaaatggaagaatttaggataagtttctgaaagactcataaacagtgattcttaaaaaaatgagcattgggatttatttcagggaaaacataagtattgtantcanattaccacctccctncgggaangaaggccacatnttgtgggttttggt

SEQ ID NO: 2982 - DNA, 319 bp, Homo sapiens
  misc_feature (24)..(24): n equals a,t,g, or c
  misc_feature (30)..(30): n equals a,t,g, or c
  misc_feature (37)..(37): n equals a,t,g, or c
  misc_feature (43)..(43): n equals a,t,g, or c
  misc_feature (50)..(50): n equals a,t,g, or c
  misc_feature (57)..(57): n equals a,t,g, or c
  misc_feature (61)..(61): n equals a,t,g, or c
  misc_feature (67)..(67): n equals a,t,g, or c
  misc_feature (69)..(69): n equals a,t,g, or c
  misc_feature (128)..(128): n equals a,t,g, or c
  misc_feature (134)..(134): n equals a,t,g, or c
  misc_feature (137)..(137): n equals a,t,g, or c
  misc_feature (143)..(143): n equals a,t,g, or c
  misc_feature (157)..(157): n equals a,t,g, or c
  misc_feature (161)..(161): n equals a,t,g, or c
  misc_feature (164)..(164): n equals a,t,g, or c
  misc_feature (168)..(168): n equals a,t,g, or c
  misc_feature (170)..(170): n equals a,t,g, or c
  misc_feature (195)..(195): n equals a,t,g, or c
  misc_feature (200)..(200): n equals a,t,g, or c
  misc_feature (203)..(203): n equals a,t,g, or c
  misc_feature (263)..(263): n equals a,t,g, or c
  misc_feature (278)..(278): n equals a,t,g, or c
  misc_feature (297)..(297): n equals a,t,g, or c
  misc_feature (307)..(307): n equals a,t,g, or c
  misc_feature (319)..(319): n equals a,t,g, or c
gaaaaaaaaaaaaaatttgttgcncttgancaacttnatgctntaaaatncaaaatntctncaattntntggtccaaaaatatattctggatttggtaattggcaaaccctttgataaacatggccantgaccnctnaatacnccccaaagccagcntttnctncttntncagtgcataaaatttatttattttnaaaanccncatactattttgggaccattaaaacctatggttaaactggctgcattggaattaactttngaccaaatcctaacnctgctactttctaacattntgaattgggnaatttcctttcn

SEQ ID NO: 2983 - DNA, 709 bp, Homo sapiens
  misc_feature (373)..(373): n equals a,t,g, or c
  misc_feature (434)..(434): n equals a,t,g, or c
  misc_feature (459)..(459): n equals a,t,g, or c
  misc_feature (511)..(511): n equals a,t,g, or c
  misc_feature (514)..(514): n equals a,t,g, or c
  misc_feature (539)..(540): n equals a,t,g, or c
  misc_feature (548)..(548): n equals a,t,g, or c
  misc_feature (555)..(555): n equals a,t,g, or c
  misc_feature (581)..(581): n equals a,t,g, or c
  misc_feature (590)..(590): n equals a,t,g, or c
  misc_feature (606)..(606): n equals a,t,g, or c
  misc_feature (627)..(627): n equals a,t,g, or c
  misc_feature (642)..(642): n equals a,t,g, or c
  misc_feature (645)..(645): n equals a,t,g, or c
  misc_feature (656)..(656): n equals a,t,g, or c
  misc_feature (669)..(669): n equals a,t,g, or c
gacagcatgcatataaaattccaatctgacaggtcataaatatacatttggatatgtgtatctattacttacaaaagtaaaaagaaatgttctaatgcacagtttgaacctaaaatatacatacataaagttcttgaaagatgccaacttgaatccaattttaaatgaaaaagtttaaaattcgtaagatgagatgagttgatatgtaaatatgtcaatcaaattgattgttggcagagtgaaaccagttttaactaagataaccatgaatacgtttgttcatgaagcctaaatacagtgacattagaaatgttagtggataaaagctgcgtactttaatttcagtttgaacagatgttttatgttatatctntattgagatgaagtagatcactccaattttaagttgaacaacatggattaactttttaganaagcagtctaattaggctgactttngaatttcctatttttaagttacagttccagaacctgaaaggtttcatccttngtntccatgaaaacaggtggtttttccnntaaaatantaaaacngggtcctaatgtcatattttaaaatnattgtttanaattaaaattggtccnccaataattttttccaatatntcccattcaggttcntcnatttccccatnttccctttgaccntgaatcttacccatgagcaaacttggaaatttgaatgaat

SEQ ID NO: 2984 - DNA, 543 bp, Homo sapiens
  misc_feature (116)..(116): n equals a,t,g, or c
  misc_feature (172)..(172): n equals a,t,g, or c
  misc_feature (232)..(232): n equals a,t,g, or c
  misc_feature (239)..(239): n equals a,t,g, or c
  misc_feature (277)..(277): n equals a,t,g, or c
  misc_feature (294)..(294): n equals a,t,g, or c
  misc_feature (297)..(297): n equals a,t,g, or c
  misc_feature (311)..(311): n equals a,t,g, or c
  misc_feature (332)..(332): n equals a,t,g, or c
  misc_feature (337)..(337): n equals a,t,g, or c
  misc_feature (344)..(344): n equals a,t,g, or c
  misc_feature (384)..(384): n equals a,t,g, or c
  misc_feature (410)..(410): n equals a,t,g, or c
  misc_feature (422)..(422): n equals a,t,g, or c
  misc_feature (481)..(481): n equals a,t,g, or c
  misc_feature (493)..(493): n equals a,t,g, or c
  misc_feature (499)..(499): n equals a,t,g, or c
  misc_feature (502)..(502): n equals a,t,g, or c
  misc_feature (532)..(532): n equals a,t,g, or c
gttcagctgtagttcttatgcaagttcctgactgcgaagtcaatgttaaaggtaaggtttttttccctatgtagtctcatcttaagttgcaaatgtagattttaattaagcagtantaatgtgacttttttgcctaatcttgcagtagattctaccgtataacacattgganatggtaatcgttcagttcatataaacataaaacagcatttgttaatatgtctgttaacangtagttnataatttaatgtttgcttttactggggcttgttttgantcccatttttatttgantcnctaacaaccatctnttaattacaatttaactttcnaaganctgcgtnatttgttttttgttaatgaaatgctattaacagcattatnaaagttttctcttttaatcttgaaangaaaaaaatccntctcttaaaaagcctcccccaaaaaaaaagaaaaactgttccttaagtcccctactgtnccaaaaatttcncggttnatntttccacctttgtcccccaaatttttcccnatttttggttt

SEQ ID NO: 2985 - DNA, 621 bp, Homo sapiens
  misc_feature (278)..(278): n equals a,t,g, or c
  misc_feature (283)..(284): n equals a,t,g, or c
  misc_feature (288)..(288): n equals a,t,g, or c
  misc_feature (299)..(299): n equals a,t,g, or c
  misc_feature (301)..(301): n equals a,t,g, or c
  misc_feature (304)..(304): n equals a,t,g, or c
  misc_feature (307)..(307): n equals a,t,g, or c
  misc_feature (311)..(311): n equals a,t,g, or c
  misc_feature (316)..(316): n equals a,t,g, or c
  misc_feature (318)..(318): n equals a,t,g, or c
  misc_feature (322)..(323): n equals a,t,g, or c
  misc_feature (325)..(325): n equals a,t,g, or c
  misc_feature (331)..(331): n equals a,t,g, or c
  misc_feature (333)..(333): n equals a,t,g, or c
  misc_feature (343)..(344): n equals a,t,g, or c
  misc_feature (350)..(350): n equals a,t,g, or c
  misc_feature (353)..(353): n equals a,t,g, or c
  misc_feature (368)..(368): n equals a,t,g, or c
  misc_feature (370)..(370): n equals a,t,g, or c
  misc_feature (375)..(375): n equals a,t,g, or c
  misc_feature (384)..(384): n equals a,t,g, or c
  misc_feature (397)..(397): n equals a,t,g, or c
  misc_feature (405)..(405): n equals a,t,g, or c
  misc_feature (409)..(409): n equals a,t,g, or c
  misc_feature (420)..(420): n equals a,t,g, or c
  misc_feature (440)..(440): n equals a,t,g, or c
  misc_feature (443)..(443): n equals a,t,g, or c
  misc_feature (451)..(452): n equals a,t,g, or c
  misc_feature (458)..(458): n equals a,t,g, or c
  misc_feature (463)..(463): n equals a,t,g, or c
  misc_feature (468)..(468): n equals a,t,g, or c
  misc_feature (472)..(472): n equals a,t,g, or c
  misc_feature (480)..(480): n equals a,t,g, or c
  misc_feature (496)..(496): n equals a,t,g, or c
  misc_feature (544)..(544): n equals a,t,g, or c
  misc_feature (550)..(550): n equals a,t,g, or c
  misc_feature (572)..(572): n equals a,t,g, or c
  misc_feature (579)..(579): n equals a,t,g, or c
  misc_feature (615)..(615): n equals a,t,g, or c
gttttggtgcaagtgatttatttaataaatgcattttattaaagaagctttaaaaagcagggtgtggagaaaagtttagttacataaatgagtatattctttgtgcaaaaatttgaaatattaccattgaaactcagatttgctgtagtgaccctcaatcccatttttctcgttccctaattaccggctgttttagtttggtttagtctgtccttccagactgttctgcgtgtctttctatgtatcaaaaatattgccttttttttttttaatttaangtttnnaatnccttttatatncncancantttnttaancnccanncncttaanangtccaatgannaaaccnccncattgtactgaactntnccccntgggaaccnccattattatttncagggttnttcntttttaccaantgaatttacaaattaattcnctnggtttaannccgttnccaancccantttnaattaaanaaaaaaaaaaatcctntcttttggaaacctaagcctggggataaattttaaaatcctttaaggntttaanccccttaaaaaagggttgtttnacccccntttcccaaattaaaaattaaaggttcctcctaaaancccctt

SEQ ID NO: 2986 - DNA, 489 bp, Homo sapiens
  misc_feature (13)..(13): n equals a,t,g, or c
  misc_feature (17)..(17): n equals a,t,g, or c
  misc_feature (24)..(24): n equals a,t,g, or c
  misc_feature (97)..(97): n equals a,t,g, or c
  misc_feature (109)..(109): n equals a,t,g, or c
  misc_feature (113)..(113): n equals a,t,g, or c
  misc_feature (127)..(127): n equals a,t,g, or c
  misc_feature (137)..(138): n equals a,t,g, or c
  misc_feature (163)..(164): n equals a,t,g, or c
  misc_feature (179)..(179): n equals a,t,g, or c
  misc_feature (184)..(184): n equals a,t,g, or c
  misc_feature (186)..(186): n equals a,t,g, or c
  misc_feature (198)..(198): n equals a,t,g, or c
  misc_feature (232)..(232): n equals a,t,g, or c
  misc_feature (246)..(246): n equals a,t,g, or c
  misc_feature (276)..(276): n equals a,t,g, or c
  misc_feature (322)..(322): n equals a,t,g, or c
  misc_feature (332)..(332): n equals a,t,g, or c
  misc_feature (346)..(346): n equals a,t,g, or c
  misc_feature (350)..(350): n equals a,t,g, or c
  misc_feature (368)..(368): n equals a,t,g, or c
  misc_feature (382)..(382): n equals a,t,g, or c
  misc_feature (411)..(411): n equals a,t,g, or c
  misc_feature (413)..(413): n equals a,t,g, or c
  misc_feature (459)..(459): n equals a,t,g, or c
  misc_feature (486)..(486): n equals a,t,g, or c
  misc_feature (488)..(488): n equals a,t,g, or c
gacccactccacntgcnaaagctnaaactactctgctttctcacttacctacacttttgacttaccacatacatctctctcttcggatatgagctgnaaactccttatntcancgctctaactctgnagtcctaatnnttctagttggaccaaaaaaaatccnnattgtttgatctaangagangnaatttaccaatnctgtatacgcatgtgtgtgtgtcgcttaaacganctgtccggttatanaaaatcctgatcgtcataaatcatgtctanacatcatgtaatgaattgcacgatttaatattgtccctattagcantcactacaanctatttctcaaatntacntatttctccgtaaacaancattcagtactccntcggatctctaaaaatcctctatgatctntncacatcactgataaagaccaattcgtatatacatgactgtccttancacatattcactatcagtagaaaagcnanc

SEQ ID NO: 2987 - DNA, 515 bp, Homo sapiens
  misc_feature (81)..(81): n equals a,t,g, or c
  misc_feature (182)..(182): n equals a,t,g, or c
  misc_feature (248)..(248): n equals a,t,g, or c
  misc_feature (267)..(267): n equals a,t,g, or c
  misc_feature (316)..(316): n equals a,t,g, or c
  misc_feature (320)..(320): n equals a,t,g, or c
  misc_feature (326)..(326): n equals a,t,g, or c
  misc_feature (338)..(338): n equals a,t,g, or c
  misc_feature (356)..(356): n equals a,t,g, or c
  misc_feature (412)..(412): n equals a,t,g, or c
  misc_feature (443)..(443): n equals a,t,g, or c
  misc_feature (451)..(451): n equals a,t,g, or c
  misc_feature (463)..(463): n equals a,t,g, or c
  misc_feature (468)..(468): n equals a,t,g, or c
  misc_feature (506)..(506): n equals a,t,g, or c
gcttatggcaaatttaaaagtttacaaataggttctctcattgaaaaaaagcattgtagtaaagtttaaagtggagctcanacaaatcatgacttattaagagactacaggaagccattcagcatttaataataactgtttacaacatgaggcaaagctaataatgttatggttttattaanagatctgtcatctctgtttttcttaaactggtttaacagtccagaactttgttatgttgtttccanctgaaagaatttattatanggcttggttaatttatcctaaattttcctttttaagaaccccatgaacnggancccccnaagaaactgaanaataactccttttttttnaaaaagggtgaatcctggcttgttgcccaaaattattttaaaaattccgccccttnagggaaaactttgctttggtatttttccttnaaaacaanttaccaccaccngcttncttggttttcccaattccactcccagggtgaaccttanccttcctgc

SEQ ID NO: 2988 - DNA, 568 bp, Homo sapiens
  misc_feature (8)..(8): n equals a,t,g, or c
  misc_feature (21)..(21): n equals a,t,g, or c
  misc_feature (86)..(86): n equals a,t,g, or c
  misc_feature (203)..(203): n equals a,t,g, or c
  misc_feature (252)..(252): n equals a,t,g, or c
  misc_feature (331)..(331): n equals a,t,g, or c
  misc_feature (377)..(379): n equals a,t,g, or c
  misc_feature (391)..(391): n equals a,t,g, or c
  misc_feature (408)..(408): n equals a,t,g, or c
  misc_feature (422)..(422): n equals a,t,g, or c
  misc_feature (465)..(465): n equals a,t,g, or c
  misc_feature (489)..(489): n equals a,t,g, or c
  misc_feature (505)..(505): n equals a,t,g, or c
  misc_feature (507)..(507): n equals a,t,g, or c
  misc_feature (534)..(534): n equals a,t,g, or c
  misc_feature (539)..(539): n equals a,t,g, or c
gctgcatnacaaaagtggttngctctatcttcttttctttccctggtggtgttgtcataacagtgtcttttagcaggattaaccantaactaacttatttgctttggtttccaataaataactgcagcctgttaataattgtgcatgtgttttatgtggcctcaaataaactgagacaatcttacacatctgcattccagatngggtcactattccttcatacttaatctcctattatgtaactgtccattnacaaaaaatacatcacataagggaaaaaacttaaatacttaatttgctagtgcattaataagtgatactaatacacatnactttttattgttaccttaaatatatgtgtttgctcagaaatatannnaataaaacctantgttatgttttctcgcnttaaaatgtaccanatcttgtccaaatgcttcgaactgtaatgtgtttactccttcncgtgaactgtgtctaaacatttantaatgtttttaaattntnaactccatgaagggtaaggtgtgtccnaattnaactgtttcaacttgcaatgccaaacaca

SEQ ID NO: 2989 - DNA, 665 bp, Homo sapiens
  misc_feature (205)..(205): n equals a,t,g, or c
  misc_feature (257)..(257): n equals a,t,g, or c
  misc_feature (281)..(281): n equals a,t,g, or c
  misc_feature (289)..(289): n equals a,t,g, or c
  misc_feature (292)..(292): n equals a,t,g, or c
  misc_feature (301)..(301): n equals a,t,g, or c
  misc_feature (316)..(316): n equals a,t,g, or c
  misc_feature (318)..(318): n equals a,t,g, or c
  misc_feature (325)..(325): n equals a,t,g, or c
  misc_feature (340)..(340): n equals a,t,g, or c
  misc_feature (356)..(356): n equals a,t,g, or c
  misc_feature (374)..(375): n equals a,t,g, or c
  misc_feature (397)..(398): n equals a,t,g, or c
  misc_feature (413)..(413): n equals a,t,g, or c
  misc_feature (416)..(416): n equals a,t,g, or c
  misc_feature (429)..(429): n equals a,t,g, or c
  misc_feature (436)..(436): n equals a,t,g, or c
  misc_feature (455)..(455): n equals a,t,g, or c
  misc_feature (457)..(457): n equals a,t,g, or c
  misc_feature (487)..(487): n equals a,t,g, or c
  misc_feature (490)..(490): n equals a,t,g, or c
  misc_feature (526)..(526): n equals a,t,g, or c
  misc_feature (538)..(538): n equals a,t,g, or c
  misc_feature (550)..(550): n equals a,t,g, or c
  misc_feature (572)..(573): n equals a,t,g, or c
  misc_feature (588)..(588): n equals a,t,g, or c
  misc_feature (601)..(601): n equals a,t,g, or c
  misc_feature (632)..(632): n equals a,t,g, or c
ggacaattccattcaatctttggaggcttttaaacattttgacacaaaattcttatggtatgtaaccagctgtgcactttcttctctttcccaaccccaggaaaggttttccttattttgtgtgctttcccagtcccattcctcagcttcttcacaggcactcctggagatatgaaagattactctccatatcccttcctctcangctcttgactacttggaactaagctcttatgtttgcctttgtttcccatcanaatgtccactaaaaagaaaaggangaaactancanaagaaaatnttattttggtttatnantcttaancccctccaaagacanaactttaaatcttttnaaaaaaaagtttggaatnnatttgattactatcattattcnncactttacttttaanccnggctccctacttnacttccncctacattatctccctttntncctttatcatcccttaaaaaaattcctttnaanatacatttttatcctccctttttacaccaaaagggnaaattccgggcntttggttgggtncaatcccctttttattcccccnncacctttttgggaangctttaagggccnaaaaggatttttcctttaagggccaaggganttttttaaaaaaccaacttttttccccccccat

SEQ ID NO: 2990 - DNA, 502 bp, Homo sapiens
  misc_feature (185)..(185): n equals a,t,g, or c
  misc_feature (214)..(214): n equals a,t,g, or c
  misc_feature (303)..(303): n equals a,t,g, or c
  misc_feature (364)..(364): n equals a,t,g, or c
  misc_feature (414)..(414): n equals a,t,g, or c
  misc_feature (452)..(452): n equals a,t,g, or c
  misc_feature (456)..(456): n equals a,t,g, or c
  misc_feature (492)..(492): n equals a,t,g, or c
  misc_feature (500)..(500): n equals a,t,g, or c
gtatttcctcttcactttactgatgctcctcttgctcaactggaggatgtctgccaagaggcatgagtctgcctgtgcaggtgtctcctaatcctgatttttgcttgtatttgtgaacatgtggcaagcctcttctgctgaaccaagtaagggttgtggagagagaacagaggcaccagacatanactaaggtgtaaggagcaagatgtaatantttaactcaattggattttttaattgggtggaataattcagggttgccacacaatattatcacctaaaaagatgtgacttactgtgaangatcaatactaaataatggggctctctctgccatatatattcttgcttaaaagtatcttantacagtgcagacttattatatacaatttaatttacatgaattcactattncatccatcctttatattaactataattgtttatatgtnacanattcccaattaaagaattacacaatattccataatntttatttntc

SEQ ID NO: 2991 - DNA, 99 bp, Homo sapiens
  misc_feature (14)..(14): n equals a,t,g, or c
  misc_feature (17)..(17): n equals a,t,g, or c
  misc_feature (46)..(47): n equals a,t,g, or c
  misc_feature (54)..(54): n equals a,t,g, or c
  misc_feature (62)..(62): n equals a,t,g, or c
  misc_feature (92)..(92): n equals a,t,g, or c
ttttctagatcgcnccntcttaaggaaaaaaagaggtggcccccgnnagtgaangattttcnataactggagccatccggggggctggcaanacttccg

SEQ ID NO: 2992 - DNA, 397 bp, Homo sapiens
  misc_feature (1)..(1): n equals a,t,g, or c
  misc_feature (122)..(122): n equals a,t,g, or c
  misc_feature (140)..(140): n equals a,t,g, or c
  misc_feature (172)..(172): n equals a,t,g, or c
  misc_feature (248)..(248): n equals a,t,g, or c
  misc_feature (267)..(267): n equals a,t,g, or c
  misc_feature (273)..(273): n equals a,t,g, or c
  misc_feature (277)..(277): n equals a,t,g, or c
  misc_feature (286)..(286): n equals a,t,g, or c
  misc_feature (306)..(306): n equals a,t,g, or c
  misc_feature (334)..(334): n equals a,t,g, or c
  misc_feature (345)..(345): n equals a,t,g, or c
  misc_feature (349)..(349): n equals a,t,g, or c
  misc_feature (397)..(397): n equals a,t,g, or c
natttttaacaagtttaattacagtattttttcaatgggaaaaactttgctattttagtaagtacttgtctcagcgcttgactttggttaaatgttaaatattttttaatatacatacccanggggcagaaaacatttgncaattcatttttattagcttgatggagcatgnattatttgcaatggaatattggacttggtatttttcctgagcattatcaggtttctggctggtgggaggggtgggnaaaaccaattcctctttanctgaanaagntattggtgngggcagggctttggctttgnctggaaagcggcttaaatccaccttatnttgggggcttntggntggggaaaaaccaggaaaactttgtccccttccccccatggggttccn

SEQ ID NO: 2993 - DNA, 101 bp, Homo sapiens
  misc_feature (17)..(17): n equals a,t,g, or c
  misc_feature (22)..(22): n equals a,t,g, or c
  misc_feature (35)..(35): n equals a,t,g, or c
  misc_feature (58)..(58): n equals a,t,g, or c
  misc_feature (77)..(77): n equals a,t,g, or c
caaaatccttcgtgttnatcangtcacctccttcnacattttgaccacctcgcttctnttgcacgacatacaagatntcgccttcgcctatctcaaaagga

SEQ ID NO: 2994 - DNA, 484 bp, Homo sapiens
  misc_feature (4)..(4): n equals a,t,g, or c
  misc_feature (19)..(19): n equals a,t,g, or c
  misc_feature (28)..(28): n equals a,t,g, or c
  misc_feature (50)..(50): n equals a,t,g, or c
  misc_feature (87)..(87): n equals a,t,g, or c
  misc_feature (137)..(137): n equals a,t,g, or c
  misc_feature (171)..(171): n equals a,t,g, or c
  misc_feature (176)..(176): n equals a,t,g, or c
  misc_feature (251)..(251): n equals a,t,g, or c
  misc_feature (255)..(255): n equals a,t,g, or c
  misc_feature (395)..(395): n equals a,t,g, or c
  misc_feature (433)..(433): n equals a,t,g, or c
  misc_feature (452)..(452): n equals a,t,g, or c
  misc_feature (477)..(477): n equals a,t,g, or c
  misc_feature (483)..(483): n equals a,t,g, or c
aatnaacctcaccctccgntaacaaaanatggagctccaccgccgtggcngacgctctataactaatggatcccccgggctgcaggnaattcggcacgagctctccccttttctctcccgttttccttctcttcaanctatctcgaaagcaaaaatatcagcactactggnaatanaaatccactctctatgtttcaattccatttatcctctggggagcacaaacttgggcaatcaataaaggctttaantganacagacatgctttagtgggtgcaatatgtgacccaaaaaattccacattcacatcagtgtggttaattttaaatcactcatcattatgcacttatattcacacccacacacactcaggactcacacagaaaaaaaaaatnattcagacactccaaaattatccttcctttctttattntttatgcaggtttatgatnaccacttgtaactgtcacaaccctnggggana

SEQ ID NO: 2995 - DNA, 99 bp, Homo sapiens
  misc_feature (3)..(3): n equals a,t,g, or c
  misc_feature (32)..(32): n equals a,t,g, or c
  misc_feature (39)..(39): n equals a,t,g, or c
  misc_feature (42)..(42): n equals a,t,g, or c
  misc_feature (60)..(60): n equals a,t,g, or c
  misc_feature (65)..(65): n equals a,t,g, or c
  misc_feature (77)..(77): n equals a,t,g, or c
  misc_feature (83)..(83): n equals a,t,g, or c
ttntcgaatccaccccctcctttaggaaaaanggctggngcncgccgtgggtggacagancttcnactaactggtgnatcccnggggctggcaagactg

SEQ ID NO: 2996 - DNA, 593 bp, Homo sapiens
  misc_feature (6)..(6): n equals a,t,g, or c
  misc_feature (19)..(19): n equals a,t,g, or c
  misc_feature (31)..(31): n equals a,t,g, or c
  misc_feature (38)..(38): n equals a,t,g, or c
  misc_feature (51)..(51): n equals a,t,g, or c
  misc_feature (91)..(91): n equals a,t,g, or c
  misc_feature (99)..(99): n equals a,t,g, or c
  misc_feature (110)..(110): n equals a,t,g, or c
  misc_feature (133)..(133): n equals a,t,g, or c
  misc_feature (146)..(146): n equals a,t,g, or c
  misc_feature (155)..(155): n equals a,t,g, or c
  misc_feature (162)..(162): n equals a,t,g, or c
  misc_feature (169)..(169): n equals a,t,g, or c
  misc_feature (174)..(174): n equals a,t,g, or c
  misc_feature (185)..(185): n equals a,t,g, or c
  misc_feature (198)..(198): n equals a,t,g, or c
  misc_feature (201)..(201): n equals a,t,g, or c
  misc_feature (213)..(213): n equals a,t,g, or c
  misc_feature (215)..(216): n equals a,t,g, or c
  misc_feature (226)..(226): n equals a,t,g, or c
  misc_feature (229)..(229): n equals a,t,g, or c
  misc_feature (235)..(235): n equals a,t,g, or c
  misc_feature (246)..(246): n equals a,t,g, or c
  misc_feature (250)..(250): n equals a,t,g, or c
  misc_feature (273)..(273): n equals a,t,g, or c
  misc_feature (307)..(307): n equals a,t,g, or c
  misc_feature (311)..(311): n equals a,t,g, or c
  misc_feature (336)..(336): n equals a,t,g, or c
  misc_feature (347)..(348): n equals a,t,g, or c
  misc_feature (357)..(357): n equals a,t,g, or c
  misc_feature (394)..(395): n equals a,t,g, or c
  misc_feature (404)..(404): n equals a,t,g, or c
  misc_feature (422)..(422): n equals a,t,g, or c
  misc_feature (425)..(425): n equals a,t,g, or c
  misc_feature (441)..(441): n equals a,t,g, or c
  misc_feature (445)..(445): n equals a,t,g, or c
  misc_feature (452)..(452): n equals a,t,g, or c
  misc_feature (460)..(460): n equals a,t,g, or c
  misc_feature (463)..(463): n equals a,t,g, or c
  misc_feature (490)..(490): n equals a,t,g, or c
  misc_feature (496)..(496): n equals a,t,g, or c
  misc_feature (501)..(501): n equals a,t,g, or c
  misc_feature (516)..(516): n equals a,t,g, or c
  misc_feature (537)..(537): n equals a,t,g, or c
  misc_feature (545)..(545): n equals a,t,g, or c
  misc_feature (547)..(547): n equals a,t,g, or c
  misc_feature (553)..(553): n equals a,t,g, or c
  misc_feature (556)..(556): n equals a,t,g, or c
  misc_feature (560)..(561): n equals a,t,g, or c
  misc_feature (563)..(563): n equals a,t,g, or c
  misc_feature (579)..(579): n equals a,t,g, or c
  misc_feature (581)..(581): n equals a,t,g, or c
  misc_feature (585)..(585): n equals a,t,g, or c
ttttcnaatcaatgccccnctaggaaaaaantggaggncgccgcggtggangacgttctataactagtggatcccccgggctgcaagactncggcacgnaggatagtatnataatatgggtacaaggactatnggcaagcaaatanaaactgaantgtccangcccaantcccntttcttgtccnaaagtctgattanccnttttatcataancnngattccgtangtnctttcnatgttaattcnattntcttggagcctcactcctcctcntataaaatcatttggtattatttataatcttctnccancattctactcttagaagctgaatcnacaaggacagnntaacctcantcttggacctctcaggctaaacaggctacattaacannatctacaanatgatggatgggttgtcnaangtgaatattctcacgntaancatgggnataccccnatngtctgttatactctgttatcgtcatcnctgaantacantgtcttgaaattaanaattctccaattactttacanaggtatcncngtactnatntttnntntcttcactgtattatnanagcnggtctcag

SEQ ID NO: 2997 - DNA, 340 bp, Homo sapiens
  misc_feature (42)..(42): n equals a,t,g, or c
  misc_feature (82)..(82): n equals a,t,g, or c
  misc_feature (107)..(107): n equals a,t,g, or c
  misc_feature (128)..(128): n equals a,t,g, or c
  misc_feature (135)..(135): n equals a,t,g, or c
  misc_feature (161)..(161): n equals a,t,g, or c
  misc_feature (207)..(207): n equals a,t,g, or c
  misc_feature (237)..(237): n equals a,t,g, or c
  misc_feature (252)..(252): n equals a,t,g, or c
  misc_feature (263)..(263): n equals a,t,g, or c
  misc_feature (269)..(269): n equals a,t,g, or c
  misc_feature (276)..(276): n equals a,t,g, or c
  misc_feature (287)..(287): n equals a,t,g, or c
gcttgatttgcctgtgagaaagatcactctgctacccagatnaaaagggccacagaaaaagcaggagattggggcttaagtnaggtgctaacaccaccgtagtgganaagggagagaaagcttggganatagatngatggggaggtagcaggacttggtgnattcactgagcctggggggatgacttgaagctgatggtgcagtggntaacagttgcagggctctgaaaggggaagnagctgatttgcaggnagagggaaaanacttantcctgtngggtccctgtnggtttttacccccgtttccccagccctattcttgccctcctttaaagtttcac

SEQ ID NO: 2998 - DNA, 285 bp, Homo sapiens
  misc_feature (26)..(26): n equals a,t,g, or c
  misc_feature (33)..(33): n equals a,t,g, or c
  misc_feature (52)..(52): n equals a,t,g, or c
  misc_feature (60)..(60): n equals a,t,g, or c
  misc_feature (76)..(76): n equals a,t,g, or c
  misc_feature (103)..(103): n equals a,t,g, or c
  misc_feature (110)..(110): n equals a,t,g, or c
  misc_feature (129)..(129): n equals a,t,g, or c
  misc_feature (140)..(140): n equals a,t,g, or c
  misc_feature (143)..(143): n equals a,t,g, or c
  misc_feature (146)..(146): n equals a,t,g, or c
  misc_feature (168)..(168): n equals a,t,g, or c
  misc_feature (172)..(173): n equals a,t,g, or c
  misc_feature (190)..(190): n equals a,t,g, or c
  misc_feature (215)..(215): n equals a,t,g, or c
  misc_feature (221)..(221): n equals a,t,g, or c
  misc_feature (227)..(227): n equals a,t,g, or c
  misc_feature (231)..(231): n equals a,t,g, or c
agcatacccctgttcttttgtccacngatgganacattggtacaggccatancactttgngcgtcttctctagccnggcttaaaaattacaatcaacaaattnacagctnagaaattaaggctgtgtcncattacttcanganaanccttacccttggatcatacttngganncctggattgctaaagangattgtcctttatataatggtgganatatcntcttgnaatntcttaatgatcaagaacaattctgtcaaaatgtttaatcttacttggaatagtc

SEQ ID NO: 2999 - DNA, 115 bp, Homo sapiens
  misc_feature (104)..(105): n equals a,t,g, or c
  misc_feature (108)..(108): n equals a,t,g, or c
  misc_feature (110)..(110): n equals a,t,g, or c
  misc_feature (113)..(113): n equals a,t,g, or c
gcggcacgagggggggcccggtacccaattcgccctatagtgagtcgtattacaattcactggccgtcgttttacaacgtcgctgtactggggaaaacccaaannccntnctntt

SEQ ID NO: 3000 - DNA, 251 bp, Homo sapiens
  misc_feature (60)..(60): n equals a,t,g, or c
  misc_feature (211)..(211): n equals a,t,g, or c
  misc_feature (222)..(222): n equals a,t,g, or c
  misc_feature (230)..(230): n equals a,t,g, or c
  misc_feature (240)..(240): n equals a,t,g, or c
  misc_feature (242)..(242): n equals a,t,g, or c
gccaccaccaagatgaccaagcaccaagccttcctgttttggtgcaaactggcatttggnaccttttgggggatccgacaagcaaataaagcttcagctcgcagtacaggactctgccagatgtcttcacctcctcctggtggaatctaagccttgtgcacctttccaatccaaaatcaagggtacaggaatcttcctggaaaaaaagtanatttgattcanctggcaanaattctgttnancttaatagg

SEQ ID NO: 3001 - DNA, 289 bp, Homo sapiens
  misc_feature (23)..(23): n equals a,t,g, or c
  misc_feature (37)..(37): n equals a,t,g, or c
  misc_feature (47)..(47): n equals a,t,g, or c
  misc_feature (85)..(85): n equals a,t,g, or c
  misc_feature (89)..(89): n equals a,t,g, or c
  misc_feature (129)..(129): n equals a,t,g, or c
  misc_feature (166)..(166): n equals a,t,g, or c
  misc_feature (185)..(185): n equals a,t,g, or c
  misc_feature (217)..(217): n equals a,t,g, or c
  misc_feature (222)..(222): n equals a,t,g, or c
  misc_feature (230)..(230): n equals a,t,g, or c
  misc_feature (247)..(247): n equals a,t,g, or c
  misc_feature (279)..(279): n equals a,t,g, or c
tttctaaacctcaccctccgtanaaaaatggagctcnccgccgtggnggacgctctacaactagtggatcccccgggctgcaggnaatncggcacgaggttgttctgtgctcctgtcctgcaccataanagcatgtcccaggtcatcatgttcttttgcaccaggntcctgggaatgcagagacncttggagctgacctgaactggacctctataancaganatgctgancaacatctgcagatacntgtatggtattgtagcagtccctgaaatcatntactctacca

SEQ ID NO: 3002 - DNA, 146 bp, Homo sapiens
  misc_feature (106)..(106): n equals a,t,g, or c
  misc_feature (115)..(115): n equals a,t,g, or c
  misc_feature (130)..(130): n equals a,t,g, or c
  misc_feature (142)..(142): n equals a,t,g, or c
  misc_feature (146)..(146): n equals a,t,g, or c
gcggcacgagggggggcccggtacccaattcgccctatagtgagtcgtattacaattcactggccgtcgttttacaacgtcttgactgggaaaactcatgcctgcntgatcctcnaaatcaccacatgantattcctatccntacn

SEQ ID NO: 3003 - DNA, 63 bp, Homo sapiens
  misc_feature (5)..(5): n equals a,t,g, or c
  misc_feature (8)..(8): n equals a,t,g, or c
  misc_feature (12)..(12): n equals a,t,g, or c
  misc_feature (52)..(52): n equals a,t,g, or c
  misc_feature (62)..(62): n equals a,t,g, or c
gtatnaanaatncaccttatgtggtttatgccttcaatcatctcgtaaatanaaagtacggnc

SEQ ID NO: 3004 - DNA, 437 bp, Homo sapiens
  misc_feature (22)..(22): n equals a,t,g, or c
  misc_feature (233)..(233): n equals a,t,g, or c
  misc_feature (241)..(241): n equals a,t,g, or c
  misc_feature (301)..(301): n equals a,t,g, or c
  misc_feature (332)..(332): n equals a,t,g, or c
  misc_feature (334)..(334): n equals a,t,g, or c
  misc_feature (363)..(363): n equals a,t,g, or c
  misc_feature (368)..(368): n equals a,t,g, or c
  misc_feature (375)..(375): n equals a,t,g, or c
  misc_feature (397)..(397): n equals a,t,g, or c
  misc_feature (420)..(420): n equals a,t,g, or c
gccacccagattgtcccctggnaaacacctgggtctctcggtttccacagtctggggttaattcctggcactgtgggatgatttcgagatgctgctctgctcttttggtcaacatctgctctgactggttgtcaaatattctgacattagacacagccccaggcacgtcctgcacacatgcactcacacaatgtcccacaggggacacacagtgttcagaattgtcaccatanacagaaantccctcctgtggtatatgttgaaatacctcctcttttgggccaaagcccctaggcagaanctcttgataatggtggcaggaaaaaggggtntngaaaaaaggcctgggcaggttaaaaccantttcncacaaantctgaattcctgcttgcaaaantgggccgaaaagggcaggaaatnctctttttaaaaaaaac

SEQ ID NO: 3005 - DNA, 180 bp, Homo sapiens
  misc_feature (6)..(6): n equals a,t,g, or c
  misc_feature (20)..(20): n equals a,t,g, or c
  misc_feature (150)..(150): n equals a,t,g, or c
  misc_feature (155)..(155): n equals a,t,g, or c
  misc_feature (160)..(160): n equals a,t,g, or c
  misc_feature (163)..(163): n equals a,t,g, or c
  misc_feature (166)..(166): n equals a,t,g, or c
gaatanaatcacttacaggnaatttcagtcattgatttcaaatttgtaaaacaagctaatagttaatattttgccaaaaagaatatctataagatacattaacctactaatggactcccaaactatgtgaaaaaaaaaaaactgacaaanttganggganaantanacaactgaacaatc

SEQ ID NO: 3006 - DNA, 113 bp, Homo sapiens
  misc_feature (101)..(101): n equals a,t,g, or c
  misc_feature (106)..(106): n equals a,t,g, or c
  misc_feature (111)..(113): n equals a,t,g, or c
gcggcacgagcggcacgagggggggcccggtacccaattcgccctatagtgagtcgtattacaattcactggccgtcgttttacaacgtcgtgactggganccccnaaaannn

SEQ ID NO: 3007 - DNA, 185 bp, Homo sapiens
  misc_feature (110)..(110): n equals a,t,g, or c
  misc_feature (121)..(121): n equals a,t,g, or c
  misc_feature (161)..(161): n equals a,t,g, or c
  misc_feature (166)..(166): n equals a,t,g, or c
  misc_feature (182)..(182): n equals a,t,g, or c
gctcacttgctctgagacaggtgcggcaagtctactgcgggctggtccgggctcctcaagtttcagaaccgaacggttattccaattcggttccttggaaaaggaaaagntgcacttttanaagttccccaatgaaacaaaaaaacctccaccattttcanggccntgttcaacggcccatnacc

SEQ ID NO: 3008 - DNA, 117 bp, Homo sapiens
  misc_feature (29)..(29): n equals a,t,g, or c
  misc_feature (40)..(40): n equals a,t,g, or c
  misc_feature (96)..(96): n equals a,t,g, or c
  misc_feature (112)..(112): n equals a,t,g, or c
  misc_feature (114)..(114): n equals a,t,g, or c
aggctcatgggataaaacagacttcttantatatacctanctatcccaggatatttcttaagctaatgtgtttgtctcatgctttcaatcatttcntgcatctgaaaacccntnaat

SEQ ID NO: 3009 - DNA, 129 bp, Homo sapiens
  misc_feature (120)..(120): n equals a,t,g, or c
  misc_feature (123)..(123): n equals a,t,g, or c
  misc_feature (127)..(129): n equals a,t,g, or c
gcggcacgagcggcacgagcggcacgagcggcacgagggggggcccggtacccaattcgccctatagtgagtcgtattacaattcactggccgtcgttttacaacgtcgtgactgggaanccnaagnnn

SEQ ID NO: 3010 - DNA, 440 bp, Homo sapiens
  misc_feature (15)..(15): n equals a,t,g, or c
  misc_feature (17)..(17): n equals a,t,g, or c
  misc_feature (22)..(22): n equals a,t,g, or c
  misc_feature (138)..(138): n equals a,t,g, or c
  misc_feature (154)..(154): n equals a,t,g, or c
  misc_feature (189)..(189): n equals a,t,g, or c
  misc_feature (245)..(245): n equals a,t,g, or c
  misc_feature (305)..(305): n equals a,t,g, or c
  misc_feature (317)..(317): n equals a,t,g, or c
  misc_feature (319)..(319): n equals a,t,g, or c
  misc_feature (331)..(331): n equals a,t,g, or c
  misc_feature (357)..(357): n equals a,t,g, or c
  misc_feature (376)..(376): n equals a,t,g, or c
  misc_feature (399)..(400): n equals a,t,g, or c
  misc_feature (434)..(434): n equals a,t,g, or c
gattctcacaccaantncaaantattaggaattttttatatcagctgacatcttgtgcttacagtaaagccatatagatgcacacatagtgactttattaaatcaaatgagttgtgcagagcagagcaaatctattangctttctcttttaaanttttctaattttactcttattagctccctcagttntcatcaattacatattcctacatcagatattttacactatcagattctttgattanaaaatcatcttcagctttacattattaatctctgaaggacataaaatcaaatactttctngtccatgatcantnatccctactatnttaaatcttcccataaaagcttaaanggaaaaaaaaatgtcgttnttccaaaaaaaatgcttgccggnnggtccgcctttatccacctttggagcgggttggngacctt

SEQ ID NO: 3011 - DNA, 279 bp, Homo sapiens
  misc_feature (171)..(171): n equals a,t,g, or c
  misc_feature (207)..(207): n equals a,t,g, or c
  misc_feature (221)..(221): n equals a,t,g, or c
  misc_feature (233)..(233): n equals a,t,g, or c
  misc_feature (276)..(276): n equals a,t,g, or c
  misc_feature (279)..(279): n equals a,t,g, or c
gaaaaaaagacatctgaacaaattttagtctctaatccttacggctaaagcaaacagtaaagatagcctaacccttagcttaataatataaaatctcatgttaaaggtccatttgcctcagttccttttactcagtacatcacattcagctttcaacaaaaaaaattacanggcatactaaaaggacaaaaaaacagtttgaagaangacagcaagcagtnggacaagactcngatttggaggaagatgttgaaatcatcagactggaaatttaanacn

SEQ ID NO: 3012 - DNA, 99 bp, Homo sapiens
  misc_feature (7)..(8): n equals a,t,g, or c
  misc_feature (18)..(18): n equals a,t,g, or c
  misc_feature (25)..(25): n equals a,t,g, or c
  misc_feature (34)..(34): n equals a,t,g, or c
  misc_feature (59)..(59): n equals a,t,g, or c
  misc_feature (76)..(76): n equals a,t,g, or c
  misc_feature (91)..(91): n equals a,t,g, or c
acttgcnnctcaaaaaanggccccnaaaagaatntaaggttgaatctctaccggggtgncggtcgatttaaaattnttggatcccccgggntgaaggaa

SEQ ID NO: 3013 - DNA, 93 bp, Homo sapiens
  misc_feature (63)..(63): n equals a,t,g, or c
  misc_feature (71)..(71): n equals a,t,g, or c
  misc_feature (73)..(73): n equals a,t,g, or c
  misc_feature (80)..(80): n equals a,t,g, or c
  misc_feature (88)..(88): n equals a,t,g, or c
gtgaatacaaaacataataaaaaggtaagctgaatatagcaaaaaaaaaaaaagggtttaaantgggagcngntgggttnccttttanctcca

SEQ ID NO: 3014 - DNA, 394 bp, Homo sapiens
  misc_feature (291)..(291): n equals a,t,g, or c
  misc_feature (357)..(357): n equals a,t,g, or c
  misc_feature (359)..(359): n equals a,t,g, or c
  misc_feature (366)..(367): n equals a,t,g, or c
  misc_feature (379)..(379): n equals a,t,g, or c
gctttcctagaaagttaagatgtaaatgtattctcacatgtaaatttgaaagttcaggggtctattatgaaatgatacacatttttaaatgaaccataatttttttcactaagctgtttgccttccaaagtgtttacaccttaagccttaacatgtatcttcattcagaaaacagttatattgtcataccatagtaggaagaaaaacctttatttggaatatacactactgtaagtttgtacagatcatatacctaccacctgtctttgcttaaagagccttgattacatnaatatgttaggaaaaaaacatattgagtttcaaaatttatatcctgacattgtttaagtttatgantnttttttnnaatttgccaaanacaaggtgttatatt

SEQ ID NO: 3015 - DNA, 108 bp, Homo sapiens
  misc_feature (102)..(103): n equals a,t,g, or c
  misc_feature (105)..(105): n equals a,t,g, or c
  misc_feature (107)..(108): n equals a,t,g, or c
gcggcacgagggggggcccggtacccaattcgccctatagtgagtcgtattacaattcactggccgtcgttttacaacgtcgtgactgggaaaacccaaatnntntnn

SEQ ID NO: 3016 - DNA, 336 bp, Homo sapiens
  misc_feature (36)..(36): n equals a,t,g, or c
  misc_feature (236)..(236): n equals a,t,g, or c
  misc_feature (282)..(282): n equals a,t,g, or c
  misc_feature (290)..(290): n equals a,t,g, or c
  misc_feature (296)..(296): n equals a,t,g, or c
  misc_feature (325)..(325): n equals a,t,g, or c
  misc_feature (335)..(335): n equals a,t,g, or c
gcttattagagaggtcctatggcagtgtaaactgtncctccttgcttgcctgcatttgctgaactagagctttcactgtcggcttgcagcacatatacccttccagttcactggcttagcaacagattcaaagaacggtcttagtactgtacctgaaattatgatccactctgatgattagactttgttcttgggtcacctgactcagctgtccttacctttcattccgtaggttnaatatagacatagacacagatctataaaaattatacagatatgatnttgatctngatatnggaaaatagccctcttataaataccgatntctatgaatnt

SEQ ID NO: 3017 - DNA, 57 bp, Homo sapiens
  misc_feature (34)..(34): n equals a,t,g, or c
  misc_feature (41)..(41): n equals a,t,g, or c
  misc_feature (49)..(49): n equals a,t,g, or c
  misc_feature (52)..(52): n equals a,t,g, or c
  misc_feature (54)..(54): n equals a,t,g, or c
gcgagtttttttttttttttttttttaaatttangggaccncttttttnaananttt

SEQ ID NO: 3018 - DNA, 294 bp, Homo sapiens
  misc_feature (133)..(133): n equals a,t,g, or c
  misc_feature (222)..(223): n equals a,t,g, or c
  misc_feature (289)..(290): n equals a,t,g, or c
  misc_feature (294)..(294): n equals a,t,g, or c
gaaacttttaaaaatctttggtggaataagagagagagagagagtatgtgtataaaatttcagagaggtattttaaaagtgatggatttctagcttggtcttgaatgaagggcaagtctggttggcagtgaanaggcacagttttcatggtgggaggctggcagcaaacagacaggctgggcccaaacacagtgggctcctgaaagctggaggtgtacaccnngacagctgctggagggctgttgaattgtttcctggaattaggtttgggtttagtgggacaataccnntccn

SEQ ID NO: 3019 - DNA, 444 bp, Homo sapiens
  misc_feature (190)..(190): n equals a,t,g, or c
  misc_feature (278)..(278): n equals a,t,g, or c
  misc_feature (300)..(300): n equals a,t,g, or c
  misc_feature (322)..(322): n equals a,t,g, or c
  misc_feature (344)..(344): n equals a,t,g, or c
  misc_feature (369)..(369): n equals a,t,g, or c
  misc_feature (372)..(372): n equals a,t,g, or c
  misc_feature (408)..(410): n equals a,t,g, or c
gcaggcatctaactcccacacctgtggctggagcccatgtcactcacctctcctactcaaaactagattgcaaattcccatccagagactctccaaatcagtgactgcaacccatgcttgttggcaggttcttatacaacccactatgagttagcatcaaaaatggctttctcctatcagcacccatgtntgggagtgtgtgtggggttacttcccagtgccgttccttctcatggtctcctgactgctccctgattccagatcaaggcttggtaaanttcaaaaactcctccatggctnggaatgcctggcttgtccagtnggaatgtttttttcacaaaaanagttcctcccccgtcttcacacacngangaatccctcacagttttcccaccaaatccacccccnnngggtgctgcttgccttattttccaaatttcccaa

SEQ ID NO: 3020 - DNA, 347 bp, Homo sapiens
  misc_feature (144)..(144): n equals a,t,g, or c
  misc_feature (220)..(220): n equals a,t,g, or c
  misc_feature (236)..(236): n equals a,t,g, or c
  misc_feature (260)..(260): n equals a,t,g, or c
  misc_feature (311)..(311): n equals a,t,g, or c
  misc_feature (322)..(322): n equals a,t,g, or c
  misc_feature (324)..(324): n equals a,t,g, or c
  misc_feature (345)..(345): n equals a,t,g, or c
gtttagttcacctggtaaaatgggtttctcatttctcgatcaagcctggtgtgaagggacgcattggactttaagttgttttatacccttcatctattttttttaaagatttgaactgttgatgtacagtttttaaaatgctanagctagcaaaagttgacaactttccatctgattgtatttattgaaacatgtgcatctacatatatttactggactncttactgtacattttncttcctctaggaaatggcatcaanatggttcaactaagaacatgatcactaaaaacattataataataccttttngaaaaacccantncccccgtttaccaaatttttntt

SEQ ID NO: 3021 - DNA, 126 bp, Homo sapiens
  misc_feature (105)..(105): n equals a,t,g, or c
  misc_feature (107)..(108): n equals a,t,g, or c
  misc_feature (119)..(119): n equals a,t,g, or c
  misc_feature (125)..(125): n equals a,t,g, or c
gctagtctcgagggggggcccggtacccaattcgccctatagtgagtcgtattacaattcactggccgtcgttttacaacgtcgtgactgggaaaacccaagctntnnttttttttctntcgcant

SEQ ID NO: 3022 - DNA, 69 bp, Homo sapiens
  misc_feature (22)..(22): n equals a,t,g, or c
  misc_feature (30)..(30): n equals a,t,g, or c
  misc_feature (32)..(32): n equals a,t,g, or c
  misc_feature (48)..(48): n equals a,t,g, or c
  misc_feature (66)..(66): n equals a,t,g, or c
gctgatgtgaggcctcttggtngttgtgtnanggaaaatggtatcaantaacagcatggcccccangta

SEQ ID NO: 3023 - DNA, 300 bp, Homo sapiens
  misc_feature (45)..(45): n equals a,t,g, or c
  misc_feature (62)..(62): n equals a,t,g, or c
  misc_feature (270)..(270): n equals a,t,g, or c
  misc_feature (288)..(288): n equals a,t,g, or c
  misc_feature (298)..(300): n equals a,t,g, or c
gagaacacagagtgtgttcatcagattttatctgcagcagttttnttctgtttattgttttnccttagtagtgatgttacttttatcaaagataatccattgaggacattgttctattttctgacaaatcaaaacgttgtcttcaaataatgcctttaacaatataattccatgtttgacataggaactacttatagattgttataaaattgaataattttgtattaattatttaattctttccttaacataacatgttaagcatgatcnaatgtgaaaacacttttnccccgaattnnn

SEQ ID NO: 3024 - DNA, 103 bp, Homo sapiens
  misc_feature (82)..(82): n equals a,t,g, or c
  misc_feature (97)..(97): n equals a,t,g, or c
  misc_feature (101)..(103): n equals a,t,g, or c
gcggcacgagggggggcccggtacccaattcgccctatagtgagtcgtattacaattcactggccgtcgttttacaacgtcntgactgggaaacccnaaannn

SEQ ID NO: 3025 - DNA, 104 bp, Homo sapiens
  misc_feature (40)..(40): n equals a,t,g, or c
  misc_feature (44)..(44): n equals a,t,g, or c
  misc_feature (96)..(96): n equals a,t,g, or c
  misc_feature (101)..(102): n equals a,t,g, or c
gcggcacgagggggggcccggtacccaattcgccctatantgantcgtattacaattcactggccgtcgttttacaacttcgtgactggaaccccnaaaannat

SEQ ID NO: 3026 - DNA, 102 bp, Homo sapiens
  misc_feature (40)..(40): n equals a,t,g, or c
  misc_feature (44)..(44): n equals a,t,g, or c
  misc_feature (97)..(97): n equals a,t,g, or c
  misc_feature (101)..(102): n equals a,t,g, or c
gcggcacgagggggggcccggtacccaattcgccctatantgantcgtattacaattcactggccgtcgttttacaacgtcgtgactgggaaacccnaaann

SEQ ID NO: 3027 - DNA, 260 bp, Homo sapiens
  misc_feature (10)..(10): n equals a,t,g, or c
  misc_feature (84)..(84): n equals a,t,g, or c
  misc_feature (115)..(115): n equals a,t,g, or c
  misc_feature (158)..(159): n equals a,t,g, or c
  misc_feature (176)..(176): n equals a,t,g, or c
  misc_feature (195)..(195): n equals a,t,g, or c
  misc_feature (197)..(197): n equals a,t,g, or c
  misc_feature (204)..(204): n equals a,t,g, or c
  misc_feature (248)..(248): n equals a,t,g, or c
ggttattcanagcttaaaatctacttttaaagctttccaaataaaaaaaagcaacttaacaaattgctccctgcttattagctnaaatgaaatcatgaatgtgctggcatagatnagagcctaattgattacctggatctaggtacatgtgtcgcctnnaatcattcaacctttcntcactactatgtgtaaggnantctgctnggtcccaggaatgtggggctaatgaataaaagcactcctacttnagtctggcagga

SEQ ID NO: 3028 - DNA, 56 bp, Homo sapiens
  misc_feature (36)..(36): n equals a,t,g, or c
  misc_feature (38)..(38): n equals a,t,g, or c
  misc_feature (41)..(41): n equals a,t,g, or c
  misc_feature (45)..(45): n equals a,t,g, or c
  misc_feature (51)..(51): n equals a,t,g, or c
gctagtctcgagttttttttttttttttttaagttnanaangttnaactanaatta

SEQ ID NO: 3029 - DNA, 339 bp, Homo sapiens
  misc_feature (112)..(112): n equals a,t,g, or c
  misc_feature (117)..(117): n equals a,t,g, or c
  misc_feature (247)..(247): n equals a,t,g, or c
  misc_feature (295)..(295): n equals a,t,g, or c
  misc_feature (301)..(301): n equals a,t,g, or c
  misc_feature (306)..(306): n equals a,t,g, or c
  misc_feature (339)..(339): n equals a,t,g, or c
gaggaagtgggcagcctggatatcacatcaccccatgtctgctgctgctcaggtttctctcactgtctcttgggtatgtggtggggattggggggtgaggaaggggtggganggcanattaaagagaaagcagctgcagcctgaggcacagacaggatgcagagtgactccatcatcccacctagagtcatggacaccacccactttgatacatcctgttccacaaccataattccctttcatgctnattcctttttaattggaatctcccttccttccacttccaaaaaaaccnaatctnacccnggttttttaaaaattggggaaaagggttttccn

SEQ ID NO: 3030 - DNA, 105 bp, Homo sapiens
  misc_feature (101)..(105): n equals a,t,g, or c
gcggcacgagggggggcccggtacccaattcgccctatagtgagtcgtattacaattcactggccgtcgttttacaacgtcgtgactgggaaaacccaaannnnn

SEQ ID NO: 3031 - DNA, 541 bp, Homo sapiens
  misc_feature (171)..(171): n equals a,t,g, or c
  misc_feature (279)..(279): n equals a,t,g, or c
  misc_feature (343)..(344): n equals a,t,g, or c
  misc_feature (347)..(347): n equals a,t,g, or c
  misc_feature (371)..(371): n equals a,t,g, or c
  misc_feature (383)..(383): n equals a,t,g, or c
  misc_feature (386)..(386): n equals a,t,g, or c
  misc_feature (388)..(388): n equals a,t,g, or c
  misc_feature (417)..(417): n equals a,t,g, or c
  misc_feature (431)..(431): n equals a,t,g, or c
  misc_feature (441)..(442): n equals a,t,g, or c
  misc_feature (455)..(455): n equals a,t,g, or c
  misc_feature (459)..(459): n equals a,t,g, or c
  misc_feature (461)..(462): n equals a,t,g, or c
  misc_feature (472)..(472): n equals a,t,g, or c
  misc_feature (507)..(507): n equals a,t,g, or c
  misc_feature (525)..(525): n equals a,t,g, or c
  misc_feature (541)..(541): n equals a,t,g, or c
ggaaaaaaaggactcatctagttatatggagaggcagagaaatgcacccacgcaggtcttggtgagtcacctgccaagaaactgagactccctaaagtaacagaacttccagccttcttggcaaaggatccaggtttggcacagtttcaaggtttatgcatttaaagaaanaaacaccctgagaaggctaaaattggtaacggctagtttgaaggttaagaaaaaaaacctactcctgaactgattctctatgttgcctgaaggctccttatcaaattnttcttactgaaaaaaccccaaaccacttcctgttgttttatattacaactgcttgaattggggnnaanttacccccccgtgctttccgtttnccccccaaattngcntnctgcatttcctgttgggttcccaattttntaaaatcccccacntgaaattttnncattgggcccccncccnannaaaaaccccnatttcccattccttggaaggattggaaaaaacccngggaaaatttttggaatnaaaccccttttttttn

SEQ ID NO: 3032 - DNA, 446 bp, Homo sapiens
  misc_feature (107)..(107): n equals a,t,g, or c
  misc_feature (287)..(287): n equals a,t,g, or c
  misc_feature (315)..(315): n equals a,t,g, or c
  misc_feature (322)..(322): n equals a,t,g, or c
  misc_feature (339)..(339): n equals a,t,g, or c
  misc_feature (369)..(369): n equals a,t,g, or c
  misc_feature (419)..(419): n equals a,t,g, or c
  misc_feature (424)..(425): n equals a,t,g, or c
  misc_feature (442)..(442): n equals a,t,g, or c
ggtgcctaacaaatattccccttctcccagtcccacatctgattgcgggctgactggtgttaccagtgctacaaagagaattctaaggtgggtatgccaggcaggcnagtttacagacctatcatatgttttctcaggggctgcctgtcaccagctttgcaaatttgggcagatttgaaattatcacttacctttctgccttagttatcagatctcttgtacctctggcagctttattgaatttgtgccaggtttgttaaaataacattgttcttgaaattattccnacaggtgagtttaccccatgcctataancccaaantgcttggaattaagggnttaaccactgcccccgggcaaattccagtnccttttccaaaaaaaaccccaaacttaaccttggaattaatccaattttnccccnnttttattttaaaattanaaaa

SEQ ID NO: 3033 - DNA, 297 bp, Homo sapiens
  misc_feature (25)..(25): n equals a,t,g, or c
  misc_feature (258)..(258): n equals a,t,g, or c
  misc_feature (262)..(262): n equals a,t,g, or c
  misc_feature (264)..(264): n equals a,t,g, or c
  misc_feature (270)..(270): n equals a,t,g, or c
  misc_feature (292)..(292): n equals a,t,g, or c
gttggattattgaattttaccttanaaaagaaaaactgcacgaaaaacacatatcaaaatttaaaaataaggaaagtaaatcaacttccacatcaacctgcctcataattccaacatttcacttgatttctatatacatctgaagccatcactaaattgtcagtgtaccttccaaaatgatggccctgaccacatccatcaaatgtttcactaagctaactaaatcctacaaatgcctggctaattgaaatgcttttnatantntttccnatgggctgaatacccaaggtanagccg

SEQ ID NO: 3034 - DNA, 427 bp, Homo sapiens
  misc_feature (160)..(160): n equals a,t,g, or c
  misc_feature (209)..(209): n equals a,t,g, or c
  misc_feature (249)..(249): n equals a,t,g, or c
  misc_feature (251)..(251): n equals a,t,g, or c
  misc_feature (303)..(303): n equals a,t,g, or c
  misc_feature (312)..(312): n equals a,t,g, or c
  misc_feature (327)..(327): n equals a,t,g, or c
  misc_feature (378)..(378): n equals a,t,g, or c
  misc_feature (380)..(380): n equals a,t,g, or c
  misc_feature (398)..(398): n equals a,t,g, or c
  misc_feature (418)..(418): n equals a,t,g, or c
  misc_feature (426)..(426): n equals a,t,g, or c
gccccgactggcctggccacactgctctccagtagcacagatgtctgctcctcctcttgaacttgggtgggaaaccccacccaaaagccccctttgttacttaggcaattccccttccctgactcccgagggctagggctagagcagacccgggtaagtnaaggcagacccagggctcctctagcctcatacccgtgccctcacagaanccatgccccggcacctctgccctgtgtctttcatacctcnanatgtctgcttgaaaatatttcctcagcctgaaagtttccccaaccatctggnaaaaaaatnctatgcatcccttanaaccctgctcagaacacaattacttttgttaaaggcttctgccacatcttntnttcccccaaaattgaaanactccgccttctccgggggncccggtanc

SEQ ID NO: 3035 - DNA, 537 bp, Homo sapiens
  misc_feature (165)..(165): n equals a,t,g, or c
  misc_feature (182)..(182): n equals a,t,g, or c
  misc_feature (190)..(190): n equals a,t,g, or c
  misc_feature (224)..(224): n equals a,t,g, or c
  misc_feature (226)..(226): n equals a,t,g, or c
  misc_feature (240)..(240): n equals a,t,g, or c
  misc_feature (251)..(251): n equals a,t,g, or c
  misc_feature (285)..(286): n equals a,t,g, or c
  misc_feature (291)..(291): n equals a,t,g, or c
  misc_feature (303)..(303): n equals a,t,g, or c
  misc_feature (316)..(316): n equals a,t,g, or c
  misc_feature (324)..(324): n equals a,t,g, or c
  misc_feature (349)..(349): n equals a,t,g, or c
  misc_feature (351)..(351): n equals a,t,g, or c
  misc_feature (356)..(356): n equals a,t,g, or c
  misc_feature (358)..(358): n equals a,t,g, or c
  misc_feature (384)..(384): n equals a,t,g, or c
  misc_feature (395)..(395): n equals a,t,g, or c
  misc_feature (410)..(410): n equals a,t,g, or c
  misc_feature (413)..(413): n equals a,t,g, or c
  misc_feature (418)..(418): n equals a,t,g, or c
  misc_feature (431)..(431): n equals a,t,g, or c
  misc_feature (433)..(433): n equals a,t,g, or c
  misc_feature (435)..(435): n equals a,t,g, or c
  misc_feature (445)..(445): n equals a,t,g, or c
  misc_feature (450)..(450): n equals a,t,g, or c
  misc_feature (454)..(454): n equals a,t,g, or c
  misc_feature (457)..(457): n equals a,t,g, or c
  misc_feature (465)..(465): n equals a,t,g, or c
  misc_feature (476)..(477): n equals a,t,g, or c
  misc_feature (479)..(480): n equals a,t,g, or c
  misc_feature (494)..(494): n equals a,t,g, or c
  misc_feature (506)..(506): n equals a,t,g, or c
  misc_feature (517)..(517): n equals a,t,g, or c
gttcttgcctatccttccattgtttctacatgcatgtagacacaagttcttattccagcatacataaaaggtaatgtactgtatatattattctgcactagttttaaaaaatttaacagtatgtaactggagctccctttgtatccatacataaagagcttcttnctctctgttacagtaanactatganaatgttccatagtttaaccagtccagtcccttananatggataccgtatngttattgcaancaagtgctgcagtcagtaacttgtgttatatcannatttngttcatgttgcnggtttatctatanaataaatnccccaaaaataaattggtgtgttcnangggtnantgtttttggttacccccagaaaaaanttggccaattnccccccgtaaaaaanttntttcnttttggaaccccncncntttttaaaanttttnttgnttntttttagnaaaatcttaanncnncccttccccccaantgaagaaaaaanaaacttgtccnttttccccccgggtgaaaaa

SEQ ID NO: 3036 - DNA, 109 bp, Homo sapiens
  misc_feature (79)..(79): n equals a,t,g, or c
  misc_feature (102)..(104): n equals a,t,g, or c
  misc_feature (108)..(108): n equals a,t,g, or c
gcggcacgagggggggcccggtacccaattcgccctatagtgagtcgtattacaattcactggccgtcgttttacaacntcgtgactgggaaaacccaaaannntatna

SEQ ID NO: 3037 - DNA, 544 bp, Homo sapiens
  misc_feature (51)..(51): n equals a,t,g, or c
  misc_feature (74)..(75): n equals a,t,g, or c
  misc_feature (84)..(84): n equals a,t,g, or c
  misc_feature (90)..(90): n equals a,t,g, or c
  misc_feature (118)..(118): n equals a,t,g, or c
  misc_feature (132)..(132): n equals a,t,g, or c
  misc_feature (143)..(144): n equals a,t,g, or c
  misc_feature (165)..(167): n equals a,t,g, or c
  misc_feature (184)..(184): n equals a,t,g, or c
  misc_feature (187)..(187): n equals a,t,g, or c
  misc_feature (190)..(190): n equals a,t,g, or c
  misc_feature (206)..(206): n equals a,t,g, or c
  misc_feature (222)..(222): n equals a,t,g, or c
  misc_feature (257)..(257): n equals a,t,g, or c
  misc_feature (273)..(273): n equals a,t,g, or c
  misc_feature (294)..(294): n equals a,t,g, or c
  misc_feature (301)..(301): n equals a,t,g, or c
  misc_feature (312)..(317): n equals a,t,g, or c
  misc_feature (336)..(336): n equals a,t,g, or c
  misc_feature (350)..(351): n equals a,t,g, or c
  misc_feature (357)..(357): n equals a,t,g, or c
  misc_feature (359)..(359): n equals a,t,g, or c
  misc_feature (365)..(365): n equals a,t,g, or c
  misc_feature (368)..(373): n equals a,t,g, or c
  misc_feature (381)..(381): n equals a,t,g, or c
  misc_feature (416)..(416): n equals a,t,g, or c
  misc_feature (450)..(450): n equals a,t,g, or c
  misc_feature (455)..(455): n equals a,t,g, or c
  misc_feature (492)..(492): n equals a,t,g, or c
  misc_feature (530)..(530): n equals a,t,g, or c
  misc_feature (536)..(536): n equals a,t,g, or c
ggcaaagtttatataagttgtaggatgcccagcagcccccttttctctatntccttcctcttgaaacaagcgtnnactataccnctttcnctaaccctttatgttaccatatcttctnccaacctctctccnatccattactnngttctgagctaccctgtctcnnntctaactcacgcctttntgnaanaggaagtttaagccantgtttactctcttaantcacttcacccttagaacaatcctgggaggtgttnatttcggaaaaggatncttaaccacaggacagaaaanttagtcntcgtttctttnnnnnnttatttataaatgggaccntatgactggttatnntcaaancntcaacnttnnnnnnggaacttngcatatttgcaacccaaaatgggccgccttgaaanggtcttttgcagtaaaatctcagtgtccacatcnaaaanagtcttccgggctccaattaatatactcctgccccanctgctcatctcttgcacctctaaacgttcttcacaaantagganattgggct

SEQ ID NO: 3038 - DNA, 364 bp, Homo sapiens
  misc_feature (1)..(1): n equals a,t,g, or c
  misc_feature (19)..(19): n equals a,t,g, or c
  misc_feature (30)..(30): n equals a,t,g, or c
  misc_feature (45)..(45): n equals a,t,g, or c
  misc_feature (82)..(82): n equals a,t,g, or c
  misc_feature (109)..(109): n equals a,t,g, or c
  misc_feature (113)..(113): n equals a,t,g, or c
  misc_feature (117)..(117): n equals a,t,g, or c
  misc_feature (129)..(129): n equals a,t,g, or c
  misc_feature (143)..(143): n equals a,t,g, or c
  misc_feature (147)..(147): n equals a,t,g, or c
  misc_feature (172)..(172): n equals a,t,g, or c
  misc_feature (179)..(179): n equals a,t,g, or c
  misc_feature (187)..(187): n equals a,t,g, or c
  misc_feature (205)..(205): n equals a,t,g, or c
  misc_feature (209)..(209): n equals a,t,g, or c
  misc_feature (245)..(245): n equals a,t,g, or c
  misc_feature (256)..(256): n equals a,t,g, or c
  misc_feature (264)..(264): n equals a,t,g, or c
  misc_feature (301)..(301): n equals a,t,g, or c
  misc_feature (310)..(310): n equals a,t,g, or c
  misc_feature (313)..(313): n equals a,t,g, or c
  misc_feature (336)..(336): n equals a,t,g, or c
  misc_feature (339)..(339): n equals a,t,g, or c
ntctgggagccgatacacnagccactaacnattcggtcgttgtgngacaaaagatgagataaaatcctcttcatcggccccnaaatctactggctgtgggggctggtanttancctncgtgaacgcccnacattgaaacactncccnatgtgttgggacgtccacagaatgncaagctnaccacgcngtttatcttacttgggcncgcntaagcccccgctttgggcccacttggtccacttccncaatcccttgncgcccaanaaaggcttctttccaaggtttcccaaagggccccccnttggggttncantcccctcaaaacataaggggccngcnttaattaacctcgaagtggggaacc

SEQ ID NO: 3039 - DNA, 102 bp, Homo sapiens
  misc_feature (43)..(43): n equals a,t,g, or c
  misc_feature (50)..(50): n equals a,t,g, or c
  misc_feature (67)..(67): n equals a,t,g, or c
  misc_feature (91)..(91): n equals a,t,g, or c
  misc_feature (94)..(94): n equals a,t,g, or c
ggccctgggcgttttcccattctgggaagaaaaaaaaaaaatncctgggnaccctttaaaaaaaccnattccctgaaaaaaaagaactttnttnccgggaaa

SEQ ID NO: 3040 - DNA, 104 bp, Homo sapiens
  misc_feature (100)..(104): n equals a,t,g, or c
gcggcacgagggggggcccggtacccaattcgccctatagtgagtcgtattacaattcactggccgtcgttttacaacgtcgtgactgggaaaacccaannnnn

SEQ ID NO: 3041 - DNA, 543 bp, Homo sapiens
  misc_feature (109)..(109): n equals a,t,g, or c
  misc_feature (136)..(136): n equals a,t,g, or c
  misc_feature (165)..(165): n equals a,t,g, or c
  misc_feature (192)..(192): n equals a,t,g, or c
  misc_feature (239)..(239): n equals a,t,g, or c
  misc_feature (245)..(245): n equals a,t,g, or c
  misc_feature (306)..(306): n equals a,t,g, or c
  misc_feature (350)..(350): n equals a,t,g, or c
  misc_feature (367)..(367): n equals a,t,g, or c
  misc_feature (370)..(370): n equals a,t,g, or c
  misc_feature (372)..(372): n equals a,t,g, or c
  misc_feature (382)..(382): n equals a,t,g, or c
  misc_feature (384)..(384): n equals a,t,g, or c
  misc_feature (391)..(391): n equals a,t,g, or c
  misc_feature (393)..(393): n equals a,t,g, or c
  misc_feature (395)..(396): n equals a,t,g, or c
  misc_feature (453)..(453): n equals a,t,g, or c
  misc_feature (467)..(467): n equals a,t,g, or c
  misc_feature (489)..(489): n equals a,t,g, or c
  misc_feature (520)..(520): n equals a,t,g, or c
gcggcacgaggtgacgcctgcgccttttcccacagcgtcagaacaacacaactttgatttctcctctgtcaaagcagggacaaacaagctggtccagatccctgatatnctggaagaaggagggcatgtgaccctnaaacccccatgagcagcatcctgtccccnagccacggaagctcctgctcccttggncaggcctgcccctccctccaagctgtgctgttggacattcggtgacncacacncctgacaagctctccttgctggcccttagaaggatcggtgaaaaggaaggggaaaccatcncttcttgaactaccctttggaatccctccccgtttgaatttttntacaccatgctttatcnttngnataaccccgntncctattnangnnaatcccaattttgaacctttcatttgccaccaaaaaaaacccttcttttatctcccnacgatttctcaaantccccgttttgaaacctctcanattcccaatttgcaactttcactccacaggnaaatttttccaaatctcttatgt

SEQ ID NO: 3042 - DNA, 71 bp, Homo sapiens
  misc_feature (7)..(7): n equals a,t,g, or c
  misc_feature (10)..(10): n equals a,t,g, or c
  misc_feature (39)..(39): n equals a,t,g, or c
  misc_feature (44)..(44): n equals a,t,g, or c
  misc_feature (60)..(60): n equals a,t,g, or c
ggacaantgnaacgtattcctgggtgtgctatacccgantgcantggattactcgggtgntcttatttcta

SEQ ID NO: 3043 - DNA, 112 bp, Homo sapiens
  misc_feature (32)..(32): n equals a,t,g, or c
  misc_feature (47)..(47): n equals a,t,g, or c
  misc_feature (104)..(104): n equals a,t,g, or c
  misc_feature (107)..(107): n equals a,t,g, or c
  misc_feature (109)..(109): n equals a,t,g, or c
gcggcacgagggggggcccggtacccaattcnccctatagtgagtcntattacaattcactggccgtcgttttacaacgtcgtgactgggaaaacccaaaatantcntngtc

SEQ ID NO: 3044 - DNA, 114 bp, Homo sapiens
  misc_feature (88)..(88): n equals a,t,g, or c
  misc_feature (108)..(108): n equals a,t,g, or c
  misc_feature (112)..(114): n equals a,t,g, or c
gcggcacgagcggcacgagggggggcccggtacccaattcgccctatagtgagtcgtattacaattcactggccgtcgttttacaacntcgtgactgggaaaaccaanggtnnn

SEQ ID NO: 3045 - DNA, 183 bp, Homo sapiens
  misc_feature (17)..(17): n equals a,t,g, or c
  misc_feature (27)..(27): n equals a,t,g, or c
  misc_feature (33)..(33): n equals a,t,g, or c
  misc_feature (57)..(57): n equals a,t,g, or c
  misc_feature (69)..(69): n equals a,t,g, or c
  misc_feature (135)..(135): n equals a,t,g, or c
  misc_feature (138)..(138): n equals a,t,g, or c
  misc_feature (159)..(159): n equals a,t,g, or c
  misc_feature (176)..(176): n equals a,t,g, or c
  misc_feature (178)..(178): n equals a,t,g, or c
aggtcatccagctgtcngatgggtcanaggtcntcactttgtctgatgaagacagtntttatagatgtnaaggatataatgttagacttctagcacttgaaattgcccatggtctttcttcttctcttcaatctnatnagctggttgatcagaaatgcnagagtgacattgagaancntaaat

SEQ ID NO: 3046 - DNA, 478 bp, Homo sapiens
  misc_feature (7)..(7): n equals a,t,g, or c
  misc_feature (18)..(18): n equals a,t,g, or c
  misc_feature (21)..(21): n equals a,t,g, or c
  misc_feature (45)..(45): n equals a,t,g, or c
  misc_feature (65)..(65): n equals a,t,g, or c
  misc_feature (108)..(108): n equals a,t,g, or c
  misc_feature (134)..(134): n equals a,t,g, or c
  misc_feature (152)..(152): n equals a,t,g, or c
  misc_feature (167)..(167): n equals a,t,g, or c
  misc_feature (231)..(231): n equals a,t,g, or c
  misc_feature (235)..(236): n equals a,t,g, or c
  misc_feature (241)..(241): n equals a,t,g, or c
  misc_feature (244)..(244): n equals a,t,g, or c
  misc_feature (247)..(247): n equals a,t,g, or c
  misc_feature (252)..(252): n equals a,t,g, or c
  misc_feature (254)..(254): n equals a,t,g, or c
  misc_feature (269)..(269): n equals a,t,g, or c
  misc_feature (273)..(273): n equals a,t,g, or c
  misc_feature (277)..(277): n equals a,t,g, or c
  misc_feature (279)..(279): n equals a,t,g, or c
  misc_feature (296)..(296): n equals a,t,g, or c
  misc_feature (314)..(314): n equals a,t,g, or c
  misc_feature (326)..(326): n equals a,t,g, or c
  misc_feature (334)..(334): n equals a,t,g, or c
  misc_feature (337)..(337): n equals a,t,g, or c
  misc_feature (349)..(349): n equals a,t,g, or c
  misc_feature (363)..(363): n equals a,t,g, or c
  misc_feature (366)..(366): n equals a,t,g, or c
  misc_feature (374)..(374): n equals a,t,g, or c
  misc_feature (376)..(376): n equals a,t,g, or c
  misc_feature (378)..(378): n equals a,t,g, or c
  misc_feature (393)..(393): n equals a,t,g, or c
  misc_feature (425)..(425): n equals a,t,g, or c
  misc_feature (460)..(461): n equals a,t,g, or c
  misc_feature (465)..(465): n equals a,t,g, or c
gaagaanatggcttccanaancatgcggctgctcctattgctganctgcctggccaaaacaggantcctgggtgatatcatcatgagacccagctgtgctcctggatngttttaccacaagtccaattgctatngttacttcaggaagtgangaactggtctgatgnccaactcgaatgtccgtcttaccgaaacagacccacctggcatctatcctgattttaaaagaancccnncaccntancanaattncntaatttggctttcanaaanaccngnccaatattggatttggncttcccccaaccccacanaaataatggctngcactttngcngttgggatttgnattggggggccaanttntctttttncnanaatccctgggtcctnggcaaagttcccttggggttggggaaaccaanccccttgttgcttgaaaaattaaactccccatttnncccncctttttttttac

SEQ ID NO: 3047 - DNA, 475 bp, Homo sapiens
  misc_feature (23)..(23): n equals a,t,g, or c
  misc_feature (99)..(99): n equals a,t,g, or c
  misc_feature (102)..(102): n equals a,t,g, or c
  misc_feature (174)..(174): n equals a,t,g, or c
  misc_feature (182)..(182): n equals a,t,g, or c
  misc_feature (213)..(213): n equals a,t,g, or c
  misc_feature (216)..(216): n equals a,t,g, or c
  misc_feature (235)..(235): n equals a,t,g, or c
  misc_feature (256)..(256): n equals a,t,g, or c
  misc_feature (259)..(259): n equals a,t,g, or c
  misc_feature (280)..(280): n equals a,t,g, or c
  misc_feature (285)..(285): n equals a,t,g, or c
  misc_feature (293)..(293): n equals a,t,g, or c
  misc_feature (309)..(309): n equals a,t,g, or c
  misc_feature (322)..(322): n equals a,t,g, or c
  misc_feature (328)..(328): n equals a,t,g, or c
  misc_feature (402)..(402): n equals a,t,g, or c
  misc_feature (427)..(427): n equals a,t,g, or c
  misc_feature (435)..(435): n equals a,t,g, or c
  misc_feature (442)..(442): n equals a,t,g, or c
  misc_feature (453)..(453): n equals a,t,g, or c
gcttcttgcaagtgcttaggcanaattatacctgaaaaaaaaagctggaactcttgaccttttctcatgttgattattaatatgagcagtgaacttccnacnatgagatgttagcagaaatgaagggctgctgtcagtgcaatgctcatggtggagctctacaggtctctgcantgccctancctgcctctcctgctctcctatcacaggcanatntgcgacgggggaccctgcntacccccagccttggctccantancattgggcacaaatccctcangtgtncaggcttngcacaggtgcatattngggagcacctcangatgcngttaggggaaccctctgcacaacccacctccggcaaaaacaagttctgggggcacggtgccccaaagaaaaccntgattgaatacttttgtttatttanttctgcgntccatgnaaaacttcctngggaaaattttctacaaacttc

SEQ ID NO: 3048 - DNA, 482 bp, Homo sapiens
  misc_feature (5)..(5): n equals a,t,g, or c
  misc_feature (7)..(8): n equals a,t,g, or c
  misc_feature (30)..(30): n equals a,t,g, or c
  misc_feature (42)..(42): n equals a,t,g, or c
  misc_feature (49)..(49): n equals a,t,g, or c
  misc_feature (55)..(57): n equals a,t,g, or c
  misc_feature (59)..(60): n equals a,t,g, or c
  misc_feature (70)..(70): n equals a,t,g, or c
  misc_feature (79)..(79): n equals a,t,g, or c
  misc_feature (94)..(94): n equals a,t,g, or c
  misc_feature (126)..(126): n equals a,t,g, or c
  misc_feature (156)..(156): n equals a,t,g, or c
  misc_feature (301)..(301): n equals a,t,g, or c
  misc_feature (327)..(327): n equals a,t,g, or c
  misc_feature (367)..(367): n equals a,t,g, or c
  misc_feature (381)..(381): n equals a,t,g, or c
  misc_feature (393)..(393): n equals a,t,g, or c
  misc_feature (405)..(405): n equals a,t,g, or c
  misc_feature (429)..(429): n equals a,t,g, or c
  misc_feature (436)..(436): n equals a,t,g, or c
  misc_feature (448)..(448): n equals a,t,g, or c
gtggncnnagggggggcccggtacacaatncgccctatattnagtcctnttacannncnntggccgtcgnttaacaacntcctgactgggaaancccaagcatgagtgccagccactggtatctanaactgtgattagtgaggaaacacctaggangaacaaacaacccaactctttttatctaatctgttgactccaaagggaccttctgcttattccagttaaaactcaagctgcaattcaaaatgaaatcagtatctttttttctctacttttcagcaaagcaagatgctaccttatnattaccacctttaacaatcaatcgcnaacatagtgggcttaaagcagctcccccttttaacctacntatctggcaaactngcagtcttgaantgaactcagctngaatttttttcctgaactgaacanttttttnggtcctgctgcnggctggttttaaatgatggtggaataaaaacccc

SEQ ID NO: 3049 - DNA, 394 bp, Homo sapiens
  misc_feature (46)..(46): n equals a,t,g, or c
  misc_feature (111)..(111): n equals a,t,g, or c
  misc_feature (375)..(376): n equals a,t,g, or c
  misc_feature (381)..(381): n equals a,t,g, or c
  misc_feature (384)..(385): n equals a,t,g, or c
gataattttataatgttgttttttggtactttaatacatttattgncctgaaataaatcacctcatttatcttttaaagagtgtgtaagtgcctgtattgttttctgaggnaaacagtcctagttttaattagaatgacatagagttctgtctaaaaacctcgaaaacttaaggaaccactgtgaaacatccatctacttacacccattccaaccccaaatcagtactgaacaccaaacatgtacacagttgtcatgatcctcatcacacttgtctcaactaaataatgttacccctccacccctcccactgaagatctgcctactgtatttctacctgaggttcaaatcagggttcttctatgaaagtctggtnnactcntcnngtctgtatc

SEQ ID NO: 3050 - DNA, 114 bp, Homo sapiens
  misc_feature (107)..(107): n equals a,t,g, or c
  misc_feature (111)..(114): n equals a,t,g, or c
gcggcacgagcggcacgagggggggcccggtacccaattcgccctatagtgagtcgtattacaattcactggccgtcgttttacaacgtcgtgactgggaaaacccnaaannnn

SEQ ID NO: 3051 - DNA, 61 bp, Homo sapiens
  misc_feature (32)..(32): n equals a,t,g, or c
  misc_feature (41)..(41): n equals a,t,g, or c
  misc_feature (45)..(45): n equals a,t,g, or c
  misc_feature (51)..(51): n equals a,t,g, or c
  misc_feature (57)..(57): n equals a,t,g, or c
gcggcacgagagtttgttttttttttaaaatngggctaaantttnttgggngcaggncccc

SEQ ID NO: 3052 - DNA, 106 bp, Homo sapiens
  misc_feature (99)..(99): n equals a,t,g, or c
  misc_feature (102)..(103): n equals a,t,g, or c
  misc_feature (105)..(106): n equals a,t,g, or c
gcggcacgagggggggcccggtacccaattcgccctatagtgagtcgtattacaattcactggccgtcgttttacaacgtcgtgactgggaaccccaanttnntnn

SEQ ID NO: 3053 - DNA, 438 bp, Homo sapiens
  misc_feature (54)..(54): n equals a,t,g, or c
  misc_feature (303)..(303): n equals a,t,g, or c
  misc_feature (373)..(373): n equals a,t,g, or c
  misc_feature (411)..(411): n equals a,t,g, or c
  misc_feature (415)..(415): n equals a,t,g, or c
  misc_feature (423)..(423): n equals a,t,g, or c
  misc_feature (428)..(428): n equals a,t,g, or c
gcaaagatgagaattaccattcctaacgtgaaaccaggattggagacagctgtncttgcccaatttagtatcagtagccagtgttacaacttaattccttcattggtaaggaaattgaacaaaatggactctctcagattccctgttagaatctgagagttccaaggcactggaggaacctttcaggtaagcctttcttccacctaagttagcacagtcagtgtctgagaaagattgtgtggaatgaaagcaaaaccttaaatcttgaattcagggttatatttcatccatcactctttctangaagctgttatgctgttatgaaatgaatgcaggtttttggcactagaatgaacctgggttttattttggntcctgtttgaataccattgtgtttgggtgaaatttccnaaantttgccanttgcncattttcccc

SEQ ID NO: 3054 - DNA, 154 bp, Homo sapiens
  misc_feature (6)..(6): n equals a,t,g, or c
  misc_feature (71)..(71): n equals a,t,g, or c
  misc_feature (94)..(94): n equals a,t,g, or c
  misc_feature (108)..(108): n equals a,t,g, or c
  misc_feature (114)..(114): n equals a,t,g, or c
  misc_feature (128)..(128): n equals a,t,g, or c
gaaaanggtaatggaaacatttcatatgaagccaagtctcactgagatcaccctactgcttaataattcanaaaattttcacctgcaaagtgtntggaattttatgtntgtggntgaaagccatcttntacaatgcttaatcacatctctgcct

SEQ ID NO: 3055 - DNA, 128 bp, Homo sapiens
  misc_feature (4)..(5): n equals a,t,g, or c
  misc_feature (7)..(7): n equals a,t,g, or c
  misc_feature (34)..(34): n equals a,t,g, or c
  misc_feature (89)..(89): n equals a,t,g, or c
  misc_feature (102)..(102): n equals a,t,g, or c
  misc_feature (117)..(117): n equals a,t,g, or c
  misc_feature (125)..(125): n equals a,t,g, or c
aggnntnccctaaaaagtttataaaagatggtanctccaccgcggcccgcggaagaatctagaactaatggatcccccgggctgcaggnaattcggcacganaggcacgaacgcctntttcatcnatc

SEQ ID NO: 3056 - DNA, 116 bp, Homo sapiens
  misc_feature (15)..(15): n equals a,t,g, or c
  misc_feature (25)..(25): n equals a,t,g, or c
  misc_feature (40)..(40): n equals a,t,g, or c
  misc_feature (51)..(51): n equals a,t,g, or c
  misc_feature (78)..(78): n equals a,t,g, or c
  misc_feature (113)..(113): n equals a,t,g, or c
aactattggatcccncgggctgcangtaattcggtacgangtgaaaagganaaccccatgcgggtaacttcgcatccnacaaactctgtctcaacattctgtgtcggggagantgc

SEQ ID NO: 3057 - DNA, 362 bp, Homo sapiens
  misc_feature (295)..(295): n equals a,t,g, or c
  misc_feature (306)..(306): n equals a,t,g, or c
  misc_feature (314)..(314): n equals a,t,g, or c
  misc_feature (327)..(327): n equals a,t,g, or c
  misc_feature (346)..(346): n equals a,t,g, or c
gccctctccacctgctgtgtacaaaggagaaataatcactccacacccgactgaacattttctaaccttatcactgtggcagaaactggctactcttcctcctgggtagacagccaggctgtatttccccgctgcccctgcagtgagaggtagccattggagccggcgcaggccaaatggactctgcactggagtgacacatgctgcttccaggcctgtccctcaaacctcccacatgtcctctgtctgctcttctcacttccaaggagcgtgaccatcgtggaaaccccaggtnagcaatggcanattgggangcatccatgggangaaactgggttccctgacntaaagcatcatggaat

SEQ ID NO: 3058 - DNA, 247 bp, Homo sapiens
  misc_feature (9)..(9): n equals a,t,g, or c
  misc_feature (11)..(11): n equals a,t,g, or c
  misc_feature (25)..(25): n equals a,t,g, or c
  misc_feature (72)..(72): n equals a,t,g, or c
  misc_feature (80)..(80): n equals a,t,g, or c
  misc_feature (229)..(229): n equals a,t,g, or c
  misc_feature (232)..(233): n equals a,t,g, or c
  misc_feature (235)..(235): n equals a,t,g, or c
  misc_feature (247)..(247): n equals a,t,g, or c
ggggggggncnaaactcctagctcntaagggtcctcctcaacaaagggaacaaaaggcccagctccaccaanggtggcgntcgctctagaactagtggatcccccgggctgcaggaatccggcacgagcggcacgagggggggcccggtacccaattcgccctatagtgagtcgtattacaattcactggccgtcgttttacaacgtcgtgactgggaaaaccccaagngtnntngtttcttcgtcn

SEQ ID NO: 3059 - DNA, 226 bp, Homo sapiens
  misc_feature (7)..(7): n equals a,t,g, or c
  misc_feature (10)..(10): n equals a,t,g, or c
  misc_feature (14)..(14): n equals a,t,g, or c
  misc_feature (35)..(35): n equals a,t,g, or c
  misc_feature (39)..(39): n equals a,t,g, or c
  misc_feature (107)..(107): n equals a,t,g, or c
  misc_feature (122)..(123): n equals a,t,g, or c
  misc_feature (146)..(146): n equals a,t,g, or c
  misc_feature (160)..(160): n equals a,t,g, or c
  misc_feature (168)..(168): n equals a,t,g, or c
  misc_feature (194)..(194): n equals a,t,g, or c
  misc_feature (205)..(205): n equals a,t,g, or c
attactngantgtngaccccccactcaatcatatnccanatctctccctcactaaacgtaagccttctcctcattctctcaatcttatccatcatagcaggcagttnaggtggattaaaccnnacccagctacgcaaaatcttagnatactcctcaattncccacatnggatgaataatagcagttctaccgtncaaacctaacntaaccattctgaatttactat

SEQ ID NO: 3060 - DNA, 318 bp, Homo sapiens
  misc_feature (81)..(81): n equals a,t,g, or c
  misc_feature (120)..(120): n equals a,t,g, or c
  misc_feature (129)..(129): n equals a,t,g, or c
  misc_feature (131)..(131): n equals a,t,g, or c
  misc_feature (184)..(184): n equals a,t,g, or c
  misc_feature (236)..(236): n equals a,t,g, or c
  misc_feature (247)..(247): n equals a,t,g, or c
  misc_feature (271)..(271): n equals a,t,g, or c
  misc_feature (295)..(295): n equals a,t,g, or c
gggaaaattccagattatgtagctttacatgttagggaccctaaagaaacaaggttgagtactggtagggtccctgaaaanaatttagtttccagaccacagattgactttgatggttangattttatnanttaaatatatcaatttttaggtactttggtatgataaagttgtattatgattnataataacaagtcttaatttgaggcttactcacttgaggactttggtacaanaatgctctttngctgtttttcctgaccaattttcnctctgaatgcaaaagggtcatatntgataaacactgaaattgccaca

SEQ ID NO: 3061 - DNA, 116 bp, Homo sapiens
  misc_feature (8)..(8): n equals a,t,g, or c
  misc_feature (97)..(97): n equals a,t,g, or c
  misc_feature (103)..(105): n equals a,t,g, or c
  misc_feature (107)..(107): n equals a,t,g, or c
gcggcacnagggggggcccggtacccaattcgccctatagtgagtcgtattacaattcactggccgtcgttttacaacgtcgtgactgggaaacccnaagtgnnntngttctccgc

SEQ ID NO: 3062 - DNA, 55 bp, Homo sapiens
  misc_feature (5)..(5): n equals a,t,g, or c
  misc_feature (29)..(29): n equals a,t,g, or c
  misc_feature (33)..(33): n equals a,t,g, or c
  misc_feature (39)..(39): n equals a,t,g, or c
  misc_feature (46)..(46): n equals a,t,g, or c
gatcntacccattcagacagatgctgtgntgtncctcanaaccatngtcattgtt

SEQ ID NO: 3063 - DNA, 351 bp, Homo sapiens
  misc_feature (193)..(193): n equals a,t,g, or c
  misc_feature (276)..(276): n equals a,t,g, or c
  misc_feature (310)..(310): n equals a,t,g, or c
  misc_feature (317)..(317): n equals a,t,g, or c
gtttggtttgagccatctccctccactccattgcaggctgtgcactaaaccaaggtacttgctgctgtctgaaccatgttgcttctacatcccatgcatgtgcacatgctgtatctactgtctgctttgcaaacttttaccttccttcccgcgagccttccggggtcttaccctttgcttctccctcccctanacattagtaacccctttctgtgtaagcattaccttcactgttgtactgtgttacagttatttgcatgtctgtcctatcctaantgaactaagtgccacttgattgctcacaaagcantttggantaggacaaattgaagaaaaacctgaaaagttcat

SEQ ID NO: 3064 - DNA, 328 bp, Homo sapiens
  misc_feature (201)..(201): n equals a,t,g, or c
  misc_feature (232)..(232): n equals a,t,g, or c
  misc_feature (287)..(287): n equals a,t,g, or c
gattttattgtttccatttcattttcccatatattgaaaagaacagggccatgaacagttcttatggaatatggtttgatatatattttgctgagttggactaacaccatttgtttttggttacattccactaacagaacatggcaagataagtttatggtcagggttggttggtgatcctcagtgttgctgcgcagtaanaaggtgagtttgaggtgagaggaacaagtangaaagaatgatcccctgaaccacctcctcactttcttactttcaaccccacctangttttgtgaacctggacttggaaaatgttcggtacccagtc

SEQ ID NO: 3065 - DNA, 100 bp, Homo sapiens
  misc_feature (25)..(25): n equals a,t,g, or c
  misc_feature (58)..(58): n equals a,t,g, or c
  misc_feature (76)..(76): n equals a,t,g, or c
  misc_feature (91)..(91): n equals a,t,g, or c
  misc_feature (94)..(94): n equals a,t,g, or c
ctccaccaaaggggcctttcgctcnaaggaactagtggatcccccgggctgcaggaancccgcacgagcgaatccntaatccttctaatanctntcctct

SEQ ID NO: 3066 - DNA, 135 bp, Homo sapiens
  misc_feature (12)..(12): n equals a,t,g, or c
  misc_feature (70)..(70): n equals a,t,g, or c
  misc_feature (123)..(123): n equals a,t,g, or c
  misc_feature (127)..(127): n equals a,t,g, or c
  misc_feature (131)..(131): n equals a,t,g, or c
  misc_feature (135)..(135): n equals a,t,g, or c
gggggatctgcnagtctaagttcctctcacaaaaagggaacaaaaggcccagctccaccaacggtggcgntcgctctagaactagtggatcccccgggctgcaggaatccggcacgagtaaancctnacanaaan

SEQ ID NO: 3067 - DNA, 168 bp, Homo sapiens
  misc_feature (12)..(12): n equals a,t,g, or c
  misc_feature (21)..(21): n equals a,t,g, or c
  misc_feature (31)..(31): n equals a,t,g, or c
  misc_feature (54)..(54): n equals a,t,g, or c
  misc_feature (68)..(68): n equals a,t,g, or c
  misc_feature (76)..(76): n equals a,t,g, or c
  misc_feature (96)..(96): n equals a,t,g, or c
  misc_feature (114)..(114): n equals a,t,g, or c
  misc_feature (129)..(129): n equals a,t,g, or c
  misc_feature (132)..(133): n equals a,t,g, or c
  misc_feature (156)..(156): n equals a,t,g, or c
ggtcccctgctnaccaaatgnacagctctantcccctgtacttctctggggttngcctagttaaacgnatatgctngggggaggagctcctggcangactccacctgtaaggantcataagacatcttngannggttcacccttgctctgacttgnccccatacctac

SEQ ID NO: 3068 - DNA, 53 bp, Homo sapiens
  misc_feature (5)..(5): n equals a,t,g, or c
  misc_feature (25)..(25): n equals a,t,g, or c
  misc_feature (30)..(30): n equals a,t,g, or c
  misc_feature (43)..(43): n equals a,t,g, or c
  misc_feature (50)..(50): n equals a,t,g, or c
gcaanaagtctgatggccacctgantgcangtgacaaggaccngacacanccc

SEQ ID NO: 3069 - DNA, 229 bp, Homo sapiens
  misc_feature (10)..(10): n equals a,t,g, or c
  misc_feature (30)..(30): n equals a,t,g, or c
  misc_feature (61)..(61): n equals a,t,g, or c
  misc_feature (63)..(63): n equals a,t,g, or c
  misc_feature (99)..(99): n equals a,t,g, or c
  misc_feature (123)..(123): n equals a,t,g, or c
  misc_feature (136)..(136): n equals a,t,g, or c
  misc_feature (145)..(145): n equals a,t,g, or c
  misc_feature (176)..(176): n equals a,t,g, or c
  misc_feature (189)..(189): n equals a,t,g, or c
  misc_feature (196)..(196): n equals a,t,g, or c
  misc_feature (207)..(207): n equals a,t,g, or c
  misc_feature (209)..(209): n equals a,t,g, or c
gaaaaactanttggttttgtttggtcagtnctattgaatttgtttgtggttttaaatttcntnaaaatttctacttttatctatttccattcatctatntgtgtttattttgctatttttgtnctgtttttttaanccccttganttaaaaacctaaatgcccaaaataacttgtnaggctataaattnccctgantattgcttcantngtatcacaaaagttttgaaa

SEQ ID NO: 3070 - DNA, 67 bp, Homo sapiens
  misc_feature (18)..(18): n equals a,t,g, or c
  misc_feature (29)..(29): n equals a,t,g, or c
  misc_feature (54)..(54): n equals a,t,g, or c
gtctggggccatccatgnaaaaacaaacnacccggggcacattgggtaaactcnctgtacgaaaaat

SEQ ID NO: 3071 - DNA, 116 bp, Homo sapiens
  misc_feature (108)..(108): n equals a,t,g, or c
  misc_feature (113)..(116): n equals a,t,g, or c
gctcgtgccgaattcggcacgaggggggcccggtacccaattcgccctatagtgagtcgtattacaattcactggccgtcgttttacaacgtcgtgactgggaacccnaaaannnn

SEQ ID NO: 3072 - DNA, 236 bp, Homo sapiens
  misc_feature (96)..(96): n equals a,t,g, or c
  misc_feature (121)..(121): n equals a,t,g, or c
  misc_feature (162)..(162): n equals a,t,g, or c
  misc_feature (189)..(189): n equals a,t,g, or c
  misc_feature (193)..(193): n equals a,t,g, or c
  misc_feature (221)..(221): n equals a,t,g, or c
  misc_feature (230)..(230): n equals a,t,g, or c
agttcgattcctctctaacactggaatgcactggaggtcttggcacatacattttttgcatgttgactcagtaaacataccatatatatgactctnatactgattacacgtagtaatcagnatgataatgaaatacctataataaaattcggagaaaagganagtaaaatttatcaaaatatttgtccncccnggaggtgtatttcctctttataatgttnctctctatngcatag

SEQ ID NO: 3073 - DNA, 56 bp, Homo sapiens
  misc_feature (23)..(23): n equals a,t,g, or c
  misc_feature (50)..(51): n equals a,t,g, or c
  misc_feature (53)..(53): n equals a,t,g, or c
aaaaaaatgaagtaactgatttnctaaaaaaaaaaaaaaaaaaaattccnncntta

SEQ ID NO: 3074 - DNA, 515 bp, Homo sapiens
  misc_feature (66)..(66): n equals a,t,g, or c
  misc_feature (119)..(119): n equals a,t,g, or c
  misc_feature (184)..(184): n equals a,t,g, or c
  misc_feature (368)..(368): n equals a,t,g, or c
  misc_feature (424)..(424): n equals a,t,g, or c
  misc_feature (435)..(435): n equals a,t,g, or c
  misc_feature (437)..(437): n equals a,t,g, or c
  misc_feature (473)..(473): n equals a,t,g, or c
gcagaatttaaggagccactcattctcagtgttgtgcaagctgatcctgcaattgcacagagtaanagcctctttaaattttgcattctaaacacctctcttgtcttgtgttagtcaanaacctgctgtactagtaggtaaaatgcatactttaacatagttaccaaggtcattatattctcanagatcctttgtgccattaagtaatttgatttttatatgccaaatccttttgatttttcttgttttgatttcctattgggccatttttcttttcttgtaaaaccgtattgctgttaataaaaattatccttgaatattgccagtgtgtggataacatccatctgttactactgactgcttactcntctgtcaaattattgaaggtgctgaacataatgaagcacttagtcaaaaactggantggttccaatntncatggaaggaatccccgaactttacaaattcccccnctaattctcaattccaaaatttccattattctggactgggcc

SEQ ID NO: 3075 - DNA, 105 bp, Homo sapiens
  misc_feature (9)..(9): n equals a,t,g, or c
  misc_feature (45)..(45): n equals a,t,g, or c
  misc_feature (48)..(48): n equals a,t,g, or c
  misc_feature (103)..(104): n equals a,t,g, or c
aacggcacnagggggggcccggtacccaattcgccctatagtgantcntattacaattcactggccgtcgttttacaacgtcgtgactgggaaaacccaaagnnt

SEQ ID NO: 3076 - DNA, 542 bp, Homo sapiens
  misc_feature (53)..(53): n equals a,t,g, or c
  misc_feature (65)..(65): n equals a,t,g, or c
  misc_feature (76)..(76): n equals a,t,g, or c
  misc_feature (101)..(101): n equals a,t,g, or c
  misc_feature (116)..(116): n equals a,t,g, or c
  misc_feature (146)..(146): n equals a,t,g, or c
  misc_feature (174)..(174): n equals a,t,g, or c
  misc_feature (240)..(240): n equals a,t,g, or c
  misc_feature (254)..(254): n equals a,t,g, or c
  misc_feature (279)..(279): n equals a,t,g, or c
  misc_feature (346)..(346): n equals a,t,g, or c
  misc_feature (370)..(370): n equals a,t,g, or c
  misc_feature (380)..(380): n equals a,t,g, or c
  misc_feature (389)..(389): n equals a,t,g, or c
  misc_feature (398)..(398): n equals a,t,g, or c
  misc_feature (440)..(441): n equals a,t,g, or c
  misc_feature (443)..(443): n equals a,t,g, or c
  misc_feature (447)..(447): n equals a,t,g, or c
  misc_feature (450)..(450): n equals a,t,g, or c
  misc_feature (481)..(481): n equals a,t,g, or c
  misc_feature (485)..(485): n equals a,t,g, or c
  misc_feature (504)..(504): n equals a,t,g, or c
  misc_feature (509)..(509): n equals a,t,g, or c
  misc_feature (525)..(525): n equals a,t,g, or c
  misc_feature (527)..(527): n equals a,t,g, or c
  misc_feature (531)..(531): n equals a,t,g, or c
  misc_feature (535)..(535): n equals a,t,g, or c
gtgacctcttctccttggtgagcatctgtgacttaagtaatatgatggatttngctgattaaaanattctgttttncctggagtgtctgaaacataattanaaaaatatgggtctncatgatggttaaaaacacctttgggactanagcaaatcactgtttttaatatgacaanattgaggctatataatttaaatcccatttcactactcctaagccaactttctgaaactcttaattnaactatcctttgtnaggcaaaaaattcctttcttttcantagaaattaatattagccttgaaaaaatgacccttctgataggtttttaaaataattaactccaaantgattttatttttttcccaaatantgggttgtantttggcggnggaaaaccntaatttttaaacattgtgttccttatttcccattttttcccnntncttntanaattatattttatattttgctttcttccccnaaangattttaaacccccatttnttttntttccttataaaatcncngttngttnagttatt

SEQ ID NO: 3077 - DNA, 540 bp, Homo sapiens
  misc_feature (11)..(11): n equals a,t,g, or c
  misc_feature (26)..(26): n equals a,t,g, or c
  misc_feature (45)..(45): n equals a,t,g, or c
  misc_feature (69)..(69): n equals a,t,g, or c
  misc_feature (94)..(94): n equals a,t,g, or c
  misc_feature (198)..(198): n equals a,t,g, or c
  misc_feature (257)..(257): n equals a,t,g, or c
  misc_feature (272)..(272): n equals a,t,g, or c
  misc_feature (274)..(274): n equals a,t,g, or c
  misc_feature (280)..(280): n equals a,t,g, or c
  misc_feature (316)..(316): n equals a,t,g, or c
  misc_feature (392)..(392): n equals a,t,g, or c
  misc_feature (427)..(427): n equals a,t,g, or c
  misc_feature (443)..(443): n equals a,t,g, or c
  misc_feature (477)..(477): n equals a,t,g, or c
  misc_feature (490)..(490): n equals a,t,g, or c
  misc_feature (496)..(496): n equals a,t,g, or c
  misc_feature (510)..(510): n equals a,t,g, or c
  misc_feature (512)..(512): n equals a,t,g, or c
  misc_feature (540)..(540): n equals a,t,g, or c
ggaattttttngtcaaagtaccttanaatattatattgaagtttngttatttgcatacttattaatttncagcacacagtcaggagtaccttanaatattatattgaagttttattatttgcatacttattaattttcagcacacagtcaggctctcattttgtgttttgttgaaataggaccaggaatactgagcancccaaaatgacttgtatgtagctttaaaatgtgctttagttttttttcaaatttgtttncctaaggctaatatnanatgttnagcataaacttacattttgttttacaaaactatatnactgaaaaatttgcccttgccaatatgttctgataaatgaaaggtgattattttacattaacataagtgttgccancttgatgtttgtttgattttaaaaaaaagtgagtnactgttttaaaaaaanaatattatcttttaaaaaaaaatgttttggtctntcaatttgaatcnaatatnagttattaatcacnanttatatagctttaatttaagtttttgan

SEQ ID NO: 3078 - DNA, 534 bp, Homo sapiens
  misc_feature (92)..(92): n equals a,t,g, or c
  misc_feature (115)..(115): n equals a,t,g, or c
  misc_feature (151)..(151): n equals a,t,g, or c
  misc_feature (227)..(227): n equals a,t,g, or c
  misc_feature (257)..(257): n equals a,t,g, or c
  misc_feature (266)..(266): n equals a,t,g, or c
  misc_feature (281)..(281): n equals a,t,g, or c
  misc_feature (317)..(317): n equals a,t,g, or c
  misc_feature (324)..(324): n equals a,t,g, or c
  misc_feature (328)..(328): n equals a,t,g, or c
  misc_feature (333)..(333): n equals a,t,g, or c
  misc_feature (336)..(336): n equals a,t,g, or c
  misc_feature (347)..(347): n equals a,t,g, or c
  misc_feature (362)..(362): n equals a,t,g, or c
  misc_feature (365)..(365): n equals a,t,g, or c
  misc_feature (397)..(398): n equals a,t,g, or c
  misc_feature (411)..(411): n equals a,t,g, or c
  misc_feature (458)..(458): n equals a,t,g, or c
  misc_feature (487)..(487): n equals a,t,g, or c
  misc_feature (507)..(507): n equals a,t,g, or c
  misc_feature (516)..(516): n equals a,t,g, or c
  misc_feature (518)..(518): n equals a,t,g, or c
gcctcatcctccccaccttgccacttggggtgttggggacttcaggtgaggctcatgcctgttgggcctctgtttttctcagaacggggacnatcatggcccccgcctcctggantgaaggctggggacagaattagaggacccaggtacntgctcagcaggaagccactgatctgtgggaccctggtcccggtgtctttgccggcctcacacccgcttccctctanttccagttgttcctgagtaaagtggaaganacgttccantgtatctgctgtcangactggtgttccggcccatcacgaccgtgttgccancacaacntgtngcaangantgcctggacanatcctttcgggcaangtnttcactgccctgcctgcgctacaacttgggcnnactatgcctgcangttaaacaactctgcaaacgtcctcaaccactctccccggctacggnattgccggtgaactccaagcattctcganaggggttttgctaaaaactntcgaagggncntcaccggacttaattt

SEQ ID NO: 3079 - DNA, 538 bp, Homo sapiens
  misc_feature (90)..(90): n equals a,t,g, or c
  misc_feature (113)..(113): n equals a,t,g, or c
  misc_feature (145)..(145): n equals a,t,g, or c
  misc_feature (214)..(214): n equals a,t,g, or c
  misc_feature (267)..(267): n equals a,t,g, or c
  misc_feature (275)..(275): n equals a,t,g, or c
  misc_feature (381)..(381): n equals a,t,g, or c
  misc_feature (402)..(402): n equals a,t,g, or c
  misc_feature (432)..(432): n equals a,t,g, or c
  misc_feature (453)..(453): n equals a,t,g, or c
  misc_feature (525)..(525): n equals a,t,g, or c
  misc_feature (534)..(534): n equals a,t,g, or c
gtgacatttttacattcaactttaatttaaatgctgaatttaaatttaaatgctgaaaatttatttaaacacttaaaatgatattagaanaggtattttatgtttttaaacanagatatatttcatttttatatgcagtcaacanatcacatgtgtatgtctcttatgtgtccctgtgtgggaatagcttgaattactacataagttctctganaatattaagttcatttaggggaacaggacatatctatatgaaaaacagaaatnatactacnaacaaaagagagatcacgagataacatgttattaattctcagtgaatgacatgtcatgaatcatcagaagagatgaggatatgggaaaagctttatgaaagtatcngaacataaggaagatcggttngttaacagaagactttcattgtggtattanttatatgattcatgttaaatntatcatagtgaaattatgctcttcttacttgtaatttacaaatattcttaatatcttttaatcttccttaanaaaaaaccngggc

SEQ ID NO: 3080 - DNA, 242 bp, Homo sapiens
  misc_feature (85)..(85): n equals a,t,g, or c
  misc_feature (87)..(87): n equals a,t,g, or c
  misc_feature (104)..(104): n equals a,t,g, or c
  misc_feature (140)..(140): n equals a,t,g, or c
  misc_feature (167)..(167): n equals a,t,g, or c
  misc_feature (180)..(180): n equals a,t,g, or c
  misc_feature (203)..(203): n equals a,t,g, or c
  misc_feature (211)..(211): n equals a,t,g, or c
  misc_feature (222)..(222): n equals a,t,g, or c
gctcgtgccgaattcggcacgaggttttaccctactcaccaaacgcctcaaccgccttttcatcaatcgcccacatcactcgaanangttaaatttatgggctngaaatcattcccggcttaccctttcaacgccccaanttggggggccctcccaaataatttccntttttaaatcttnggcccttcctttcccctttaacnaacaattncccggggggcncaaaaggggccctttaattt

SEQ ID NO: 3081 - DNA, 64 bp, Homo sapiens
  misc_feature (9)..(9): n equals a,t,g, or c
  misc_feature (20)..(20): n equals a,t,g, or c
  misc_feature (35)..(35): n equals a,t,g, or c
  misc_feature (57)..(57): n equals a,t,g, or c
  misc_feature (62)..(62): n equals a,t,g, or c
gttcagttncattttactantcaatcttacgggtntacacatcctttaattatactngtttnta

SEQ ID NO: 3082 - DNA, 427 bp, Homo sapiens
  misc_feature (11)..(11): n equals a,t,g, or c
  misc_feature (45)..(45): n equals a,t,g, or c
  misc_feature (148)..(148): n equals a,t,g, or c
  misc_feature (181)..(181): n equals a,t,g, or c
  misc_feature (276)..(276): n equals a,t,g, or c
  misc_feature (305)..(305): n equals a,t,g, or c
  misc_feature (308)..(308): n equals a,t,g, or c
  misc_feature (366)..(366): n equals a,t,g, or c
  misc_feature (388)..(388): n equals a,t,g, or c
  misc_feature (395)..(395): n equals a,t,g, or c
  misc_feature (421)..(421): n equals a,t,g, or c
  misc_feature (424)..(424): n equals a,t,g, or c
aaaacattccntttgaaagatgtcatgctattgtataaatgaatnctcctggaaaggattgcctttcctaaagaaaatatttattagtgccaaataattcaaatggtataacaaagtgaagtgaaaaaatcagtatgtgttgtggtanctgcttggataggggtaccatcttgtctgggantgtatacctatgctagtttcctcctttttattttttgccttcattcttctgaatttacatatttcctaaaaatttccaaattgcttttcaggaanatttcaaggcattggggaaggttatgaanccngaaggaattgaaaaccaaaataattaattttataaattaaagttaccattacatccanaattggcctgaaaattcccccncctcacncttgtttgtcttgggcaaatgtttanttnata

SEQ ID NO: 3083 - DNA, 217 bp, Homo sapiens
  misc_feature (87)..(87): n equals a,t,g, or c
  misc_feature (149)..(149): n equals a,t,g, or c
  misc_feature (162)..(162): n equals a,t,g, or c
  misc_feature (186)..(186): n equals a,t,g, or c
  misc_feature (208)..(208): n equals a,t,g, or c
  misc_feature (213)..(213): n equals a,t,g, or c
aaatttctgggattcttgaaagcatgggctctctccgcactgagtctagtttcactgcttcttactggttttaatctttaatgttanacctatgtttatcccttattaaaatttccccctgctttaatttcaatgttccaatgtcaaanatcttataattcnaaatgttctcccaagggtgggtcntaatttttttttaaaattttantaaanattt

SEQ ID NO: 3084 - DNA, 529 bp, Homo sapiens
  misc_feature (16)..(16): n equals a,t,g, or c
  misc_feature (105)..(105): n equals a,t,g, or c
  misc_feature (184)..(184): n equals a,t,g, or c
  misc_feature (277)..(277): n equals a,t,g, or c
  misc_feature (297)..(297): n equals a,t,g, or c
  misc_feature (341)..(341): n equals a,t,g, or c
  misc_feature (343)..(343): n equals a,t,g, or c
  misc_feature (352)..(352): n equals a,t,g, or c
  misc_feature (360)..(360): n equals a,t,g, or c
  misc_feature (373)..(373): n equals a,t,g, or c
  misc_feature (380)..(380): n equals a,t,g, or c
  misc_feature (397)..(397): n equals a,t,g, or c
  misc_feature (427)..(427): n equals a,t,g, or c
  misc_feature (459)..(459): n equals a,t,g, or c
  misc_feature (468)..(469): n equals a,t,g, or c
  misc_feature (510)..(510): n equals a,t,g, or c
  misc_feature (527)..(527): n equals a,t,g, or c
ttgaatgcatgtacanatacctattttttcatctcagtttgtaacccatgcatttggggttggagttggcatgcagtgaaacctacagtatttatcaatatgtantcagtaactgtatttttgatcagcttcctttacttccctaacatttttaggtaaaaacaggaagtcttgttcctttttnctccccaaatcattatgccctgtctttttgttattctaaaattaagaaatagggtcttaaaaagccaaaaacttcccatgaagtgaattatantaaaggctttccttgggatnaaaaaatcagggttaaaactgtgggccaacaatattttccaaangnacaaaacanctcctatngaaaaaaattganaattgantatatgaaccaaacatntactccttttccaatattgctaaaaatcanttcttccattaaaaactaatctctaatgaaantaattttcnnaaactatgaattaaaaattttttaatggttttccatctgantcctgaaacccaaatangt

SEQ ID NO: 3085 - DNA, 411 bp, Homo sapiens
  misc_feature (1)..(1): n equals a,t,g, or c
  misc_feature (9)..(9): n equals a,t,g, or c
  misc_feature (26)..(26): n equals a,t,g, or c
  misc_feature (85)..(85): n equals a,t,g, or c
  misc_feature (100)..(100): n equals a,t,g, or c
  misc_feature (104)..(104): n equals a,t,g, or c
  misc_feature (106)..(106): n equals a,t,g, or c
  misc_feature (109)..(109): n equals a,t,g, or c
  misc_feature (115)..(115): n equals a,t,g, or c
  misc_feature (138)..(138): n equals a,t,g, or c
  misc_feature (173)..(173): n equals a,t,g, or c
  misc_feature (181)..(181): n equals a,t,g, or c
  misc_feature (206)..(206): n equals a,t,g, or c
  misc_feature (222)..(222): n equals a,t,g, or c
  misc_feature (245)..(245): n equals a,t,g, or c
  misc_feature (250)..(250): n equals a,t,g, or c
  misc_feature (283)..(283): n equals a,t,g, or c
  misc_feature (305)..(305): n equals a,t,g, or c
  misc_feature (309)..(309): n equals a,t,g, or c
  misc_feature (343)..(343): n equals a,t,g, or c
  misc_feature (349)..(349): n equals a,t,g, or c
  misc_feature (352)..(352): n equals a,t,g, or c
  misc_feature (364)..(364): n equals a,t,g, or c
  misc_feature (381)..(381): n equals a,t,g, or c
naaaatatntatttttaaaaaaccanaaaggtatggaaaaaggattgctctcgacgttaaaaacatcagcttttctgtttttttncaccatataaattanagtntnctntcgaanaatgggtggtggttatggtacanaccataacaggctactttgctgctacagtaaggcntgaaaaanttcagcgaattttactgtcttgcanaatttgggggattacnaaatggaaaactgctatataatnttcgncaaaaatgattgcattgtgtgacttatatcctnctatttattggcttgagtgcangganattttataaaaaaatctggtttgggttatcaaanatcttngantggggatcaaanaatgctgggaaatttcngagctaaactggaattaatcttaggaaact

SEQ ID NO: 3086 - DNA, 56 bp, Homo sapiens
  misc_feature (3)..(4): n equals a,t,g, or c
  misc_feature (17)..(17): n equals a,t,g, or c
  misc_feature (40)..(40): n equals a,t,g, or c
gcnnctccagggggggnccggaaccaatttcgccctatantgattcctataacgat

SEQ ID NO: 3087 - DNA, 103 bp, Homo sapiens
  misc_feature (8)..(8): n equals a,t,g, or c
  misc_feature (100)..(103): n equals a,t,g, or c
gcggcacnagggggggcccggtacccaattcgccctatagtgagtcgtattacaattcactggccgtcgttttacaacgtcgtgactgggaaaaccaaannnn

SEQ ID NO: 3088 - DNA, 422 bp, Homo sapiens
  misc_feature (59)..(59): n equals a,t,g, or c
  misc_feature (71)..(71): n equals a,t,g, or c
  misc_feature (97)..(97): n equals a,t,g, or c
  misc_feature (138)..(138): n equals a,t,g, or c
  misc_feature (177)..(177): n equals a,t,g, or c
  misc_feature (237)..(237): n equals a,t,g, or c
  misc_feature (260)..(260): n equals a,t,g, or c
  misc_feature (413)..(413): n equals a,t,g, or c
  misc_feature (417)..(417): n equals a,t,g, or c
gtgagattgcaggcgtaattaaatgccttcttgaggacttttataccttcctcttgaanacataaatccanagcttactggtggttgtctgaaaaanatcacatcttgtaataggagtcatacataaatatttctganatctccctcatacttaaccaccgtgcctggaaaatgcanacaactgtattcagtaaatggtatttgaatataagtaaatcaaaagtgtcgtttccatanattctgtagatgttaccacttanaataattacctgtctaacccttaacaaattctaccgtatattctcaagaacttttgcaaacaccggggattcccaaaaacaatgttgggaattgttttccaattttccttttgaaaacctccaaaaattttaaattcattacctttttacctnccanttttt

SEQ ID NO: 3089 - DNA, 484 bp, Homo sapiens
  misc_feature (86)..(86): n equals a,t,g, or c
  misc_feature (90)..(90): n equals a,t,g, or c
  misc_feature (93)..(93): n equals a,t,g, or c
  misc_feature (137)..(137): n equals a,t,g, or c
  misc_feature (243)..(243): n equals a,t,g, or c
  misc_feature (392)..(392): n equals a,t,g, or c
  misc_feature (415)..(415): n equals a,t,g, or c
  misc_feature (451)..(451): n equals a,t,g, or c
  misc_feature (455)..(455): n equals a,t,g, or c
  misc_feature (457)..(457): n equals a,t,g, or c
gcggcacgagaccttactaccagacaaccttagccaaaccatttacccaaataaagtataggcgatagaaattgaaacctggcgcnatanatntagtaccgcaagggaaagatgaaaaattataaccaagcataatntagcaaggactaacccctataccttctgcataatgaattaactagaaataactttgcaaggagagccaaagctaagacccccgaaaccagacgagctacctaagancagctaaaagagcacacccgtctatgtagcaaaatagtgggaagatttataggtagaggcgacaaacctaccgagcctggtgatagctggttgtccaaaataaatcttagttcactttaaatttgcccacagaacctctaaatcccttntaaatttaactgttagtccaaanaagaacagctctttggacctaagaaaaaacttgtanaaanantaaaaatttacaccatagtaggcctaa

SEQ ID NO: 3090 - DNA, 471 bp, Homo sapiens
  misc_feature (63)..(63): n equals a,t,g, or c
  misc_feature (155)..(155): n equals a,t,g, or c
  misc_feature (203)..(203): n equals a,t,g, or c
  misc_feature (245)..(245): n equals a,t,g, or c
  misc_feature (319)..(319): n equals a,t,g, or c
  misc_feature (327)..(327): n equals a,t,g, or c
  misc_feature (414)..(414): n equals a,t,g, or c
  misc_feature (432)..(432): n equals a,t,g, or c
  misc_feature (434)..(434): n equals a,t,g, or c
  misc_feature (454)..(454): n equals a,t,g, or c
  misc_feature (470)..(470): n equals a,t,g, or c
gcttagccaaaccatttacccaaataaagtataggcgatagaaattgaaacctggcgcaatanatatagtaccgcaagggaaagatgaaaaattataaccaagcataatatagcaaggactaacccctataccttctgcataatgaattaactanaaataactttgcaaggagagccaaagctaagacccccgaaaccagacnagctacctaagaacagctaaaagagcacacccgtctatgtancaaaatagtgggaagatttataggtagaggcgacaaacctaccgagcctggtgatagctggttgtccaaaatanaatcttanttcaactttaaatttgcccacagaaccctctaaatcccttgtaaatttaactgttagtccaaaagaagaacagctctttggacctangaaaaaaccttgttaaananagtaaaaaatttaacacccnttagtaggcctaaaanc

SEQ ID NO: 3091 - DNA, 103 bp, Homo sapiens
  misc_feature (44)..(44): n equals a,t,g, or c
  misc_feature (100)..(103): n equals a,t,g, or c
gcggcacgagggggggcccggtacccaattcgccctatagtgantcgtattacaattcactggccgtcgttttacaacgtcgtgactgggaaaacccaannnn

SEQ ID NO: 3092 - DNA, 374 bp, Homo sapiens
  misc_feature (36)..(36): n equals a,t,g, or c
  misc_feature (45)..(45): n equals a,t,g, or c
  misc_feature (47)..(47): n equals a,t,g, or c
  misc_feature (192)..(192): n equals a,t,g, or c
  misc_feature (294)..(294): n equals a,t,g, or c
  misc_feature (308)..(308): n equals a,t,g, or c
  misc_feature (337)..(337): n equals a,t,g, or c
  misc_feature (344)..(344): n equals a,t,g, or c
  misc_feature (365)..(365): n equals a,t,g, or c
gctcgtgccgaattcggcacgaggagaaatcgtggnatgaaagananagtaccagtgatgacttcttatccctggagctgggctttcactgctacccatatcccagccctgcgagtctgttctagccagcacagacaccgcagatccggaactgaatgttcctaaatggcgcagccaatccaggcttttcanaaactgggcaaaaacattaaaatggggacaatcgggtcttccgcagtggtccaacacaggatttcttttaaatgtttcaaaaacatgtccttaaaacttcancctgcttcttagcnagtgggccagttttgcttaaaactggtgngggggcngggggaaaattttttaaaaantgccaaaaa

SEQ ID NO: 3093 - DNA, 516 bp, Homo sapiens
  misc_feature (166)..(166): n equals a,t,g, or c
  misc_feature (281)..(281): n equals a,t,g, or c
  misc_feature (355)..(355): n equals a,t,g, or c
  misc_feature (359)..(359): n equals a,t,g, or c
  misc_feature (388)..(388): n equals a,t,g, or c
  misc_feature (392)..(392): n equals a,t,g, or c
  misc_feature (399)..(399): n equals a,t,g, or c
  misc_feature (463)..(463): n equals a,t,g, or c
  misc_feature (473)..(473): n equals a,t,g, or c
  misc_feature (480)..(480): n equals a,t,g, or c
  misc_feature (494)..(494): n equals a,t,g, or c
  misc_feature (498)..(498): n equals a,t,g, or c
gctgcaaatgcttctttaagcaaaatataagtgtgtatcttatagaaagtaatgcaatatcaccagtctgaggtttggagtgtattaaggtacttggtttctggaaatctttttaagcttggaaacctttaaacctgcgacttaaaaaaggatctacagctatctnagtaggtggccttctgtgtcttggctaattttaaagtgtggtgtttgtttcttacgcaaaaaggaacaaatttaaatcactaggtactcaaccaacagatttcagtgtggattanttaagaaataattgtagttcttgtgtggtggcacaaatttttttccctacattttgtttatgcagactgtcttntatnccttcatccttttctttttttccctgaanaaangaaatcncaattttgtttattggatgctttgaaaaaaatccgaagggaaagaaaaaaccaaactgactgtnaatactttcntgaattngataattttggctnaaantgccaggccccatcctgg

SEQ ID NO: 3094 - DNA, 99 bp, Homo sapiens
  misc_feature (96)..(96): n equals a,t,g, or c
gcggcacgagggggggcccggtacccaattcgccctatagtgagtcgtattacaattcactggccgtcgttttacaacgtcgtgactgggaaaccnaaa

SEQ ID NO: 3095 - DNA, 463 bp, Homo sapiens
  misc_feature (42)..(43): n equals a,t,g, or c
  misc_feature (215)..(215): n equals a,t,g, or c
  misc_feature (243)..(243): n equals a,t,g, or c
  misc_feature (254)..(254): n equals a,t,g, or c
  misc_feature (272)..(272): n equals a,t,g, or c
  misc_feature (309)..(309): n equals a,t,g, or c
  misc_feature (317)..(317): n equals a,t,g, or c
  misc_feature (334)..(334): n equals a,t,g, or c
  misc_feature (354)..(354): n equals a,t,g, or c
gcacgcctggccaagaataaagtctttagagttggtaatgtnnactatttcttttcctgctgtattaaattcattcatttaataaaataatatgaattgcatgcccacagtgtatcaaacctggcactgggcaccttgttgctgtaggttcagtgagccatggcctctgtatcatggtccagatcatgtgtttagtgggagattaaacaaattantcattgaacaaatcactacaagtagtantgatataaaanaaaagtatagtttcgatnaaattgaacaatgggaggtctaaataaatccattcanacttgaanaatggcaattatctganacccaagatatggaaaaatnggtaaaaggcatccctggctcttccttaacacactaaatatctgctctcttaccacacccgtacttatgcaaatttgttcaaaataatcattccccggacttcaaatcc

SEQ ID NO: 3096 - DNA, 523 bp, Homo sapiens
  misc_feature (69)..(69): n equals a,t,g, or c
  misc_feature (223)..(223): n equals a,t,g, or c
  misc_feature (278)..(278): n equals a,t,g, or c
  misc_feature (283)..(283): n equals a,t,g, or c
  misc_feature (296)..(297): n equals a,t,g, or c
  misc_feature (351)..(351): n equals a,t,g, or c
  misc_feature (354)..(354): n equals a,t,g, or c
  misc_feature (357)..(357): n equals a,t,g, or c
  misc_feature (362)..(362): n equals a,t,g, or c
  misc_feature (381)..(381): n equals a,t,g, or c
  misc_feature (389)..(389): n equals a,t,g, or c
  misc_feature (394)..(394): n equals a,t,g, or c
  misc_feature (470)..(470): n equals a,t,g, or c
  misc_feature (482)..(482): n equals a,t,g, or c
  misc_feature (492)..(492): n equals a,t,g, or c
  misc_feature (505)..(505): n equals a,t,g, or c
  misc_feature (517)..(517): n equals a,t,g, or c
ggtttgtcaacccctgctttagatgttgggttttatgtcagtgggcctcaatttcaggttttgagaaanacaaaagaaggggttggctcattggaatcagctggacagcttttcaaaagctacacacctccctctctccttcttctcatcagctttccctgagaaaccactgtcttaaactttatgatcccagttagtctgatttcattaactgatacagatngtttgctttcattaactatatttggcctctgttaacatatcttaagttatgtttnaacanttttttcttttannaggtttgttgggaaaaaaaattttttccttttttgaaaaagaaccaaacaactnccngtncttangtttcctgggaatctccantggggttnaaacnaatcccgggccttgaatccccaccaatactcttctcttgggctctgttttattaataaaaaggaacctgggaaaanaacaaattaatnttctttaaanaataacactcccnaccacctgttcnttttcc

SEQ ID NO: 3097 - DNA, 351 bp, Homo sapiens
  misc_feature (1)..(1): n equals a,t,g, or c
  misc_feature (24)..(25): n equals a,t,g, or c
  misc_feature (51)..(51): n equals a,t,g, or c
  misc_feature (61)..(61): n equals a,t,g, or c
  misc_feature (108)..(108): n equals a,t,g, or c
  misc_feature (111)..(111): n equals a,t,g, or c
  misc_feature (114)..(114): n equals a,t,g, or c
  misc_feature (139)..(139): n equals a,t,g, or c
  misc_feature (141)..(141): n equals a,t,g, or c
  misc_feature (175)..(175): n equals a,t,g, or c
  misc_feature (179)..(179): n equals a,t,g, or c
  misc_feature (186)..(187): n equals a,t,g, or c
  misc_feature (191)..(191): n equals a,t,g, or c
  misc_feature (201)..(201): n equals a,t,g, or c
  misc_feature (221)..(221): n equals a,t,g, or c
  misc_feature (226)..(226): n equals a,t,g, or c
  misc_feature (233)..(233): n equals a,t,g, or c
  misc_feature (237)..(237): n equals a,t,g, or c
  misc_feature (246)..(246): n equals a,t,g, or c
  misc_feature (260)..(260): n equals a,t,g, or c
  misc_feature (266)..(266): n equals a,t,g, or c
  misc_feature (293)..(293): n equals a,t,g, or c
  misc_feature (323)..(323): n equals a,t,g, or c
  misc_feature (348)..(348): n equals a,t,g, or c
nccccgttcttgctcttgaccttnncattaaaatgggggggggggctcttnccaaaaaatnccactttcttcccaaggggggaaaaaacctcccggggggcccttggnggnaancccccccccctaaaaaaccctttgnancaaaaccccttacttttcccccaaaatggaagcnttgncttttgnngggngggccacccnccaaacctaaatgatttttncttcnaaatttncttncggggaatncaatctaattggangttttnaaaagccaaagggaaccttcccccaanctttggttaataccctggtttgttcccatnatgggatcttgggttcaactttttnttt

SEQ ID NO: 3098 - DNA, 544 bp, Homo sapiens
  misc_feature (60)..(60): n equals a,t,g, or c
  misc_feature (83)..(83): n equals a,t,g, or c
  misc_feature (97)..(97): n equals a,t,g, or c
  misc_feature (149)..(149): n equals a,t,g, or c
  misc_feature (203)..(203): n equals a,t,g, or c
  misc_feature (213)..(213): n equals a,t,g, or c
  misc_feature (217)..(217): n equals a,t,g, or c
  misc_feature (226)..(226): n equals a,t,g, or c
  misc_feature (238)..(239): n equals a,t,g, or c
  misc_feature (265)..(265): n equals a,t,g, or c
  misc_feature (271)..(271): n equals a,t,g, or c
  misc_feature (277)..(277): n equals a,t,g, or c
  misc_feature (286)..(286): n equals a,t,g, or c
  misc_feature (290)..(290): n equals a,t,g, or c
  misc_feature (297)..(297): n equals a,t,g, or c
  misc_feature (299)..(299): n equals a,t,g, or c
  misc_feature (309)..(309): n equals a,t,g, or c
  misc_feature (331)..(331): n equals a,t,g, or c
  misc_feature (342)..(342): n equals a,t,g, or c
  misc_feature (347)..(347): n equals a,t,g, or c
  misc_feature (360)..(361): n equals a,t,g, or c
  misc_feature (393)..(393): n equals a,t,g, or c
  misc_feature (395)..(396): n equals a,t,g, or c
  misc_feature (401)..(406): n equals a,t,g, or c
  misc_feature (411)..(411): n equals a,t,g, or c
  misc_feature (415)..(415): n equals a,t,g, or c
  misc_feature (432)..(432): n equals a,t,g, or c
  misc_feature (470)..(470): n equals a,t,g, or c
  misc_feature (502)..(502): n equals a,t,g, or c
  misc_feature (513)..(513): n equals a,t,g, or c
  misc_feature (524)..(524): n equals a,t,g, or c
  misc_feature (533)..(533): n equals a,t,g, or c
gtgacctttgacatgtgtgcaccttctgcttctccagataatctggtattccatatgaanaatgaagatgagaaacatcactntacaaaccagttanactatccccaatttgggttgcatttaacttgaaagccaaaaaaaatttgggnttcctggccttcttgccaaaagcttaaaaagggtttgaactttttgttgaaaanaaaaaccaantttnaaaaaaacntggttctttccnnaaaaagaaacttttaggggcttgggnaacccncccccnaaaaaaaanttanaaaaaantnttggaattcntttttcccaaaaaacttggggnaattttttttnaaaanaaaaattcccctnnaaaaattccctttccccctttttggggggaangnnaaaannnnnnaaaantttnccccccccccccttttnaaatttggaaaaactttggcccccccttttttgaaaantttttaaaaaaaattttttttggggaaaaatngccccccaaancccccccctgnaatttttgnaaaaattcttt

SEQ ID NO: 3099 - DNA, 587 bp, Homo sapiens
  misc_feature (65)..(65): n equals a,t,g, or c
  misc_feature (86)..(86): n equals a,t,g, or c
  misc_feature (163)..(163): n equals a,t,g, or c
  misc_feature (234)..(234): n equals a,t,g, or c
  misc_feature (290)..(290): n equals a,t,g, or c
  misc_feature (352)..(352): n equals a,t,g, or c
  misc_feature (379)..(379): n equals a,t,g, or c
  misc_feature (411)..(411): n equals a,t,g, or c
  misc_feature (418)..(418): n equals a,t,g, or c
  misc_feature (497)..(497): n equals a,t,g, or c
  misc_feature (514)..(514): n equals a,t,g, or c
  misc_feature (523)..(523): n equals a,t,g, or c
  misc_feature (566)..(566): n equals a,t,g, or c
  misc_feature (568)..(568): n equals a,t,g, or c
gactttccacattttccctcttgtttgaggtcctgttccaaccttcatttctgaaactgttctanagcactttgtctttctcgtanttcataacttaccccttcagtctagaattagaattacattatctgttttactactttactagactgtaagctcctanaagataaggactagggagttcatctctgtattccaccagaaggtacagtgactcataactagagtctttanatgaaacttactgagttgaataacttaatatatttctgttttcattcccaagggangccatgtctggagatagaccttgaatttaataaattttaggcactataccatttcagtgganaaaattgttgggaaatttggggggatngatatataaaggggaggagttcactgggccantttgaangtgcttccattggtctggggttactaaccatttcttcctgaatggtgcctagtatatccccaacagtttgtttcctatncccaaaaaatttatatnaaattttcntttctttgcaaaaacttgttccttccttccattcatgaaatcntnccatgctaaattctaattc

SEQ ID NO: 3100 - DNA, 106 bp, Homo sapiens
  misc_feature (10)..(10): n equals a,t,g, or c
  misc_feature (96)..(96): n equals a,t,g, or c
  misc_feature (101)..(101): n equals a,t,g, or c
  misc_feature (104)..(105): n equals a,t,g, or c
gcggcacganggggggcccggtacccaattcgccctatagtgagtcgtattacaattcactggccgtcgttttacaacgtcgtgactgggaacccnaaatnttnnc

SEQ ID NO: 3101 - DNA, 367 bp, Homo sapiens
  misc_feature (61)..(61): n equals a,t,g, or c
  misc_feature (75)..(75): n equals a,t,g, or c
  misc_feature (155)..(155): n equals a,t,g, or c
  misc_feature (201)..(201): n equals a,t,g, or c
  misc_feature (205)..(205): n equals a,t,g, or c
  misc_feature (218)..(218): n equals a,t,g, or c
  misc_feature (237)..(237): n equals a,t,g, or c
  misc_feature (260)..(260): n equals a,t,g, or c
  misc_feature (315)..(315): n equals a,t,g, or c
  misc_feature (318)..(318): n equals a,t,g, or c
  misc_feature (326)..(326): n equals a,t,g, or c
  misc_feature (341)..(341): n equals a,t,g, or c
  misc_feature (351)..(351): n equals a,t,g, or c
gattgtatacgtgattcgtgcaacagcttctgaattttttcctccctcacccaccttacanccattagtcctatnataatttaatttgggtttgttggtatagaaactgtatttgcacaataatgataaagccactcaggctcatctagtcattncctggatttatgtgtgtacgagtacataaaaataagggcactgatncgtntggtacttgtctnaaatggttattcttcagtngttcaaaggtacacaaaatgctnttttctttataaggtaaaaatacttggaggttataagaaaataactcttaactanctnactttgantggctttgatatttntttctcatantggaatccataacctt

SEQ ID NO: 3102 - DNA, 529 bp, Homo sapiens
  misc_feature (194)..(194): n equals a,t,g, or c
  misc_feature (208)..(208): n equals a,t,g, or c
  misc_feature (210)..(211): n equals a,t,g, or c
  misc_feature (307)..(307): n equals a,t,g, or c
  misc_feature (319)..(319): n equals a,t,g, or c
  misc_feature (325)..(325): n equals a,t,g, or c
  misc_feature (405)..(405): n equals a,t,g, or c
  misc_feature (421)..(421): n equals a,t,g, or c
  misc_feature (427)..(427): n equals a,t,g, or c
  misc_feature (432)..(432): n equals a,t,g, or c
  misc_feature (439)..(439): n equals a,t,g, or c
  misc_feature (443)..(443): n equals a,t,g, or c
  misc_feature (464)..(464): n equals a,t,g, or c
  misc_feature (515)..(515): n equals a,t,g, or c
gcttttgagttagtctatagaaaggaatcctttattctttattgcagagcagtgataaaataattttattgtactgttgataccatgctttttctttatccaagaacatccctattaaacaaacatgaaagaaaataattgatttataaccctttttaaagcagaggcacataagtctatagagtggtactgtnagtgtatgtactanannaacaaaggaaacctgtctcagaacatttggatttggttggaaacttttcattttctgtctcatagagcccaacttactgagtggcactgcccatantgtgaacaaaanagtgtntaaagacgggactggacatggaaaactcaaaaaatcctttctctctcttacctttgtgcgattgaaccatcttacctatnacagtgaatcttaatnatgcantagtntttctcntgtntccttctgaaagaaaatccgngttgttttattcttgtaatattctgctctaataaatatgtaactgtattcntagagaacgatttt

SEQ ID NO: 3103 - DNA, 564 bp, Homo sapiens
  misc_feature (140)..(140): n equals a,t,g, or c
  misc_feature (150)..(150): n equals a,t,g, or c
  misc_feature (179)..(179): n equals a,t,g, or c
  misc_feature (231)..(231): n equals a,t,g, or c
  misc_feature (305)..(305): n equals a,t,g, or c
  misc_feature (353)..(353): n equals a,t,g, or c
  misc_feature (368)..(368): n equals a,t,g, or c
  misc_feature (370)..(370): n equals a,t,g, or c
  misc_feature (421)..(421): n equals a,t,g, or c
  misc_feature (450)..(451): n equals a,t,g, or c
  misc_feature (457)..(457): n equals a,t,g, or c
  misc_feature (481)..(481): n equals a,t,g, or c
  misc_feature (490)..(491): n equals a,t,g, or c
  misc_feature (516)..(516): n equals a,t,g, or c
  misc_feature (527)..(527): n equals a,t,g, or c
  misc_feature (564)..(564): n equals a,t,g, or c
gctcgtgccgaattcggcacgagctgcggtagggggcggaaatccttgctaagcttctatagctgggggattctccaattaggtctaggattttgtggtctcatatcagttttttgcttctgaagtctttcatggtacanaaatgggganagtatttgtggggggttgtgccacatgancgaatcagggagatgagaaaatgcatggatatattcaggaaataatgagtanccagttgggtaaacatatctatccatctaaggtagggtgggaacaccttgaaaatggtcatgggaatttattanaaaccatcaacaagttggtctggggatccaaaaactgaatgaatgttngcctgtggatttcanancaattggcagcagtgccaaattccccggtcttgggccctcttcaagtctcncctgaaccgtggcctcaccgagtcaaaanngagttntctccgctgcaccaaacacacctncaccaccanntggttttcatttgacgcccaacacncccatgaacanacttggaaatgtccattcaaatgaacccctaagcctn

SEQ ID NO: 3104 - DNA, 551 bp, Homo sapiens
  misc_feature (154)..(154): n equals a,t,g, or c
  misc_feature (174)..(174): n equals a,t,g, or c
  misc_feature (180)..(180): n equals a,t,g, or c
  misc_feature (272)..(272): n equals a,t,g, or c
  misc_feature (276)..(276): n equals a,t,g, or c
  misc_feature (294)..(294): n equals a,t,g, or c
  misc_feature (299)..(299): n equals a,t,g, or c
  misc_feature (321)..(321): n equals a,t,g, or c
  misc_feature (379)..(379): n equals a,t,g, or c
  misc_feature (392)..(392): n equals a,t,g, or c
  misc_feature (411)..(411): n equals a,t,g, or c
  misc_feature (437)..(437): n equals a,t,g, or c
  misc_feature (444)..(444): n equals a,t,g, or c
  misc_feature (446)..(446): n equals a,t,g, or c
  misc_feature (450)..(450): n equals a,t,g, or c
  misc_feature (462)..(462): n equals a,t,g, or c
  misc_feature (465)..(465): n equals a,t,g, or c
  misc_feature (519)..(519): n equals a,t,g, or c
  misc_feature (540)..(540): n equals a,t,g, or c
  misc_feature (545)..(545): n equals a,t,g, or c
  misc_feature (551)..(551): n equals a,t,g, or c
gctcgtgccgaattcggcacgaggaaagtcttttaggtgactttcagaaccagaatcacatatcatctgcagagctgttaacctcattttccaaattcctatgacacttttcacaagagttatgtttgccccagagatcttaattcagaactanggtccttcaccttttaagangtgganctacatgtgattttcctgacacttgagatcatttgatggtgttaaaatgctggggtaggggttgggaaatgggaaatgggagatgggggtangttnacaaaaaaagttcttgantaaangctaggaagaaaactatctgangttacttatttgcctaatccttctatattagaattaggaaatgtaaattagtctccanatccttgtgttgncttcttaatcccaccgtanccatgacagacaaattctcaccctcncctgctnantgtntgcaagttaganaanaccccaaatccccccccttttggaacttcaaattgggggggtcccaaaacaccnccggttcatatttctaaacantccanaatccn

SEQ ID NO: 3105 - DNA, 368 bp, Homo sapiens
  misc_feature (101)..(101): n equals a,t,g, or c
  misc_feature (226)..(226): n equals a,t,g, or c
  misc_feature (251)..(251): n equals a,t,g, or c
  misc_feature (272)..(272): n equals a,t,g, or c
  misc_feature (288)..(288): n equals a,t,g, or c
  misc_feature (340)..(340): n equals a,t,g, or c
  misc_feature (348)..(348): n equals a,t,g, or c
  misc_feature (354)..(354): n equals a,t,g, or c
ggtcatgtgttctcttttgaactgttcagcttttccgtaggggggaagatcagtcatgagaagcagaaagtaactctaccttccttgatgccagggagctntgatgagaaagaaatcctaggaaaggaccagttccccttattccaacttagcatcactgaatttgtctttggcaaatgggctttcctcaagtcctgctctgtgtttcagcaaggacaggaagtanactgcctcttgtgttacttgaagancagtgttaggggagtgcctangggctcaaggaagtantcttctttctgttaacggttgcccacaggtcagggacctttattaagcaaanatttcctnaaattnttcctggggaaccc

SEQ ID NO: 3106 - DNA, 348 bp, Homo sapiens
  misc_feature (24)..(24): n equals a,t,g, or c
  misc_feature (33)..(33): n equals a,t,g, or c
  misc_feature (51)..(51): n equals a,t,g, or c
  misc_feature (62)..(62): n equals a,t,g, or c
  misc_feature (71)..(71): n equals a,t,g, or c
  misc_feature (81)..(81): n equals a,t,g, or c
  misc_feature (91)..(91): n equals a,t,g, or c
  misc_feature (124)..(124): n equals a,t,g, or c
  misc_feature (133)..(133): n equals a,t,g, or c
  misc_feature (193)..(193): n equals a,t,g, or c
  misc_feature (201)..(201): n equals a,t,g, or c
  misc_feature (205)..(205): n equals a,t,g, or c
  misc_feature (216)..(216): n equals a,t,g, or c
  misc_feature (224)..(224): n equals a,t,g, or c
  misc_feature (231)..(231): n equals a,t,g, or c
  misc_feature (236)..(236): n equals a,t,g, or c
  misc_feature (241)..(241): n equals a,t,g, or c
  misc_feature (247)..(247): n equals a,t,g, or c
  misc_feature (273)..(273): n equals a,t,g, or c
  misc_feature (275)..(275): n equals a,t,g, or c
  misc_feature (298)..(298): n equals a,t,g, or c
  misc_feature (303)..(303): n equals a,t,g, or c
  misc_feature (317)..(317): n equals a,t,g, or c
gcggcacgagtgtagttgtatatncacgatgtnatttaatgctaaacagtncttacagcttnagggaaaancataaatttntagttaaatngccttcatactgtggatttttcctcctactaantaatatgtnggaaattaagattacacatgttctgggtcccctcaaaccctacattgctacagttcactntagcaacncatntcgtggtgatngggggatntacgtanaaacntatanaagttnttttaaattttatttattaaggaagnanttcccccaatctgcataaatganttatnactgattttatcanaatatctgtattaaaggttccagaaaaaccc

SEQ ID NO: 3107 - DNA, 564 bp, Homo sapiens
  misc_feature (180)..(180): n equals a,t,g, or c
  misc_feature (266)..(266): n equals a,t,g, or c
  misc_feature (272)..(272): n equals a,t,g, or c
  misc_feature (284)..(284): n equals a,t,g, or c
  misc_feature (310)..(310): n equals a,t,g, or c
  misc_feature (314)..(314): n equals a,t,g, or c
  misc_feature (319)..(319): n equals a,t,g, or c
  misc_feature (337)..(337): n equals a,t,g, or c
  misc_feature (351)..(351): n equals a,t,g, or c
  misc_feature (366)..(366): n equals a,t,g, or c
  misc_feature (400)..(400): n equals a,t,g, or c
  misc_feature (432)..(432): n equals a,t,g, or c
  misc_feature (439)..(439): n equals a,t,g, or c
  misc_feature (478)..(478): n equals a,t,g, or c
  misc_feature (483)..(483): n equals a,t,g, or c
  misc_feature (509)..(509): n equals a,t,g, or c
  misc_feature (525)..(525): n equals a,t,g, or c
  misc_feature (558)..(558): n equals a,t,g, or c
gtgcttttcacagtaggcctgatgactaaaagatatgctttattacacgctattttcacctcttgaaagtcaaaggtgatgattaatttcatttagcaggggaagtggaataatatcttttgaaataactaagtccactaaattatacagtatgctattctggttctaagtacatattantcccttggcaaatctgttctttcaaagcataccttccccaaatgagcctacctacttcttaaaaaacatattacacaatgtggtantaatangtgttaaggaangtaattttttccatagtgggtatgcnaacntttcntttgaaatttttccttanatttaaagactttngggaaataaaaattngcagccaaccaaattccttgaatagaattttatncctactttggggaaaaaattattttttgtttnccaaaanttatttttagttattcctttagaaaatttgaaattttancccantttagggcttttaattggaacctttncccaaagttgaaaccntttaccttgaaacccccaatttttttttttttnccattg

SEQ ID NO: 3108 - DNA, 115 bp, Homo sapiens
  misc_feature (5)..(5): n equals a,t,g, or c
  misc_feature (10)..(10): n equals a,t,g, or c
  misc_feature (44)..(44): n equals a,t,g, or c
  misc_feature (47)..(47): n equals a,t,g, or c
  misc_feature (104)..(105): n equals a,t,g, or c
  misc_feature (112)..(112): n equals a,t,g, or c
gcggnacganggggggcccggtacccaattcgccctatagtgantcntattacaattcactggccgtctttttacaacgtcgtgactgggaaaaccaaaacttnngggatcnaaa

SEQ ID NO: 3109 - DNA, 591 bp, Homo sapiens
  misc_feature (293)..(293): n equals a,t,g, or c
  misc_feature (326)..(326): n equals a,t,g, or c
  misc_feature (345)..(345): n equals a,t,g, or c
  misc_feature (393)..(393): n equals a,t,g, or c
  misc_feature (432)..(432): n equals a,t,g, or c
  misc_feature (447)..(447): n equals a,t,g, or c
  misc_feature (454)..(454): n equals a,t,g, or c
  misc_feature (484)..(484): n equals a,t,g, or c
  misc_feature (518)..(518): n equals a,t,g, or c
  misc_feature (527)..(527): n equals a,t,g, or c
  misc_feature (563)..(564): n equals a,t,g, or c
  misc_feature (578)..(578): n equals a,t,g, or c
gtgaatcactgaacactaagctgtgttttcttgaagccctgcaaactgaagctagacaacttaaacttcagaagaaataacagcaacctatttacatatataagctactttcatacctgactggtgatgtatggacatcagagtaatatggcctatatcagtttttcatgattgttggttttttattgttgttttttctccctacctctccttattttctcttcctaggacgtgagacttcacaacctgctaaaaatgagcttccctaataatatggggacctacctgtctangaacaaaccatcctagccattaaagattagatnaacctgagaccagagatcnttttcttctaaaatactttctccgaaagatcttaaaaagacaaggganaatgttgaaggaaaataatcttgggacccactctctgancaaaggaaatcactnggactgntaggaactctcctcttccatatccctcccnaggatcttctatctctggaagtataaccaattcntggttcttncttacgaatccccatcatttcctgtccttcccttgnnaccttcctcctttnaccccttccatta

SEQ ID NO: 3110 - DNA, 104 bp, Homo sapiens
  misc_feature (20)..(20): n equals a,t,g, or c
  misc_feature (33)..(34): n equals a,t,g, or c
  misc_feature (39)..(39): n equals a,t,g, or c
  misc_feature (69)..(69): n equals a,t,g, or c
ctcttatatttcccagtctnatctgctggaatnnctatnctactatcagaccgaaatctctacaaaatnttcttcgaccccgtgggaagaagatacccattcta

SEQ ID NO: 3111 - DNA, 79 bp, Homo sapiens
  misc_feature (11)..(11): n equals a,t,g, or c
  misc_feature (16)..(16): n equals a,t,g, or c
  misc_feature (34)..(34): n equals a,t,g, or c
  misc_feature (54)..(54): n equals a,t,g, or c
  misc_feature (76)..(76): n equals a,t,g, or c
ggcctcttganctatnccaatgagacgctggtantcactaagtatgattttttnaaagtattgttttataaaacanaaa

SEQ ID NO: 3112 - DNA, 734 bp, Homo sapiens
  misc_feature (252)..(252): n equals a,t,g, or c
  misc_feature (295)..(295): n equals a,t,g, or c
  misc_feature (313)..(315): n equals a,t,g, or c
  misc_feature (321)..(321): n equals a,t,g, or c
  misc_feature (335)..(335): n equals a,t,g, or c
  misc_feature (337)..(337): n equals a,t,g, or c
  misc_feature (351)..(351): n equals a,t,g, or c
  misc_feature (366)..(369): n equals a,t,g, or c
  misc_feature (419)..(419): n equals a,t,g, or c
  misc_feature (435)..(435): n equals a,t,g, or c
  misc_feature (443)..(443): n equals a,t,g, or c
  misc_feature (449)..(449): n equals a,t,g, or c
  misc_feature (452)..(452): n equals a,t,g, or c
  misc_feature (469)..(469): n equals a,t,g, or c
  misc_feature (474)..(476): n equals a,t,g, or c
  misc_feature (484)..(484): n equals a,t,g, or c
  misc_feature (491)..(491): n equals a,t,g, or c
  misc_feature (526)..(527): n equals a,t,g, or c
  misc_feature (537)..(537): n equals a,t,g, or c
  misc_feature (552)..(552): n equals a,t,g, or c
  misc_feature (564)..(565): n equals a,t,g, or c
  misc_feature (578)..(578): n equals a,t,g, or c
  misc_feature (581)..(581): n equals a,t,g, or c
  misc_feature (587)..(587): n equals a,t,g, or c
  misc_feature (589)..(589): n equals a,t,g, or c
  misc_feature (619)..(619): n equals a,t,g, or c
  misc_feature (640)..(640): n equals a,t,g, or c
  misc_feature (644)..(644): n equals a,t,g, or c
  misc_feature (668)..(668): n equals a,t,g, or c
  misc_feature (681)..(681): n equals a,t,g, or c
ggattctttggcttataagacacagcatatagaaaatttagttattcccattaggctgccttggtcctagagaattaatcatttaaaagaacctctcattaaatatgaaagattttataatttgcaaacacttaagctggtatgcaaggcaaatgttcaaagaatttttcagaatttgttatttaaaccattaattagaaactacttatttctgaaatttggcataggcttgaaggaaatttgggttttaancattttattcctttttactgtctaccaaagggggcttaccccngccaaaaattttgttttnnnaatccnaacccaagggcatnanaaaggaattttttngtttggttacctttnnnnaaaaaaaccccaaattttttttttttgaaaaaattttttctttttttttnaaaaaagcccctttantttttttnaaatanggntttttttaaaaattggnccccnnnttttttantttaaantttttttaaaaaaaaaaaattttaattgttttttnnaaaaaatttnccccccctttaaaantttttccccacnnaggtttttccccnggntttttnanaaaaaaatttttttttttaaaaaatttttnttttttggggggtttttttantttnccccttccctttccccaaattttnggtttaacccctnttttttcccccccaaaatttccccttccccgtttccccaaaaatttcccccca

SEQ ID NO: 3113 - DNA, 361 bp, Homo sapiens
  misc_feature (196)..(196): n equals a,t,g, or c
  misc_feature (208)..(208): n equals a,t,g, or c
  misc_feature (229)..(229): n equals a,t,g, or c
  misc_feature (238)..(238): n equals a,t,g, or c
  misc_feature (250)..(250): n equals a,t,g, or c
  misc_feature (253)..(253): n equals a,t,g, or c
  misc_feature (257)..(257): n equals a,t,g, or c
  misc_feature (301)..(301): n equals a,t,g, or c
  misc_feature (332)..(332): n equals a,t,g, or c
  misc_feature (338)..(338): n equals a,t,g, or c
  misc_feature (343)..(343): n equals a,t,g, or c
  misc_feature (347)..(347): n equals a,t,g, or c
gctcgtgccgaattcggcacgagcggccctgcctcccggaccaccctgcggggcgcaccaccgatctggggtgcggggctcggcctccctgcgctcctggctgacggtgtgaccttgggaccgagacgtgcaactgtccaaggctctgtcctatgccctgcgccatggggccttgaactggggcttcccatggganctggtacctaanttggagctgatgcccctgganacaccgcangccctgcccccnatnctantccatggtacattctggaacactggccatccatcctactcaaangcctgtcctgccagggaaggacccacattcnccttgncccangaantgcctggaaaaccc

SEQ ID NO: 3114 - DNA, 61 bp, Homo sapiens
  misc_feature (44)..(45): n equals a,t,g, or c
  misc_feature (53)..(53): n equals a,t,g, or c
  misc_feature (55)..(55): n equals a,t,g, or c
  misc_feature (60)..(60): n equals a,t,g, or c
gcggcacgaggtaactagtcttgagtttttttttttttttttanntttaaatncnttttnc

SEQ ID NO: 3115 - DNA, 347 bp, Homo sapiens
  misc_feature (51)..(51): n equals a,t,g, or c
  misc_feature (108)..(108): n equals a,t,g, or c
  misc_feature (255)..(255): n equals a,t,g, or c
  misc_feature (265)..(265): n equals a,t,g, or c
  misc_feature (274)..(274): n equals a,t,g, or c
  misc_feature (281)..(281): n equals a,t,g, or c
  misc_feature (338)..(338): n equals a,t,g, or c
gcttacgtttatacttgagaaagtgttgatacagtggcctgagtaggtttnggatttggtttgcagactggcttacagccctctggtaaaagaattgcagactttcangtgggtaggatgagggattgctgctgctctaggtgcaaatggattctatttatgtggttttgaataataatctgggatgtttgcaaactttacagttcattatctttccctataaacaagatgggttggggttttctagctctacantgagcattantccaaccangtttgantacagctggagcaaaaaaattacttgtttttttttttttaaatgggcaaggaacaanttttttttt

SEQ ID NO: 3116 - DNA, 419 bp, Homo sapiens
  misc_feature (137)..(137): n equals a,t,g, or c
  misc_feature (265)..(265): n equals a,t,g, or c
  misc_feature (268)..(268): n equals a,t,g, or c
  misc_feature (274)..(274): n equals a,t,g, or c
  misc_feature (325)..(325): n equals a,t,g, or c
  misc_feature (403)..(403): n equals a,t,g, or c
  misc_feature (407)..(407): n equals a,t,g, or c
  misc_feature (417)..(417): n equals a,t,g, or c
  misc_feature (419)..(419): n equals a,t,g, or c
gatctaatatctttggtccagtttgagattcgacttaaaaagaatccagaagacacttttgcagagacacagaaagtaacaaagtacagatgtcatagaaattgtagtccagcagtaccaggggagatgtactgggnccaaagactctgatcctctagactacctgtagagcaagatatctttccatttatatcatctccatatggtgactagtactctatgatgcataggttaaatccgaggttccctagctttggaatattanatnctattnaaagaaatgagattgggaacattaatgtcacaaaacttatttgctcagganttgggcagaactgctctcttaaccttaggctgtaccacctggctgaagtttagtcctcctacctccttggaatgcccncctncttccccccntn

SEQ ID NO: 3117 - DNA, 103 bp, Homo sapiens
  misc_feature (24)..(24): n equals a,t,g, or c
  misc_feature (44)..(44): n equals a,t,g, or c
  misc_feature (89)..(89): n equals a,t,g, or c
  misc_feature (91)..(91): n equals a,t,g, or c
  misc_feature (99)..(99): n equals a,t,g, or c
taccgcctggtaaattttccaggnatttaagtcccttttccttntggtgaaataccccccttgttaaaatttcgcaacaaaaaaaagcnancccgttcnaaac

SEQ ID NO: 3118 - DNA, 153 bp, Homo sapiens
  misc_feature (1)..(1): n equals a,t,g, or c
  misc_feature (10)..(10): n equals a,t,g, or c
  misc_feature (28)..(28): n equals a,t,g, or c
  misc_feature (35)..(35): n equals a,t,g, or c
  misc_feature (50)..(50): n equals a,t,g, or c
  misc_feature (106)..(106): n equals a,t,g, or c
  misc_feature (119)..(119): n equals a,t,g, or c
  misc_feature (133)..(133): n equals a,t,g, or c
  misc_feature (148)..(148): n equals a,t,g, or c
  misc_feature (151)..(151): n equals a,t,g, or c
ntttattggntgtacttgtcaaccaaanaacatanctcttaaaccagaantttaagaatcttaatgggaaatttttggacttgaatctgggttcaaaatttgggtngccctttccgttncaagtttcttaaantttctccggttttcnaanaa

SEQ ID NO: 3119 - DNA, 472 bp, Homo sapiens
  misc_feature (1)..(2): n equals a,t,g, or c
  misc_feature (6)..(6): n equals a,t,g, or c
  misc_feature (23)..(23): n equals a,t,g, or c
  misc_feature (29)..(29): n equals a,t,g, or c
  misc_feature (111)..(111): n equals a,t,g, or c
  misc_feature (247)..(247): n equals a,t,g, or c
  misc_feature (347)..(347): n equals a,t,g, or c
  misc_feature (435)..(435): n equals a,t,g, or c
  misc_feature (439)..(439): n equals a,t,g, or c
  misc_feature (442)..(442): n equals a,t,g, or c
  misc_feature (452)..(452): n equals a,t,g, or c
  misc_feature (460)..(460): n equals a,t,g, or c
nngacntgctgatattcctcagngacgtntaaggtagaacgaaaacacctttatgagaaccccatccatggaatgctactccattactgactttctcaaatgaattgagangtctcaaaggcagagactatgagttactcatttttgtatctcctagcagagcacagctctgttgcggatgggacccctcacaataatgtttacatagtttaattaaattcagaaagttatcattcatttgcagaanaaattactggtaatgaagtactatgcagtgttccattctgcagaagactaatacctgctaaaacatttctgtttaatatttgataacaaattatcccttnccaaaggaactattgctaacttccccaccccctgacatttaaccctccagatacctcctgggacaatggttatggcaactggaatctntatntcncaaatgaaanccctcccncgaattgaatta

SEQ ID NO: 3120 - DNA, 103 bp, Homo sapiens
  misc_feature (48)..(48): n equals a,t,g, or c
  misc_feature (80)..(80): n equals a,t,g, or c
  misc_feature (83)..(83): n equals a,t,g, or c
  misc_feature (97)..(97): n equals a,t,g, or c
  misc_feature (102)..(102): n equals a,t,g, or c
gtcggcacgagggggggcccggtacccaattcgccctatagtgagtcntattacaattcactggccgtcgttttacaacntcntgactgggaaaacntaaant

SEQ ID NO: 3121 - DNA, 183 bp, Homo sapiens
  misc_feature (5)..(6): n equals a,t,g, or c
  misc_feature (9)..(9): n equals a,t,g, or c
  misc_feature (72)..(72): n equals a,t,g, or c
  misc_feature (80)..(80): n equals a,t,g, or c
  misc_feature (130)..(131): n equals a,t,g, or c
  misc_feature (149)..(149): n equals a,t,g, or c
  misc_feature (154)..(154): n equals a,t,g, or c
  misc_feature (177)..(177): n equals a,t,g, or c
gcgcnnccncggtggcggccgctctatattaatggatcgcccgggctggatgaatgcagcccgagccacttnactaccanacgccttagtccaaaccatttacccaaataaagtataggcgattggaaanngaaaccgtggcgcaatanatatngtaccgcaagggaaagatgaganaattat

SEQ ID NO: 3122 - DNA, 157 bp, Homo sapiens
  misc_feature (2)..(2): n equals a,t,g, or c
  misc_feature (26)..(26): n equals a,t,g, or c
  misc_feature (36)..(36): n equals a,t,g, or c
  misc_feature (38)..(38): n equals a,t,g, or c
  misc_feature (65)..(65): n equals a,t,g, or c
  misc_feature (102)..(102): n equals a,t,g, or c
  misc_feature (104)..(104): n equals a,t,g, or c
  misc_feature (113)..(113): n equals a,t,g, or c
  misc_feature (142)..(142): n equals a,t,g, or c
cnttttcaggcctcacacaatttttntattaatgancntgatcggacccaagaaaaaacaaatcncctccatgggggttccaattttcctttctccaggccnantttaaaaanaaaccccctccccccgaggttcccctttnaccttcccaagttcc

SEQ ID NO: 3123 - DNA, 77 bp, Homo sapiens
  misc_feature (60)..(60): n equals a,t,g, or c
  misc_feature (63)..(63): n equals a,t,g, or c
  misc_feature (66)..(66): n equals a,t,g, or c
  misc_feature (71)..(71): n equals a,t,g, or c
  misc_feature (73)..(73): n equals a,t,g, or c
gggaaatggagacggtcatccctgtagatgtcatgatgcaaggggggataaaggtcaccnttncangcctngntgga

SEQ ID NO: 3124 - DNA, 112 bp, Homo sapiens
  misc_feature (6)..(6): n equals a,t,g, or c
  misc_feature (9)..(9): n equals a,t,g, or c
  misc_feature (36)..(36): n equals a,t,g, or c
  misc_feature (42)..(42): n equals a,t,g, or c
  misc_feature (58)..(58): n equals a,t,g, or c
  misc_feature (94)..(94): n equals a,t,g, or c
  misc_feature (104)..(104): n equals a,t,g, or c
ccttgnggnctcttaatcagaggcttccgcggggcntaacgntctaaattttagtggnttcccgggctgcaggaattcggcacggggccccccnggtcccccanaatttttt

SEQ ID NO: 3125 - DNA, 530 bp, Homo sapiens
  misc_feature (19)..(19): n equals a,t,g, or c
  misc_feature (22)..(22): n equals a,t,g, or c
  misc_feature (39)..(39): n equals a,t,g, or c
  misc_feature (52)..(52): n equals a,t,g, or c
  misc_feature (67)..(67): n equals a,t,g, or c
  misc_feature (173)..(173): n equals a,t,g, or c
  misc_feature (248)..(248): n equals a,t,g, or c
  misc_feature (283)..(283): n equals a,t,g, or c
  misc_feature (314)..(314): n equals a,t,g, or c
  misc_feature (348)..(349): n equals a,t,g, or c
  misc_feature (379)..(379): n equals a,t,g, or c
  misc_feature (383)..(383): n equals a,t,g, or c
  misc_feature (390)..(390): n equals a,t,g, or c
  misc_feature (393)..(393): n equals a,t,g, or c
  misc_feature (469)..(469): n equals a,t,g, or c
  misc_feature (473)..(474): n equals a,t,g, or c
  misc_feature (506)..(506): n equals a,t,g, or c
  misc_feature (530)..(530): n equals a,t,g, or c
aggtcccagccccaccacngangcggccgctctactctnaatggatcccccnggctgcacgaattcngcacgagcctctgtatagcctcccagggctctccaaggaagatggctgagctccatgggcagggtgttctcacaccaccacagatgggacgtgtgcattctccttnagacctccatgcaggccgtccccctgcagccgacctgcccccccgtcctatgttgcacatggtgggccagagtcnctggctggtagaatgcttccggggctgtgtttacnggcgtggtgtcatgtgtgaacatcattccangaaaaggggcctcctcaagggtaagtggggtctnnatgttaacctcgcagatggtggccgcaccnggantagaatnctngggctgtcaccacggacatacatccttcttccgagcctcgtgatctctccttccctgcctccaaggggaagctgcncccnnatctggccatgctcctgggcctccactatgtnggtctacatcggccttggaaaaan

SEQ ID NO: 3126 - DNA, 549 bp, Homo sapiens
  misc_feature (211)..(211): n equals a,t,g, or c
  misc_feature (237)..(237): n equals a,t,g, or c
  misc_feature (244)..(244): n equals a,t,g, or c
  misc_feature (284)..(284): n equals a,t,g, or c
  misc_feature (287)..(287): n equals a,t,g, or c
  misc_feature (289)..(289): n equals a,t,g, or c
  misc_feature (291)..(291): n equals a,t,g, or c
  misc_feature (319)..(319): n equals a,t,g, or c
  misc_feature (341)..(341): n equals a,t,g, or c
  misc_feature (343)..(343): n equals a,t,g, or c
  misc_feature (360)..(360): n equals a,t,g, or c
  misc_feature (380)..(381): n equals a,t,g, or c
  misc_feature (406)..(406): n equals a,t,g, or c
  misc_feature (408)..(408): n equals a,t,g, or c
  misc_feature (428)..(428): n equals a,t,g, or c
  misc_feature (445)..(446): n equals a,t,g, or c
  misc_feature (494)..(494): n equals a,t,g, or c
  misc_feature (500)..(500): n equals a,t,g, or c
  misc_feature (511)..(511): n equals a,t,g, or c
  misc_feature (519)..(519): n equals a,t,g, or c
  misc_feature (547)..(547): n equals a,t,g, or c
gcggtcctcaggtctcctccctggcaagatcagccagagggaatgcgcctctgccacatctcctcgtccaccccctacccccggctccgttgtcctttccctcccgggacccgccgcgcgcccgccccgcgcgcccgcagtccccctctcactttctcccaacctcgccctcccacagacgtgcccggtgccggtaggctcctctccgcanggcaactggctttgggaccggatganatttgangcagcagcgaacctgggaccgggcttgtcgtgactctggntcncntnctgccccggcagcctttgtgacacgganccctccggctgcctgctcctcncncctcgcatgggtctgcnacattgtggcaattccaganncttttattgtttgaaaacagatacncncaattggctttgccgtgcangaatttaaaaatttcanntcaactctgacactcatctctctgcttgtctctgcaaatcagcctcanaatganttctgattttntcaaacangcgttatttatttaaaaattttccaacntc

SEQ ID NO: 3127 - DNA, 503 bp, Homo sapiens
  misc_feature (128)..(128): n equals a,t,g, or c
  misc_feature (148)..(148): n equals a,t,g, or c
  misc_feature (153)..(153): n equals a,t,g, or c
  misc_feature (167)..(167): n equals a,t,g, or c
  misc_feature (283)..(283): n equals a,t,g, or c
  misc_feature (347)..(347): n equals a,t,g, or c
  misc_feature (374)..(374): n equals a,t,g, or c
  misc_feature (380)..(380): n equals a,t,g, or c
  misc_feature (450)..(450): n equals a,t,g, or c
  misc_feature (459)..(459): n equals a,t,g, or c
  misc_feature (494)..(494): n equals a,t,g, or c
  misc_feature (498)..(498): n equals a,t,g, or c
  misc_feature (501)..(501): n equals a,t,g, or c
gctcggatgacaccctggcctgaactgaggagatgaccagggatgctgggctgggccctctttccctgcgagacgcacacagctgagcacttagcaggcaccgccacgtcccagcatccctggagcangagccccgccacagccttcnggacngaaattttgggatnttcccaagccgaccttccctccgccttctcccacatgaggccatctcaggagatggaaggcttggccagcgccaagtaaacagggtacctcaagccccatttcctcacactaaganggcagactgtgaattgactgggttgagaccaaaccggtccctgtcctctagttgccttctttanacctccgggcccatcctcatccctgantggccnaaccttgctttcctgggctttgccagatgcttggtttgttaagtttttaaatatatttttgttctttgtngaaaaaatntttttttttgcaaggggccccccaaggcttggganaaangtntc

SEQ ID NO: 3128 - DNA, 262 bp, Homo sapiens
  misc_feature (1)..(1): n equals a,t,g, or c
  misc_feature (28)..(28): n equals a,t,g, or c
  misc_feature (32)..(32): n equals a,t,g, or c
  misc_feature (55)..(55): n equals a,t,g, or c
  misc_feature (69)..(69): n equals a,t,g, or c
  misc_feature (109)..(109): n equals a,t,g, or c
  misc_feature (113)..(113): n equals a,t,g, or c
  misc_feature (117)..(117): n equals a,t,g, or c
  misc_feature (121)..(121): n equals a,t,g, or c
  misc_feature (128)..(128): n equals a,t,g, or c
  misc_feature (137)..(137): n equals a,t,g, or c
  misc_feature (148)..(148): n equals a,t,g, or c
  misc_feature (156)..(156): n equals a,t,g, or c
  misc_feature (160)..(160): n equals a,t,g, or c
  misc_feature (190)..(190): n equals a,t,g, or c
  misc_feature (213)..(213): n equals a,t,g, or c
  misc_feature (216)..(216): n equals a,t,g, or c
  misc_feature (228)..(228): n equals a,t,g, or c
  misc_feature (234)..(234): n equals a,t,g, or c
nataaagttagacgctatttctgatacntggnatatatgattcatccttaccatntatcctcatatcanacttttcaattatgtaggtggtttaatgtgcatgctgttnagtnaatncctnaggaagnatctggganaaatatccctnaatcctanagtnttcaataaaacatgcctgtgactcttatgnattaaaggtcattttgtcttctnatnaaatttctggcncatatnttctttccttgatttgcttaaacatttt

SEQ ID NO: 3129 - DNA, 100 bp, Homo sapiens
  misc_feature (17)..(17): n equals a,t,g, or c
  misc_feature (21)..(21): n equals a,t,g, or c
  misc_feature (53)..(53): n equals a,t,g, or c
  misc_feature (75)..(75): n equals a,t,g, or c
  misc_feature (86)..(86): n equals a,t,g, or c
tcaattggaattttttnggangaagatgaccaacggatttgactgctaatatnggattccttaccttttgttctnaataagtctcncataaatgagtgca

SEQ ID NO: 3130 - DNA, 176 bp, Homo sapiens
  misc_feature (21)..(21): n equals a,t,g, or c
  misc_feature (56)..(56): n equals a,t,g, or c
  misc_feature (70)..(71): n equals a,t,g, or c
  misc_feature (84)..(84): n equals a,t,g, or c
  misc_feature (131)..(131): n equals a,t,g, or c
  misc_feature (144)..(144): n equals a,t,g, or c
  misc_feature (170)..(170): n equals a,t,g, or c
  misc_feature (172)..(172): n equals a,t,g, or c
tttgtatgtggattttatttngttttactataataattgactaaccaggggtttangagaaaaattttgnnttccaaatgttgntcctcaccaggcctatatattcatcatttattggatattcattcttnagttaagaatacnggtattattattctgatctcaactcncntatt

SEQ ID NO: 3131 - DNA, 103 bp, Homo sapiens
  misc_feature (10)..(10): n equals a,t,g, or c
  misc_feature (100)..(103): n equals a,t,g, or c
gcggcacganggggggcccggtacccaattcgccctatagtgagtcgtattacaattcactggccgtcgttttacaacgtcgtgactgggaacccaaaannnn

SEQ ID NO: 3132 - DNA, 125 bp, Homo sapiens
  misc_feature (20)..(20): n equals a,t,g, or c
  misc_feature (47)..(47): n equals a,t,g, or c
  misc_feature (50)..(50): n equals a,t,g, or c
  misc_feature (58)..(58): n equals a,t,g, or c
  misc_feature (77)..(77): n equals a,t,g, or c
  misc_feature (125)..(125): n equals a,t,g, or c
aatattctttttggggagancggaatttaccccccttggcttaatcntanattcttgncgagattttcctggaaacntttgggggggggaaatttttggggttccaggtggcgggaacccggaan

SEQ ID NO: 3133 - DNA, 107 bp, Homo sapiens
  misc_feature (102)..(103): n equals a,t,g, or c
  misc_feature (105)..(107): n equals a,t,g, or c
gcggcacgagggggggcccggtacccaattcgccctatagtgagtcgtattacaattcactggccgtcgttttacaacgtcgtgactgggaaaacccaaatnncnnn

SEQ ID NO: 3134 - DNA, 72 bp, Homo sapiens
  misc_feature (65)..(65): n equals a,t,g, or c
  misc_feature (70)..(70): n equals a,t,g, or c
  misc_feature (72)..(72): n equals a,t,g, or c
gtctaggactggtttgggtgctttaaaatagatattgtagttcagtgcgtgctacatgggggganacggnan

SEQ ID NO: 3135 - DNA, 571 bp, Homo sapiens
  misc_feature (26)..(26): n equals a,t,g, or c
  misc_feature (82)..(82): n equals a,t,g, or c
  misc_feature (143)..(143): n equals a,t,g, or c
  misc_feature (230)..(230): n equals a,t,g, or c
  misc_feature (242)..(242): n equals a,t,g, or c
  misc_feature (256)..(256): n equals a,t,g, or c
  misc_feature (261)..(261): n equals a,t,g, or c
  misc_feature (266)..(266): n equals a,t,g, or c
  misc_feature (268)..(268): n equals a,t,g, or c
  misc_feature (277)..(277): n equals a,t,g, or c
  misc_feature (319)..(319): n equals a,t,g, or c
  misc_feature (390)..(390): n equals a,t,g, or c
  misc_feature (404)..(404): n equals a,t,g, or c
  misc_feature (430)..(430): n equals a,t,g, or c
  misc_feature (450)..(450): n equals a,t,g, or c
  misc_feature (478)..(478): n equals a,t,g, or c
  misc_feature (506)..(506): n equals a,t,g, or c
  misc_feature (521)..(521): n equals a,t,g, or c
  misc_feature (541)..(541): n equals a,t,g, or c
  misc_feature (556)..(556): n equals a,t,g, or c
gcccaagtaccaatgtacaaactgangagcttgggcaaagtgtgtcatttatcgttctggggctagggctgagtcaggtccnagaactgaccccctctcagagctgggacttcatcaaggctttggctctggtttgaacgtgntacttgcaagctcttgtcgtagcaccgggagactcctctcccagcaactcaggactcctaggaccagtgaggcctgtgctatcatanatgaattatgantggatccatctganctatnacaantnccacccatnaacaacactgcggtgctaagctaaaatgcctgaagaccatanacagagagaatgggatttttaaagaaacatttattaatacaaatcaaaacatgtgaagctcagaatgaatntgggaaacatgatngggaactgggattcactgaacacgtnctgcctaagtcaaagggcanaggtccggtgtgaccaacatcaggcgcntggggctctccatgggcactctgcactnaaacaaattgcgccnttctgtatggtgcttgttcntaccactgcccacanggctcttattatttt

SEQ ID NO: 3136 - DNA, 127 bp, Homo sapiens
  misc_feature (2)..(2): n equals a,t,g, or c
  misc_feature (7)..(7): n equals a,t,g, or c
  misc_feature (13)..(13): n equals a,t,g, or c
  misc_feature (21)..(21): n equals a,t,g, or c
  misc_feature (48)..(48): n equals a,t,g, or c
  misc_feature (103)..(103): n equals a,t,g, or c
  misc_feature (106)..(106): n equals a,t,g, or c
  misc_feature (114)..(114): n equals a,t,g, or c
  misc_feature (121)..(121): n equals a,t,g, or c
cncaaanttaccntgggaaanttccggaacaacgggctgtgagctccnccgaggtggcggccgctctagaactagtggatcccccgggctgcaggaattcggnacnaggccgtntatgtgnggtcaa

SEQ ID NO: 3137 - DNA, 99 bp, Homo sapiens
  misc_feature (7)..(7): n equals a,t,g, or c
  misc_feature (27)..(27): n equals a,t,g, or c
  misc_feature (48)..(48): n equals a,t,g, or c
  misc_feature (50)..(50): n equals a,t,g, or c
  misc_feature (53)..(53): n equals a,t,g, or c
  misc_feature (63)..(63): n equals a,t,g, or c
  misc_feature (70)..(70): n equals a,t,g, or c
  misc_feature (90)..(90): n equals a,t,g, or c
  misc_feature (92)..(92): n equals a,t,g, or c
cctggtnttacggagacttgcccgcgntaaatttctcaaaattcggcnanaanggccttgaantccaccnaaggtgtgcggccgctctangnactagtg

SEQ ID NO: 3138 - DNA, 99 bp, Homo sapiens
  misc_feature (2)..(2): n equals a,t,g, or c
  misc_feature (15)..(17): n equals a,t,g, or c
  misc_feature (23)..(23): n equals a,t,g, or c
  misc_feature (40)..(41): n equals a,t,g, or c
  misc_feature (51)..(51): n equals a,t,g, or c
  misc_feature (68)..(68): n equals a,t,g, or c
cnctggtttcctcgnnntaatgnccaaaattagggaaatnnggctggaggnccaccgaaggtgtgcanacgctctagaactagtggatcccccgggctg

SEQ ID NO: 3139 - DNA, 101 bp, Homo sapiens
  misc_feature (11)..(11): n equals a,t,g, or c
  misc_feature (16)..(16): n equals a,t,g, or c
  misc_feature (55)..(55): n equals a,t,g, or c
  misc_feature (72)..(73): n equals a,t,g, or c
ggaacaagganctganagctccaccgcggtgagcggccgctctagaactagtggntcccccgggctgcaggnncaaacccactccaccttactaccagaca

SEQ ID NO: 3140 - DNA, 157 bp, Homo sapiens
  misc_feature (1)..(1): n equals a,t,g, or c
  misc_feature (6)..(7): n equals a,t,g, or c
  misc_feature (22)..(23): n equals a,t,g, or c
  misc_feature (107)..(108): n equals a,t,g, or c
  misc_feature (113)..(113): n equals a,t,g, or c
  misc_feature (144)..(144): n equals a,t,g, or c
  misc_feature (154)..(154): n equals a,t,g, or c
nacaanngctggaactccaccnnggtgagcggccgctctagaactagtggatcccccgggctgcaggaattcgagcacgaggaggcgttcagctgcttcaagatgannctgancatctccttcccagccactggctgccaaaanctcattgaangtg

SEQ ID NO: 3141 - DNA, 414 bp, Homo sapiens
  misc_feature (2)..(2): n equals a,t,g, or c
  misc_feature (14)..(14): n equals a,t,g, or c
  misc_feature (25)..(25): n equals a,t,g, or c
  misc_feature (35)..(35): n equals a,t,g, or c
  misc_feature (47)..(47): n equals a,t,g, or c
  misc_feature (167)..(167): n equals a,t,g, or c
  misc_feature (200)..(200): n equals a,t,g, or c
  misc_feature (218)..(218): n equals a,t,g, or c
  misc_feature (221)..(221): n equals a,t,g, or c
  misc_feature (252)..(252): n equals a,t,g, or c
  misc_feature (268)..(268): n equals a,t,g, or c
  misc_feature (273)..(273): n equals a,t,g, or c
  misc_feature (345)..(345): n equals a,t,g, or c
  misc_feature (347)..(348): n equals a,t,g, or c
  misc_feature (395)..(395): n equals a,t,g, or c
  misc_feature (402)..(402): n equals a,t,g, or c
gnggtacgaggaantacataatcanacttgatcanactacgggcaanctcaaaacgtttactaattgccatcaactccaatttaaagattatggccacatactactttgaaaagtttgtagaatggtgtgttttataacccataaatggtgtgtgtctacataccanaatattttaggcaaagaaacatatttagatatnttttgacagaggatcatnagnatttatgtgtttgaatcttaatgagaagcangtaaattctaaattanaacangtgtaaagaaagaagggaatgttggttaagaatttaatctgaatttattcaagttacttttgttctactggnanncatagtactttagtttatatcttgcaagagataaccctgctgtgtancataatntgggtaaaatat

SEQ ID NO: 3142 - DNA, 112 bp, Homo sapiens
  misc_feature (22)..(22): n equals a,t,g, or c
  misc_feature (29)..(29): n equals a,t,g, or c
  misc_feature (56)..(56): n equals a,t,g, or c
  misc_feature (99)..(99): n equals a,t,g, or c
  misc_feature (103)..(103): n equals a,t,g, or c
agcctggtttctcgctttaacngccaaantagggaaaataggctggagctccaccnaggtggcgagccgctctagtactagtggatcccccgggctgcngganttcgggacg

SEQ ID NO: 3143 - DNA, 411 bp, Homo sapiens
  misc_feature (27)..(27): n equals a,t,g, or c
  misc_feature (109)..(109): n equals a,t,g, or c
  misc_feature (223)..(223): n equals a,t,g, or c
  misc_feature (235)..(235): n equals a,t,g, or c
  misc_feature (241)..(241): n equals a,t,g, or c
  misc_feature (246)..(247): n equals a,t,g, or c
  misc_feature (250)..(250): n equals a,t,g, or c
  misc_feature (254)..(254): n equals a,t,g, or c
  misc_feature (264)..(264): n equals a,t,g, or c
  misc_feature (273)..(273): n equals a,t,g, or c
  misc_feature (290)..(290): n equals a,t,g, or c
  misc_feature (339)..(339): n equals a,t,g, or c
  misc_feature (354)..(354): n equals a,t,g, or c
  misc_feature (361)..(361): n equals a,t,g, or c
  misc_feature (389)..(389): n equals a,t,g, or c
  misc_feature (405)..(405): n equals a,t,g, or c
ggccttgtcatcgcaagcatttgacanagacttgcttgtcttgggcctgtcacctcctgaaaggctgctttagctgtggatgcccttgattaagggagagagcgcctangagctgcctgccccacctggggtgacggctgtagggctgggtctatgttgcaagccctatatcctaccatgcagtggaaagtgcttagctctctccctcctgacctctgggcanccagtcatcaanacaganagacnntgncggnatgtgggcancatgcccangttccttgctgactcancacttatttctgtggttttaaaaaagaatttaatgtttttggttgtatntttttgggggggtgncggtggncagaaacatgggggtagttctgagttgntaagaaatgtttctgnaatcaa

SEQ ID NO: 3144 - DNA, 92 bp, Homo sapiens
  misc_feature (16)..(16): n equals a,t,g, or c
  misc_feature (26)..(26): n equals a,t,g, or c
  misc_feature (41)..(41): n equals a,t,g, or c
  misc_feature (64)..(64): n equals a,t,g, or c
  misc_feature (82)..(82): n equals a,t,g, or c
gctcgtgccgaattcngaacgaacanaacatttactgggangcatataatttctattcaaggtngtattgaatgatggttangttaatatta

SEQ ID NO: 3145 - DNA, 99 bp, Homo sapiens
  misc_feature (15)..(15): n equals a,t,g, or c
  misc_feature (45)..(45): n equals a,t,g, or c
  misc_feature (51)..(51): n equals a,t,g, or c
  misc_feature (56)..(56): n equals a,t,g, or c
  misc_feature (60)..(60): n equals a,t,g, or c
  misc_feature (75)..(75): n equals a,t,g, or c
  misc_feature (98)..(99): n equals a,t,g, or c
atacgtttcctgggncttgatcgcgctaaatcctcaaaattaggntaacanggccngcanctccaccaaggtgtntggccgctctaggaattagtggnn

SEQ ID NO: 3146 - DNA, 94 bp, Homo sapiens
  misc_feature (35)..(35): n equals a,t,g, or c
  misc_feature (39)..(39): n equals a,t,g, or c
  misc_feature (41)..(41): n equals a,t,g, or c
  misc_feature (49)..(49): n equals a,t,g, or c
  misc_feature (65)..(65): n equals a,t,g, or c
ccccactcagcccagtgtggggtagaagcaacgtntcantnatctccanctcccaggaacactangaatactttggttttagccaaatcatcac

SEQ ID NO: 3147 - DNA, 414 bp, Homo sapiens
  misc_feature (15)..(15): n equals a,t,g, or c
  misc_feature (20)..(20): n equals a,t,g, or c
  misc_feature (23)..(23): n equals a,t,g, or c
  misc_feature (37)..(37): n equals a,t,g, or c
  misc_feature (40)..(40): n equals a,t,g, or c
  misc_feature (131)..(131): n equals a,t,g, or c
  misc_feature (199)..(199): n equals a,t,g, or c
  misc_feature (237)..(237): n equals a,t,g, or c
  misc_feature (260)..(260): n equals a,t,g, or c
  misc_feature (264)..(264): n equals a,t,g, or c
  misc_feature (270)..(270): n equals a,t,g, or c
  misc_feature (275)..(275): n equals a,t,g, or c
  misc_feature (292)..(292): n equals a,t,g, or c
  misc_feature (296)..(296): n equals a,t,g, or c
  misc_feature (327)..(327): n equals a,t,g, or c
  misc_feature (343)..(343): n equals a,t,g, or c
  misc_feature (362)..(362): n equals a,t,g, or c
  misc_feature (372)..(372): n equals a,t,g, or c
  misc_feature (405)..(405): n equals a,t,g, or c
tattcagctctaccngcctnatntagggaaagctggngcncctgcaggtaccggtccggaattcccgggtcgacccacgcgtccgcccacgcgtccgtaatagtaagatgggcaaacctcctagtccttgncatttagaagctggctttttctaagacttctagtatgtatggaattctttgaaaattatattactttnatttctactgattttattttgggatactaaggatgtgnccaaatgattcgggatactaagnatgncatcgntttgnaaatcatctagtgatgnttgntatgacagattatcctcaaagaaacatcagngatgatctggaacctntaaaaacatctgttaggangcaaaaattnaaaggagcatttgggtaataatcttaacttttnggttcaggt

SEQ ID NO: 3148 - DNA, 62 bp, Homo sapiens
  misc_feature (1)..(1): n equals a,t,g, or c
  misc_feature (9)..(9): n equals a,t,g, or c
  misc_feature (23)..(23): n equals a,t,g, or c
  misc_feature (61)..(61): n equals a,t,g, or c
ntaaccacntaataatgggtttncacacatgataaaaaaaaaaaaaccttttacaaatgant

SEQ ID NO: 3149 - DNA, 379 bp, Homo sapiens
  misc_feature (70)..(70): n equals a,t,g, or c
  misc_feature (299)..(299): n equals a,t,g, or c
  misc_feature (353)..(353): n equals a,t,g, or c
  misc_feature (355)..(355): n equals a,t,g, or c
  misc_feature (362)..(362): n equals a,t,g, or c
  misc_feature (369)..(369): n equals a,t,g, or c
ataaaaataaataaaagggccccacaaaatccaggtagggggtaactgatgaactgattacctatttcanatttacgaatctcaaaactctaagatagagattatggcatctagtcaaatactatttgaaatactacgtactctcaaagttttaataacaaaatggtaaaaattatattgaaggttcagtctcctcagattcttaaagactttgtgaattatataggcaggatttaaggatagcatctccacctaatgaggtgttaacacttgcttgggttttaaaacgtccagatcanttcttgttgcttcctgaaagcatgggcttgggtctgccacatgtttggggcgcncnagcattntgggaanggaaaaaagg

SEQ ID NO: 3150 - DNA, 129 bp, Homo sapiens
  misc_feature (9)..(10): n equals a,t,g, or c
  misc_feature (58)..(58): n equals a,t,g, or c
  misc_feature (67)..(67): n equals a,t,g, or c
  misc_feature (85)..(85): n equals a,t,g, or c
  misc_feature (105)..(105): n equals a,t,g, or c
  misc_feature (113)..(113): n equals a,t,g, or c
tcttacganncccaatccggaaagctggtacgcctgcacgtaccggtccggtaattcncgggtcgantcaagcgtccgctcacgncggtcggaaggaaaatcccncaattcangaggaaactgaatcac

SEQ ID NO: 3151 - DNA, 259 bp, Homo sapiens
  misc_feature (25)..(25): n equals a,t,g, or c
  misc_feature (30)..(30): n equals a,t,g, or c
  misc_feature (35)..(35): n equals a,t,g, or c
  misc_feature (39)..(39): n equals a,t,g, or c
  misc_feature (41)..(41): n equals a,t,g, or c
  misc_feature (52)..(53): n equals a,t,g, or c
  misc_feature (61)..(61): n equals a,t,g, or c
  misc_feature (74)..(74): n equals a,t,g, or c
  misc_feature (90)..(90): n equals a,t,g, or c
  misc_feature (105)..(105): n equals a,t,g, or c
  misc_feature (120)..(120): n equals a,t,g, or c
  misc_feature (149)..(149): n equals a,t,g, or c
  misc_feature (156)..(156): n equals a,t,g, or c
  misc_feature (219)..(219): n equals a,t,g, or c
  misc_feature (221)..(221): n equals a,t,g, or c
  misc_feature (223)..(223): n equals a,t,g, or c
  misc_feature (242)..(242): n equals a,t,g, or c
  misc_feature (251)..(251): n equals a,t,g, or c
cccacgcgtccgtatatatgtgatnctgantgttnaaanancaactctattnnacccgtanaatgtactggatntcaacacacagtccanagacagtcattctancaaaagcttagtgtntccctataactgggtattctggtagggtnaagtaangcatcctattccatttcatgctgtggtaacagcaagataggagccgcacaggtcatagccagnantnggctatgcgtcccttcatntaatcccantactccta

SEQ ID NO: 3152 - DNA, 388 bp, Homo sapiens
  misc_feature (207)..(207): n equals a,t,g, or c
  misc_feature (260)..(260): n equals a,t,g, or c
  misc_feature (267)..(267): n equals a,t,g, or c
  misc_feature (274)..(274): n equals a,t,g, or c
  misc_feature (277)..(277): n equals a,t,g, or c
  misc_feature (302)..(302): n equals a,t,g, or c
  misc_feature (330)..(330): n equals a,t,g, or c
  misc_feature (361)..(361): n equals a,t,g, or c
  misc_feature (381)..(381): n equals a,t,g, or c
  misc_feature (385)..(385): n equals a,t,g, or c
cccacgcgtccgcccacttgagctcatttttgctcaaagaccaactctattaaacccttagaatgttctggatttcaacacacagtccacagacagccattctatcaaaagcttagtgttttccctatgactgggttttctggtaaggtgaactaaggcatccttttccatttcaggctgtggtaacagcagataacagccgcagangtcatagccagcacttttctatgcgtcccttcatttaatcccagtactcctangtggtanatctatnatnttggtccacatgaattattgaaaantctgtcctaaattttaaatggaacaaantatgggtttgcaatttactggtggtggttcncaggaaatactacgacaatngganttt

SEQ ID NO: 3153 - DNA, 439 bp, Homo sapiens
  misc_feature (231)..(231): n equals a,t,g, or c
  misc_feature (234)..(234): n equals a,t,g, or c
  misc_feature (306)..(306): n equals a,t,g, or c
  misc_feature (308)..(308): n equals a,t,g, or c
  misc_feature (325)..(325): n equals a,t,g, or c
  misc_feature (328)..(328): n equals a,t,g, or c
  misc_feature (331)..(331): n equals a,t,g, or c
  misc_feature (353)..(353): n equals a,t,g, or c
  misc_feature (358)..(358): n equals a,t,g, or c
  misc_feature (388)..(388): n equals a,t,g, or c
  misc_feature (410)..(410): n equals a,t,g, or c
  misc_feature (420)..(420): n equals a,t,g, or c
aggatatttagtatagcaatatctttggataaaataatcaacaaacaaaattatgttgttggaaaccagaaaacgacaccactgatgaatgtacttaggctacttaatcaagaaatagtcgcaatgattctacttctgtcttcttttttaaaaaaaatttaattagtttgttttattttagaatagcattactgattacctttcttccctggaaattaacacattcgttanaanacttaaggatgcatccaatgaaatactttagaattgaaaagaaggaaatgaattacttgaattctccagaantnttgtgtctattggtgcnccnacnccgtttaaatgctatattgccnctganaactgatgcccttttgtgaaacacactgtnacaggccccgtttacctccttnttttaattanaaaaaaaaaaggggggcgg

SEQ ID NO: 3154 - DNA, 79 bp, Homo sapiens
  misc_feature (59)..(59): n equals a,t,g, or c
  misc_feature (68)..(68): n equals a,t,g, or c
  misc_feature (71)..(71): n equals a,t,g, or c
  misc_feature (76)..(76): n equals a,t,g, or c
  misc_feature (78)..(78): n equals a,t,g, or c
cccacgcgtccgggtacacttaccttttttttttttttttaaattttcccccatccagnaaaacaacnttntaatntnt

SEQ ID NO: 3155 - DNA, 247 bp, Homo sapiens
  misc_feature (30)..(30): n equals a,t,g, or c
  misc_feature (38)..(38): n equals a,t,g, or c
  misc_feature (40)..(40): n equals a,t,g, or c
  misc_feature (67)..(68): n equals a,t,g, or c
  misc_feature (127)..(127): n equals a,t,g, or c
  misc_feature (142)..(144): n equals a,t,g, or c
  misc_feature (165)..(165): n equals a,t,g, or c
  misc_feature (184)..(184): n equals a,t,g, or c
  misc_feature (213)..(213): n equals a,t,g, or c
  misc_feature (226)..(226): n equals a,t,g, or c
  misc_feature (234)..(234): n equals a,t,g, or c
ccccattttataaaaaaggggaaaaaagcntgggggtntnacgggggccccccccaggggttaaccnnagatcccggggaaaatttcccccggggggttccggaaacccaacggccggttcccggcntaattcaatactaannnaaaaaaccccaaaccccaatnggaacccccttaaaccaanggggggggccctcctccaagcccctcccnaaaattggaaccncccggggnccgaacccaatgt

SEQ ID NO: 3156 - DNA, 485 bp, Homo sapiens
  misc_feature (250)..(250): n equals a,t,g, or c
  misc_feature (286)..(286): n equals a,t,g, or c
  misc_feature (334)..(334): n equals a,t,g, or c
  misc_feature (375)..(375): n equals a,t,g, or c
  misc_feature (417)..(418): n equals a,t,g, or c
  misc_feature (450)..(450): n equals a,t,g, or c
  misc_feature (469)..(469): n equals a,t,g, or c
  misc_feature (483)..(483): n equals a,t,g, or c
attggttgtgttttcaaccatcagatgttcctgggaaattgtcaaccctctgatgcagtagaaacctgtgtatttgatttgaacgatgaatccaaatggaaacccatgagtgaggaagcaattaaatctgtgtgtgctcctggagctacaacatcccttcctccctttccacctctgtgtgcatccacaattgaacgcgtcagtaacaagtaatgaaattgaaaatgcagctgaggctcctggtgtcagnaacacagggaagggatcttgggcctcactactggtntgggaaagaaccagctctcctacccttttatcacccagcttttgggcntcttatgaatttgaagcgttcaacaagttatatcagcgggnaatgaaaaatttccagaatgccatagggaagggctgttcctnnatggtcgcacatttaaaaggttccccaatacntttggtgttatagaaatgncagaaattgcattngc

SEQ ID NO: 3157 - DNA, 242 bp, Homo sapiens
  misc_feature (39)..(39): n equals a,t,g, or c
  misc_feature (52)..(52): n equals a,t,g, or c
  misc_feature (54)..(54): n equals a,t,g, or c
  misc_feature (60)..(60): n equals a,t,g, or c
  misc_feature (69)..(70): n equals a,t,g, or c
  misc_feature (76)..(76): n equals a,t,g, or c
  misc_feature (79)..(79): n equals a,t,g, or c
  misc_feature (92)..(92): n equals a,t,g, or c
  misc_feature (160)..(160): n equals a,t,g, or c
  misc_feature (210)..(210): n equals a,t,g, or c
  misc_feature (217)..(217): n equals a,t,g, or c
  misc_feature (223)..(223): n equals a,t,g, or c
  misc_feature (234)..(234): n equals a,t,g, or c
cccacgcgtccggccacgcgtccgctccagaatgaaaanaatttctacaccnanacttanacgacagtnnatgctnaantggcaattcctcntttaagctatttttcccaaccttcaggttggtcagccctcctgatcctcacaggtggataagtgaggnctaccagacaggggagcctaagaaacttggattgaccttctaatctaccnccttganttcagnacaccattacnatcgggga

SEQ ID NO: 3158 - DNA, 324 bp, Homo sapiens
  misc_feature (113)..(113): n equals a,t,g, or c
  misc_feature (119)..(119): n equals a,t,g, or c
  misc_feature (131)..(131): n equals a,t,g, or c
  misc_feature (173)..(173): n equals a,t,g, or c
  misc_feature (185)..(185): n equals a,t,g, or c
  misc_feature (198)..(198): n equals a,t,g, or c
  misc_feature (206)..(206): n equals a,t,g, or c
  misc_feature (216)..(216): n equals a,t,g, or c
  misc_feature (221)..(221): n equals a,t,g, or c
  misc_feature (277)..(277): n equals a,t,g, or c
  misc_feature (284)..(284): n equals a,t,g, or c
  misc_feature (288)..(288): n equals a,t,g, or c
  misc_feature (314)..(314): n equals a,t,g, or c
  misc_feature (321)..(321): n equals a,t,g, or c
accaagcacctcaagctgggaatggttgtgggaggaggaaagtaatcaagagatgtttcatatgaaaataacaatatctgcaatgagccttaaaggatgaacaatattcccanaaacanattttggggccnagatatgaagcatggaacaaaggaaataatattctgaacatnatggagaaagcntcattaaagtgcncagaagtngcaatattcntgaantgtttggggaaacaaacataccattgaatgtttctagaacctacaagggaccccgnaaacctngaanaatgaaaaagaataaggaaatccaanttccatnaaa

SEQ ID NO: 3159 - DNA, 99 bp, Homo sapiens
  misc_feature (10)..(10): n equals a,t,g, or c
  misc_feature (15)..(15): n equals a,t,g, or c
  misc_feature (35)..(36): n equals a,t,g, or c
  misc_feature (54)..(54): n equals a,t,g, or c
  misc_feature (56)..(56): n equals a,t,g, or c
  misc_feature (91)..(91): n equals a,t,g, or c
  misc_feature (93)..(93): n equals a,t,g, or c
gactgtcgcnccctntctccgttcaaaaaatgggnncctgggcccaaaagcaantntttggtccggaattcccgggtcgacccacgcgtgngngcccat

SEQ ID NO: 3160 - DNA, 105 bp, Homo sapiens
  misc_feature (3)..(3): n equals a,t,g, or c
  misc_feature (29)..(29): n equals a,t,g, or c
  misc_feature (33)..(33): n equals a,t,g, or c
  misc_feature (70)..(70): n equals a,t,g, or c
  misc_feature (78)..(78): n equals a,t,g, or c
  misc_feature (104)..(104): n equals a,t,g, or c
aangaagtcccccctaattaatatcggtncccngggaaaatttttaggggaaggtttttcggggtgtcantttttaangggcccatattttttacgggtgtaana

SEQ ID NO: 3161 - DNA, 274 bp, Homo sapiens
  misc_feature (1)..(1): n equals a,t,g, or c
  misc_feature (6)..(6): n equals a,t,g, or c
  misc_feature (9)..(10): n equals a,t,g, or c
  misc_feature (72)..(72): n equals a,t,g, or c
  misc_feature (107)..(107): n equals a,t,g, or c
  misc_feature (111)..(111): n equals a,t,g, or c
  misc_feature (125)..(125): n equals a,t,g, or c
  misc_feature (142)..(142): n equals a,t,g, or c
  misc_feature (161)..(161): n equals a,t,g, or c
  misc_feature (222)..(222): n equals a,t,g, or c
  misc_feature (233)..(233): n equals a,t,g, or c
  misc_feature (252)..(252): n equals a,t,g, or c
  misc_feature (257)..(258): n equals a,t,g, or c
nggganagnnggtacgcctgcatgtaccggtccggaattcccgggtcgacccacgcgtccgatcctagcatnttaaaattcagttgttacattgggatcccacatantatnttgtcatctatatnagggtggatgagggctnaaatttcatcttgggtctnggaacagattcatgggcacacattttataacgattggtcctcagttctgcaaattaagaanctccaatcttnttgattccccaccggtagnaacannatgcattgagtaatat

SEQ ID NO: 3162 - DNA, 546 bp, Homo sapiens
  misc_feature (277)..(277): n equals a,t,g, or c
  misc_feature (298)..(298): n equals a,t,g, or c
  misc_feature (305)..(305): n equals a,t,g, or c
  misc_feature (312)..(312): n equals a,t,g, or c
  misc_feature (357)..(357): n equals a,t,g, or c
  misc_feature (374)..(374): n equals a,t,g, or c
  misc_feature (380)..(380): n equals a,t,g, or c
  misc_feature (394)..(394): n equals a,t,g, or c
  misc_feature (412)..(412): n equals a,t,g, or c
  misc_feature (422)..(422): n equals a,t,g, or c
  misc_feature (430)..(430): n equals a,t,g, or c
  misc_feature (442)..(442): n equals a,t,g, or c
  misc_feature (463)..(463): n equals a,t,g, or c
  misc_feature (467)..(467): n equals a,t,g, or c
  misc_feature (469)..(469): n equals a,t,g, or c
  misc_feature (493)..(493): n equals a,t,g, or c
  misc_feature (499)..(499): n equals a,t,g, or c
  misc_feature (505)..(505): n equals a,t,g, or c
  misc_feature (507)..(507): n equals a,t,g, or c
  misc_feature (523)..(523): n equals a,t,g, or c
cacgtttccttcatttttgtctatacagttcctcaagtaggatatttaagtaggaaacccttctttttaataaaatcatttgcagaattccaaaatacagaacagatgaaagcaggtctgctctgtgacctgtgatggagtcagtagggtcctcaaagcccagcctcttcagtcttccttcactggcccccagggagccctaggctaaacagaccatcatgtgaaaaccactgttacaggtgcgagaatggtgttttacagagcagccagaggagangcatagaaaaggaaacagatnaaatganaaactanttaggaaaagaaagctttcatgaacactttactatgttgccacangctttaaaggaaatccnccttangttattctcacaanaaaccctattttaaatcngttcattatncccatttnttaggcttgaanggaacacaatcctttggacangttnanttaactcttcccaggtctcacaantaaatntcaaangntgaatggaacccaggnttggccaactcaaggggtgttct

SEQ ID NO: 3163 - DNA, 548 bp, Homo sapiens
  misc_feature (323)..(323): n equals a,t,g, or c
  misc_feature (351)..(351): n equals a,t,g, or c
  misc_feature (415)..(415): n equals a,t,g, or c
  misc_feature (435)..(435): n equals a,t,g, or c
  misc_feature (449)..(449): n equals a,t,g, or c
  misc_feature (500)..(500): n equals a,t,g, or c
  misc_feature (533)..(533): n equals a,t,g, or c
gtgcttttctctttggcagagtttttctttgctctgatcttggagacatccctctgcctagtggaaacataaggaatacagaaagaatgcaaggagatagaccaacgtgagattctccttcatgcactcaagagaacgatgttgcaggaagagctagtctttcaggctgggctggtgacctgagaaagaatgtccagcttttcttctccacttggcatatcaagagccaggcgtggaaagactaaaacaggaaatgtttataaaaactgttcacggttcgccaacaagaaattggttaaagttagcaaaaatggggattgganattcccaggaaggaaagatgcccggggnttaattggggaaaaattgggaaccctgaaacccaggaaagttcaagccccaagcccaaccaggntttccctgtttttttccaantgaaagaaagtttnggggccccaaggaatgggatttggaaaaacttttccccccaagttcccccngaaacttaattaaatttggttgccttaaaggantcccaaaccccgggg

SEQ ID NO: 3164 - DNA, 298 bp, Homo sapiens
  misc_feature (65)..(65): n equals a,t,g, or c
  misc_feature (150)..(150): n equals a,t,g, or c
  misc_feature (166)..(166): n equals a,t,g, or c
  misc_feature (252)..(252): n equals a,t,g, or c
  misc_feature (263)..(263): n equals a,t,g, or c
  misc_feature (269)..(269): n equals a,t,g, or c
  misc_feature (286)..(286): n equals a,t,g, or c
  misc_feature (291)..(291): n equals a,t,g, or c
gtattatcaataacaataaaaataaagcaaatacattagacattaccctcccatcaggtgcacanaagaaagtcaaggctggaatttcattctcttatctaaatctctctgttctctctcagggaatattttcagagaataggtggaatnaagtgaggctgtgganaatgttatctataataggatagactttcttctgtgcacctgatgggagggtaatgtctaatgtattatcagtaacagtaaaaatanagcaaataccngaaaantaaataagggggggccnttctnaaaaatc

SEQ ID NO: 3165 - DNA, 215 bp, Homo sapiens
  misc_feature (6)..(7): n equals a,t,g, or c
  misc_feature (25)..(25): n equals a,t,g, or c
  misc_feature (84)..(84): n equals a,t,g, or c
  misc_feature (97)..(97): n equals a,t,g, or c
  misc_feature (108)..(108): n equals a,t,g, or c
  misc_feature (127)..(127): n equals a,t,g, or c
  misc_feature (145)..(145): n equals a,t,g, or c
  misc_feature (199)..(199): n equals a,t,g, or c
  misc_feature (206)..(206): n equals a,t,g, or c
  misc_feature (208)..(208): n equals a,t,g, or c
tccttnncgcactcctgtaccgaancattggagatccctcctgtgtgtaggttaaagagccaaaggccagatggttttgccgantcccccctgctantgtggggggancccactttctgcttgtgangccctgactgggaaccanttggcctggaatctgggaagggggctcccttcccacccttgttcttcctccccncccacangnaatcctg

SEQ ID NO: 3166 - DNA, 164 bp, Homo sapiens
  misc_feature (16)..(16): n equals a,t,g, or c
  misc_feature (44)..(44): n equals a,t,g, or c
  misc_feature (59)..(60): n equals a,t,g, or c
  misc_feature (82)..(82): n equals a,t,g, or c
  misc_feature (136)..(136): n equals a,t,g, or c
  misc_feature (148)..(148): n equals a,t,g, or c
  misc_feature (150)..(150): n equals a,t,g, or c
  misc_feature (163)..(163): n equals a,t,g, or c
cctttgggggggggcnccccaaccgggccccccttttgggcccnaaaaaaaaagatttnnaacccccgggggggtttccctnttgggggggaaaaaatttttccccccccccggggggggggttttccgtccaaanacccccaaaccngnccgggttttcctnc

SEQ ID NO: 3167 - DNA, 556 bp, Homo sapiens
  misc_feature (91)..(91): n equals a,t,g, or c
  misc_feature (110)..(110): n equals a,t,g, or c
  misc_feature (128)..(128): n equals a,t,g, or c
  misc_feature (175)..(175): n equals a,t,g, or c
  misc_feature (237)..(237): n equals a,t,g, or c
  misc_feature (256)..(256): n equals a,t,g, or c
  misc_feature (300)..(300): n equals a,t,g, or c
  misc_feature (304)..(304): n equals a,t,g, or c
  misc_feature (312)..(312): n equals a,t,g, or c
  misc_feature (327)..(327): n equals a,t,g, or c
  misc_feature (334)..(334): n equals a,t,g, or c
  misc_feature (391)..(391): n equals a,t,g, or c
  misc_feature (405)..(405): n equals a,t,g, or c
  misc_feature (415)..(415): n equals a,t,g, or c
  misc_feature (446)..(446): n equals a,t,g, or c
  misc_feature (512)..(512): n equals a,t,g, or c
  misc_feature (527)..(527): n equals a,t,g, or c
  misc_feature (531)..(531): n equals a,t,g, or c
  misc_feature (546)..(546): n equals a,t,g, or c
  misc_feature (554)..(554): n equals a,t,g, or c
aagagaaaggctctgagtaaataggcaaggcccggggtgagcaggggctggaatccgaaagtgggaggcggcggccccccaccctccatantccttccgccctctgctancaccgaagtttagcccangacgggggccgtttaagggcccggccctccgccgccgcgcacgtgancggcaccaggaagctggctgggcgcagccttccctgaagctcgctggcaccggccgcacgcntccatcccgggcctctgancggaaggggaaccgaagctagaaggaaggcgcattctgcccaangtcncggcagcngcagtttcttgggcnccaagtngtgattggaattactcccacgaagaaagggcgttaacaagaactcctaagcgaaaanaaaaacttgaacanttgttaaaancttaaggttttggggctttccttgaaatttncccccaagggggggttttttgaaaaaaattgggggaaccaaaagggtttccctttaaaaaaagggnaacccggtttaggcntttncccttgaaaggaaanggtttatncc

SEQ ID NO: 3168 - DNA, 112 bp, Homo sapiens
  misc_feature (47)..(47): n equals a,t,g, or c
  misc_feature (64)..(64): n equals a,t,g, or c
  misc_feature (79)..(79): n equals a,t,g, or c
  misc_feature (88)..(88): n equals a,t,g, or c
  misc_feature (112)..(112): n equals a,t,g, or c
ggaactctccgacaggcaatacctgctccagagagccaaatctggtnggctgaacttttatcangcctgcattgcagtntgatttctncctcttcgcagtcctgcttctgtn

SEQ ID NO: 3169 - DNA, 245 bp, Homo sapiens
  misc_feature (75)..(75): n equals a,t,g, or c
  misc_feature (133)..(133): n equals a,t,g, or c
  misc_feature (136)..(136): n equals a,t,g, or c
  misc_feature (199)..(199): n equals a,t,g, or c
  misc_feature (224)..(224): n equals a,t,g, or c
  misc_feature (229)..(229): n equals a,t,g, or c
  misc_feature (244)..(245): n equals a,t,g, or c
cgcagatgctggagcagcgactggcccgggaagatccgtgccctggagagaagcaaggagcagctgctctcgganagagctggacagaagtttgtattacaggctcgtacaccggaggtttctgatggagcanacnacttgaggaaggccggccttgctgaacacagtggactgaccgggtctggacccctcccccacnggtgactgtgcactgcagcagaganaagangaaaggaatctgaann

SEQ ID NO: 3170 - DNA, 99 bp, Homo sapiens
  misc_feature (18)..(19): n equals a,t,g, or c
  misc_feature (23)..(23): n equals a,t,g, or c
  misc_feature (46)..(46): n equals a,t,g, or c
  misc_feature (53)..(53): n equals a,t,g, or c
  misc_feature (63)..(63): n equals a,t,g, or c
  misc_feature (67)..(67): n equals a,t,g, or c
  misc_feature (69)..(69): n equals a,t,g, or c
  misc_feature (92)..(92): n equals a,t,g, or c
taggggtggtccatgganncaanggagtaaggacagcccaaacgcntctatgngtgtctagcntatnanggtttcaccggtcattccgtcangttctgt

SEQ ID NO: 3171 - DNA, 305 bp, Homo sapiens
  misc_feature (3)..(3): n equals a,t,g, or c
  misc_feature (9)..(9): n equals a,t,g, or c
  misc_feature (16)..(16): n equals a,t,g, or c
  misc_feature (21)..(21): n equals a,t,g, or c
  misc_feature (64)..(64): n equals a,t,g, or c
  misc_feature (114)..(114): n equals a,t,g, or c
  misc_feature (195)..(195): n equals a,t,g, or c
  misc_feature (267)..(267): n equals a,t,g, or c
  misc_feature (283)..(283): n equals a,t,g, or c
  misc_feature (285)..(286): n equals a,t,g, or c
  misc_feature (293)..(293): n equals a,t,g, or c
acngttacnttaccangtttncccgctcatttatctcgttctgctagggccaccactaataagncgtcccatgagatcggggtggcaatactacggcattaatacaggttgagntgacaaagaaaaggcaacagttggttacggtggccagggtgaccgccacgaagaggggttgcggtaaaggagggttagcgnagttgttagccgccgcggcctatcaagccagttatgagaactacctattacgcgtggcgtattgccatgttntagaccatgaaggagnanntgccctnagaagcagtgag

SEQ ID NO: 3172 - DNA, 107 bp, Homo sapiens
  misc_feature (27)..(27): n equals a,t,g, or c
  misc_feature (29)..(29): n equals a,t,g, or c
  misc_feature (55)..(56): n equals a,t,g, or c
  misc_feature (72)..(72): n equals a,t,g, or c
agggggcccatgtgatagcgatacaangncccaggacatctacgagttcaagttnncaattacacaagacancagttggtctacgctgcgctcagccgtgtatcgct

SEQ ID NO: 3173 - DNA, 153 bp, Homo sapiens
  misc_feature (28)..(28): n equals a,t,g, or c
  misc_feature (112)..(112): n equals a,t,g, or c
  misc_feature (120)..(120): n equals a,t,g, or c
  misc_feature (123)..(123): n equals a,t,g, or c
  misc_feature (126)..(126): n equals a,t,g, or c
  misc_feature (140)..(140): n equals a,t,g, or c
aaactgtttaattaaaacaaagcatcgngaaggccacggctggtgttgacactatgtgatttctgcccagtgctctgaatgtcaaatgaaaaaattcaatgaaacgccggtnaaccgcgnganttnctataatcctcttnaggtatccaaaat

SEQ ID NO: 3174 - DNA, 519 bp, Homo sapiens
  misc_feature (2)..(2): n equals a,t,g, or c
  misc_feature (7)..(7): n equals a,t,g, or c
  misc_feature (10)..(11): n equals a,t,g, or c
  misc_feature (27)..(27): n equals a,t,g, or c
  misc_feature (216)..(216): n equals a,t,g, or c
  misc_feature (379)..(379): n equals a,t,g, or c
  misc_feature (416)..(416): n equals a,t,g, or c
  misc_feature (436)..(436): n equals a,t,g, or c
  misc_feature (453)..(453): n equals a,t,g, or c
  misc_feature (469)..(469): n equals a,t,g, or c
  misc_feature (497)..(497): n equals a,t,g, or c
  misc_feature (502)..(502): n equals a,t,g, or c
cnctccnacnnatacctttccaggttnaccgttcatctatctcgttccaaatacttttacttgctaatttttttatttgtcccactactatgtttatttgcccttacgtcacccagtggaccctgagtttcatacacgtagctgtcactttgcacgcattttattatcttgtgcgcattgcccgcacgtactagttttaagggtgattatagttantatgttgattagtggctagcgattggttggttgcgttttcctgatggcccacgtactggtggtttgtgtttaatgtagtgtttgtggtgtgttgcctggtgacacaacagttacaatggctcgctactggtgttgtgtactatatgggccctgcccagcctangcccctagaagccacttgccctcagtctgcaaggtgntttgtgctggttgccaaatncaacaacgtgaatcatnacaagaggccttgctnattatgagtgtgagtgtttgattggccnctgtnttcctgccaagtcaata

SEQ ID NO: 3175 - DNA, 152 bp, Homo sapiens
  misc_feature (3)..(3): n equals a,t,g, or c
  misc_feature (17)..(17): n equals a,t,g, or c
  misc_feature (27)..(28): n equals a,t,g, or c
  misc_feature (41)..(41): n equals a,t,g, or c
  misc_feature (108)..(108): n equals a,t,g, or c
  misc_feature (111)..(111): n equals a,t,g, or c
  misc_feature (116)..(116): n equals a,t,g, or c
  misc_feature (131)..(131): n equals a,t,g, or c
  misc_feature (152)..(152): n equals a,t,g, or c
canagctggtaaggccncacgtatcannccgggaattctcnggtcgactcacgcgtccgcgggactcctggggtggttctcttcctctggtcccttctggggaacctnttntcccnaatttcttcgctgcngttttccccatcggttccctn

SEQ ID NO: 3176 - DNA, 287 bp, Homo sapiens
  misc_feature (4)..(4): n equals a,t,g, or c
  misc_feature (21)..(21): n equals a,t,g, or c
  misc_feature (45)..(45): n equals a,t,g, or c
  misc_feature (58)..(58): n equals a,t,g, or c
  misc_feature (95)..(95): n equals a,t,g, or c
  misc_feature (164)..(164): n equals a,t,g, or c
  misc_feature (243)..(243): n equals a,t,g, or c
  misc_feature (250)..(250): n equals a,t,g, or c
  misc_feature (262)..(263): n equals a,t,g, or c
  misc_feature (284)..(284): n equals a,t,g, or c
gatnttgccaacccggatccngttgccaacgtttacccgatcatntatcctcgttcanatttttcttttgcttttattttaactacagcggtttngtactctgctttgcacgtacgtccgtttttcgggtgctgtgttgtttggggcgcggttgctgtatggtnactggtggttagccatgggttaccctatacgtagtgtgactttttaaagtagtgtggtagttgtgcgcgcgctagcggnggaattnaagcaaagacannacaaacgtagatgggcccctncta

SEQ ID NO: 3177 - DNA, 603 bp, Homo sapiens
  misc_feature (1)..(1): n equals a,t,g, or c
  misc_feature (3)..(3): n equals a,t,g, or c
  misc_feature (12)..(12): n equals a,t,g, or c
  misc_feature (22)..(22): n equals a,t,g, or c
  misc_feature (36)..(36): n equals a,t,g, or c
  misc_feature (192)..(192): n equals a,t,g, or c
  misc_feature (296)..(296): n equals a,t,g, or c
  misc_feature (412)..(412): n equals a,t,g, or c
  misc_feature (431)..(431): n equals a,t,g, or c
  misc_feature (527)..(527): n equals a,t,g, or c
  misc_feature (530)..(530): n equals a,t,g, or c
  misc_feature (554)..(554): n equals a,t,g, or c
  misc_feature (567)..(567): n equals a,t,g, or c
  misc_feature (594)..(594): n equals a,t,g, or c
nanttgtcgacntgatccgttnccaggtttacccgntcatttatctcgttcctacgcccactactgtgttgcttatactgttgtatttttgcaaaagcggtcttgctgttaacgggcgtgttatgtttgttggccgtaacactattgtatactgctgcacttcgttctgagtgctacgccgctgcaaatcantccacagatgcatacagcacacttgtactactggcctacgtgtagcgttttggattgtatggcgtgtgacttctactggttaaattactcttagggtaacccanagtcatatactacttaacggtaggccactgcccctgcttatacggccccgcctgccggtgcccctgccccaggccaatgcgcgggcccacttgtagtaggccggagcttaaccaanttggtgtgcaactaatacngtggtgttgatcttaggtgccctgggctttgtgtccaacttagcccctgtggggcgtgcagccgactgggtgtagttgtgggcctagcgcaaacantcntgttatgtttagacggtgttcctngtgccggactttngcgcgttggggtgagatgttttacctnactgcccca

SEQ ID NO: 3178 - DNA, 214 bp, Homo sapiens
  misc_feature (15)..(15): n equals a,t,g, or c
  misc_feature (19)..(19): n equals a,t,g, or c
  misc_feature (49)..(49): n equals a,t,g, or c
  misc_feature (54)..(54): n equals a,t,g, or c
  misc_feature (70)..(70): n equals a,t,g, or c
  misc_feature (113)..(113): n equals a,t,g, or c
  misc_feature (134)..(134): n equals a,t,g, or c
  misc_feature (178)..(178): n equals a,t,g, or c
  misc_feature (180)..(180): n equals a,t,g, or c
  misc_feature (183)..(183): n equals a,t,g, or c
  misc_feature (196)..(196): n equals a,t,g, or c
gcacacgctacaggncgtnaacagttagccccacctaggacgggtacgntggcnccccgtttgccaacangtgttgcggattgcacgtgtttaggtatgtgtctgatatccanagctcatgttatggcccgttngataagcagttaccacaatgcctctgaccgccgcttcggtatancngancgacggttgcaanccgcatgtcccatcatgg

SEQ ID NO: 3179 - DNA, 108 bp, Homo sapiens
  misc_feature (4)..(4): n equals a,t,g, or c
  misc_feature (19)..(19): n equals a,t,g, or c
  misc_feature (35)..(35): n equals a,t,g, or c
  misc_feature (56)..(56): n equals a,t,g, or c
  misc_feature (97)..(97): n equals a,t,g, or c
  misc_feature (106)..(106): n equals a,t,g, or c
gttnttcgttggatggttnaggtgggacacggganggatcctggggaaatggttanccacttttctcagtcggtcttacttggcccaccacgttganttgaacggnac

SEQ ID NO: 3180 - DNA, 577 bp, Homo sapiens
  misc_feature (13)..(13): n equals a,t,g, or c
  misc_feature (16)..(16): n equals a,t,g, or c
  misc_feature (18)..(18): n equals a,t,g, or c
  misc_feature (29)..(29): n equals a,t,g, or c
  misc_feature (76)..(76): n equals a,t,g, or c
  misc_feature (195)..(195): n equals a,t,g, or c
  misc_feature (307)..(307): n equals a,t,g, or c
  misc_feature (309)..(309): n equals a,t,g, or c
  misc_feature (335)..(336): n equals a,t,g, or c
  misc_feature (372)..(372): n equals a,t,g, or c
  misc_feature (388)..(388): n equals a,t,g, or c
  misc_feature (399)..(399): n equals a,t,g, or c
  misc_feature (423)..(423): n equals a,t,g, or c
  misc_feature (435)..(435): n equals a,t,g, or c
  misc_feature (437)..(437): n equals a,t,g, or c
  misc_feature (458)..(458): n equals a,t,g, or c
  misc_feature (526)..(526): n equals a,t,g, or c
  misc_feature (530)..(530): n equals a,t,g, or c
  misc_feature (542)..(542): n equals a,t,g, or c
  misc_feature (547)..(547): n equals a,t,g, or c
  misc_feature (553)..(553): n equals a,t,g, or c
gcccgtcttgtcnacngntaccttaccangtttccccgtcatttatctcgttctaaagggaggtagagccgggagncgatattactgtagcagttacaagctagggaggatgggcgcttgcccgtacaaggggcaaactgctgctactatgtgaatgagcgatggaatgggagacagcgaaaaaaaaggcaccanaacacaacggacatagagtggctggaaccgtttgccgagagggggccagggggaagggccgcggcccaatgcgagcagccaataatgaagaagactacgacgactaaagcgnangtggttggcactctatggagttgggnncaactgggtgataaaaaaactttctgggcaactggnagatagggaggccggnagggcagtttnctagaagttgcgcactgtactagnagggggttgcgngnagcgcgacacaaaggcacatntgcaacgtggaatgctaaagacagccgcaatgaccagggcaattggcgtgagcgcggagattgcaagngccnaagtaggagctnagatncattgnagggcaaaagctggatgcgtggtg

SEQ ID NO: 3181 - DNA, 428 bp, Homo sapiens
  misc_feature (1)..(1): n equals a,t,g, or c
  misc_feature (5)..(5): n equals a,t,g, or c
  misc_feature (10)..(11): n equals a,t,g, or c
  misc_feature (22)..(22): n equals a,t,g, or c
  misc_feature (194)..(194): n equals a,t,g, or c
  misc_feature (209)..(210): n equals a,t,g, or c
  misc_feature (216)..(216): n equals a,t,g, or c
  misc_feature (278)..(278): n equals a,t,g, or c
  misc_feature (327)..(327): n equals a,t,g, or c
  misc_feature (341)..(341): n equals a,t,g, or c
  misc_feature (401)..(401): n equals a,t,g, or c
  misc_feature (413)..(415): n equals a,t,g, or c
nttgncaacnnatgccttccangtttacccgtcatttatctcgttctttatctcgttctttatctcgttcttttcactcttctgttcctgctattctctgtctgttcacgggtacctgtcgctgaactgactcttcgtcgtcgtgtttggtacgtcttagtagcaggagtgattcccattgtagtacttatcancacagcggtgttcanngtgatnacagttcccacagtctccatcccggcgcttgccaccgccaccccaacagccgtacgaccatncaaccgaataggcagcatgtctgtaggccgccaaagcttgttctgcaancttttcaccctcanccgattcaaactatacgaagtatgccgcgtcagaggcgtagccaatagtattgctaccanataacgggtatnnnacaactgatcaca

SEQ ID NO: 3182 - DNA, 285 bp, Homo sapiens
  misc_feature (6)..(6): n equals a,t,g, or c
  misc_feature (17)..(17): n equals a,t,g, or c
  misc_feature (19)..(19): n equals a,t,g, or c
  misc_feature (31)..(31): n equals a,t,g, or c
  misc_feature (74)..(74): n equals a,t,g, or c
  misc_feature (229)..(229): n equals a,t,g, or c
  misc_feature (248)..(248): n equals a,t,g, or c
  misc_feature (269)..(269): n equals a,t,g, or c
  misc_feature (271)..(271): n equals a,t,g, or c
  misc_feature (274)..(274): n equals a,t,g, or c
aaagcnctcactatagntnaaagctggtacncctgcaggtaccggtccggaattcccgggtcgacccacgcgtncgccaaattcatagagaataaaattacatgaaagagttacaagctcactgttttaaagacttgacatttttcatttagttttaatttacagtacttatggagagccagcagaagacatcagagcactcacttcttcccatctttgttaaggttancagaattacccatggacantgttaggtgaggctcattcgncngcnctgaaaacaaa

SEQ ID NO: 3183 - DNA, 203 bp, Homo sapiens
  misc_feature (2)..(3): n equals a,t,g, or c
  misc_feature (8)..(8): n equals a,t,g, or c
  misc_feature (19)..(19): n equals a,t,g, or c
  misc_feature (102)..(103): n equals a,t,g, or c
  misc_feature (134)..(134): n equals a,t,g, or c
  misc_feature (136)..(136): n equals a,t,g, or c
  misc_feature (182)..(182): n equals a,t,g, or c
  misc_feature (192)..(192): n equals a,t,g, or c
  misc_feature (196)..(196): n equals a,t,g, or c
gnnagagngcttccctcancacgagcgattcgcaacccagttaaagctggtacccctgcaggtaccggtccggaattcccgggtcgacccacgcgtccgcgnnctcgtgggcggccactccggtcccgacaccnancctgccggaaagaacacccggaaatgaaaggccaccaagaagaaangcactacctnctangacaaga

SEQ ID NO: 3184 - DNA, 553 bp, Homo sapiens
  misc_feature (4)..(4): n equals a,t,g, or c
  misc_feature (6)..(6): n equals a,t,g, or c
  misc_feature (13)..(13): n equals a,t,g, or c
  misc_feature (25)..(25): n equals a,t,g, or c
  misc_feature (74)..(74): n equals a,t,g, or c
  misc_feature (234)..(234): n equals a,t,g, or c
  misc_feature (341)..(341): n equals a,t,g, or c
  misc_feature (378)..(379): n equals a,t,g, or c
  misc_feature (392)..(392): n equals a,t,g, or c
  misc_feature (406)..(406): n equals a,t,g, or c
  misc_feature (426)..(426): n equals a,t,g, or c
  misc_feature (478)..(478): n equals a,t,g, or c
  misc_feature (523)..(523): n equals a,t,g, or c
  misc_feature (532)..(532): n equals a,t,g, or c
  misc_feature (545)..(545): n equals a,t,g, or c
  misc_feature (553)..(553): n equals a,t,g, or c
cgtntntatagtnaaagctggtacncctgcaggtaccggtccggaattcccgggtcgacccacgcgttcggtanaagatgaacaggagcattatataagtgatgatttggacattgaaactaaaatggaagaacaggaaaaaaaccctgcatcttctgaacttgaagaaccaagtttagtttgtgaggaagatgaaattatgaggtctaaagaaagtccagatctttctatttntcattctcaggttgagcagttagtcaataaaacatctgaacttgatatgtctgaaagcaaaacaagaagtggaaaagtctttcagaataaaatggcaaatggaaatnaaccagtaaaatcttccaaagaaaatcggaagagaanncaacatgaatctnggagaatagtaagncttatgataatgtataggtngaatacaatgggaaggatcacgaatatcattactacagattaaatttaaaangatgaatttgatatctttcgatgtacctgagagtttttgatattnaaattttgnttaaaaaatattnttgttttn

SEQ ID NO: 3185 - DNA, 88 bp, Homo sapiens
  misc_feature (8)..(8): n equals a,t,g, or c
  misc_feature (16)..(16): n equals a,t,g, or c
  misc_feature (21)..(21): n equals a,t,g, or c
  misc_feature (26)..(26): n equals a,t,g, or c
  misc_feature (51)..(51): n equals a,t,g, or c
gctgtatntttcctcnggaanaatcncactcactattttggaaagctggtnccgcctgcaggtaccggtccggaattcccgggtcgac

SEQ ID NO: 3186 - DNA, 102 bp, Homo sapiens
  misc_feature (14)..(14): n equals a,t,g, or c
  misc_feature (29)..(29): n equals a,t,g, or c
  misc_feature (55)..(55): n equals a,t,g, or c
  misc_feature (66)..(66): n equals a,t,g, or c
  misc_feature (83)..(83): n equals a,t,g, or c
tgagtggacatgcnatggaaatggattgngacactggtgaatgaacagatgatantctacgtactnaagatgcatcacccaanatgatgaaaggtactgtac

SEQ ID NO: 3187 - DNA, 196 bp, Homo sapiens
  misc_feature (20)..(20): n equals a,t,g, or c
  misc_feature (37)..(38): n equals a,t,g, or c
  misc_feature (69)..(69): n equals a,t,g, or c
  misc_feature (85)..(85): n equals a,t,g, or c
  misc_feature (132)..(132): n equals a,t,g, or c
  misc_feature (164)..(164): n equals a,t,g, or c
  misc_feature (179)..(179): n equals a,t,g, or c
  misc_feature (184)..(184): n equals a,t,g, or c
  misc_feature (191)..(191): n equals a,t,g, or c
ggatgatgtttactaacgangaattttacatccaaanngggataggcacttggacccccattctccaanggcccgggggggcggnttcccatgggatgtgaaaggctggccattattaagtccctgtaactnaaatgtcaaccccaccgaggcaccctcccgtnccccagaatcttggntgttnacaaatnacgtg

SEQ ID NO: 3188 - DNA, 100 bp, Homo sapiens
  misc_feature (11)..(12): n equals a,t,g, or c
  misc_feature (63)..(63): n equals a,t,g, or c
  misc_feature (73)..(73): n equals a,t,g, or c
  misc_feature (81)..(81): n equals a,t,g, or c
actatttttgnnagatggtaccccctgcaggtaccggtccggaattcccgggtcgacccattngtccggtttnaccagatnctgacccgcgacggcaagg

SEQ ID NO: 3189 - DNA, 506 bp, Homo sapiens
  misc_feature (393)..(393): n equals a,t,g, or c
  misc_feature (430)..(430): n equals a,t,g, or c
  misc_feature (451)..(451): n equals a,t,g, or c
  misc_feature (456)..(456): n equals a,t,g, or c
  misc_feature (459)..(459): n equals a,t,g, or c
  misc_feature (500)..(500): n equals a,t,g, or c
gctctttagatctacttgcttttctgcttttaaagattccatgggagcagtgaggcttactttgagaataagggtactttgttggataaaagtgaagcaaacttttattttggcagtaacggaaataaagtaaatatcactatagcatagacctgtgtttccaactcattttgctcaacttttccagacttcctgagtaaacacagatgggtttccacttatttttcagttttatgtagaaagttctttagactataaattccacatgctacttggagttttcagtgtttgcttgattgcatgccattggaaggtcaaaaacctagatttagacattataaagatttagaaggtgatgatgtgtagtaacgtgttttcatttggctttatttnggctttcttgatggtaattctaaatgttttaattcangtcttgactaaatttcctggnaattnggnggcagacagaattttgaaagccttctatttttaaatagcanaatggt

SEQ ID NO: 3190 - DNA, 146 bp, Homo sapiens
  misc_feature (9)..(9): n equals a,t,g, or c
  misc_feature (116)..(116): n equals a,t,g, or c
  misc_feature (121)..(121): n equals a,t,g, or c
  misc_feature (124)..(124): n equals a,t,g, or c
  misc_feature (141)..(141): n equals a,t,g, or c
  misc_feature (145)..(145): n equals a,t,g, or c
ggcggcccntttgggtcccgccggggcgccgggggtgcgggagccggcccaggagggggcggcagcggcggagtagccaagtggctccgggagcacctgggcttccgcgggggggncggangcngagggggcagaaagccngcgnc

SEQ ID NO: 3191 - DNA, 416 bp, Homo sapiens
  misc_feature (37)..(39): n equals a,t,g, or c
  misc_feature (89)..(89): n equals a,t,g, or c
  misc_feature (116)..(116): n equals a,t,g, or c
  misc_feature (144)..(144): n equals a,t,g, or c
  misc_feature (165)..(165): n equals a,t,g, or c
  misc_feature (188)..(188): n equals a,t,g, or c
  misc_feature (204)..(204): n equals a,t,g, or c
  misc_feature (235)..(235): n equals a,t,g, or c
  misc_feature (242)..(242): n equals a,t,g, or c
  misc_feature (259)..(259): n equals a,t,g, or c
  misc_feature (269)..(269): n equals a,t,g, or c
  misc_feature (288)..(288): n equals a,t,g, or c
  misc_feature (312)..(312): n equals a,t,g, or c
  misc_feature (324)..(324): n equals a,t,g, or c
  misc_feature (327)..(327): n equals a,t,g, or c
  misc_feature (388)..(388): n equals a,t,g, or c
  misc_feature (392)..(392): n equals a,t,g, or c
  misc_feature (414)..(414): n equals a,t,g, or c
gcctatgcgtccggtaccatggaaaactaaatttaannnaccagttataacagtgtttaatttagataagtttgagggaaaataatcantaggcaagaggaacatttttcctgtantagctagagtgccttgaaaaaatgtgtnggctatgtgaaggaatatttnaactaaaatggaatggtatgctntatacccttaaagttngaggaggatcttgatatgttttaacattatnatggcanggaaatatataaagaanaaaaatattnttctatttacaatttttanaaaaggtttaatgtaaaaataatntggatttgtatnaanaacaacacttatcgctatgtattgtgttagacatattgtcagtctgttgctactgacttanatanttaaatgttggcactgctgaanat

SEQ ID NO: 3192 - DNA, 63 bp, Homo sapiens
  misc_feature (13)..(13): n equals a,t,g, or c
  misc_feature (16)..(16): n equals a,t,g, or c
  misc_feature (35)..(35): n equals a,t,g, or c
  misc_feature (44)..(44): n equals a,t,g, or c
  misc_feature (55)..(55): n equals a,t,g, or c
gagatagactttnctnttgtaaagtaaataaattnttcaaaganaagcattgcanatggacct

SEQ ID NO: 3193 - DNA, 520 bp, Homo sapiens
  misc_feature (270)..(270): n equals a,t,g, or c
  misc_feature (358)..(358): n equals a,t,g, or c
  misc_feature (400)..(400): n equals a,t,g, or c
  misc_feature (428)..(428): n equals a,t,g, or c
  misc_feature (441)..(441): n equals a,t,g, or c
  misc_feature (490)..(490): n equals a,t,g, or c
  misc_feature (494)..(494): n equals a,t,g, or c
  misc_feature (514)..(514): n equals a,t,g, or c
gcccacgcgttcgggaattcatgtggaggccaccccagctgcaagtgccttccttggagcagagaggcagcctcgtcctcctgtcccctctcctcccagccaccatcgttcatctgctccgggcagaactgtgtggcccctgcctgtgccagccatgggctcgggatggactccctgggccccacccattgccaagccaggaaggcagctttcgcttgttcctgctcgggacagccccgggtttcccagcatcctgatgtgtcccctctncccacttcagaggccacccactcagcaccaccggcctggcttgctgcagactataaactataaccactagctcgacacaagtctgcantccaggcgtgttggaagcccgctttccgggttcggggaaggnccccgggggcttggggaaacgccctggngccctttccttgngcccaaaacccaaaggccccccttttggccctttcccttgggcccttgnttgnccgaaccaaggaaacttggncccaaa

SEQ ID NO: 3194 - DNA, 62 bp, Homo sapiens
  misc_feature (20)..(20): n equals a,t,g, or c
  misc_feature (32)..(32): n equals a,t,g, or c
  misc_feature (45)..(46): n equals a,t,g, or c
  misc_feature (59)..(59): n equals a,t,g, or c
gtcgacccacgcgtccgtanaagagtaggtcntccagtgctgctnntgcagacacctangat

SEQ ID NO: 3195 - DNA, 508 bp, Homo sapiens
  misc_feature (4)..(4): n equals a,t,g, or c
  misc_feature (9)..(9): n equals a,t,g, or c
  misc_feature (25)..(25): n equals a,t,g, or c
  misc_feature (27)..(27): n equals a,t,g, or c
  misc_feature (137)..(137): n equals a,t,g, or c
  misc_feature (158)..(158): n equals a,t,g, or c
  misc_feature (253)..(253): n equals a,t,g, or c
  misc_feature (415)..(415): n equals a,t,g, or c
  misc_feature (434)..(435): n equals a,t,g, or c
  misc_feature (499)..(499): n equals a,t,g, or c
  misc_feature (508)..(508): n equals a,t,g, or c
catntggcngtgaccttatctggangnacgctggtacgcctgcaggtaccggtccggaattcccgggtcgacccacgcgtccgctaagacttacctgatatttcttaggatgtggacatcatgtttggggcaatgtntccctcaccgcctctctcatnctttataccataaaagagtgatggcaatatgctagctgaaattcacccttcgatggtttcattttcttgtctacaaaggcagggtgagcgactgntgccctgtgatttctggcactcccagtggaaaggaagcagaggggccaagttatggcagagtgcacccagttaggccttcgactacaaaagtatcatggtttcccttcctccccagttaccattctttccctggttcccatccccttcacatccagcagtgngggctaaccttcctttgcnnatcctgggaaaacacatctttgctccagtgcaaagttagactggacaaacaagccggtgtggangaagctttn

SEQ ID NO: 3196 - DNA, 91 bp, Homo sapiens
  misc_feature (54)..(54): n equals a,t,g, or c
  misc_feature (66)..(66): n equals a,t,g, or c
  misc_feature (82)..(82): n equals a,t,g, or c
  misc_feature (90)..(91): n equals a,t,g, or c
acttttgggaaagctggcccgcctgcaggtaccggtccggaattcccgggtcgncccacgcgtccnttcgcctcaaaggcgnacaggtgnn

SEQ ID NO: 3197 - DNA, 193 bp, Homo sapiens
  misc_feature (3)..(3): n equals a,t,g, or c
  misc_feature (7)..(7): n equals a,t,g, or c
  misc_feature (30)..(30): n equals a,t,g, or c
  misc_feature (45)..(45): n equals a,t,g, or c
  misc_feature (52)..(52): n equals a,t,g, or c
  misc_feature (62)..(62): n equals a,t,g, or c
  misc_feature (109)..(109): n equals a,t,g, or c
  misc_feature (140)..(140): n equals a,t,g, or c
  misc_feature (158)..(158): n equals a,t,g, or c
  misc_feature (179)..(179): n equals a,t,g, or c
  misc_feature (193)..(193): n equals a,t,g, or c
ggnctgnctgaggaggtgtggacttttatntatagatctacatanaaactgntacatgacanaaaccacacctaaagaaattttaagaatttggcacagttactcactntgtgtaatctgaaatctagctgctgaatacnctgaagtaaatccttgancactgaagtctttcaattganctggatgaatactn

SEQ ID NO: 3198 - DNA, 474 bp, Homo sapiens
  misc_feature (24)..(25): n equals a,t,g, or c
  misc_feature (463)..(463): n equals a,t,g, or c
  misc_feature (470)..(470): n equals a,t,g, or c
gtcgacccacgcgtccgcggacgnntgggaaaatatcataagatatacctattttaaaacagaatggacaccctatatttcagggctgttgacaggcacataagccctcacagtcagctagccattgattttcagagtttcttcatttacttcaattattgataaatattcaggattgctagtaaatatgttctttactcatgtgattcctttaccatctttttttagaggcattcagaagtccagtatttcgacatggaacagataagaatggattcagcttgggtttcagtaaaaacatgcgacaagtttttggtgatgagaagaagtactggttgctacccattttttcaagtctaggtgatggctgctcctttccaacttgccttgttaaccaggatcctgaacaagcatctactccttgcagggctgaattccacagcttaaaatctcgaaaaccatnaagtttnctgc

SEQ ID NO: 3199 - DNA, 58 bp, Homo sapiens
  misc_feature (5)..(5): n equals a,t,g, or c
  misc_feature (26)..(26): n equals a,t,g, or c
  misc_feature (30)..(30): n equals a,t,g, or c
  misc_feature (33)..(33): n equals a,t,g, or c
  misc_feature (49)..(49): n equals a,t,g, or c
ggctngatgggctgactttgactcanaggnatngttcggatttggcatntcaaaacca

SEQ ID NO: 3200 - DNA, 405 bp, Homo sapiens
  misc_feature (9)..(9): n equals a,t,g, or c
  misc_feature (40)..(42): n equals a,t,g, or c
  misc_feature (53)..(53): n equals a,t,g, or c
  misc_feature (118)..(118): n equals a,t,g, or c
  misc_feature (120)..(120): n equals a,t,g, or c
  misc_feature (173)..(173): n equals a,t,g, or c
  misc_feature (175)..(175): n equals a,t,g, or c
  misc_feature (190)..(190): n equals a,t,g, or c
  misc_feature (195)..(195): n equals a,t,g, or c
  misc_feature (246)..(246): n equals a,t,g, or c
  misc_feature (280)..(280): n equals a,t,g, or c
  misc_feature (308)..(308): n equals a,t,g, or c
  misc_feature (357)..(357): n equals a,t,g, or c
  misc_feature (383)..(383): n equals a,t,g, or c
  misc_feature (388)..(388): n equals a,t,g, or c
  misc_feature (392)..(392): n equals a,t,g, or c
gaacaaaanatggagagctaatttctgttcctcttttgannntgggttatgtnctagtgagaggttcatctgataaaaatcaaatttcaagtacaatatcacttttaaaatatctaananaaggatattcaataggaactccattagatggaccaaaaggaccaaaagaaaangntaaaaaaggactttnatatntatctcaaaaaacttctataccacttgttccagttggaatttcatatagtnaaaagtggatattaaaaaagacttgggataaatntgagatacccaaacctttttaaaaagtnaaaatctttttaagtgaaccaataacaattagtgataaagatgatttanataaatatacagaaattataaaaccnaaaanaaangcgggccgttcta

SEQ ID NO: 3201 - DNA, 94 bp, Homo sapiens
  misc_feature (75)..(75): n equals a,t,g, or c
  misc_feature (82)..(82): n equals a,t,g, or c
  misc_feature (87)..(87): n equals a,t,g, or c
  misc_feature (90)..(90): n equals a,t,g, or c
  misc_feature (92)..(92): n equals a,t,g, or c
gcagaactgtaatctgcgaagatgaataaacaagcgaggtcactcttctgggcatagaaaatgctaccacgtggntaccggntgaangangnat

SEQ ID NO: 3202 - DNA, 549 bp, Homo sapiens
  misc_feature (32)..(32): n equals a,t,g, or c
  misc_feature (477)..(477): n equals a,t,g, or c
  misc_feature (490)..(490): n equals a,t,g, or c
  misc_feature (512)..(512): n equals a,t,g, or c
  misc_feature (515)..(515): n equals a,t,g, or c
  misc_feature (532)..(532): n equals a,t,g, or c
gtttttaggaattaagtcaaactaagggatangggcctgagtggaagaggctttgccactgaaatgacgtgcatgtggcagccgccggaaccagaggacatgcagccgcgtgcggagagtgaggcggatccattacgggcacacagcttaccatttccttccagaattccttcttccaaacaagctatactgaaatccctctagtaaaagattgagacgaaacactaatagttttgggccaaaacgtggtggagaagtttgaaaagacaaacatagcaacgtgtctttggctatatggttccttgccctccagcaagcttgaaatataaaaaggctaacatgcaaaactaggggtactacccccctcccccagtttttaaaaagcaatttccagaagcaaacacacaatggttcgacttgaagtgtcggcataaccattcagtaagaaaagctagaatagtaaacctcttttctggntgggctatttatnaaacctaataaacatcaaggancgnactcaaggatgaaactnggcaatgtgtggagccg

SEQ ID NO: 3203 - DNA, 99 bp, Homo sapiens
  misc_feature (13)..(13): n equals a,t,g, or c
  misc_feature (24)..(25): n equals a,t,g, or c
  misc_feature (29)..(29): n equals a,t,g, or c
  misc_feature (31)..(31): n equals a,t,g, or c
  misc_feature (56)..(56): n equals a,t,g, or c
  misc_feature (96)..(96): n equals a,t,g, or c
caaggagaatctncgctcactacnngggnanaatggcccgccgagcaggcaccggnccggaattcccgggttgacccacgcgcttttcacccgatngcg

SEQ ID NO: 3204 - DNA, 140 bp, Homo sapiens
  misc_feature (3)..(3): n equals a,t,g, or c
  misc_feature (11)..(11): n equals a,t,g, or c
  misc_feature (14)..(14): n equals a,t,g, or c
  misc_feature (30)..(30): n equals a,t,g, or c
  misc_feature (48)..(49): n equals a,t,g, or c
  misc_feature (79)..(79): n equals a,t,g, or c
  misc_feature (126)..(126): n equals a,t,g, or c
  misc_feature (132)..(132): n equals a,t,g, or c
ttnagaacgtnttncggcacgcgctgcggntcctcattcacctgcacnncagggtggccccatctaagctggaggcgtngcaaaaggccctggagcctacaggccagagcggaataggcagtgaangagctntactccca

SEQ ID NO: 3205 - DNA, 461 bp, Homo sapiens
  misc_feature (7)..(7): n equals a,t,g, or c
  misc_feature (153)..(153): n equals a,t,g, or c
  misc_feature (271)..(271): n equals a,t,g, or c
  misc_feature (285)..(285): n equals a,t,g, or c
  misc_feature (295)..(295): n equals a,t,g, or c
  misc_feature (305)..(305): n equals a,t,g, or c
  misc_feature (325)..(325): n equals a,t,g, or c
  misc_feature (332)..(332): n equals a,t,g, or c
  misc_feature (380)..(380): n equals a,t,g, or c
  misc_feature (399)..(399): n equals a,t,g, or c
  misc_feature (439)..(439): n equals a,t,g, or c
  misc_feature (452)..(452): n equals a,t,g, or c
  misc_feature (460)..(460): n equals a,t,g, or c
gcggacncgtgggggcggaggcagaggtggggctctctggcagtggagtgggtgctagaggcaaacccctcccctgcagcctgcttggtggtgatgttatgctgctgtgtgtccttccactgaggcaggggcacaggtggcctgggctagganggctgagcagcagagtgccgagggatggagggagagcccccatgggagggtgccagggggctggctgagcagctgggcggggtccgtgaggtaagaaggtgcccgggccagggggcangagctctgatgtangacagctcantccagtcaangggtgctatgaggacagcangggcctncgagtctggggtggcctcacccccacaagcagtcctggctactcagcngcactacccataggggacncctgggcagtttcttcaattcggtggcacattaacatcgnttgaaactttgtnttttcttnt

SEQ ID NO: 3206 - DNA, 69 bp, Homo sapiens
  misc_feature (12)..(13): n equals a,t,g, or c
  misc_feature (16)..(16): n equals a,t,g, or c
  misc_feature (53)..(53): n equals a,t,g, or c
  misc_feature (65)..(65): n equals a,t,g, or c
gctcttcacttnnatngatgcttttagatatttggcccttatgtgggaagaanatattgatctanaatg

SEQ ID NO: 3207 - DNA, 275 bp, Homo sapiens
  misc_feature (2)..(2): n equals a,t,g, or c
  misc_feature (4)..(4): n equals a,t,g, or c
  misc_feature (21)..(21): n equals a,t,g, or c
  misc_feature (65)..(65): n equals a,t,g, or c
  misc_feature (72)..(72): n equals a,t,g, or c
  misc_feature (146)..(146): n equals a,t,g, or c
  misc_feature (151)..(151): n equals a,t,g, or c
  misc_feature (167)..(168): n equals a,t,g, or c
  misc_feature (199)..(199): n equals a,t,g, or c
  misc_feature (235)..(235): n equals a,t,g, or c
  misc_feature (240)..(241): n equals a,t,g, or c
  misc_feature (247)..(247): n equals a,t,g, or c
antnataaatcaaaaaaattngggggggccacccccggaaagggcttcttttctggccttgggcnaccaagngcctcccctcaaacccttcccaagctttcaaccttatggcccaagccaagaaggggaagaaagcccccgaagtngcaanggaagaaagcaagcanncccgtggcccccaaccgggttcaagaacccnaaacccaaggtgccgcttcccttgggggcccaaggnccctnnattttnaagaagtggaagaaccttgaacaacttg

SEQ ID NO: 3208 - DNA, 146 bp, Homo sapiens
  misc_feature (2)..(3): n equals a,t,g, or c
  misc_feature (14)..(14): n equals a,t,g, or c
  misc_feature (28)..(28): n equals a,t,g, or c
  misc_feature (91)..(91): n equals a,t,g, or c
  misc_feature (115)..(115): n equals a,t,g, or c
  misc_feature (119)..(119): n equals a,t,g, or c
  misc_feature (129)..(129): n equals a,t,g, or c
  misc_feature (141)..(141): n equals a,t,g, or c
tnntctatcttgcnaatcccgttcatanttaaagccagtacgcctgcaggtaccggtccggaattcccgggtcgacccacgctttcggttncggttgccccctcctgtggactgngggngcccgtttgnatgagctcatgnagaac

SEQ ID NO: 3209 - DNA, 100 bp, Homo sapiens
  misc_feature (4)..(4): n equals a,t,g, or c
  misc_feature (40)..(40): n equals a,t,g, or c
  misc_feature (72)..(73): n equals a,t,g, or c
  misc_feature (91)..(91): n equals a,t,g, or c
ttgnaaccccgttaaagcttgtacgcctgcaggtaccggnccggaattcccgggtcgacccacgcgtccgcnncgcgttcgcccacgcgtncgcccacgc

SEQ ID NO: 3210 - DNA, 451 bp, Homo sapiens
  misc_feature (9)..(9): n equals a,t,g, or c
  misc_feature (346)..(346): n equals a,t,g, or c
  misc_feature (366)..(366): n equals a,t,g, or c
  misc_feature (399)..(399): n equals a,t,g, or c
  misc_feature (426)..(426): n equals a,t,g, or c
  misc_feature (445)..(445): n equals a,t,g, or c
gcggactcntgggctgaacattagcaatgtggtaagcactgcagtaggagttttcacgtgtctactcatgtaatcctcaatgcaaccttaaagataatgcaagtaccattgctctcatttatgggtttgtgaatgctgagattaagaaggaatcgtgagtctctacaaggttggagactgtaatgtgccctgcctggctggctctggcttcacactctgcattgtgtgtgcagggagcttctggacactctgacgaggatctggttacctctgcacaacacagaagacaggttgaggaagacggaaagctgaggggcttcttcagggaaaaataatctcagcgtancattcctgtaagcctgtctncatcttacttgaagggacttgcttggatttctncaaatccatcgttgtgttgtgccaagncatgactatttctctctgngataaa

SEQ ID NO: 3211 - DNA, 99 bp, Homo sapiens
  misc_feature (1)..(1): n equals a,t,g, or c
  misc_feature (23)..(23): n equals a,t,g, or c
  misc_feature (30)..(30): n equals a,t,g, or c
  misc_feature (32)..(32): n equals a,t,g, or c
  misc_feature (48)..(48): n equals a,t,g, or c
  misc_feature (51)..(51): n equals a,t,g, or c
  misc_feature (61)..(61): n equals a,t,g, or c
  misc_feature (78)..(78): n equals a,t,g, or c
nggtctaggtgtcgtccgagacncttagtngnactcacatgggaaccnctnctatatttgnaagctggtacccctgcnggtaccggtccggaatccccg

SEQ ID NO: 3212 - DNA, 72 bp, Homo sapiens
  misc_feature (56)..(56): n equals a,t,g, or c
  misc_feature (58)..(58): n equals a,t,g, or c
  misc_feature (62)..(62): n equals a,t,g, or c
  misc_feature (67)..(67): n equals a,t,g, or c
  misc_feature (72)..(72): n equals a,t,g, or c
ttaaaatcatgacatgacatacttttggaatttagtgcccatatgctgacagatgncnaaangggtntatan

SEQ ID NO: 3213 - DNA, 84 bp, Homo sapiens
  misc_feature (63)..(63): n equals a,t,g, or c
  misc_feature (66)..(66): n equals a,t,g, or c
  misc_feature (70)..(70): n equals a,t,g, or c
cccccggtcctttttttgggggaaaaaaaaacccccctcccctttttttggggggaaaaaaangantaanccccttctttgggg

SEQ ID NO: 3214 - DNA, 70 bp, Homo sapiens
  misc_feature (4)..(4): n equals a,t,g, or c
  misc_feature (16)..(17): n equals a,t,g, or c
  misc_feature (51)..(51): n equals a,t,g, or c
  misc_feature (63)..(63): n equals a,t,g, or c
gctnatgcaaggtcannccccttcctgggggcctggttaatgtggatgagngaaggcctgggncccttgc

SEQ ID NO: 3215 - DNA, 477 bp, Homo sapiens
  misc_feature (8)..(8): n equals a,t,g, or c
  misc_feature (47)..(47): n equals a,t,g, or c
  misc_feature (65)..(65): n equals a,t,g, or c
  misc_feature (83)..(83): n equals a,t,g, or c
  misc_feature (98)..(98): n equals a,t,g, or c
  misc_feature (109)..(109): n equals a,t,g, or c
  misc_feature (137)..(137): n equals a,t,g, or c
  misc_feature (140)..(140): n equals a,t,g, or c
  misc_feature (142)..(142): n equals a,t,g, or c
  misc_feature (165)..(165): n equals a,t,g, or c
  misc_feature (177)..(177): n equals a,t,g, or c
  misc_feature (199)..(199): n equals a,t,g, or c
  misc_feature (212)..(213): n equals a,t,g, or c
  misc_feature (243)..(243): n equals a,t,g, or c
  misc_feature (261)..(261): n equals a,t,g, or c
  misc_feature (302)..(302): n equals a,t,g, or c
  misc_feature (310)..(310): n equals a,t,g, or c
  misc_feature (318)..(318): n equals a,t,g, or c
  misc_feature (365)..(365): n equals a,t,g, or c
  misc_feature (369)..(369): n equals a,t,g, or c
  misc_feature (373)..(373): n equals a,t,g, or c
  misc_feature (375)..(375): n equals a,t,g, or c
  misc_feature (381)..(381): n equals a,t,g, or c
  misc_feature (408)..(408): n equals a,t,g, or c
  misc_feature (410)..(410): n equals a,t,g, or c
  misc_feature (434)..(434): n equals a,t,g, or c
  misc_feature (475)..(475): n equals a,t,g, or c
ggcttcgntgtatttagtaagcctttacaagacttgttaaagatgtnatgagtgccccaagctgncgttccttcccttcctgncccacaagctccttntcctgaatttnctacctaaatattaaccatatgcctagnctntnaaactaaaaacttggacctcatnctcaattattanctcctttcaactctggagaccntctgtctggtctnnctctagaaggttctaccgcataaattgatntgtgctccctgccctcgnactgcccaagcccgggcctgcacatactcactggactgttnccgttttnacagatgncagtcttcctgccccttttcacactgcagctgaagttcaattacctnaaangacncncttatntttcatttccttggctccaaacctttngnttgcctctaagattaaagctcaanttcttaacagtgtacagtgtgcaacttccaacctttttatntg

SEQ ID NO: 3216 - DNA, 559 bp, Homo sapiens
  misc_feature (10)..(10): n equals a,t,g, or c
  misc_feature (402)..(402): n equals a,t,g, or c
  misc_feature (427)..(427): n equals a,t,g, or c
  misc_feature (463)..(463): n equals a,t,g, or c
  misc_feature (548)..(548): n equals a,t,g, or c
  misc_feature (558)..(558): n equals a,t,g, or c
ggcaaatttnctgtgcaagctctaagtagcaggtggtatttccttaatatattgtttttgacctttggggaaattggtattacgagctgactttggaaaattaaaatagcatcaaggtcctacattttaaataaaacaatcgatatcttaatttttaaaatcagactagattacgataccaggaaaagacatacatattttgcttttatgtgttaaagttttgtaattcagggaggacaagaaaagggatatggtgcagctgaactttctaattcactaagacaggaaaaaaggaaggaaaaaatgtatatttttaagtttcaatttaaacctttgctggtaactaaatgctttgatatgatcagtcatacaaagagttaaattaagcatggagctgttcanatggcaaatctgcgttgagctgaangtaaaagacatctggatttttcattcatttgctcancagcactaaatttcaagcttgtttttttgttcagcatcaaagaaaagggtggtttatggttatcggattttttttaacccacatntttcatgaana

SEQ ID NO: 3217 - DNA, 410 bp, Homo sapiens
  misc_feature (170)..(170): n equals a,t,g, or c
  misc_feature (195)..(195): n equals a,t,g, or c
  misc_feature (236)..(236): n equals a,t,g, or c
  misc_feature (336)..(336): n equals a,t,g, or c
  misc_feature (367)..(367): n equals a,t,g, or c
  misc_feature (375)..(375): n equals a,t,g, or c
  misc_feature (389)..(389): n equals a,t,g, or c
  misc_feature (405)..(405): n equals a,t,g, or c
tcaaaatttttggctgtgttcttgaatactatagcttaccccaagaggacttgtggggaacaagaatgagagggtgaactagaaagaaaggtgattaggcattgtccaccccaaaagcaactcctctaacaaaagaaggagcttagagcagtttccatggagaggaggantggctgtttatcatggctggccctntcattagctcattaccaaaaaacctcaagggaacaactaanaaaaggttttgggattaaaatctgtttaaagaaatatccggaaatagggtttcccataaaaaccttgcccattttttctaaaatctgatttttttccttntttttaacccataaatttttggctttattcntacatatnctggtattttgacntcttttggccaaaaanataaa

SEQ ID NO: 3218 - DNA, 170 bp, Homo sapiens
  misc_feature (5)..(5): n equals a,t,g, or c
  misc_feature (12)..(12): n equals a,t,g, or c
  misc_feature (25)..(25): n equals a,t,g, or c
  misc_feature (92)..(93): n equals a,t,g, or c
  misc_feature (101)..(101): n equals a,t,g, or c
  misc_feature (103)..(103): n equals a,t,g, or c
  misc_feature (138)..(138): n equals a,t,g, or c
cttgntgacttnctcggaaataccnctactatagggtaagctggtacgcctgcaggtaccggtccggaattcccgggtcgacccacgcgttnncggacgcntngggtgaaaagctccttagccctggggcttgagggnggaaaggggtagggtgggtaagagtccatgga

SEQ ID NO: 3219 - DNA, 64 bp, Homo sapiens
  misc_feature (9)..(9): n equals a,t,g, or c
  misc_feature (11)..(11): n equals a,t,g, or c
  misc_feature (60)..(60): n equals a,t,g, or c
  misc_feature (62)..(63): n equals a,t,g, or c
gcggacgcntnggcaagatctacgaagagagatagatctaccgaagagagatagattttnannc

SEQ ID NO: 3220 - DNA, 62 bp, Homo sapiens
  misc_feature (10)..(10): n equals a,t,g, or c
  misc_feature (42)..(42): n equals a,t,g, or c
  misc_feature (47)..(47): n equals a,t,g, or c
  misc_feature (50)..(50): n equals a,t,g, or c
  misc_feature (58)..(58): n equals a,t,g, or c
gcaaatagtntatcaaccccagactatttgtttgacatgggncaatnttnagaatatnttgg

SEQ ID NO: 3221 - DNA, 80 bp, Homo sapiens
  misc_feature (46)..(46): n equals a,t,g, or c
  misc_feature (52)..(52): n equals a,t,g, or c
  misc_feature (59)..(59): n equals a,t,g, or c
  misc_feature (64)..(64): n equals a,t,g, or c
  misc_feature (79)..(79): n equals a,t,g, or c
ggtcttctttaggtagcagaggtgcagaggaggagtttagatgacntttganacctcantcatnaaggcctacagaatnt

SEQ ID NO: 3222 - DNA, 74 bp, Homo sapiens
  misc_feature (10)..(10): n equals a,t,g, or c
  misc_feature (63)..(64): n equals a,t,g, or c
  misc_feature (71)..(71): n equals a,t,g, or c
gcttctgagntaggagaacttattccaccttcaaaacctagtttgggctgggtgcagtggttnnactaatncca

SEQ ID NO: 3223 - DNA, 385 bp, Homo sapiens
  misc_feature (19)..(20): n equals a,t,g, or c
  misc_feature (34)..(34): n equals a,t,g, or c
  misc_feature (85)..(85): n equals a,t,g, or c
  misc_feature (92)..(92): n equals a,t,g, or c
  misc_feature (109)..(110): n equals a,t,g, or c
  misc_feature (138)..(138): n equals a,t,g, or c
  misc_feature (146)..(146): n equals a,t,g, or c
  misc_feature (151)..(151): n equals a,t,g, or c
  misc_feature (198)..(198): n equals a,t,g, or c
  misc_feature (216)..(216): n equals a,t,g, or c
  misc_feature (226)..(226): n equals a,t,g, or c
  misc_feature (230)..(230): n equals a,t,g, or c
  misc_feature (233)..(233): n equals a,t,g, or c
  misc_feature (250)..(250): n equals a,t,g, or c
  misc_feature (258)..(258): n equals a,t,g, or c
  misc_feature (263)..(263): n equals a,t,g, or c
  misc_feature (269)..(269): n equals a,t,g, or c
  misc_feature (271)..(271): n equals a,t,g, or c
  misc_feature (274)..(274): n equals a,t,g, or c
  misc_feature (305)..(305): n equals a,t,g, or c
  misc_feature (311)..(311): n equals a,t,g, or c
  misc_feature (326)..(326): n equals a,t,g, or c
  misc_feature (348)..(348): n equals a,t,g, or c
  misc_feature (366)..(366): n equals a,t,g, or c
cttgctatagctctgagcnngtactcccgcaggnacccgtccggaattcccgggtcgacccacgcgtccgcccacgcttttcgantactatnctttacagggaaaaaanngggctgttgtgggcatcctatgcagaancatatttncgctnggttcgaaagattatgatgcatcagctctctagcaaatcttctttgnttctttttacagcattgnccttgcttgnaccnttngctgatggctgctagantttaaatntatcntgatcncntanttgataatattagtgattccgatttcagctntcattngctatgcttttgctnatttctcatgtaacatttggtnaacgattccaggaatatngacacataggtgggaataa

SEQ ID NO: 3224 - DNA, 90 bp, Homo sapiens
  misc_feature (2)..(2): n equals a,t,g, or c
  misc_feature (34)..(34): n equals a,t,g, or c
  misc_feature (60)..(60): n equals a,t,g, or c
  misc_feature (72)..(72): n equals a,t,g, or c
  misc_feature (88)..(88): n equals a,t,g, or c
gntctgtctgtattattattcacctataattagncattatgagataatgataatacagtnggatagtaaagnttataatatataaatnga

SEQ ID NO: 3225 - DNA, 91 bp, Homo sapiens
  misc_feature (12)..(12): n equals a,t,g, or c
  misc_feature (47)..(47): n equals a,t,g, or c
  misc_feature (50)..(50): n equals a,t,g, or c
  misc_feature (57)..(57): n equals a,t,g, or c
  misc_feature (74)..(74): n equals a,t,g, or c
gaaactattacnttgtaagaactctgcctatgcttgctaaatatagnggngaattantggtttactaaaataancaggaagaggggaaaaa

SEQ ID NO: 3226 - DNA, 413 bp, Homo sapiens
  misc_feature (39)..(39): n equals a,t,g, or c
  misc_feature (413)..(413): n equals a,t,g, or c
gttttcatctatcttggcaggaagtgagtatgcgacatntaagattgagacatcaaaaattcacagcatgagcagattgtttacagatggggtaactaaaaacaatgaggtaaatgtggttgcctctgggaaaaacactggaggcattggaaagggttgggttgggggcctgttgttttttgcattcgcccccttgagttcatttgttctttcatctaacagacacttactgtttgccaaacacatgtaaatgaaacgactttactgaagatttgaggacgtgagatattttctgtcaccacagtgccagatttaaaattgaatattagagaaacttgttcttaaaactttttgctaggcactttatgccaaccatgttgctaccctcttctctccgtcctcttacattcttn

SEQ ID NO: 3227 - DNA, 146 bp, Homo sapiens
  misc_feature (5)..(5): n equals a,t,g, or c
  misc_feature (12)..(12): n equals a,t,g, or c
  misc_feature (21)..(23): n equals a,t,g, or c
  misc_feature (127)..(128): n equals a,t,g, or c
  misc_feature (131)..(131): n equals a,t,g, or c
  misc_feature (136)..(136): n equals a,t,g, or c
  misc_feature (139)..(139): n equals a,t,g, or c
aggangcttaanttatcttannnaaacttctgactatagttaaagctggtacccctgcaggtaccggtccggaattcccgggtcgacccacgcgtccgttacctctctgccaagtttggtggaaaannggncaaanttnaaaaaat

SEQ ID NO: 3228 - DNA, 55 bp, Homo sapiens
  misc_feature (15)..(15): n equals a,t,g, or c
  misc_feature (17)..(17): n equals a,t,g, or c
  misc_feature (28)..(28): n equals a,t,g, or c
gacctctactatagntnaagctggtacncctgcaggtaccggtccggaattcccg

SEQ ID NO: 3229 - DNA, 277 bp, Homo sapiens
  misc_feature (8)..(8): n equals a,t,g, or c
  misc_feature (18)..(18): n equals a,t,g, or c
  misc_feature (23)..(23): n equals a,t,g, or c
  misc_feature (27)..(27): n equals a,t,g, or c
  misc_feature (39)..(39): n equals a,t,g, or c
  misc_feature (115)..(115): n equals a,t,g, or c
  misc_feature (147)..(147): n equals a,t,g, or c
  misc_feature (158)..(158): n equals a,t,g, or c
  misc_feature (167)..(167): n equals a,t,g, or c
  misc_feature (172)..(172): n equals a,t,g, or c
  misc_feature (235)..(235): n equals a,t,g, or c
  misc_feature (243)..(244): n equals a,t,g, or c
  misc_feature (254)..(254): n equals a,t,g, or c
  misc_feature (259)..(259): n equals a,t,g, or c
tagcccangctgggacgnctgcnggtnccggtccggaantcccgggtcgacccacgcgtccgcccacagcgtcctggaatttttttcttttgaaagctatgtaggtggactttgngattatgtaagcataaagctaatgggattggngggagccccanctgagagcnggcangtgctggacaatcttctctcagccttgctctgctaatgtctccctgggtgtaggctggcctcntgctgctnntgttatgcancacancaagataactgcctgctg

SEQ ID NO: 3230 - DNA, 382 bp, Homo sapiens
  misc_feature (309)..(309): n equals a,t,g, or c
  misc_feature (343)..(343): n equals a,t,g, or c
  misc_feature (357)..(357): n equals a,t,g, or c
  misc_feature (370)..(370): n equals a,t,g, or c
  misc_feature (375)..(375): n equals a,t,g, or c
gctggcctgtttttataactttatttttcaaatattaacaaccactgctttcagagtggttattttgttatttttgaagcaggaaataaccatttgtatttgcacctgcgtattgcatatgaattatggtatacttggcaaatgcttttcttttacctgtgaaaattctgaaagctggtccaagctacattgcataccaaattgtgctcttatatattatttgcatcgtgtcctttttaatcaaatagcatgttttagttttattatagtaagctttttgctgtaagaatggcacttgcttaacctttnaatggaccttggaatctttaaattattgcttttnaacattggtaattnaaaccaaaattcnatttncgtaatt

SEQ ID NO: 3231 - DNA, 142 bp, Homo sapiens
  misc_feature (3)..(3): n equals a,t,g, or c
  misc_feature (8)..(8): n equals a,t,g, or c
  misc_feature (19)..(19): n equals a,t,g, or c
  misc_feature (28)..(28): n equals a,t,g, or c
  misc_feature (30)..(30): n equals a,t,g, or c
  misc_feature (118)..(118): n equals a,t,g, or c
  misc_feature (122)..(122): n equals a,t,g, or c
  misc_feature (135)..(135): n equals a,t,g, or c
  misc_feature (139)..(139): n equals a,t,g, or c
  misc_feature (142)..(142): n equals a,t,g, or c
acncccanttgaaaccccncactcattntngggaaagctggcacgcctgcaggtaccggtccggaattcccgggtcgacccacgctttcgcaggagtctgccacttgtcaaagaaggngttnatcctgagtcttnccantcn

SEQ ID NO: 3232 - DNA, 679 bp, Homo sapiens
  misc_feature (9)..(9): n equals a,t,g, or c
  misc_feature (41)..(41): n equals a,t,g, or c
  misc_feature (458)..(459): n equals a,t,g, or c
  misc_feature (461)..(461): n equals a,t,g, or c
  misc_feature (480)..(480): n equals a,t,g, or c
  misc_feature (523)..(523): n equals a,t,g, or c
  misc_feature (569)..(569): n equals a,t,g, or c
  misc_feature (604)..(604): n equals a,t,g, or c
  misc_feature (638)..(638): n equals a,t,g, or c
  misc_feature (652)..(652): n equals a,t,g, or c
  misc_feature (669)..(669): n equals a,t,g, or c
  misc_feature (672)..(672): n equals a,t,g, or c
gaatttgcnttaaggtcagctagcatcctgctggcaagccnctgcatagcatttgtgataagaaggaccaactctaggctcaatatgaagggatttagttctgtaagcagcaaaaaagcttctttatcaagtcatcttacctctaattcttttccagtgtgccaactccaaagtcaacattaaaaatgtaaatggacctgtgtaaatatcacagagagcttttccttatacatctcaatgctgagagttaaaatattcccaggttaaaatttttttaaagtaccaataatagagctaaatacaatgacatttgcttttaaaaggtggatattttatttctgctttttgaaaatacttatttagtattgacttggaagccaatttgggtcctttaataagtaaagaaaataatatgtttaaaaatgtaaatgttttacaaattttgaaactttcataanngnattaatcagaaaacaagcncattgccattctttgaaactcatgtttctagacatgacagcangtcaataaaaggatgaaaacaagtgtcttcactaagccgtattggncaataaatgggacccaaacgttcaatctgttcaanttaccaaaggttcaaaaaatacgtaatttagcanggaaacctttcatnccagtggctatcccagnccncacattc

SEQ ID NO: 3233 - DNA, 503 bp, Homo sapiens
  misc_feature (11)..(11): n equals a,t,g, or c
  misc_feature (38)..(38): n equals a,t,g, or c
  misc_feature (363)..(363): n equals a,t,g, or c
  misc_feature (420)..(420): n equals a,t,g, or c
  misc_feature (426)..(426): n equals a,t,g, or c
  misc_feature (442)..(442): n equals a,t,g, or c
  misc_feature (488)..(488): n equals a,t,g, or c
  misc_feature (491)..(491): n equals a,t,g, or c
gcccacgcgtncgattgggtctttagccttatgaattngagctgcttatttaattggtgtaatttactacatattagtactatattcgtaaggattttttattaaccattacagattttacaaacagctagttatatggtaaacagattattatgcctttttgcaattctgaatatgattctagtatttgtgtagatgtatttggtactttttcccctaattccaacactagtttatatatatagcgaataaatctagttgtataaatttttaaatgccgtcagtagaaagcacacaaggttatgatttttttaattactggcttctgatttctttcacttctgatccttttctttttctcanatgtagctgagtcttgatcattttaagacaacgatgggtagaatttgagaataatgntaattntccttttgtaattcanccctttactatgctttgccagaagatcagaatctccatccttgggnttnggataaccatgt

SEQ ID NO: 3234 - DNA, 105 bp, Homo sapiens
  misc_feature (1)..(1): n equals a,t,g, or c
  misc_feature (16)..(16): n equals a,t,g, or c
  misc_feature (63)..(63): n equals a,t,g, or c
  misc_feature (75)..(75): n equals a,t,g, or c
  misc_feature (86)..(86): n equals a,t,g, or c
  misc_feature (102)..(102): n equals a,t,g, or c
nacctggataacccgntctcgaaggggcggcggcagcggcaagcggaggaggcggaggcctgngagggggcctgngaaaagggctnggaaggcctgaacagnggg

SEQ ID NO: 3235 - DNA, 111 bp, Homo sapiens
  misc_feature (44)..(44): n equals a,t,g, or c
  misc_feature (50)..(51): n equals a,t,g, or c
  misc_feature (83)..(83): n equals a,t,g, or c
  misc_feature (89)..(89): n equals a,t,g, or c
aaggcccccagcaggtaccggtccggaattcccgggtctacccncgcgtnnttttaagccctataacaagctaaaaaacaggncaactntaaacgaaaaccccgaaaacta

SEQ ID NO: 3236 - DNA, 252 bp, Homo sapiens
  misc_feature (14)..(14): n equals a,t,g, or c
  misc_feature (63)..(63): n equals a,t,g, or c
  misc_feature (71)..(71): n equals a,t,g, or c
  misc_feature (73)..(73): n equals a,t,g, or c
  misc_feature (81)..(81): n equals a,t,g, or c
  misc_feature (108)..(108): n equals a,t,g, or c
  misc_feature (110)..(110): n equals a,t,g, or c
  misc_feature (119)..(120): n equals a,t,g, or c
  misc_feature (128)..(128): n equals a,t,g, or c
  misc_feature (133)..(133): n equals a,t,g, or c
  misc_feature (142)..(143): n equals a,t,g, or c
  misc_feature (148)..(148): n equals a,t,g, or c
  misc_feature (186)..(186): n equals a,t,g, or c
  misc_feature (200)..(200): n equals a,t,g, or c
  misc_feature (205)..(205): n equals a,t,g, or c
  misc_feature (213)..(213): n equals a,t,g, or c
  misc_feature (234)..(234): n equals a,t,g, or c
gaaaggtcggaagncccaggaccggtccggaattcccgggtcgaccccgcttccccggacgcnttttaaancngcaactgngtctttagagctaggggccacattaancnttgcactgnncagcatcnggctntatggaacnnaagtntaccaaatataaaaagaaacttctgcttttaaaaaaantatatatatatatnaaatncgaaaccngcatttctcccacggcaatgnaagaagtagggcgggtga

SEQ ID NO: 3237 - DNA, 70 bp, Homo sapiens
  misc_feature (4)..(4): n equals a,t,g, or c
  misc_feature (16)..(16): n equals a,t,g, or c
  misc_feature (56)..(56): n equals a,t,g, or c
tttngcacccaagggnatgctggcccggggggagctttaggatcaaagcccgcttnacaagacgacgaac

SEQ ID NO: 3238 - DNA, 452 bp, Homo sapiens
  misc_feature (33)..(33): n equals a,t,g, or c
  misc_feature (40)..(40): n equals a,t,g, or c
  misc_feature (42)..(42): n equals a,t,g, or c
  misc_feature (260)..(260): n equals a,t,g, or c
  misc_feature (362)..(362): n equals a,t,g, or c
  misc_feature (373)..(373): n equals a,t,g, or c
  misc_feature (430)..(430): n equals a,t,g, or c
  misc_feature (438)..(438): n equals a,t,g, or c
  misc_feature (451)..(451): n equals a,t,g, or c
ttttcgccgccgtctccctcccttgcccggggngcatttngnccttttgcccgcctggccaccgcccctaggggccccctttctgcccttcccgcacccctagtggggctttgtctcggcgcccagaaaatggcgacggggcccctggcgaccccttccccgaggacagcgccggactccgagccctcctctcggagccccggccgcgggccctgcgccaccccctgccccgtccttgacccggctctcgcctccgcttntgccccttgaaaccttggcgatcctatttcgtggactcctagatcggccctgctacttgcaaagggtatgccgggccagggaaaccagggatcggcgcccgntctctggcagntcctgggggcacttagggaaagatgcggatgcaagccttgaactggcactggccagnggttcagncttcactgcttgng

SEQ ID NO: 3239 - DNA, 99 bp, Homo sapiens
  misc_feature (12)..(12): n equals a,t,g, or c
  misc_feature (21)..(21): n equals a,t,g, or c
  misc_feature (24)..(24): n equals a,t,g, or c
  misc_feature (30)..(30): n equals a,t,g, or c
  misc_feature (38)..(38): n equals a,t,g, or c
  misc_feature (55)..(56): n equals a,t,g, or c
  misc_feature (93)..(93): n equals a,t,g, or c
gcggccgcacancaagaattnagngaaggnccccctgnaggtaccggtccggaanncccgggacgtcccacgcgacctttttaaacgcaaatntaacaa

SEQ ID NO: 3240 - DNA, 440 bp, Homo sapiens
  misc_feature (9)..(10): n equals a,t,g, or c
  misc_feature (305)..(305): n equals a,t,g, or c
  misc_feature (354)..(354): n equals a,t,g, or c
  misc_feature (376)..(376): n equals a,t,g, or c
  misc_feature (385)..(385): n equals a,t,g, or c
  misc_feature (413)..(413): n equals a,t,g, or c
  misc_feature (429)..(429): n equals a,t,g, or c
ttttacgcnnccgggtgtgctgcttgattgagggctccttagagggggagatacacacgcacacacacatgctcacccccgggctgcacccctcacctctgccacagcactgagggcctcccccgcgttgctgttctcccaggaattccacggcctttgagtacctggaggagttccccatacagatgctggcccagctggagacactcacagggaggaaggcaaagcacgggctcttcgcatcaacatggaatatggcagaaatttctctggccccgacaaggacgtcttctttgatgaccggnctgtggggcacacagaagatgcctggcagtctaactttcttcatcctgncatctactactatagatacctncccaccggngagcaggtctctgccttccccaacctgngggctcctcaaaactnaccgctgcaaa

SEQ ID NO: 3241 - DNA, 528 bp, Homo sapiens
  misc_feature (455)..(455): n equals a,t,g, or c
  misc_feature (470)..(470): n equals a,t,g, or c
  misc_feature (492)..(492): n equals a,t,g, or c
  misc_feature (515)..(515): n equals a,t,g, or c
  misc_feature (522)..(522): n equals a,t,g, or c
tttcataaaaaaataagagtggaggaatagggcaatattttgccttaggtaaccagatgaattgcaaccattaacatctgaggcaacatctgaagaggaagtgcgttattgggaaatatgataaatttaatttcattgcatttacagtgtctgtgggacatcagctggaggtattcaatgaatgtctggatatagagcaatgtctcagaagaaagtctagaaatagtgctgtccaatagaaacctactgtgaccctcaaatgcaaattatttagtacattaattacgttttatttaacacaatatatctaaaatgttatttcatcttgtaatcaatacaaagttattaagatgttttcttgccagatcttaaacttggtgtgtaattttatacttagcacatctcaagccatatgtcagatgctcggtagccgtatgtggcttggggactaccgnatgggacagtgccgntccagaatatggtaatggggangattataccttaacaatgggcanttgaaanactgca

SEQ ID NO: 3242 - DNA, 58 bp, Homo sapiens
  misc_feature (5)..(5): n equals a,t,g, or c
  misc_feature (40)..(40): n equals a,t,g, or c
  misc_feature (44)..(44): n equals a,t,g, or c
gaatntttaaaaacaggacaagcactacaagatacggggnctanttaaaaaaacaaaa

SEQ ID NO: 3243 - DNA, 179 bp, Homo sapiens
  misc_feature (2)..(3): n equals a,t,g, or c
  misc_feature (27)..(28): n equals a,t,g, or c
  misc_feature (65)..(65): n equals a,t,g, or c
  misc_feature (106)..(106): n equals a,t,g, or c
  misc_feature (134)..(134): n equals a,t,g, or c
  misc_feature (143)..(143): n equals a,t,g, or c
  misc_feature (150)..(150): n equals a,t,g, or c
  misc_feature (172)..(172): n equals a,t,g, or c
gnngaagatttaagataactaagcacnntaaacttgtaggcatctaataaattagccttaaaatntataaagcaaaaatataactacaaggagaaattggcaaatnctcacttacagtgggagaattgcatacngctctcagntaatganaggacaagcaaacaaaactagnaaacata

SEQ ID NO: 3244 - DNA, 122 bp, Homo sapiens
  misc_feature (1)..(1): n equals a,t,g, or c
  misc_feature (6)..(6): n equals a,t,g, or c
  misc_feature (20)..(20): n equals a,t,g, or c
  misc_feature (31)..(31): n equals a,t,g, or c
  misc_feature (39)..(39): n equals a,t,g, or c
  misc_feature (106)..(106): n equals a,t,g, or c
  misc_feature (112)..(112): n equals a,t,g, or c
  misc_feature (115)..(115): n equals a,t,g, or c
ntaaancattaagcggctgntaaaagtgggncaaatttnagggggctgagcctggtggctcacatttggtatcttataggctataaattagagctattcgccaacncctgancangccaggc

SEQ ID NO: 3245 - DNA, 53 bp, Homo sapiens
  misc_feature (29)..(29): n equals a,t,g, or c
  misc_feature (37)..(37): n equals a,t,g, or c
  misc_feature (43)..(43): n equals a,t,g, or c
  misc_feature (45)..(45): n equals a,t,g, or c
  misc_feature (50)..(50): n equals a,t,g, or c
cgatttttttcaaaggttaaaatggaccntggtttgnaaagananttcantgg

SEQ ID NO: 3246 - DNA, 423 bp, Homo sapiens
  misc_feature (2)..(2): n equals a,t,g, or c
  misc_feature (5)..(5): n equals a,t,g, or c
  misc_feature (23)..(23): n equals a,t,g, or c
  misc_feature (51)..(51): n equals a,t,g, or c
  misc_feature (54)..(54): n equals a,t,g, or c
  misc_feature (77)..(77): n equals a,t,g, or c
  misc_feature (103)..(103): n equals a,t,g, or c
  misc_feature (110)..(110): n equals a,t,g, or c
  misc_feature (112)..(112): n equals a,t,g, or c
  misc_feature (120)..(120): n equals a,t,g, or c
  misc_feature (127)..(127): n equals a,t,g, or c
  misc_feature (149)..(150): n equals a,t,g, or c
  misc_feature (169)..(169): n equals a,t,g, or c
  misc_feature (176)..(176): n equals a,t,g, or c
  misc_feature (179)..(179): n equals a,t,g, or c
  misc_feature (196)..(196): n equals a,t,g, or c
  misc_feature (199)..(199): n equals a,t,g, or c
  misc_feature (209)..(209): n equals a,t,g, or c
  misc_feature (223)..(223): n equals a,t,g, or c
  misc_feature (229)..(229): n equals a,t,g, or c
  misc_feature (236)..(236): n equals a,t,g, or c
  misc_feature (241)..(241): n equals a,t,g, or c
  misc_feature (247)..(247): n equals a,t,g, or c
  misc_feature (251)..(251): n equals a,t,g, or c
  misc_feature (254)..(254): n equals a,t,g, or c
  misc_feature (259)..(259): n equals a,t,g, or c
  misc_feature (277)..(277): n equals a,t,g, or c
  misc_feature (287)..(287): n equals a,t,g, or c
  misc_feature (327)..(327): n equals a,t,g, or c
  misc_feature (340)..(340): n equals a,t,g, or c
  misc_feature (345)..(345): n equals a,t,g, or c
  misc_feature (373)..(373): n equals a,t,g, or c
  misc_feature (376)..(376): n equals a,t,g, or c
  misc_feature (385)..(385): n equals a,t,g, or c
  misc_feature (395)..(395): n equals a,t,g, or c
  misc_feature (409)..(409): n equals a,t,g, or c
  misc_feature (419)..(419): n equals a,t,g, or c
tntgngaccccagatggcattcncaaaaccccttcgagaaggaacccaggnacncctgcaggcaccggtccggaagncccgggacgacccacgcttttcgctnttcccancngaggggancccaggngcgggtcaaaaaagcgaaccanncggacagggacacaaaccnagacagntangaacgctgagagaggantgncaacaagcanggcgagcccacggncacacnggcaccngagcngacccncganagncccancgaaactgaggcgtgccngcaggacagngagcaggccctcaggagccaaagggatgcaaggaacgaancctggataccaangaggngacccacgaagaacacagatgaaacaangancaaccgagngctaggggcncacagagacaacancccggagagnataa

SEQ ID NO: 3247 - DNA, 130 bp, Homo sapiens
  misc_feature (18)..(18): n equals a,t,g, or c
  misc_feature (28)..(28): n equals a,t,g, or c
  misc_feature (50)..(50): n equals a,t,g, or c
  misc_feature (60)..(60): n equals a,t,g, or c
  misc_feature (81)..(81): n equals a,t,g, or c
  misc_feature (116)..(116): n equals a,t,g, or c
  misc_feature (124)..(124): n equals a,t,g, or c
gaagaagcaagagaccangcccaatgangccaagaacatcagggccggcntggcaagaangaatgggaggactgacggaanggatggcaaccaaccgaaggcggacacaggacgcnaggacatnaaagca

SEQ ID NO: 3248 - DNA, 99 bp, Homo sapiens
  misc_feature (14)..(14): n equals a,t,g, or c
  misc_feature (16)..(16): n equals a,t,g, or c
  misc_feature (19)..(20): n equals a,t,g, or c
  misc_feature (26)..(26): n equals a,t,g, or c
  misc_feature (37)..(37): n equals a,t,g, or c
  misc_feature (50)..(50): n equals a,t,g, or c
  misc_feature (64)..(64): n equals a,t,g, or c
  misc_feature (81)..(81): n equals a,t,g, or c
tattggaaaaacgngnacnnatccgngaaaacccctnactatatttgagncgaaaggtcccccngcaggtaccggtccggnattcccggggcgactaac

SEQ ID NO: 3249 - DNA, 118 bp, Homo sapiens
  misc_feature (1)..(1): n equals a,t,g, or c
  misc_feature (23)..(23): n equals a,t,g, or c
  misc_feature (35)..(35): n equals a,t,g, or c
  misc_feature (39)..(39): n equals a,t,g, or c
  misc_feature (50)..(50): n equals a,t,g, or c
  misc_feature (107)..(107): n equals a,t,g, or c
ncccggacccacacacacctagnggggaaaaaganccgngcccacagacnattagacaagagataacacagggatacaccgagaaaatatacccagagagatacagnaccccaacagc

SEQ ID NO: 3250 - DNA, 116 bp, Homo sapiens
  misc_feature (2)..(2): n equals a,t,g, or c
  misc_feature (13)..(13): n equals a,t,g, or c
  misc_feature (51)..(51): n equals a,t,g, or c
  misc_feature (96)..(97): n equals a,t,g, or c
  misc_feature (109)..(110): n equals a,t,g, or c
anggcagcgagcngggagcacagacccagaacgaagacaagaacgaccggnacaacgccaacggagctcaagaggcgaacaagccgcaagacaagnnggacggaaacannaaaaaa

SEQ ID NO: 3251 - DNA, 139 bp, Homo sapiens
  misc_feature (18)..(18): n equals a,t,g, or c
  misc_feature (20)..(20): n equals a,t,g, or c
  misc_feature (23)..(23): n equals a,t,g, or c
  misc_feature (25)..(25): n equals a,t,g, or c
  misc_feature (41)..(41): n equals a,t,g, or c
  misc_feature (103)..(103): n equals a,t,g, or c
  misc_feature (107)..(107): n equals a,t,g, or c
  misc_feature (112)..(112): n equals a,t,g, or c
  misc_feature (133)..(133): n equals a,t,g, or c
ataagctaagtgagtagngnttncnaacctgaagaccacgncacagctcgtatgctgatggtcatttgcattaagatgaacaatttctaaaaacatacataanaaanagtancaatcaactgagcaaaaatangggaaa

SEQ ID NO: 3252 - DNA, 105 bp, Homo sapiens
  misc_feature (28)..(28): n equals a,t,g, or c
  misc_feature (40)..(40): n equals a,t,g, or c
  misc_feature (53)..(53): n equals a,t,g, or c
  misc_feature (72)..(72): n equals a,t,g, or c
  misc_feature (77)..(77): n equals a,t,g, or c
cacaacacctaccacagggaaaaccgcnacgcccgcaggnaccggtccggaantcccgggtcgacccacgcntttcngccaaacatggcggggcaggacgggggg

SEQ ID NO: 3253 - DNA, 522 bp, Homo sapiens
  misc_feature (468)..(468): n equals a,t,g, or c
  misc_feature (499)..(499): n equals a,t,g, or c
  misc_feature (516)..(516): n equals a,t,g, or c
  misc_feature (521)..(522): n equals a,t,g, or c
ggacgcgtggggtagccccaagaaggctggggctatttaccagggtagaaaaaggagcttacctcccacctttggtcctaagtccctgccccctccccttcacaccataactaggtaacagtttgataactagggaagaaagcagaacagttaagcagccgccacatccccgctggctgggggcctcactccaggaaggggctggactggctgtcctttccagtggcctggctccgctgtgtggatggggagatcggggccagaggcagaaccctggtgaggaagctccagtcctgctctctacccagcccatcttgcctccatggtgcctctggaggcctctgggcctcctctaacaggggctggtgggcaccaagagccaatggagtagacccctggctggtaagggccaagtcccaccggttgcttctgggaaagggtttctaacactagtctgtgtgctggggntcctggggtgcccttcactggccttttggtnaataacaagggccttgnttaann

SEQ ID NO: 3254 - DNA, 395 bp, Homo sapiens
  misc_feature (266)..(266): n equals a,t,g, or c
  misc_feature (282)..(282): n equals a,t,g, or c
  misc_feature (361)..(361): n equals a,t,g, or c
ggggcatgccaggacagctggttccaaagtcaactgcattccctgccgaggagccagggctgaattcttcatcacagcctggttatggcttaggcattataaatgatgctgtgctgacagccaggtggacagcctgcctaactggatgatgcttcatctgtcctgacagggacagccctgcaaatagaatctgagggatggcagacctattggagtcatcgtgtcctttcactgagtctggtgggactctcttccactcatcttanactggaagatgcctgncttttttctttcttataagtcttcacagagaaagggagctttttcccaagacacactttatttttcttttggcaatggntagtgcaagggttaaaaagttcttgaagtcaaat

SEQ ID NO: 3255 - DNA, 142 bp, Homo sapiens
  misc_feature (2)..(2): n equals a,t,g, or c
  misc_feature (21)..(21): n equals a,t,g, or c
  misc_feature (28)..(28): n equals a,t,g, or c
  misc_feature (34)..(34): n equals a,t,g, or c
  misc_feature (46)..(46): n equals a,t,g, or c
  misc_feature (123)..(123): n equals a,t,g, or c
  misc_feature (134)..(134): n equals a,t,g, or c
  misc_feature (141)..(142): n equals a,t,g, or c
antaatttttatgatcttctnctatttngaaagntggtacccctgnaggtaccggtccggaattcccgggtcgacccacgcgtccttacgggcgagggcatggacgagatggagttcaccgangtgggatgtgntacccann

SEQ ID NO: 3256 - DNA, 105 bp, Homo sapiens
  misc_feature (4)..(4): n equals a,t,g, or c
  misc_feature (31)..(31): n equals a,t,g, or c
  misc_feature (33)..(33): n equals a,t,g, or c
  misc_feature (56)..(56): n equals a,t,g, or c
  misc_feature (98)..(98): n equals a,t,g, or c
  misc_feature (100)..(100): n equals a,t,g, or c
gttntagttctagatcgcgagcggccgcccngnttttttttaattttttttttccntttttttggcatcattaacatttcatttgaaatgcatattgntnttgaa

SEQ ID NO: 3257 - DNA, 388 bp, Homo sapiens
  misc_feature (6)..(6): n equals a,t,g, or c
  misc_feature (34)..(34): n equals a,t,g, or c
  misc_feature (41)..(41): n equals a,t,g, or c
  misc_feature (255)..(255): n equals a,t,g, or c
ggggtnggtctcttacccttgatgttttgttttnttccatnactaaaatatttggtggacttgaaagtgaccttgtcctgatttcagaattagaaatttagtgagtgtttttattgccttaggcagcacttgcttaatgtggatgacatgtcaatggcattaaatcaccattgagccacaggctgtgaagggagccagtcagcatcagttttctgactattgtgcctaagaaactcaaaaagatttgtgctgcangcatcccgaaggattgggacccacatgggccttgatgtgcgtttctgtaggccagagcccagccaaggctcctggcatgtttttcttcacctttgcaggctaacagaaatgtcttgattctctttcaaatcaa

SEQ ID NO: 3258 - DNA, 689 bp, Homo sapiens
  misc_feature (1)..(1): n equals a,t,g, or c
  misc_feature (8)..(8): n equals a,t,g, or c
  misc_feature (10)..(10): n equals a,t,g, or c
  misc_feature (75)..(75): n equals a,t,g, or c
  misc_feature (81)..(81): n equals a,t,g, or c
  misc_feature (124)..(124): n equals a,t,g, or c
  misc_feature (176)..(176): n equals a,t,g, or c
  misc_feature (182)..(182): n equals a,t,g, or c
  misc_feature (197)..(197): n equals a,t,g, or c
  misc_feature (266)..(267): n equals a,t,g, or c
  misc_feature (280)..(280): n equals a,t,g, or c
  misc_feature (308)..(308): n equals a,t,g, or c
  misc_feature (311)..(311): n equals a,t,g, or c
  misc_feature (320)..(320): n equals a,t,g, or c
  misc_feature (362)..(362): n equals a,t,g, or c
  misc_feature (368)..(369): n equals a,t,g, or c
  misc_feature (402)..(402): n equals a,t,g, or c
  misc_feature (405)..(406): n equals a,t,g, or c
  misc_feature (416)..(416): n equals a,t,g, or c
  misc_feature (431)..(432): n equals a,t,g, or c
  misc_feature (437)..(437): n equals a,t,g, or c
  misc_feature (446)..(446): n equals a,t,g, or c
  misc_feature (467)..(467): n equals a,t,g, or c
  misc_feature (484)..(484): n equals a,t,g, or c
  misc_feature (511)..(511): n equals a,t,g, or c
  misc_feature (526)..(526): n equals a,t,g, or c
  misc_feature (533)..(534): n equals a,t,g, or c
  misc_feature (539)..(539): n equals a,t,g, or c
  misc_feature (563)..(563): n equals a,t,g, or c
  misc_feature (570)..(570): n equals a,t,g, or c
  misc_feature (577)..(577): n equals a,t,g, or c
  misc_feature (580)..(580): n equals a,t,g, or c
  misc_feature (591)..(592): n equals a,t,g, or c
  misc_feature (602)..(602): n equals a,t,g, or c
  misc_feature (606)..(606): n equals a,t,g, or c
  misc_feature (621)..(622): n equals a,t,g, or c
  misc_feature (648)..(648): n equals a,t,g, or c
  misc_feature (653)..(653): n equals a,t,g, or c
  misc_feature (665)..(665): n equals a,t,g, or c
  misc_feature (668)..(668): n equals a,t,g, or c
  misc_feature (670)..(670): n equals a,t,g, or c
naacctgngnatagcttagaaatagccatgctggagtattatgtccagaaggtaacctgctaatgctagcacgcntcgcanacactacgaaaggctcgcacagtcaacatggtagtgtatgccnttcacagccaacacgtctatacactggggacttcaccagtcaaaatactccnggtgcnttaaaattaagggcntttaattcaacttaagcggtttccgaataacccaaaatttaaatcaaacggtttaattttttacggagnngaccctttactangggaagggccccccaattttaggacccntcnaaatatttngggcctttaaaggccccaaatattttccaaaccctttaaacnatttannaaatttccaaatttgggaaaaaatttataaaantanncaaatttggnaaaatgggggaaacnntgggntttaaaaanccggggaaatttggggggggnccccccttaaagggggnaaaaaatttggggaactcccccaaaancaatttttattgccnacccttnntttcnggggggaaaaaacccaaacccccnaaatttnagggggnttnttaaaaccccnncccccaaggngggngcaaacctccggccnngtttcctttgggaaaccaaatttttncccgngggtttccattnggncnttgggaaatttttaagttt

SEQ ID NO: 3259 - DNA, 472 bp, Homo sapiens
  misc_feature (7)..(7): n equals a,t,g, or c
  misc_feature (12)..(12): n equals a,t,g, or c
  misc_feature (15)..(15): n equals a,t,g, or c
  misc_feature (18)..(18): n equals a,t,g, or c
  misc_feature (25)..(25): n equals a,t,g, or c
  misc_feature (356)..(356): n equals a,t,g, or c
  misc_feature (413)..(413): n equals a,t,g, or c
  misc_feature (422)..(422): n equals a,t,g, or c
  misc_feature (451)..(451): n equals a,t,g, or c
  misc_feature (457)..(457): n equals a,t,g, or c
  misc_feature (471)..(471): n equals a,t,g, or c
tccactnctgtnggnacngctgcgnaattgccgggtccgacccacgcgtccggagggcgcacccctgagccctgggctctgcttggcatgcccctgaaccccgtttccttcacagactctctgggacttagctccttggacagcaggccccccacagtaactgtgtctgttttctttgctgctgagctcgtgcacagagatgatggctgatgcctccttctccctcagggtacgggtctggcacgtgtgggctcctggtaatgccagtaatggcctctgggtagagtagggtcacgtcactctgagagaattccccattgtgcctacagactcacccctttctttccctcttctgntttcatttccttccctatattcagacagacattcataggatggacatagaaatcatnttaatgacngaaaagacttttaaggaactattcactgnacttancttgtaccaaacanc

SEQ ID NO: 3260 - DNA, 699 bp, Homo sapiens
  misc_feature (1)..(1): n equals a,t,g, or c
  misc_feature (12)..(12): n equals a,t,g, or c
  misc_feature (148)..(148): n equals a,t,g, or c
  misc_feature (163)..(163): n equals a,t,g, or c
  misc_feature (230)..(230): n equals a,t,g, or c
  misc_feature (242)..(242): n equals a,t,g, or c
  misc_feature (279)..(279): n equals a,t,g, or c
  misc_feature (318)..(318): n equals a,t,g, or c
  misc_feature (327)..(327): n equals a,t,g, or c
  misc_feature (330)..(330): n equals a,t,g, or c
  misc_feature (494)..(494): n equals a,t,g, or c
  misc_feature (498)..(498): n equals a,t,g, or c
  misc_feature (510)..(510): n equals a,t,g, or c
  misc_feature (609)..(609): n equals a,t,g, or c
  misc_feature (620)..(620): n equals a,t,g, or c
  misc_feature (639)..(639): n equals a,t,g, or c
  misc_feature (683)..(683): n equals a,t,g, or c
  misc_feature (692)..(692): n equals a,t,g, or c
ncggacgcgtgngtagtgagataagcaggacattttacaaagaaacaagtagctgttcaatagatttccatgaactctgagcacagccaacaatccccgccccccactcctccctacccccaagtgttaccaggcttcattctttagngtcattccagtcctncactaaatttccattagttattaatcatctaaagcttttatctaaagtttaccatttatccttctgnctctggccctgnattcccctactttacagagatatatttaaaaaactgncacttgtaaaagcaaacagacaagtgggatagaatactnaaaagtcanganaatagaaagccttttctgaaattgaatcaccttctaacagctatttctaataaaaaatgtattaagaaagaaagggggaaaaaaaggcttggatcccgaaagacagtttgaatcataacagtgcgagtgcgagacagaagacaatcactttctactctctgctngtcnctaaaggaattncagttaggtattcaagaatggaagaacaccgagagtcagccgttcttctttctctttaaaacaaaaaccaaattcatcttgggcatggtatcaagttgncttgaatgtanaagggaaaaaaaaaggcantttccaaggcattacctaaaaatcaactctttccatttaaatgnggggccatnttggtaa

SEQ ID NO: 3261 - DNA, 132 bp, Homo sapiens
  misc_feature (42)..(42): n equals a,t,g, or c
  misc_feature (49)..(49): n equals a,t,g, or c
  misc_feature (62)..(62): n equals a,t,g, or c
  misc_feature (69)..(69): n equals a,t,g, or c
  misc_feature (82)..(82): n equals a,t,g, or c
agggctccaggaacaccccacgtccgttcttctggaccacancgccctngactgtgaccctnagcgacncttctgtcctgcnctccgaacacacagcgctgtcctggaaaactctgcacacgtgtgcagact

SEQ ID NO: 3262 - DNA, 133 bp, Homo sapiens
  misc_feature (2)..(2): n equals a,t,g, or c
  misc_feature (20)..(21): n equals a,t,g, or c
  misc_feature (45)..(45): n equals a,t,g, or c
  misc_feature (71)..(71): n equals a,t,g, or c
  misc_feature (111)..(111): n equals a,t,g, or c
  misc_feature (119)..(119): n equals a,t,g, or c
  misc_feature (125)..(125): n equals a,t,g, or c
gnatggttgtcgaagccaanntgctgcgagcactcaggcctatgnaagaaaccaagggaagacagtggttngtggaccaaaagggctgtgaagcattcctgggcatgtgcnccaagatntccacntcttggaa

SEQ ID NO: 3263 - DNA, 56 bp, Homo sapiens
  misc_feature (3)..(3): n equals a,t,g, or c
  misc_feature (28)..(28): n equals a,t,g, or c
  misc_feature (32)..(32): n equals a,t,g, or c
  misc_feature (40)..(40): n equals a,t,g, or c
  misc_feature (51)..(51): n equals a,t,g, or c
ggntggctgaagtgtacgaccttgcggncagnaaaccagntgacattgaangctca

SEQ ID NO: 3264 - DNA, 158 bp, Homo sapiens
  misc_feature (17)..(17): n equals a,t,g, or c
  misc_feature (20)..(20): n equals a,t,g, or c
  misc_feature (28)..(28): n equals a,t,g, or c
  misc_feature (40)..(40): n equals a,t,g, or c
  misc_feature (86)..(86): n equals a,t,g, or c
  misc_feature (101)..(101): n equals a,t,g, or c
  misc_feature (116)..(116): n equals a,t,g, or c
  misc_feature (131)..(131): n equals a,t,g, or c
  misc_feature (144)..(144): n equals a,t,g, or c
aagcaatcctgccttancgncccaaagngctagagtgatnattacaggcattgaaccaccatgtacagcccaggattagtttatantctttggttgaaggnctctttttgagacangaacttactcagttncacatgctgattncctaaatgcaggtg

SEQ ID NO: 3265 - DNA, 279 bp, Homo sapiens
  misc_feature (34)..(34): n equals a,t,g, or c
  misc_feature (161)..(161): n equals a,t,g, or c
  misc_feature (194)..(194): n equals a,t,g, or c
  misc_feature (233)..(233): n equals a,t,g, or c
  misc_feature (235)..(235): n equals a,t,g, or c
  misc_feature (253)..(253): n equals a,t,g, or c
  misc_feature (255)..(255): n equals a,t,g, or c
gagaaaaacaagaaaagtggagaatcttcttctnagttgagtcaagagcagaagagtgtctttgatgaagatctgcaaaagaagatagaagagaatgaacggttgcatatacaattttttgaagctgatgagcagcacaagcatgtggaagcagagctgangagtcgactggtcactctggagacagaagcagnccagcaccaagctgtggttgacggtctcacccggaagtncntggaaaccattgagaagntncagaacgacaaggttaaactagaa

SEQ ID NO: 3266 - DNA, 629 bp, Homo sapiens
  misc_feature (460)..(460): n equals a,t,g, or c
  misc_feature (472)..(472): n equals a,t,g, or c
  misc_feature (503)..(503): n equals a,t,g, or c
  misc_feature (572)..(572): n equals a,t,g, or c
  misc_feature (575)..(575): n equals a,t,g, or c
  misc_feature (577)..(577): n equals a,t,g, or c
  misc_feature (591)..(591): n equals a,t,g, or c
  misc_feature (599)..(599): n equals a,t,g, or c
gtccagaaaaataaatatgtgcttatttatctcccctgttctgggttgacaacagagtggttctcctggtagcttccagataccaaatccttgggcgtggaagagcagtaaggcaggagtaggggagagttgggcaatagaattaatataagaaggttctgatctctgtactcttttggtgactaagtcctgaaaaatatatttgccatgtctcaaatttgttggacttctgatacagtgtggcttaatgttcttgctctcgctaacagcaacattttacaatcagtgtcgagcttggatttggcattatgaagtattttgtttggggggcacatatagaagagctacttaggatgaaatagaaggtatgacaacattgtagtttgtgcatatcaaatcatcagatgccatgggatttgagagaagtgggagagaaaagttttggtgtgaataaaactgnaataatgtgtanagctaaaggaacagtgggagacaacctgaantagaaagtgtttcacagagaatgctaattctggagcctgagccactacttttttttttttttttaaacnggntngaaccagactttanctttctgnaaaacttttaaaaacctcttggatgccttg

SEQ ID NO: 3267 - DNA, 489 bp, Homo sapiens
  misc_feature (1)..(1): n equals a,t,g, or c
  misc_feature (198)..(198): n equals a,t,g, or c
  misc_feature (214)..(214): n equals a,t,g, or c
  misc_feature (274)..(274): n equals a,t,g, or c
  misc_feature (315)..(315): n equals a,t,g, or c
  misc_feature (478)..(480): n equals a,t,g, or c
  misc_feature (482)..(483): n equals a,t,g, or c
  misc_feature (485)..(485): n equals a,t,g, or c
ncattcgccttttctaggattgcatttcccaagtgctattgcaataacagttgatactcattttaggtaccaaaccttttgagttcaactgatcaaaccaaaggaaaagtgttgctagagaaaattagggaaaaggtgaaaaagaaaaaatggtagtaattgagcagaaaaaaattaatttatatatgtattgattgncaaccacatttatctnagtagaactgaattggctcggaaaaaagaaaaactgcatgttaatcattttcctaagctntccttttgaggcttagtcagtttattgggaaaatgtttagnattattccttgctattagtactcattttatgtatgttacccttcagtaagttctccccattttagtttcctaggactgaaaggattcttttctacattatacatgtgtgttgtcatatttggcttttgctatatactttaacttcattgttaaaaaaaaaaannnannanaaaa

SEQ ID NO: 3268 - DNA, 110 bp, Homo sapiens
  misc_feature (1)..(1): n equals a,t,g, or c
  misc_feature (53)..(53): n equals a,t,g, or c
  misc_feature (58)..(58): n equals a,t,g, or c
  misc_feature (77)..(77): n equals a,t,g, or c
  misc_feature (87)..(87): n equals a,t,g, or c
  misc_feature (110)..(110): n equals a,t,g, or c
ntagaaatgtactcaagccctatttataaacaaatacttttctacttgaagtntaacncttacagaacatcacctgnaatggccacncacactgtatgtgtgagtcatan

SEQ ID NO: 3269 - DNA, 462 bp, Homo sapiens
  misc_feature (2)..(2): n equals a,t,g, or c
  misc_feature (50)..(50): n equals a,t,g, or c
  misc_feature (60)..(60): n equals a,t,g, or c
  misc_feature (394)..(394): n equals a,t,g, or c
  misc_feature (399)..(399): n equals a,t,g, or c
  misc_feature (434)..(434): n equals a,t,g, or c
  misc_feature (460)..(460): n equals a,t,g, or c
  misc_feature (462)..(462): n equals a,t,g, or c
gnttagcccaccaatgccaagacaaaattatttttcttatacttattttntattaaacanaatgaaaaagatccttttcaaaaaggtgatcctgaaaataaaactaacactccagtattttgtcattgtttttcgcaattgagctatctgaaaactgttattcctaagtaatgttcaaaaatgataagtaatctggatacctttttcttatactttctcctaggaaaactttaaaactttaaaaaggcaaacctaccaataggaataacaaattaaatgtcaagagagtatatccaatattaggatataaaatgtatgtgtctcaagtttaactctacaaaaatttggtacttgtttttaaactctatatataaagttcgacttaatcatgggntgttntaagaagtcttttggagagcaagaacatttttgcntttcttaaaggggggggtttacttgnan

SEQ ID NO: 3270 - DNA, 482 bp, Homo sapiens
  misc_feature (210)..(211): n equals a,t,g, or c
  misc_feature (322)..(322): n equals a,t,g, or c
  misc_feature (365)..(365): n equals a,t,g, or c
  misc_feature (396)..(396): n equals a,t,g, or c
  misc_feature (448)..(448): n equals a,t,g, or c
  misc_feature (452)..(452): n equals a,t,g, or c
  misc_feature (477)..(477): n equals a,t,g, or c
  misc_feature (479)..(479): n equals a,t,g, or c
gcatttctatatcgtctctgcgttacatactcactgagcacttttagaaggaaagggtaaggtggtagagtacaggatctagttgtatacaaaattggttttctcatccatttggagaatttttattttggaataacagatgaaatgatcaggtttgtttatgatgagggggttatttgtggtcataaattcaaatgaccttctttattnnttttctctttgttgacatgtttctcatatgagataaatggccttttgaaaggtacctaccttagcatgtgccacagtatgatgtgttcatgttgatatacataagcatttnctagtcttaaggtctaggggttatgtaatattggatttgcctnaaagtttttgaattacacataccatattctnaacatttaaaaattaaataattttgcttatatatttgattattatgttgggngagnactcctgttatagagtatttattgngncag

SEQ ID NO: 3271 - DNA, 491 bp, Homo sapiens
  misc_feature (5)..(5): n equals a,t,g, or c
  misc_feature (99)..(99): n equals a,t,g, or c
  misc_feature (463)..(463): n equals a,t,g, or c
  misc_feature (469)..(469): n equals a,t,g, or c
  misc_feature (477)..(477): n equals a,t,g, or c
  misc_feature (481)..(481): n equals a,t,g, or c
  misc_feature (488)..(488): n equals a,t,g, or c
gtcantgtcttaattgaggccaccagatacacacatgagaatataaataacggcttgtggcaataatgactaaatgccaaggagtggctggtaaaccgnggtgttccctagagaccccggcctgggctctacttaggctgcctcttggacatcagaccaaggcttacattctgaatccacagggcatccacatgggtggtgtcagtcccccacagacagagaagtgtcccgttgcatttttccatctattccagtagtaagattgtgtcatttgagattttctttaactgtataattggacgtttaattaacaaaccagagaggaggaaaaacaatgaggtgggtagagcatcatgttcagcctcagggctgtacagcaaagcaattttagactgcggatgttgagtcttcagttaccctgagtgccagttacagtgattcacatctgaaagaacagtcttgntgaganggacagtncaangtggatnggc

SEQ ID NO: 3272 - DNA, 105 bp, Homo sapiens
  misc_feature (1)..(1): n equals a,t,g, or c
  misc_feature (42)..(42): n equals a,t,g, or c
  misc_feature (77)..(77): n equals a,t,g, or c
  misc_feature (80)..(80): n equals a,t,g, or c
  misc_feature (87)..(87): n equals a,t,g, or c
  misc_feature (103)..(103): n equals a,t,g, or c
nccccctgaaaatactactatatttcaagctggtacccctgnaggtaccggtccggaattcccgggtcgacccattngcncgctttnaaaaaaaaaaaaaaangg

SEQ ID NO: 3273 - DNA, 536 bp, Homo sapiens
  misc_feature (277)..(278): n equals a,t,g, or c
  misc_feature (285)..(285): n equals a,t,g, or c
  misc_feature (287)..(287): n equals a,t,g, or c
  misc_feature (302)..(304): n equals a,t,g, or c
  misc_feature (309)..(309): n equals a,t,g, or c
  misc_feature (314)..(314): n equals a,t,g, or c
  misc_feature (324)..(324): n equals a,t,g, or c
  misc_feature (336)..(336): n equals a,t,g, or c
  misc_feature (459)..(459): n equals a,t,g, or c
  misc_feature (461)..(461): n equals a,t,g, or c
  misc_feature (464)..(464): n equals a,t,g, or c
  misc_feature (494)..(494): n equals a,t,g, or c
  misc_feature (530)..(530): n equals a,t,g, or c
ggaatcttttaagtgtggtggtaaagattgcaaaataataaaatgacctctgaatttaaaatttagaaaaatatgtcttttctatattgattttacaatttggagaaatttctcttattttttatattttttcttttagtgggagaagtttagtctacggttttttatttttagtcaccaagctgtagccaactcctgggtcattttctctgaaaaacatttggagatcatgacaagttttggattaaaacattctgttattttgcatgcaaactannttactgngntccagactggccaannnttggnacccntatcaacacntgcccctttagnggctttcataccattaccaccagtaccagaaactccaggtggcccaagcttaaagtaaaaatcctaaagcacattggcttctcccatgcaatgtgctgggtccaaaccatgctggtaaatatnanaantcctatggttatgactgactaatgacaatnatagccccaaaatacatatttttgatactatttaanccaaga

SEQ ID NO: 3274 - DNA, 459 bp, Homo sapiens
  misc_feature (3)..(3): n equals a,t,g, or c
  misc_feature (457)..(459): n equals a,t,g, or c
ggnggaacctggctccggcagcccagccccgcgccctctgcctggcccctgttcctagatggtgggcatcgggacgtcggatgtggacctggacaaataccgccacacgttctgcagcctgctgggcagggatgaggacagctggggcctctcctacacgggcctcctccaccacaagggcgacaagaccagcttctcgtcgcggttcggccagggctccatcattggcgtgcacctggacacctggcacggcacactcacctttttcaagaacaggaagtgtataggtgtggcagccaccaagctgcgaggacgagagcctggctggagcccgcgttgctgttcccacagggcctcggtttttcctaacttgctctgcatgctgtcagcggctgccccgccgtcatagacttaaaggactgcaataaatgtagagttgatgtctaaaaaaaaaaannn

SEQ ID NO: 3275 - DNA, 117 bp, Homo sapiens
  misc_feature (33)..(33): n equals a,t,g, or c
  misc_feature (56)..(56): n equals a,t,g, or c
  misc_feature (58)..(58): n equals a,t,g, or c
  misc_feature (83)..(83): n equals a,t,g, or c
  misc_feature (86)..(86): n equals a,t,g, or c
aaaagaggatgaaggataaggttgtagcactgntacaagacccactggtggtgacnanaacggcatgtcctgggaggttaaantanactgaatgcctagatattatcctactgatga

SEQ ID NO: 3276 - DNA, 509 bp, Homo sapiens
  misc_feature (22)..(22): n equals a,t,g, or c
  misc_feature (29)..(29): n equals a,t,g, or c
  misc_feature (433)..(433): n equals a,t,g, or c
  misc_feature (469)..(469): n equals a,t,g, or c
  misc_feature (475)..(475): n equals a,t,g, or c
  misc_feature (477)..(477): n equals a,t,g, or c
  misc_feature (497)..(497): n equals a,t,g, or c
gagagtatttatgagagtagantaagatnaaggagcaaaggggagagatatataatgaagacacctccttaatggtctatgtcaacgctaggtgacctgtcttcctttgcttcttcaagcttctaggacctgtgtgttttgtttcatttttggttttgaaccctcaaaacaacactctcagtttcatccactgacatacactctgtgtggtgcttggtaaattacattcactttctcagcctttgagcttcactttccccctctgtgaaataagcaggtttttaacctatttgtattatggatttcttttaaaatatgatgaaagctgtagactctccattccaaaaaaaaaaaaaaatgaacaaatatgcatacacaaaagattttacaaatccatctcaggaggtcacgaaccaacccctgatactcatangactccatgggatcttttaagtttccaggtttaaanaacatntnggcaagcattttccaagtancccatttcacat

SEQ ID NO: 3277 - DNA, 512 bp, Homo sapiens
  misc_feature (392)..(392): n equals a,t,g, or c
  misc_feature (453)..(453): n equals a,t,g, or c
  misc_feature (461)..(461): n equals a,t,g, or c
  misc_feature (493)..(493): n equals a,t,g, or c
  misc_feature (499)..(499): n equals a,t,g, or c
  misc_feature (509)..(509): n equals a,t,g, or c
gcccacgcgtccggggaaatggggctagggaggtgaaagtgcgtggtcacaaaatatcagaaatgccagtagcccagagggacttgcaggaaaagcgtgcctaacattagtctcaaaagtctggatataactaaagatccaggtgaagtggggtcaagggtggtcttggggactctggtttggcagggctcaggcctgacccgggtgcctattcctgcagcgctggttttggttggtgagagttcttctcagtctgttcataggcgcagaaattgtgggtgagtgtgtggtgcagcccatggggagaggacggggtgaggaaggaggtgggcagagggcacctgggacaatagggaactggggttggttttctgctccctcttcccactctncagctccttctagggcccactttttggcccttaccatgcaaccacattggacctctaagtncccatctntcttgcagtgtcccaccttccataccactttntaattncattttccancct

SEQ ID NO: 3278 - DNA, 51 bp, Homo sapiens
  misc_feature (9)..(9): n equals a,t,g, or c
  misc_feature (41)..(41): n equals a,t,g, or c
  misc_feature (45)..(45): n equals a,t,g, or c
  misc_feature (51)..(51): n equals a,t,g, or c
gatgaagtnaccctagccatcatatgagattgtttgggctnttgntcgcan

SEQ ID NO: 3279 - DNA, 202 bp, Homo sapiens
  misc_feature (184)..(185): n equals a,t,g, or c
  misc_feature (187)..(187): n equals a,t,g, or c
  misc_feature (195)..(195): n equals a,t,g, or c
  misc_feature (198)..(198): n equals a,t,g, or c
ggtgggctgcagtgatgactttggctttctttccaaaaatgacggcagccatactgtgatccctgcccccaactgctgcacagagaagagggtgaatgcggcgagggtgggtggaaggtgggcggtgagctggggggttatggtgataacctatgcaagagatcaaggttgtggtagggagcanngnttctcaancanggga

SEQ ID NO: 3280 - DNA, 237 bp, Homo sapiens
  misc_feature (5)..(7): n equals a,t,g, or c
  misc_feature (216)..(216): n equals a,t,g, or c
gcggnnncgtggggaactggcttagtttttagaagagtgatcggtctcattaaagtggagggaaaaataggacccttaaggaaaatcaaaagatagtgacttaatttagctagaaataaggacttaatatctgtcttcaaatatatatatatggctttgtggagtggtttttggaccagtaaggcagcttatttagcataatgattataaagtggnttcttctgctttgcgaactgt

SEQ ID NO: 3281 - DNA, 59 bp, Homo sapiens
  misc_feature (33)..(33): n equals a,t,g, or c
  misc_feature (45)..(45): n equals a,t,g, or c
  misc_feature (48)..(48): n equals a,t,g, or c
  misc_feature (52)..(52): n equals a,t,g, or c
  misc_feature (56)..(56): n equals a,t,g, or c
ttttgcaccttgtcgaccactcaggcgcaggcncagggaaggacnagngacnccanagg

SEQ ID NO: 3282 - DNA, 430 bp, Homo sapiens
  misc_feature (30)..(30): n equals a,t,g, or c
  misc_feature (215)..(215): n equals a,t,g, or c
  misc_feature (218)..(218): n equals a,t,g, or c
  misc_feature (247)..(247): n equals a,t,g, or c
  misc_feature (258)..(258): n equals a,t,g, or c
  misc_feature (275)..(275): n equals a,t,g, or c
  misc_feature (285)..(285): n equals a,t,g, or c
  misc_feature (290)..(290): n equals a,t,g, or c
  misc_feature (360)..(360): n equals a,t,g, or c
  misc_feature (402)..(402): n equals a,t,g, or c
ttttcgccatctacaacagcagcggagagntcatcaacaacatcaagtactacgacggcttcatgggccagcgggtcggcgccatcagctgcctggccttccacccgcactggcctcacctggccgtgggaagcaacgactactacatctccgtgtactcggtggagaagccgtgtcagataagcggcgtgaccccgggcccaccaggccacggncgnctgctgtacatagtgaagctgtcactcgncggggcacggngcgtcggctgctgcggncccgcagtgngaacngttggctgctgccttagctgctgatgacggcaggagggccctgctactcgcttttgtctgtcttcgctgncgtgtctggaatgtcagggaaggggagggctcgggttgaccngtggcttcccactgagcaccagcaatca

SEQ ID NO: 3283 - DNA, 86 bp, Homo sapiens
  misc_feature (12)..(12): n equals a,t,g, or c
  misc_feature (38)..(38): n equals a,t,g, or c
  misc_feature (50)..(51): n equals a,t,g, or c
  misc_feature (80)..(80): n equals a,t,g, or c
ttttcggggatnagagcccggcagacagagctctgggnctgaccttagcnncattcttcatggctgccaagtgagagtgnggcccc

SEQ ID NO: 3284 - DNA, 74 bp, Homo sapiens
  misc_feature (4)..(4): n equals a,t,g, or c
  misc_feature (6)..(6): n equals a,t,g, or c
  misc_feature (8)..(8): n equals a,t,g, or c
  misc_feature (65)..(65): n equals a,t,g, or c
  misc_feature (72)..(72): n equals a,t,g, or c
gcantntntcccgcctgcccatcatcgatgtggcccccttggacgttttgtattcaatcactgtnttgtccnat

SEQ ID NO: 3285 - DNA, 150 bp, Homo sapiens
  misc_feature (3)..(3): n equals a,t,g, or c
  misc_feature (14)..(14): n equals a,t,g, or c
  misc_feature (20)..(20): n equals a,t,g, or c
  misc_feature (87)..(87): n equals a,t,g, or c
  misc_feature (89)..(89): n equals a,t,g, or c
  misc_feature (122)..(122): n equals a,t,g, or c
  misc_feature (143)..(143): n equals a,t,g, or c
  misc_feature (148)..(148): n equals a,t,g, or c
agngacttcaatgnaatctngctactatttggaaagctggccgcctgcaggtaccggtccggaattcccgggtcgacccacgcgttntnggacgcgtgggctattttctaaataaacctttntaatctaaaaaatagtttggncgttntg

SEQ ID NO: 3286 - DNA, 189 bp, Homo sapiens
  misc_feature (144)..(144): n equals a,t,g, or c
  misc_feature (159)..(159): n equals a,t,g, or c
  misc_feature (182)..(182): n equals a,t,g, or c
  misc_feature (185)..(185): n equals a,t,g, or c
  misc_feature (189)..(189): n equals a,t,g, or c
ggaatgctgagttttctttatcttgacacttgatacatacgtaattcatatatctatatgcttcacgtttttatagtttactgtatatatgttattcctcaaaaaaaaaaagaaaaaaaaatcctttctttctacagaggtacntactactctacctgntaatcaccaatctcaacatgttnacngaan

SEQ ID NO: 3287 - DNA, 51 bp, Homo sapiens
  misc_feature (23)..(23): n equals a,t,g, or c
  misc_feature (38)..(38): n equals a,t,g, or c
  misc_feature (43)..(43): n equals a,t,g, or c
  misc_feature (49)..(49): n equals a,t,g, or c
gcccacgcgtccgggagggtggngggaattaagggtgntattnaccttnac

SEQ ID NO: 3288 - DNA, 143 bp, Homo sapiens
  misc_feature (6)..(6): n equals a,t,g, or c
  misc_feature (11)..(11): n equals a,t,g, or c
  misc_feature (21)..(21): n equals a,t,g, or c
  misc_feature (29)..(29): n equals a,t,g, or c
  misc_feature (31)..(31): n equals a,t,g, or c
  misc_feature (118)..(118): n equals a,t,g, or c
  misc_feature (120)..(120): n equals a,t,g, or c
  misc_feature (130)..(130): n equals a,t,g, or c
  misc_feature (132)..(132): n equals a,t,g, or c
  misc_feature (134)..(134): n equals a,t,g, or c
ccgggnttttntggggggttnttttcccntnggcattttcaaaaaccaaggttgggccttttggggaaccgggggaaaaaccccctggggcaggccttccggttttctctcgcaaacncnccccggggcncngnggctccggc

SEQ ID NO: 3289 - DNA, 57 bp, Homo sapiens
  misc_feature (17)..(17): n equals a,t,g, or c
  misc_feature (33)..(33): n equals a,t,g, or c
  misc_feature (35)..(35): n equals a,t,g, or c
  misc_feature (38)..(38): n equals a,t,g, or c
  misc_feature (54)..(54): n equals a,t,g, or c
gcatttcctaaaggctngagccggagctgccgngncangcgtctaacaaggccntta

SEQ ID NO: 3290 - DNA, 589 bp, Homo sapiens
  misc_feature (9)..(9): n equals a,t,g, or c
  misc_feature (40)..(40): n equals a,t,g, or c
  misc_feature (409)..(409): n equals a,t,g, or c
  misc_feature (475)..(475): n equals a,t,g, or c
  misc_feature (529)..(529): n equals a,t,g, or c
  misc_feature (535)..(535): n equals a,t,g, or c
  misc_feature (538)..(538): n equals a,t,g, or c
  misc_feature (564)..(564): n equals a,t,g, or c
  misc_feature (570)..(570): n equals a,t,g, or c
gtcctcccntcttacctacaagtgctgacccttcctgggntgctgccaaacatgaccctggatactgtgagtctcaggctgctgggctaccaggatcagaatcaagaagggaaaaggatcaaaatttatagagtatcttttagagtactagcatggtcatttcattaccaactttgcaaaataggtatcattgatcccattttatagacgaataagttgagtctgatggataacttgctatgtgagggacccaagcctgctaattctacacttttgcacactctcactttattgcctacagaagagctcagaaggagagggagggagagggggacgggaagtagaactgtccctggggtagaaataaattggagtgctggacatgtgcattaggagcctactaggctgnattgcagatgactcagtatgcaatgggcaggaaggaggggtgaagagaggagtaggcagttttctncaaagctgctttacaacaacatcctgagtgtgaacataagtgagtctacatgtntatctntgnctcttctacacataccctttgcaagntgctgngtggaagtttttggggcct

SEQ ID NO: 3291 - DNA, 471 bp, Homo sapiens
  misc_feature (14)..(14): n equals a,t,g, or c
  misc_feature (30)..(31): n equals a,t,g, or c
  misc_feature (37)..(37): n equals a,t,g, or c
  misc_feature (39)..(39): n equals a,t,g, or c
  misc_feature (123)..(124): n equals a,t,g, or c
  misc_feature (320)..(320): n equals a,t,g, or c
  misc_feature (330)..(330): n equals a,t,g, or c
  misc_feature (341)..(341): n equals a,t,g, or c
  misc_feature (360)..(360): n equals a,t,g, or c
  misc_feature (370)..(370): n equals a,t,g, or c
  misc_feature (410)..(410): n equals a,t,g, or c
  misc_feature (420)..(421): n equals a,t,g, or c
  misc_feature (440)..(440): n equals a,t,g, or c
  misc_feature (454)..(454): n equals a,t,g, or c
tgcactttctactncagatctttaatgggnnaacccncngcaggttccggtccggaattcccgggtcgacccacgcgtccgcccacttttaggatggtcctcttgtacttcgtgtgctccganncatggtgacgatgacacaccctggtggcatgcccgtgtatgttggtttagcgttgtctgcattgttctagagtgaaacaggtgtcaggctgtcactgttcacacaaatttttaataagaaacatttaccaagggagcatctttggactctctgtttttaaaaccttctgaaccatgacttggagccggcagagtangctgtggctngggactttaanaccaaccattaacaattgntggttaaagnaatttccggttaccgtccatttccaagttggaaaatgctnagtccttttnnttttttttttttccaattnaaaaaggaccattnaacttaaaaaaaaaaaa

SEQ ID NO: 3292 - DNA, 548 bp, Homo sapiens
  misc_feature (10)..(10): n equals a,t,g, or c
  misc_feature (48)..(48): n equals a,t,g, or c
  misc_feature (470)..(470): n equals a,t,g, or c
  misc_feature (476)..(476): n equals a,t,g, or c
  misc_feature (503)..(503): n equals a,t,g, or c
  misc_feature (518)..(518): n equals a,t,g, or c
  misc_feature (548)..(548): n equals a,t,g, or c
gggaggagtntctcctggaccatccgaacctagcctgtcccggcccgnagcctctatggaggctcctgccgggccgtagagcccttcgccccctggggacccacccgtctataaggtccgtttggcctgcagcagcctgagtccgtaatgctgggcactgttcatgggatcggccccctatggagccctgtgtctataggggactcctacggtccctagggttcggccccgtccataatgactccatatacagggccttccatcgctctatagggctcagccctcggcttccagagcctgtcagcagtggccgtacccttcgccgggactgccgggtctccgggacctcttcgatctacaaggtcatgttatgcctatagaggtcgcatttgcagggcctcaccccgggtagagggtcctcttcaggtttttacggcctgtccccgctctaaagggtcaagtgcaaggangcggcnaatggcccttgggcaaaggttcttggncatggggaactgggnttttgggccttgggcccgtgctgggggtcn

SEQ ID NO: 3293 - DNA, 159 bp, Homo sapiens
  misc_feature (15)..(15): n equals a,t,g, or c
  misc_feature (22)..(22): n equals a,t,g, or c
  misc_feature (38)..(38): n equals a,t,g, or c
  misc_feature (40)..(40): n equals a,t,g, or c
  misc_feature (69)..(69): n equals a,t,g, or c
  misc_feature (124)..(124): n equals a,t,g, or c
  misc_feature (138)..(138): n equals a,t,g, or c
  misc_feature (150)..(150): n equals a,t,g, or c
  misc_feature (159)..(159): n equals a,t,g, or c
ggccaaaccttaaanaaggttncaagggtccctaaatntntttgggaatttttccaggggggaagaccnttaacaccctgggaaaaaaaaaagaatttgggaaaaaccacccgggaaccaactngggggggccttaantttaataggggnaggcggggn

SEQ ID NO: 3294 - DNA, 183 bp, Homo sapiens
  misc_feature (16)..(16): n equals a,t,g, or c
  misc_feature (23)..(23): n equals a,t,g, or c
  misc_feature (42)..(42): n equals a,t,g, or c
  misc_feature (49)..(49): n equals a,t,g, or c
  misc_feature (89)..(89): n equals a,t,g, or c
  misc_feature (125)..(125): n equals a,t,g, or c
  misc_feature (131)..(131): n equals a,t,g, or c
  misc_feature (168)..(168): n equals a,t,g, or c
  misc_feature (172)..(172): n equals a,t,g, or c
atggctgggaagaaanttcaccnccctgagcttttctgaccntgaaatnggcagggcacatgacacacccattttataaatgggcatgnccattttgataaaggaggaaagaagttcaactcccncttctncaaagtccagggccttgggctccacagcgaaagcctncccnatgcccccact

SEQ ID NO: 3295 - DNA, 174 bp, Homo sapiens
  misc_feature (1)..(1): n equals a,t,g, or c
  misc_feature (6)..(6): n equals a,t,g, or c
  misc_feature (20)..(20): n equals a,t,g, or c
  misc_feature (24)..(24): n equals a,t,g, or c
  misc_feature (28)..(28): n equals a,t,g, or c
  misc_feature (156)..(156): n equals a,t,g, or c
  misc_feature (159)..(159): n equals a,t,g, or c
  misc_feature (161)..(162): n equals a,t,g, or c
  misc_feature (170)..(170): n equals a,t,g, or c
ngattnaaaaagctcaagancgcngaangctgggtttttacaaggatattcggtatttgatgaaacccagttaggcatgacatattccccttctccccattcctacctctcttttattaaaaattttatagttacagtgtctatgttgcccagccnggncnngaaccctntggc

SEQ ID NO: 3296 - DNA, 316 bp, Homo sapiens
  misc_feature (9)..(9): n equals a,t,g, or c
  misc_feature (20)..(21): n equals a,t,g, or c
  misc_feature (27)..(27): n equals a,t,g, or c
  misc_feature (61)..(61): n equals a,t,g, or c
  misc_feature (108)..(108): n equals a,t,g, or c
  misc_feature (119)..(119): n equals a,t,g, or c
  misc_feature (121)..(121): n equals a,t,g, or c
  misc_feature (123)..(123): n equals a,t,g, or c
  misc_feature (159)..(159): n equals a,t,g, or c
  misc_feature (163)..(163): n equals a,t,g, or c
  misc_feature (179)..(179): n equals a,t,g, or c
  misc_feature (205)..(205): n equals a,t,g, or c
  misc_feature (242)..(242): n equals a,t,g, or c
  misc_feature (249)..(249): n equals a,t,g, or c
  misc_feature (279)..(279): n equals a,t,g, or c
  misc_feature (304)..(304): n equals a,t,g, or c
  misc_feature (312)..(312): n equals a,t,g, or c
aggaaaacntgcactataanntcgggnaaggtactcctgggggtaccggtccggaattccngggtcgacccacgcgtccgtttacgcgtccgggcggctgcggaggcnatgggcctgantnanggccggagttgcccggagcctgccaccgctctcagncagnccgcatccttctctgntcttccctccccccgcctgccacggngcgggtatccgcagccacagcccggggccggtgaggnggcgaanggggaggggaggaatcaagggatgagcgcnggaagggcgttgggggccctgagcngtactaangacg

SEQ ID NO: 3297 - DNA, 130 bp, Homo sapiens
  misc_feature (3)..(5): n equals a,t,g, or c
  misc_feature (55)..(55): n equals a,t,g, or c
  misc_feature (69)..(69): n equals a,t,g, or c
  misc_feature (107)..(107): n equals a,t,g, or c
  misc_feature (111)..(111): n equals a,t,g, or c
  misc_feature (125)..(125): n equals a,t,g, or c
gannnttaggcccggcccctccccgcttccgcacagggaccgggaccgggaccgngagcgggagcgcanagagcggagccgggagcgagacaaggagcgagaacggngacnctcccgctcccggnaccgg

SEQ ID NO: 3298 - DNA, 576 bp, Homo sapiens
  misc_feature (45)..(45): n equals a,t,g, or c
  misc_feature (362)..(362): n equals a,t,g, or c
  misc_feature (370)..(370): n equals a,t,g, or c
  misc_feature (429)..(429): n equals a,t,g, or c
  misc_feature (503)..(503): n equals a,t,g, or c
  misc_feature (524)..(524): n equals a,t,g, or c
  misc_feature (541)..(541): n equals a,t,g, or c
  misc_feature (555)..(555): n equals a,t,g, or c
  misc_feature (562)..(562): n equals a,t,g, or c
gggcttttgccattttttaaaaaggatactggaaacggaaaaganatgacattcatatgaacaatgcatttttcttattaatataatctatttttgtattttacttaatgagctttaagtgcctgtcgttctgaaaattgtgtatttataattcagcttatctcacaattggacctaatagcatttctttgtgcagttaggtgacgagcactgctttgaggcccaagcactagtagagatgcgcgatacaggtctagtttcggtaactgttccagacatcaagcaataaaaaaatgaataccacaaaagatgtttgattttacagtggagccttactgaaccagcattcagaagtttaaggncctcctangtatgagtatttttagtagtggatcactgtggcagggtgcaacttctaccagttcctgnttcttctgagccagaaccctttttcagggaaaggggacccaattaattttaaaaacctcaccttgaagcacaanttggccatgggggcttgggantaaaggtcctattttcnaccctggtaacttnccaaatnctgggaacccccag

SEQ ID NO: 3299 - DNA, 115 bp, Homo sapiens
  misc_feature (1)..(1): n equals a,t,g, or c
  misc_feature (8)..(8): n equals a,t,g, or c
  misc_feature (25)..(26): n equals a,t,g, or c
  misc_feature (84)..(84): n equals a,t,g, or c
  misc_feature (111)..(111): n equals a,t,g, or c
  misc_feature (115)..(115): n equals a,t,g, or c
ngaagtgntagatctatgaaagctnntacgccctgcagggtaccggtccggaattcccgggtcgacccacgcgtccgggagttntgtggaaacctcccctctcagcggccngggn

SEQ ID NO: 3300 - DNA, 58 bp, Homo sapiens
  misc_feature (31)..(31): n equals a,t,g, or c
  misc_feature (37)..(37): n equals a,t,g, or c
  misc_feature (40)..(40): n equals a,t,g, or c
  misc_feature (44)..(44): n equals a,t,g, or c
  misc_feature (52)..(52): n equals a,t,g, or c
gggatttggtgtggaaacctcccctctcagngggggnggngatnaaactgantaatac

SEQ ID NO: 3301 - DNA, 448 bp, Homo sapiens
  misc_feature (70)..(71): n equals a,t,g, or c
  misc_feature (126)..(126): n equals a,t,g, or c
  misc_feature (187)..(187): n equals a,t,g, or c
  misc_feature (229)..(229): n equals a,t,g, or c
  misc_feature (236)..(236): n equals a,t,g, or c
  misc_feature (239)..(239): n equals a,t,g, or c
  misc_feature (241)..(242): n equals a,t,g, or c
  misc_feature (248)..(249): n equals a,t,g, or c
  misc_feature (251)..(251): n equals a,t,g, or c
  misc_feature (259)..(259): n equals a,t,g, or c
  misc_feature (274)..(274): n equals a,t,g, or c
  misc_feature (299)..(300): n equals a,t,g, or c
  misc_feature (314)..(314): n equals a,t,g, or c
  misc_feature (383)..(383): n equals a,t,g, or c
  misc_feature (385)..(385): n equals a,t,g, or c
  misc_feature (427)..(427): n equals a,t,g, or c
  misc_feature (434)..(434): n equals a,t,g, or c
  misc_feature (442)..(442): n equals a,t,g, or c
gtgctgcttgtcagacattgctgtctcttcctgtggattttaattggagaaaatatattaggtgactatnntagagctgatgaatttgcagatcaatctcctggaaacctcagttcttcatccctnagaagaaagctgtttttagatgggaacggaagcatctccgactccttaccttcggcttctnccggaagtcctcacagtggtgttcaaacatcactagagatgntttattnaanannattggnntnttgaaaanggaaggaagcccctngcagacaccaagttcggggcagtgnncttctagccctatncaggctaagtgcaaaaaaatacagcttgggaagcataactagaccttcgctatttcttcacccactttntnaccaattgaattcagataggagagactccactctcagaacanaggaagnttactggncattct

SEQ ID NO: 3302 - DNA, 292 bp, Homo sapiens
  misc_feature (1)..(1): n equals a,t,g, or c
  misc_feature (3)..(3): n equals a,t,g, or c
  misc_feature (13)..(13): n equals a,t,g, or c
  misc_feature (31)..(31): n equals a,t,g, or c
  misc_feature (37)..(37): n equals a,t,g, or c
  misc_feature (151)..(151): n equals a,t,g, or c
  misc_feature (154)..(154): n equals a,t,g, or c
  misc_feature (170)..(170): n equals a,t,g, or c
  misc_feature (185)..(185): n equals a,t,g, or c
  misc_feature (188)..(188): n equals a,t,g, or c
  misc_feature (210)..(210): n equals a,t,g, or c
  misc_feature (240)..(240): n equals a,t,g, or c
  misc_feature (263)..(263): n equals a,t,g, or c
  misc_feature (276)..(276): n equals a,t,g, or c
  misc_feature (280)..(280): n equals a,t,g, or c
nanagaagacttnttgtagacccccttgaanatacgnaaagctggtacgcctgcaggtaccggtccggaattcccgggtcgacccacgcgtccggcttttttagatattcttcctttatactacatcaaaacttgataagttgcaatgtanatnactggcccagggcttngccatctgaagattnggntgaaaaacactgacatgaagtnagattaataggataaaaggcatatacattnatttaatgtgaatacacagcggnctttataatgaanaccnaaagatacagaa

SEQ ID NO: 3303 - DNA, 308 bp, Homo sapiens
  misc_feature (2)..(4): n equals a,t,g, or c
  misc_feature (10)..(10): n equals a,t,g, or c
  misc_feature (59)..(59): n equals a,t,g, or c
  misc_feature (148)..(148): n equals a,t,g, or c
  misc_feature (161)..(161): n equals a,t,g, or c
  misc_feature (182)..(182): n equals a,t,g, or c
  misc_feature (197)..(197): n equals a,t,g, or c
  misc_feature (242)..(242): n equals a,t,g, or c
  misc_feature (262)..(263): n equals a,t,g, or c
  misc_feature (287)..(287): n equals a,t,g, or c
  misc_feature (307)..(307): n equals a,t,g, or c
gnnncaatcntcctttgtcatttatacttgcatttgcctccttttaccctaaccaattnttttctctcatgtgcatatatgtattccctctttcccaacactggcataattacttcaaataattattcaatcctatcactttcatttntagattttccttnttggggggaggaggattattntctttataaaaatgntaacaaaatatttcaaacttgcagaatataaccaatatccatgancctatctctcagaattaatnntttaaagaaataaaaacatatatnaggagtctcctttggacttna

SEQ ID NO: 3304 - DNA, 454 bp, Homo sapiens
  misc_feature (4)..(4): n equals a,t,g, or c
  misc_feature (21)..(21): n equals a,t,g, or c
  misc_feature (23)..(23): n equals a,t,g, or c
  misc_feature (26)..(26): n equals a,t,g, or c
  misc_feature (51)..(51): n equals a,t,g, or c
  misc_feature (390)..(390): n equals a,t,g, or c
  misc_feature (439)..(439): n equals a,t,g, or c
  misc_feature (449)..(449): n equals a,t,g, or c
  misc_feature (453)..(454): n equals a,t,g, or c
aaantactaatactcattttnanggngggctaagaatatgaatagaccatntgtctattatataaatatagtgaagaaacatatgacaaaatgttcaaccttagtcctgatcagaataaaaataaaagtaaaataggtacaattttaaagctactaacttgactacaaggagtagtgctggtgaggggcagggaggccagaatcgtggtgtatggctgggggtcgggggtgtaaagagcctccatccttcatctattcattatactaacatacttatgagatatgtatttattaagtgccttcaaatgtttataacctttggctctgaattctacatttaggaactatagatacaaattattgacctgatgatgatattacttaatgggnaggagaagtagctaaatatattaatagcatgggaaattcatcgaggatnattaaaaganattnn

SEQ ID NO: 3305 - DNA, 555 bp, Homo sapiens
  misc_feature (30)..(30): n equals a,t,g, or c
  misc_feature (61)..(61): n equals a,t,g, or c
  misc_feature (73)..(73): n equals a,t,g, or c
  misc_feature (77)..(77): n equals a,t,g, or c
  misc_feature (79)..(79): n equals a,t,g, or c
  misc_feature (105)..(105): n equals a,t,g, or c
  misc_feature (406)..(406): n equals a,t,g, or c
  misc_feature (487)..(487): n equals a,t,g, or c
  misc_feature (511)..(511): n equals a,t,g, or c
  misc_feature (513)..(513): n equals a,t,g, or c
  misc_feature (522)..(522): n equals a,t,g, or c
  misc_feature (550)..(550): n equals a,t,g, or c
acaacttcacttacttttgggaaagctggnccgcctgcaggtaccggtccggaattcccgngtcgacccacgnttcntncagcgcggggagcccgtcggtaattntaatattttattatatatatatatctatatttttgtccaaaccaaccgcacatgcagatggggctcccgcccgtggtgttatttaaagaagaaacgtctatgtgtacagatgaatgataaactctctgcttctccctctgcccctctccaggcgccggcgggcgggccggtttcgaagttgatgcaatcggtttaaacatggctgaacgcgtgtgtacacgggactgacgcaacccacgtgtaactgtcagcccgggccctgagtaatcgcttaaagatgttcctacgggcttgttgctgntgatgttttggtttggtttggtttttgggctttttttggattataaaaaaataatctatttctatgagaaaaagaagcgtntggatattttgggaatctttccgntnaagcattanaacctttaataaacttttttgaaaaggntccaa

SEQ ID NO: 3306 - DNA, 290 bp, Homo sapiens
  misc_feature (20)..(21): n equals a,t,g, or c
  misc_feature (241)..(242): n equals a,t,g, or c
  misc_feature (263)..(263): n equals a,t,g, or c
  misc_feature (275)..(275): n equals a,t,g, or c
  misc_feature (282)..(282): n equals a,t,g, or c
gagaatgtgctggagctacnnagccgagatggctctgagtacctgatccagcacgactcggaggccatcatcagcacctggcataaggccattgctcagggcatccaggagctggctcactggtggaggtaaggagagttaacctggttaagggaagagaggactcttcgctgagggtctccaggccatgcctgttgggagtgcatttcgggtcccttgcccatcctggaaggacccgcanntggctcaaggccccgcctttntgaggctatggnaatccantccgcaaa

SEQ ID NO: 3307 - DNA, 121 bp, Homo sapiens
  misc_feature (5)..(5): n equals a,t,g, or c
  misc_feature (18)..(18): n equals a,t,g, or c
  misc_feature (44)..(44): n equals a,t,g, or c
  misc_feature (56)..(56): n equals a,t,g, or c
  misc_feature (91)..(91): n equals a,t,g, or c
  misc_feature (114)..(114): n equals a,t,g, or c
  misc_feature (120)..(120): n equals a,t,g, or c
agcanaaaaatgcactanggccatgggaggattcagtgctaaancaagaatgatanaaaatagtctcaacttaaaggcccttacccaaatntgaaaatgctgaagaattaactntaaatnt

SEQ ID NO: 3308 - DNA, 182 bp, Homo sapiens
  misc_feature (6)..(6): n equals a,t,g, or c
  misc_feature (8)..(8): n equals a,t,g, or c
  misc_feature (16)..(16): n equals a,t,g, or c
  misc_feature (80)..(80): n equals a,t,g, or c
  misc_feature (92)..(92): n equals a,t,g, or c
  misc_feature (110)..(110): n equals a,t,g, or c
  misc_feature (113)..(113): n equals a,t,g, or c
  misc_feature (162)..(162): n equals a,t,g, or c
  misc_feature (167)..(167): n equals a,t,g, or c
taatancnactttggnccatacctttccggggtgtgtttgaggatgccctctaccatgtgggccttccccaggagatgancctgttaagtgntcggcagtaacctactanggnccttcgcctcagcagcaaatcttgctactggctctagatctgcgggttnccctntaccctgcctcccgg

SEQ ID NO: 3309 - DNA, 359 bp, Homo sapiens
  misc_feature (7)..(7): n equals a,t,g, or c
  misc_feature (11)..(11): n equals a,t,g, or c
  misc_feature (35)..(35): n equals a,t,g, or c
  misc_feature (60)..(60): n equals a,t,g, or c
  misc_feature (64)..(64): n equals a,t,g, or c
  misc_feature (140)..(140): n equals a,t,g, or c
  misc_feature (178)..(178): n equals a,t,g, or c
  misc_feature (192)..(192): n equals a,t,g, or c
  misc_feature (226)..(226): n equals a,t,g, or c
  misc_feature (280)..(280): n equals a,t,g, or c
  misc_feature (315)..(315): n equals a,t,g, or c
  misc_feature (357)..(359): n equals a,t,g, or c
gggtttntagncacatcctctaaaattgatggaanagcaagactttatgccttgacatancccnagtgggagccagactataaggaataaaaggaaaaactttcttcctctctctccaagaggatatgggaagcttctgngagtgcataggatgggggctggagtcattcttagctgnttcccttcctctgnccatatactggatcacctcaacataccctggtgnggctctaagggtaaatcagggatagggccaaggagaaaacaaccaagaactctntcctgtaataagcaggatccagattgagaaagtcnagcgaatataagagcaaaagccatttaaaaatctatataccnnn

SEQ ID NO: 3310 - DNA, 159 bp, Homo sapiens
  misc_feature (30)..(30): n equals a,t,g, or c
  misc_feature (38)..(38): n equals a,t,g, or c
  misc_feature (71)..(71): n equals a,t,g, or c
  misc_feature (91)..(91): n equals a,t,g, or c
  misc_feature (96)..(96): n equals a,t,g, or c
  misc_feature (132)..(132): n equals a,t,g, or c
  misc_feature (140)..(140): n equals a,t,g, or c
aacgaaggcacagaccgaatcaaggagagnggcgatanactagaaagcaagagaaaacaaaatccgagggngatagggataagcatggggncaagnacatggatatgagcataccgctcacaggggaagaancataaccntgagatgatcacaactggg

SEQ ID NO: 3311 - DNA, 105 bp, Homo sapiens
  misc_feature (2)..(2): n equals a,t,g, or c
  misc_feature (45)..(45): n equals a,t,g, or c
  misc_feature (55)..(55): n equals a,t,g, or c
  misc_feature (58)..(58): n equals a,t,g, or c
  misc_feature (72)..(72): n equals a,t,g, or c
  misc_feature (105)..(105): n equals a,t,g, or c
tncccttgggaagaaaccccgggaagcaacgaacgaagtctgggngcccctaagnaantggcccccgggggnccctgggaacaaagctaacgctggggcaatggn

SEQ ID NO: 3312 - DNA, 410 bp, Homo sapiens
  misc_feature (285)..(285): n equals a,t,g, or c
  misc_feature (318)..(318): n equals a,t,g, or c
  misc_feature (381)..(381): n equals a,t,g, or c
  misc_feature (410)..(410): n equals a,t,g, or c
ccacgctttcggttaagggtctctgggaactgacctttttaactataagaacacacaacagaaagttcagcggattatggaggactgatttcctcatcaacctgtggttattgataaaagcttcttcagggtgggtcctgatcaccccagctgtttccatacaactgtggttcacttaggtgtcatgggcatgcacacattttgtccaagggaaataaagtaggtgaaaagcagtttagatactttaatggatacattgggcagggcttgcccaaaactgctttnctccttgatcttgagtgaagctacaacacaagngtcggggaaagttcagaaggcaggcattttttacttaagctttctaaagggctttaaattcgnaacattcttaaataaaggatataaagggn

SEQ ID NO: 3313 - DNA, 409 bp, Homo sapiens
  misc_feature (4)..(4): n equals a,t,g, or c
  misc_feature (12)..(12): n equals a,t,g, or c
tttngcctcagnctccacatctgcctgttgcggtcctggctgtggggtctcaggataaggacatagccccctggaagctgggaaggccccacatcaggccttgcagtttctaacccaggaggtggccgacagcagtgcgtcggggctgcctgtccctgcacacgaggccctggggggtgaatggaggctctccctgtttttgttagcattggaggcctgagcagggctaacgcccaaccgctgcttaagcgcataagatgctgagatggaaaacgtgttgcatggtgtaaaccatgcaaagccctcccagccagtgcagtgatcgaggcagacagaagggaaaccgctctgcaaagagaggctcggctctctctggggtacacagatcacccagactgggcaaagctct

SEQ ID NO: 3314 - DNA, 508 bp, Homo sapiens
  misc_feature (9)..(9): n equals a,t,g, or c
  misc_feature (36)..(36): n equals a,t,g, or c
  misc_feature (39)..(39): n equals a,t,g, or c
  misc_feature (393)..(393): n equals a,t,g, or c
  misc_feature (439)..(439): n equals a,t,g, or c
  misc_feature (469)..(469): n equals a,t,g, or c
  misc_feature (471)..(471): n equals a,t,g, or c
  misc_feature (475)..(475): n equals a,t,g, or c
  misc_feature (492)..(492): n equals a,t,g, or c
ggagccttnccctggcggggccccacctctgggaanccncagcgcctgcaagattttttcctctcgtgacagggagcagcatgcggagggcccttgcacaacctgggtcttcaggaaggacagtttctaaccagagttctggtaagcactggtgacatttcacattggcttaagcaataaggaaaagcagtcatctcacgtagcaacgtggcttggggaagggagtctccagtttcatgtattcggagcctcaagaacaacgttgaagacctggattcttctcctgtttttgcagttccttgcccaggtgttggcccagctctcttcatggttccaagaaggctgccccaggaaggcttgtggacagaagggagaagcatctcttctctatgnctctttttatctaagaaaccaggtttgaccagcatccttcccttancttcccaggaggaatgcccggatccccttngncttncccatcccttcatgggntgactaaaccccacta

SEQ ID NO: 3315 - DNA, 284 bp, Homo sapiens
  misc_feature (1)..(1): n equals a,t,g, or c
  misc_feature (9)..(10): n equals a,t,g, or c
  misc_feature (16)..(16): n equals a,t,g, or c
  misc_feature (73)..(73): n equals a,t,g, or c
  misc_feature (241)..(241): n equals a,t,g, or c
  misc_feature (261)..(261): n equals a,t,g, or c
  misc_feature (281)..(282): n equals a,t,g, or c
  misc_feature (284)..(284): n equals a,t,g, or c
ngaaaatcnnccctantttttggggggaaaaaaaaggcccccgggtttaaccggcctcttgggcaagggggtnacccccggggtttccccggggaaaattttcccccgggggtttcgggaacccccaacggcccgttcccggctttcccggccggaataacaaagtttaaagggaatggggcttggtaaagtaacccttcttggcttggtttggtttgggggggggggttttggtgggaanccgcttggtgggggaagcgntccaagcccttggggtggtnngn

SEQ ID NO: 3316 - DNA, 241 bp, Homo sapiens
  misc_feature (1)..(2): n equals a,t,g, or c
  misc_feature (13)..(13): n equals a,t,g, or c
  misc_feature (205)..(205): n equals a,t,g, or c
  misc_feature (208)..(209): n equals a,t,g, or c
  misc_feature (213)..(213): n equals a,t,g, or c
  misc_feature (240)..(240): n equals a,t,g, or c
nnttcgcaggcanaggggtacctggaggaggaagggccgtgggtcacctgcagggcgggctcaggcctcgcggctccgcgggccgcccacttgggttggggcacagcgcgagtctcgcgcacgtggcgggctgtggtgcctgtcgttcgagttcgcatagaggggctgggcgggtcacgcggggaacctgccttgagccccgcgntgnncacnccggaccatggcggccttgggcctggnc

SEQ ID NO: 3317 - DNA, 261 bp, Homo sapiens
  misc_feature (2)..(4): n equals a,t,g, or c
  misc_feature (33)..(33): n equals a,t,g, or c
  misc_feature (42)..(42): n equals a,t,g, or c
  misc_feature (170)..(170): n equals a,t,g, or c
  misc_feature (190)..(190): n equals a,t,g, or c
  misc_feature (202)..(202): n equals a,t,g, or c
  misc_feature (215)..(215): n equals a,t,g, or c
  misc_feature (240)..(240): n equals a,t,g, or c
annntaatcctggcctccgcctgcggagccggnggaacccgnttcccgcctccacggggcagcgccagcggcctggtcctttcaccggcagctccgtgccgacgctctcaccgctcttcctatcgccgggagtggcgggccgaccagggggcggccgggctaccgtccgncattcacgtgtctctgcgcncgcgggggccgnccgagccggccancatgccgctgggcctgaagcccacntgcagccgtatgcaagaccac

SEQ ID NO: 3318 - DNA, 603 bp, Homo sapiens
  misc_feature (1)..(1): n equals a,t,g, or c
  misc_feature (11)..(11): n equals a,t,g, or c
  misc_feature (34)..(34): n equals a,t,g, or c
  misc_feature (36)..(36): n equals a,t,g, or c
  misc_feature (61)..(61): n equals a,t,g, or c
  misc_feature (199)..(199): n equals a,t,g, or c
  misc_feature (222)..(222): n equals a,t,g, or c
  misc_feature (240)..(240): n equals a,t,g, or c
  misc_feature (260)..(260): n equals a,t,g, or c
  misc_feature (323)..(323): n equals a,t,g, or c
  misc_feature (407)..(407): n equals a,t,g, or c
  misc_feature (454)..(454): n equals a,t,g, or c
  misc_feature (468)..(468): n equals a,t,g, or c
  misc_feature (479)..(480): n equals a,t,g, or c
  misc_feature (483)..(483): n equals a,t,g, or c
  misc_feature (486)..(486): n equals a,t,g, or c
  misc_feature (529)..(529): n equals a,t,g, or c
  misc_feature (546)..(546): n equals a,t,g, or c
  misc_feature (548)..(548): n equals a,t,g, or c
  misc_feature (569)..(569): n equals a,t,g, or c
  misc_feature (597)..(597): n equals a,t,g, or c
naatcttttanaatgtgtttgcatgggtatgtgngngtatgattcctgtgtccttcattgngtctgaatgttgacagctgagttgttgtcctgtgggtgtagtatagtgtgttcttaaacatttcaggtatttttgaatttatctatgttgtctttgaatcttttacagggattctataactgccgtcatgtaagttgntacagaagggaggctgtttttgngtcttgtatatttctttnctttcagaaattacagatgnttataattagcttcaaacactgccttaatagcaattggaagataactgccgtcagcccgacgngggctttccctttacttcaggaggagaatgactactaatctggaacaaaggtcttactatagcagtcagatcaccagaagaagngccgacacttcctggcttcatctgaaaatttggagtcaagggaaaantggaaagaattgcnaaaataccaannaanttntaccccatggccatgaaccaaataagaacagatatgcctaaanggataacccagacctgngnggaattgggccgggaacaaangggaaacatttgggacaacttaaccggngtgaaa

SEQ ID NO: 3319 - DNA, 70 bp, Homo sapiens
  misc_feature (14)..(14): n equals a,t,g, or c
  misc_feature (54)..(55): n equals a,t,g, or c
ggatttgaactgcncccctgtctccttgtgggttggcctagaataaaagggganngctggccctttaaag

SEQ ID NO: 3320 - DNA, 506 bp, Homo sapiens
  misc_feature (1)..(2): n equals a,t,g, or c
  misc_feature (398)..(398): n equals a,t,g, or c
  misc_feature (400)..(400): n equals a,t,g, or c
  misc_feature (406)..(406): n equals a,t,g, or c
  misc_feature (446)..(446): n equals a,t,g, or c
  misc_feature (471)..(471): n equals a,t,g, or c
  misc_feature (480)..(480): n equals a,t,g, or c
  misc_feature (490)..(490): n equals a,t,g, or c
  misc_feature (505)..(505): n equals a,t,g, or c
nnaggctgtgttctaaaactgtgcccacgggcctgcctcgcaggggaggtcttggctgtctctgccctccacagctgccctgcgcaccgcatgccctccactcgcgctgggtgccgagggccgggggagaaggcagggctgcctcgggaagggcgaccttggcccccccgtgtgaaacgcacacctgcatgaggctcccgcgctccctgctcccctcgcgtccttccctgggtgtctccgtgccaggtttttagggagtgcccccccaccccggcccccttctgtgttgctcctgccacttcagtcctctgggacacagggttgagtccgagcagcagagtattggtatgtctgtctgtcccgtggacctgcccgcagggcccacgtttgtggctacnancaccancccgtcttgcggcggaaaccccctgtgctcgacccgcttncggctcattcaaggaatgtgtgggnaactgcaanacttgcattntgggaacggggaganc

SEQ ID NO: 3321 - DNA, 288 bp, Homo sapiens
  misc_feature (24)..(24): n equals a,t,g, or c
  misc_feature (28)..(28): n equals a,t,g, or c
  misc_feature (61)..(61): n equals a,t,g, or c
  misc_feature (75)..(75): n equals a,t,g, or c
  misc_feature (80)..(81): n equals a,t,g, or c
  misc_feature (84)..(84): n equals a,t,g, or c
  misc_feature (91)..(91): n equals a,t,g, or c
  misc_feature (93)..(94): n equals a,t,g, or c
  misc_feature (100)..(100): n equals a,t,g, or c
  misc_feature (102)..(102): n equals a,t,g, or c
  misc_feature (109)..(109): n equals a,t,g, or c
  misc_feature (134)..(134): n equals a,t,g, or c
  misc_feature (142)..(142): n equals a,t,g, or c
  misc_feature (176)..(176): n equals a,t,g, or c
  misc_feature (186)..(186): n equals a,t,g, or c
  misc_feature (188)..(188): n equals a,t,g, or c
  misc_feature (203)..(203): n equals a,t,g, or c
  misc_feature (216)..(216): n equals a,t,g, or c
  misc_feature (225)..(225): n equals a,t,g, or c
  misc_feature (238)..(238): n equals a,t,g, or c
  misc_feature (252)..(252): n equals a,t,g, or c
ggctgactctggaaaacattaggnactnagaatcaagggttctggggtcagatggataatngccataatgctaancaagnngcnactggantnncttgcncntaaatcnactgggcatttcattggtacatttnttgaattnatgattgtttgtgagatactgacacatccgcacnttcagaacancntgtgcccttggattntgtgcacaggaanctagatggncacctgaataggntgatttattcttgnaatacagaaatgtgattttgagcccaagaataaaga

SEQ ID NO: 3322 - DNA, 409 bp, Homo sapiens
  misc_feature (348)..(348): n equals a,t,g, or c
  misc_feature (355)..(355): n equals a,t,g, or c
  misc_feature (386)..(386): n equals a,t,g, or c
  misc_feature (404)..(404): n equals a,t,g, or c
  misc_feature (408)..(408): n equals a,t,g, or c
ggatattttttagttgcttataggtaggttttctttttactcttccacagaaaagaaaataatagtaataataataagacaatgtagtgtggtgttgcagagtatcattgtgagtgttttgttttgttttctgagatgcttagaaaatggtgaatgtgtaacagtttccaactgaagtgaaatcatattctgttagcatggagcagcagcactatcttcctgtctactctctaacggtgtgtgaatgtatgctaatatctatatatatatattaaatgttggatttctctatcaatgatctaagtggtttgcagctggaagtttgtgtgtatgtgtgtgtttcaggantgaaaantatcccacacttacagtgttatttgtaatcntcttacttctctaacagngatna

SEQ ID NO: 3323 - DNA, 552 bp, Homo sapiens
  misc_feature (444)..(444): n equals a,t,g, or c
  misc_feature (464)..(464): n equals a,t,g, or c
  misc_feature (503)..(503): n equals a,t,g, or c
  misc_feature (518)..(518): n equals a,t,g, or c
  misc_feature (522)..(522): n equals a,t,g, or c
  misc_feature (532)..(532): n equals a,t,g, or c
gcacatatgtgatatttatctctaaatagaatgtcttagttttatttttatcactagattttatgtactttgaaccacagattctttcatcaagtgatcttaaaatactttcttatacacagagcccacttacttttctgtgggactgtctcatttatgaaaaatcattggagaaatctttaatagaaaccttcagattcagaaatacttgcacaatataattagtaataaaatctcgtgtatatatatgtaaataattttattctacaaataaagtatttatcttcataatagctgatggctgctagttactgtatgctagaggacatctatcaacctatgcttaagggacccaggaatttatattttaaccaactccctagtatgcagacacctcatcttgtgcttttaggaaccattgggtaaaactcattggatactggnttcaccagttacatttttgnttttatgaacctcactggggaaaaggttacatggaaggnggtagaaccccccanctgntttttaagtnaagggccgtaaagggggata

SEQ ID NO: 3324 - DNA, 523 bp, Homo sapiens
  misc_feature (4)..(4): n equals a,t,g, or c
  misc_feature (357)..(357): n equals a,t,g, or c
  misc_feature (414)..(414): n equals a,t,g, or c
  misc_feature (479)..(479): n equals a,t,g, or c
  misc_feature (482)..(482): n equals a,t,g, or c
  misc_feature (507)..(507): n equals a,t,g, or c
  misc_feature (517)..(517): n equals a,t,g, or c
  misc_feature (519)..(519): n equals a,t,g, or c
gctncccgacagctgctcgttgacagtgtcacagactctgtgcttggccccaatggtgatgtaacaggcaccccacacacatcccccgacgggcgcttcatagtcagtgctgcagctgacagcccctggctgcacgtgcaggagatcacagtgcggggcgagatccagaccctgtatgacctgcaaataaactcgggcatctcagacttggccttccagcgctccttcactgaaagcaatcaatacaacatctacgcggctctgcacacggagccggacctgctgttcctggagctgtccacggggaaggtgggcatgctgaagaacttaaaggagccacccgcagggccagctcanccctgggggggtacccacagaatcatgagggacagtgggctgtttggacagtacctnctacaccagcccgagagtcactgttcctcatcaatgggagacaaaaacacgctgcggtgtgaggngtnaaggtataaaggggggggaccacantggtgttggntngggt

SEQ ID NO: 3325 - DNA, 67 bp, Homo sapiens
  misc_feature (35)..(35): n equals a,t,g, or c
  misc_feature (42)..(42): n equals a,t,g, or c
  misc_feature (56)..(57): n equals a,t,g, or c
  misc_feature (62)..(62): n equals a,t,g, or c
ggtgaggacgacgaggaggacaccggagtctgcancctgganccatttgaccttanntattnagatt

SEQ ID NO: 3326 - DNA, 500 bp, Homo sapiens
  misc_feature (351)..(351): n equals a,t,g, or c
  misc_feature (420)..(420): n equals a,t,g, or c
  misc_feature (453)..(453): n equals a,t,g, or c
  misc_feature (464)..(464): n equals a,t,g, or c
  misc_feature (473)..(473): n equals a,t,g, or c
  misc_feature (499)..(499): n equals a,t,g, or c
gatcgaaaaggtggattcaacagacctttggatttcattgcatgagaattgaagtgttgaaggatgattttttttcccctcatcttggtcagagagtggattttgtattttgtatttaacttgcattcaaaaaacaggatctcagttctcctttcttgtaaagtaagaaaatcttatttatgatatatacagttaacttaccttgcctcaacagaagaaaggttaaatattacatttttttcttttaggaaatatcatttgtggcaggcgtcaaccccattttatttgtccttattcctgtggaagcagtatatgttttcttcctgaatgctcattaggacttcttaaaanacatgaaagtaatttggaagtaagtttatccaataaagcagtatttctacccttttagatttgataaanatttttattactaaagaatctccccagacattntcttttttttntcacacctnggatttaagtatcttggattggtacna

SEQ ID NO: 3327 - DNA, 64 bp, Homo sapiens
  misc_feature (13)..(14): n equals a,t,g, or c
  misc_feature (17)..(17): n equals a,t,g, or c
  misc_feature (42)..(42): n equals a,t,g, or c
  misc_feature (64)..(64): n equals a,t,g, or c
gagacttttgacnnttnttagaggctaacccagagggtaganaggagaacagttggatttctgn

SEQ ID NO: 3328 - DNA, 547 bp, Homo sapiens
  misc_feature (476)..(476): n equals a,t,g, or c
  misc_feature (524)..(524): n equals a,t,g, or c
  misc_feature (528)..(529): n equals a,t,g, or c
  misc_feature (535)..(535): n equals a,t,g, or c
gggactgggttcgagttggtcctggctctatccatggtgcctggcacgggctcggcccacaaggtctcagggaggctgtgcggggagtcaggataggctggaagcctggggatggcctgtgtggaggtggcgtctgtgccaggcctagaagtcatacgggggaggtagcaaccctgactctgagtccaactctcgctgttggaactgggctggccctgtttcctcactggccctgaatttcaatccgttcaataaggggttgggcaagatgatttctgaggtgctatccatctctgtccagcttagcctggaaggtcaagtcctggacacacagacagatgatgggacagcccagcaccaggctcagcccctggtggggagcgtgtgtgcagcagctttggtcctaaataataataacacaatggtgccactaacggagatttatggagctcttttccggccatgaacttcgtgtncttgcactaatatgaagccatttatctaaaagtcaagttccctttatnccgnngaaaanatggcctcttcg

SEQ ID NO: 3329 - DNA, 105 bp, Homo sapiens
  misc_feature (19)..(19): n equals a,t,g, or c
  misc_feature (30)..(30): n equals a,t,g, or c
  misc_feature (35)..(35): n equals a,t,g, or c
  misc_feature (66)..(66): n equals a,t,g, or c
  misc_feature (86)..(86): n equals a,t,g, or c
accaactaccgggccctgngctctgtccangcgcncagctacggaagcccggacggtcagcagcgnaggtcagcgtctatgcgagntctgggggctctggttccc

SEQ ID NO: 3330 - DNA, 132 bp, Homo sapiens
  misc_feature (11)..(11): n equals a,t,g, or c
  misc_feature (17)..(17): n equals a,t,g, or c
  misc_feature (67)..(68): n equals a,t,g, or c
  misc_feature (82)..(82): n equals a,t,g, or c
  misc_feature (117)..(118): n equals a,t,g, or c
tgcacagactnctggcntatactcagaataaaatttacataatgctttacatactcacaaaattgtnntgataaacatactnttataattgttgcaacaccttgggaaatagctggnnctatattactgcgt

SEQ ID NO: 3331 - DNA, 515 bp, Homo sapiens
  misc_feature (299)..(299): n equals a,t,g, or c
  misc_feature (342)..(342): n equals a,t,g, or c
  misc_feature (362)..(362): n equals a,t,g, or c
  misc_feature (373)..(373): n equals a,t,g, or c
  misc_feature (402)..(402): n equals a,t,g, or c
  misc_feature (415)..(415): n equals a,t,g, or c
  misc_feature (460)..(460): n equals a,t,g, or c
  misc_feature (481)..(481): n equals a,t,g, or c
  misc_feature (488)..(488): n equals a,t,g, or c
  misc_feature (495)..(495): n equals a,t,g, or c
  misc_feature (507)..(507): n equals a,t,g, or c
gcccaggtggtgctgcttggccccaggtcgaattcctgtgctggcagcaagcaggggcctgggctgtcggctggctggggctcatgcagccatcccctttgcagccatccgggtgacctgcataggttcctgcggggtctccaacaaggctaatgacacagcgtgggtagtggaggagggttacttcaacagttccctgtcgctggcagacaaggggagcctgcccgctggagagcacagcttccccttccagttcctgcttcctgccactgcacccacgtcctttgagggtcctttcnggaagatcgtgcaccaggtgaaggccgccatccaaacgccacngttttccaaggatcacaagngcaagcctcgnggtctatatcttgagcccctttgaacctnaacagcattccanacattggagcaaacccaaccgtgggccttctgccaccaaagaaanttcttcctacaagcttggttnaagaacngggcaancgtggtcccttnacaagcca

SEQ ID NO: 3332 - DNA, 562 bp, Homo sapiens
  misc_feature (518)..(518): n equals a,t,g, or c
  misc_feature (525)..(525): n equals a,t,g, or c
  misc_feature (534)..(534): n equals a,t,g, or c
  misc_feature (558)..(559): n equals a,t,g, or c
gcccacacccggcctaataaggaatattctgaataactttatgccaataaactcaacaacttagatgaaatggacaaattctttagaagacaaaaactaccagtgctcactcatgaagaaataggtgagctgaaaaatcctctatctattaaagaaattgaattttagtttttaactttcctataaagaaaactttagcagagaggggtaggcaccatctctgctgtttggtcgactcagccattccagcctgcgggctttggagagtccaaaagtttcagacaagggagcgtccccccagcagcacaacatagtggctttgccagatcatgaccagactgctgctttaagcagcctggatcacttccttctcactgggcagggactcccagttgggcccttcagccatgcccactggcacatactatggacagagctctgatctctccctgggatggagtgccccagggaggggagggctgccacctgggttggatggatgactcaactgttccaancctgcangctttgganaagtccaagctgatggggcagaanntgg

SEQ ID NO: 3333 - DNA, 302 bp, Homo sapiens
  misc_feature (194)..(194): n equals a,t,g, or c
  misc_feature (275)..(275): n equals a,t,g, or c
  misc_feature (283)..(283): n equals a,t,g, or c
  misc_feature (285)..(285): n equals a,t,g, or c
  misc_feature (289)..(289): n equals a,t,g, or c
  misc_feature (301)..(301): n equals a,t,g, or c
gcccacgcgtccggcctcactagtggcaagggcaggagccactggggagaggacaagaggcctgagacctgctccccagtggctccaggcctcactagtggcaagggcaggatgaggctgcaccgctgggaagagtctatctaagctcttggcttggagtcccgtgtcgtctccacccagaggaagttctccanagttcacctttcccttttccttgagttgtgctgaatgccccaccccagctctctttcccttctgggtgtctttgctggganggggctgngntgtnagccctaccggnt

SEQ ID NO: 3334 - DNA, 408 bp, Homo sapiens
  misc_feature (143)..(143): n equals a,t,g, or c
  misc_feature (174)..(174): n equals a,t,g, or c
  misc_feature (242)..(242): n equals a,t,g, or c
  misc_feature (245)..(245): n equals a,t,g, or c
  misc_feature (248)..(248): n equals a,t,g, or c
  misc_feature (258)..(259): n equals a,t,g, or c
  misc_feature (261)..(261): n equals a,t,g, or c
  misc_feature (264)..(264): n equals a,t,g, or c
  misc_feature (275)..(275): n equals a,t,g, or c
  misc_feature (280)..(280): n equals a,t,g, or c
  misc_feature (295)..(296): n equals a,t,g, or c
  misc_feature (298)..(298): n equals a,t,g, or c
  misc_feature (310)..(310): n equals a,t,g, or c
  misc_feature (340)..(340): n equals a,t,g, or c
  misc_feature (348)..(348): n equals a,t,g, or c
  misc_feature (357)..(357): n equals a,t,g, or c
  misc_feature (380)..(380): n equals a,t,g, or c
gcccacgcgtccggcaaaattcaatgtgcaatttggggaaagggttctcttgtgtgtgtctcccatttagaggcagatggggccagagtgttctagagatccagactctagagctccgatcccatccacccctcagctgtggncacacaccaacgcggagcagccctcaccctncccatgcaattaggacgaggtgagcgcagacgtcactctaagctcaaacttttcgcagtctcttcccntgnggnaaaaccatanncntcnagcccaaacangggtngaaaggccaaatctnnanaaaggttgcagncgagagggaaggctccctctgcgcctgaangcccccangtcctcggnttggggggaactcttcagcacanccttctctggacacccgaaggaagaatc

SEQ ID NO: 3335 - DNA, 658 bp, Homo sapiens
  misc_feature (501)..(501): n equals a,t,g, or c
gcacagttccaggttcacccggctgagcgcgctgcccttgcggaggccgcgggccctcctggtgagatcccttcacgtcccctggcctccagtgtcatctgctctgcgtgatatctccagggggacctctctgctgggctccaggccgcatggctgtgggtgaccagcatcatgtcccaccgggtcccctgcagtcccagtgcacctgcctgctcatccagggacctgtcctcactgcctgctgcctgcactgtgtggaaggacagaggctaaacgacgaagcctcgagctctggtctcatggaaatggcagcctgcccaccacccacgcttgcccagcctttcttcacgcattaaaacgtggagagtggaatcttctgggcccaggtaatgcgcctttgctccgacattcccttcactactcactggcgagctcagttggaaattcactcccaataggagttccacggcagacacatcgtgagtcatggcagaactttgncttttaattgcagaatgttaaagaaagagtcactcaggtagcaaagattggcttttcaggggcgattttatggagctattaactcagagacaccattacttaaatgtaatttttattattacaattaaagactgattttgattttatgaaaaaaaaa

SEQ ID NO: 3336 - DNA, 118 bp, Homo sapiens
  misc_feature (43)..(44): n equals a,t,g, or c
  misc_feature (51)..(51): n equals a,t,g, or c
  misc_feature (54)..(54): n equals a,t,g, or c
  misc_feature (96)..(96): n equals a,t,g, or c
tggactgactatggcactctgaggctggcctgcacgggctcannccatgangangagaaccgatcccttgccttgcccctccctgtggcagggctnactgcctgccctcctgcttgca

SEQ ID NO: 3337 - DNA, 103 bp, Homo sapiens
  misc_feature (48)..(48): n equals a,t,g, or c
  misc_feature (69)..(69): n equals a,t,g, or c
  misc_feature (71)..(71): n equals a,t,g, or c
  misc_feature (79)..(80): n equals a,t,g, or c
cacttaccatcttgcctttctccttgctctgatgaatttgaactttcngcctaatgtggacgctctggntnagcttcannaggaaccatgaaccacttactgg

SEQ ID NO: 3338 - DNA, 66 bp, Homo sapiens
  misc_feature (25)..(25): n equals a,t,g, or c
  misc_feature (42)..(42): n equals a,t,g, or c
  misc_feature (53)..(53): n equals a,t,g, or c
  misc_feature (56)..(56): n equals a,t,g, or c
gctagttctagatcgcgagcggccnggatttcattgggtttnttttacaatantancttttggggt

SEQ ID NO: 3339 - DNA, 366 bp, Homo sapiens
  misc_feature (8)..(8): n equals a,t,g, or c
  misc_feature (330)..(330): n equals a,t,g, or c
  misc_feature (353)..(353): n equals a,t,g, or c
  misc_feature (362)..(362): n equals a,t,g, or c
  misc_feature (364)..(365): n equals a,t,g, or c
gcggactngtgggcccagatgctgagggtccccatggacaatttgtttcagagaagagagttgaacagtggtgagctgggctcacagctccatccatgggccccattttgtaccttgtcctgagttggtccaaagggcatttacaatgtcataaatatccttatataagaaaaaaaatgatctcttatcaattagcactcactaatgtactactaattgagcaacctacgcactcagttgactacgtaaatctgtcaggtcttttgtgatttcctctgatgcaggagaggaaaaattgtaattgatgaaaataatgaatgaaaatcaacngatgaataaatggttctttatangtgaaaaananna

SEQ ID NO: 3340 - DNA, 351 bp, Homo sapiens
  misc_feature (14)..(14): n equals a,t,g, or c
  misc_feature (35)..(35): n equals a,t,g, or c
  misc_feature (60)..(60): n equals a,t,g, or c
  misc_feature (74)..(74): n equals a,t,g, or c
  misc_feature (94)..(94): n equals a,t,g, or c
  misc_feature (98)..(98): n equals a,t,g, or c
  misc_feature (109)..(109): n equals a,t,g, or c
  misc_feature (131)..(131): n equals a,t,g, or c
  misc_feature (134)..(134): n equals a,t,g, or c
  misc_feature (136)..(136): n equals a,t,g, or c
  misc_feature (146)..(147): n equals a,t,g, or c
  misc_feature (149)..(149): n equals a,t,g, or c
  misc_feature (151)..(151): n equals a,t,g, or c
  misc_feature (153)..(153): n equals a,t,g, or c
  misc_feature (160)..(160): n equals a,t,g, or c
  misc_feature (183)..(183): n equals a,t,g, or c
  misc_feature (193)..(193): n equals a,t,g, or c
  misc_feature (209)..(209): n equals a,t,g, or c
  misc_feature (234)..(234): n equals a,t,g, or c
  misc_feature (246)..(246): n equals a,t,g, or c
  misc_feature (275)..(275): n equals a,t,g, or c
  misc_feature (293)..(293): n equals a,t,g, or c
  misc_feature (304)..(304): n equals a,t,g, or c
  misc_feature (332)..(332): n equals a,t,g, or c
  misc_feature (350)..(350): n equals a,t,g, or c
ggccacgcgtgcgntatattcgggatatcacattngaattattttagattagaacaagtngcaacgcaattaancacggaattgcatcaaaganatgnaacatggatgngaagagatttggccagtgtgcntgngncacagcaatnncnangntggatanacttaagctaatgctaactcaanagactatgcnactcatgacagcgaantaattgagtttaaatcgcataaganctgaaattcacngaaagatggaagatcttccttaacaaganagaaaatataaatgttgnagatgaattanaaatgcacttttatgaaattcagttacnaactatatgaagttaaant

SEQ ID NO: 3341 - DNA, 443 bp, Homo sapiens
  misc_feature (2)..(2): n equals a,t,g, or c
  misc_feature (5)..(5): n equals a,t,g, or c
  misc_feature (10)..(10): n equals a,t,g, or c
  misc_feature (42)..(42): n equals a,t,g, or c
  misc_feature (44)..(44): n equals a,t,g, or c
  misc_feature (70)..(70): n equals a,t,g, or c
  misc_feature (82)..(82): n equals a,t,g, or c
  misc_feature (154)..(154): n equals a,t,g, or c
  misc_feature (209)..(209): n equals a,t,g, or c
  misc_feature (236)..(236): n equals a,t,g, or c
  misc_feature (242)..(242): n equals a,t,g, or c
  misc_feature (245)..(245): n equals a,t,g, or c
  misc_feature (309)..(309): n equals a,t,g, or c
  misc_feature (330)..(330): n equals a,t,g, or c
  misc_feature (362)..(362): n equals a,t,g, or c
  misc_feature (417)..(417): n equals a,t,g, or c
  misc_feature (420)..(420): n equals a,t,g, or c
  misc_feature (431)..(431): n equals a,t,g, or c
  misc_feature (439)..(439): n equals a,t,g, or c
gntcnttttntcttataaaccttttgcctattaatgctgtanancctacttcttcacagcaaatacccancagagaaacatntgaagccaataaagagagaagaaaaatgacatcaaagtcaagtgaatcaaatatatattcacctttaacctnttttatcactgctgattcagaactccatgacattattaaagatttggaggattgnttgatggtgggtctacacacttgtggngatctnggntccaaatactttgcgaatatttacctccaactctgaaatcaagggagtttgcagtgtgggttgntgctaccacctcttatctgangaatttgaaaaccagcattgagaacgtactcnggaaaagtggggatttccaatgggccactatttaaaggaagagagatggtgctgnggncgtaatgccanaatgtaancatg

SEQ ID NO: 3342 - DNA, 376 bp, Homo sapiens
  misc_feature (221)..(221): n equals a,t,g, or c
  misc_feature (257)..(257): n equals a,t,g, or c
  misc_feature (317)..(317): n equals a,t,g, or c
  misc_feature (331)..(331): n equals a,t,g, or c
  misc_feature (350)..(350): n equals a,t,g, or c
  misc_feature (369)..(370): n equals a,t,g, or c
gattaaaagtgctcttctcatagcacgaggggaatagctgggcttctgtctcagaacggtcaccgtggcatttgccttaaccacgccatgcccctgacctttgtatttgcaagtcttgaggataattaaaatggggaagtatttttgtgcctatttggccctaggctgaagagtttcattctgtcctgtagtctgaggctaacctaaacacattaacttangaaccgacctgacttctgaccagggacaagacccantgtgggaggttattttggattacaccagtctgctttggtctgggtgtaagcattgttcgngctctgaatgtggnttcaccctgaatcacccancatacaccggtctcattgnntgcctg

SEQ ID NO: 3343 - DNA, 61 bp, Homo sapiens
  misc_feature (21)..(21): n equals a,t,g, or c
  misc_feature (27)..(27): n equals a,t,g, or c
  misc_feature (34)..(34): n equals a,t,g, or c
tattattttgctgactgtggnttcatnaacacantaaaaatatagcttggaaaaaaaaaaa

SEQ ID NO: 3344 - DNA, 491 bp, Homo sapiens
  misc_feature (26)..(26): n equals a,t,g, or c
  misc_feature (37)..(37): n equals a,t,g, or c
  misc_feature (53)..(53): n equals a,t,g, or c
  misc_feature (66)..(66): n equals a,t,g, or c
  misc_feature (82)..(82): n equals a,t,g, or c
  misc_feature (86)..(86): n equals a,t,g, or c
  misc_feature (92)..(92): n equals a,t,g, or c
  misc_feature (98)..(98): n equals a,t,g, or c
  misc_feature (108)..(108): n equals a,t,g, or c
  misc_feature (110)..(110): n equals a,t,g, or c
  misc_feature (119)..(119): n equals a,t,g, or c
  misc_feature (129)..(129): n equals a,t,g, or c
  misc_feature (133)..(134): n equals a,t,g, or c
  misc_feature (146)..(146): n equals a,t,g, or c
  misc_feature (150)..(150): n equals a,t,g, or c
  misc_feature (154)..(154): n equals a,t,g, or c
  misc_feature (173)..(173): n equals a,t,g, or c
  misc_feature (202)..(202): n equals a,t,g, or c
  misc_feature (241)..(241): n equals a,t,g, or c
  misc_feature (323)..(323): n equals a,t,g, or c
  misc_feature (337)..(338): n equals a,t,g, or c
  misc_feature (406)..(406): n equals a,t,g, or c
  misc_feature (445)..(446): n equals a,t,g, or c
  misc_feature (460)..(460): n equals a,t,g, or c
  misc_feature (491)..(491): n equals a,t,g, or c
gaacatttcttccctttaagtaaatnttttaaaatgngtttgcatgggtatgngtgtgtatgattnctgtgtccttcattgngtcngaatgntgacanctgagttgtngncctgagggngtagtatagngtgnncttaaacatttnaggnattnttgaatttatctatgttgnctttgaatcttttacagggattctataantgccgtcatgtaatctgttacagaagggaggctgtgttntgtgtcttgtatatttcttttctttcagaaattacagatgtttataattagcttcaaacactgccttaatagcaattggaanataactgccgtcanncgacgtggtctttccctttacttcatgaggagaatgactactaatctggaagaaaggtcttactatancactcaggatcaccagagtatgtgccgaacactttctgnnttaatctgaaaatntgagtcatggaaaatggaagatttgcaaaan

SEQ ID NO: 3345 - DNA, 157 bp, Homo sapiens
  misc_feature (115)..(115): n equals a,t,g, or c
  misc_feature (128)..(128): n equals a,t,g, or c
  misc_feature (130)..(130): n equals a,t,g, or c
  misc_feature (133)..(133): n equals a,t,g, or c
  misc_feature (155)..(155): n equals a,t,g, or c
ggtagccatgacatagcttgagctatagcctttaattccttactttggctatgggtggagggtgagtttgaagaggttctgattttcttgtaacctgggaaagccatgaccttgngcccgattctttnanatngctttgggtaataaatattggngg

SEQ ID NO: 3346 - DNA, 248 bp, Homo sapiens
  misc_feature (211)..(212): n equals a,t,g, or c
  misc_feature (222)..(223): n equals a,t,g, or c
  misc_feature (225)..(225): n equals a,t,g, or c
gggacggtggaccctgcgcctgggaccgcgtccgtcctgctcgccgcgcatggccgggaacgcggagccgccgcccgccggagccgcatgcccccaggaccggaggtcctgcagcggccgggccgggggcgaccgcgtctgggaggacggagaacatccggcgaagaagctcaagagcggtggcgactaggagcggcgcgagaagccgccnnagcggaaganngngctgctcatggcctattcgggca

SEQ ID NO: 3347 - DNA, 63 bp, Homo sapiens
  misc_feature (10)..(11): n equals a,t,g, or c
  misc_feature (34)..(35): n equals a,t,g, or c
  misc_feature (54)..(54): n equals a,t,g, or c
gtgacatggnnacacaactggacacgccaggaanntggcagttcccagacccancaatgatag

SEQ ID NO: 3348 - DNA, 377 bp, Homo sapiens
  misc_feature (2)..(2): n equals a,t,g, or c
  misc_feature (6)..(6): n equals a,t,g, or c
  misc_feature (38)..(39): n equals a,t,g, or c
  misc_feature (87)..(87): n equals a,t,g, or c
  misc_feature (107)..(107): n equals a,t,g, or c
  misc_feature (117)..(117): n equals a,t,g, or c
  misc_feature (162)..(162): n equals a,t,g, or c
  misc_feature (180)..(180): n equals a,t,g, or c
  misc_feature (219)..(219): n equals a,t,g, or c
  misc_feature (235)..(235): n equals a,t,g, or c
  misc_feature (242)..(242): n equals a,t,g, or c
  misc_feature (264)..(264): n equals a,t,g, or c
  misc_feature (306)..(306): n equals a,t,g, or c
  misc_feature (316)..(316): n equals a,t,g, or c
  misc_feature (324)..(324): n equals a,t,g, or c
  misc_feature (371)..(371): n equals a,t,g, or c
  misc_feature (375)..(375): n equals a,t,g, or c
ancgcnctgggaaacgcccttaggataagtttacgctnnaacgccctgcaggtaccggtccggaattcccgggtcgacccacgcgtncgaggttagatgggctctgnccacactagncattacaacatcacggaaagatgaagttagagacttggtattaanctttggtatgccacttgnattagattcacaatcttgtaggctgggcaagatgcttancctgtcatggtctgcntcctgtnctattcaatgatgattattatntactttataatatcataaagactaaacaggctcatgcatganatattttggnagaggagnatggagtatgtaacacttgacattactggtactattcaaaaggatcnctgntt

SEQ ID NO: 3349 - DNA, 269 bp, Homo sapiens
  misc_feature (14)..(14): n equals a,t,g, or c
  misc_feature (18)..(18): n equals a,t,g, or c
  misc_feature (27)..(27): n equals a,t,g, or c
  misc_feature (65)..(65): n equals a,t,g, or c
  misc_feature (76)..(76): n equals a,t,g, or c
  misc_feature (106)..(106): n equals a,t,g, or c
  misc_feature (112)..(112): n equals a,t,g, or c
  misc_feature (114)..(114): n equals a,t,g, or c
  misc_feature (123)..(123): n equals a,t,g, or c
  misc_feature (136)..(136): n equals a,t,g, or c
  misc_feature (138)..(138): n equals a,t,g, or c
  misc_feature (179)..(179): n equals a,t,g, or c
  misc_feature (243)..(243): n equals a,t,g, or c
  misc_feature (246)..(246): n equals a,t,g, or c
  misc_feature (249)..(249): n equals a,t,g, or c
  misc_feature (255)..(255): n equals a,t,g, or c
cgggaatactcttnggtnatttcgcgnaggtacccggtccggaattcccgggtcgacccacgcgnccgacccttanggccttttacgcttaattcctggtgaaggntggganangaatggcanctgaagggcggtntnaaaatttccctgggggggcttctcactggtctctactcatncagtaaggggatctgtgaccatgtgtggggtgggacaggagagacacacggggtcctggaagcnctntgngcacangatgggagggcaca

SEQ ID NO: 3350 - DNA, 159 bp, Homo sapiens
  misc_feature (18)..(18): n equals a,t,g, or c
  misc_feature (37)..(37): n equals a,t,g, or c
  misc_feature (39)..(40): n equals a,t,g, or c
  misc_feature (80)..(80): n equals a,t,g, or c
  misc_feature (135)..(135): n equals a,t,g, or c
  misc_feature (139)..(139): n equals a,t,g, or c
  misc_feature (155)..(155): n equals a,t,g, or c
  misc_feature (157)..(157): n equals a,t,g, or c
ttggtatgcaacaaatangaaactgataacctggctnannctacaattcaatggaaccactattttgttcccctggtggntactaacacttccaaaccagcagactcacagttgccaggacaggaagcaaaaagnctgnaagccggttattaggngnaa

SEQ ID NO: 3351 - DNA, 152 bp, Homo sapiens
  misc_feature (1)..(1): n equals a,t,g, or c
  misc_feature (3)..(3): n equals a,t,g, or c
  misc_feature (7)..(7): n equals a,t,g, or c
  misc_feature (10)..(10): n equals a,t,g, or c
  misc_feature (40)..(40): n equals a,t,g, or c
  misc_feature (132)..(132): n equals a,t,g, or c
  misc_feature (141)..(142): n equals a,t,g, or c
  misc_feature (144)..(144): n equals a,t,g, or c
  misc_feature (152)..(152): n equals a,t,g, or c
ngnccgnagngattggcaaactcccagcggtttaagggtntaaaagggccccgcaggccaccagggtccggaattcccgggtcgacccacgcgtccggatgtgccagggagtgggtgtggagacccggacangggcgcagnnanactcacan

SEQ ID NO: 3352 - DNA, 417 bp, Homo sapiens
  misc_feature (354)..(354): n equals a,t,g, or c
  misc_feature (391)..(391): n equals a,t,g, or c
  misc_feature (393)..(393): n equals a,t,g, or c
  misc_feature (402)..(402): n equals a,t,g, or c
  misc_feature (405)..(405): n equals a,t,g, or c
gataaacaactcagttaacgtttacatagtaaataattgcattgccttgggctggaatagggacgccagaaggtataggaccatgtggaattcagaaaagggagccctgaagaatgagattttattgttcttaccaggagagtccaggtgctagagttctctccttgtaagtgactaaccttctcccttttggtacacaatcctcagatgaacggagatgattcattaggccattctagcttaatggatgcatcactgtgcaaccacgcaaatgcctcatttctgattcactcatttaatatttattgaggagtgctgggtactaggccattagaagaacaaacaacaacaacntaggcctggaccttgcacttgcagagtcacaggctananaggcacacnagntaatatagaaca

SEQ ID NO: 3353 - DNA, 287 bp, Homo sapiens
  misc_feature (8)..(8): n equals a,t,g, or c
  misc_feature (13)..(13): n equals a,t,g, or c
  misc_feature (19)..(19): n equals a,t,g, or c
  misc_feature (103)..(103): n equals a,t,g, or c
  misc_feature (117)..(117): n equals a,t,g, or c
  misc_feature (143)..(143): n equals a,t,g, or c
  misc_feature (156)..(156): n equals a,t,g, or c
  misc_feature (159)..(159): n equals a,t,g, or c
  misc_feature (235)..(235): n equals a,t,g, or c
  misc_feature (239)..(239): n equals a,t,g, or c
  misc_feature (250)..(250): n equals a,t,g, or c
  misc_feature (267)..(267): n equals a,t,g, or c
  misc_feature (278)..(278): n equals a,t,g, or c
gggcctgntctgncgagangagagcagatggaatgagttggtgacccctcttaatctgtagcctcagggaaacacggctacccaatgccaagatggtaaaccntcaactcgaagagnaagatcaggacgtatgcttaaggtgnaagggtgaggagnagntggtaggcagtatgtttgccagtgacattgaaggtgagagaaacaaaaattacaaatgaatgatattttctcaatnctgnggaagaagtgntacaggcaggcctttgntcttagagctnccaagatgg

SEQ ID NO: 3354 - DNA, 322 bp, Homo sapiens
  misc_feature (1)..(1): n equals a,t,g, or c
  misc_feature (7)..(7): n equals a,t,g, or c
  misc_feature (40)..(40): n equals a,t,g, or c
  misc_feature (191)..(191): n equals a,t,g, or c
  misc_feature (267)..(267): n equals a,t,g, or c
  misc_feature (307)..(307): n equals a,t,g, or c
  misc_feature (311)..(311): n equals a,t,g, or c
  misc_feature (318)..(318): n equals a,t,g, or c
  misc_feature (320)..(320): n equals a,t,g, or c
ngcaacnaattgacttagaaggatacaaaataaataatanagcagagtggtgtctgcaagtcttcacagtagactcagagcttaggtgtgagggaatgagacgacacagatgggtgtggaagccacctgcctaggagccccattcccccaggaacacatccagtttcaagaatgtcgcagtccagatgtgntgtactaatcacaggtcataagcagtgttgcctgtaatatagctgacattcgacaagatttctaaggaaacagttntggaaagttaacctgtggatgttaagtcctgcttcattgntggncacttangntg

SEQ ID NO: 3355 - DNA, 102 bp, Homo sapiens
  misc_feature (13)..(13): n equals a,t,g, or c
  misc_feature (25)..(25): n equals a,t,g, or c
  misc_feature (42)..(42): n equals a,t,g, or c
  misc_feature (73)..(73): n equals a,t,g, or c
  misc_feature (91)..(91): n equals a,t,g, or c
ggcaaagatgacngcagcatactgngaaccctgcgcccaacngctgacagagaagagggtgaatgtggagggngggaggaaggtggaaggngagctgggggg

SEQ ID NO: 3356 - DNA, 156 bp, Homo sapiens
  misc_feature (6)..(6): n equals a,t,g, or c
  misc_feature (34)..(35): n equals a,t,g, or c
  misc_feature (48)..(48): n equals a,t,g, or c
  misc_feature (55)..(55): n equals a,t,g, or c
  misc_feature (103)..(103): n equals a,t,g, or c
  misc_feature (105)..(105): n equals a,t,g, or c
  misc_feature (112)..(112): n equals a,t,g, or c
  misc_feature (115)..(115): n equals a,t,g, or c
  misc_feature (147)..(147): n equals a,t,g, or c
gacatncacgcatggaagcatcactgctatatannaggctcaccatgnctcaacngaattaaatgtttataccgtagatcctgagatcagcaccggacactgnanccaaatnttntaggaggcacatctacgtactagagatttgcnttccatagg

SEQ ID NO: 3357 - DNA, 280 bp, Homo sapiens
cgtccggtgaaacctttgctttctggcctaattactgagttaattagggcctagaccacagtaacctccattcccacccagagtctctgattcaactctgatttgaccctagcttgtcaccctgacaccgactccacagcctttggtccttggcactctgatcccgacccttggccctcttccactgggaagtagcaatgggtggaccgctgggctgtggtctgggtggtctatagctgtggcctgaccgcacactgcaacaactttcaatgccccccaa

SEQ ID NO: 3358 - DNA, 100 bp, Homo sapiens
  misc_feature (4)..(4): n equals a,t,g, or c
  misc_feature (23)..(23): n equals a,t,g, or c
  misc_feature (44)..(44): n equals a,t,g, or c
  misc_feature (66)..(67): n equals a,t,g, or c
tgtncctgggcaaatccccatgnggaaagccgggggaagggaanccatctttccccccgtgggggnncgagccaaagttgggtggaaaaaaccccattgg

SEQ ID NO: 3359 - DNA, 119 bp, Homo sapiens
  misc_feature (10)..(10): n equals a,t,g, or c
  misc_feature (15)..(15): n equals a,t,g, or c
  misc_feature (40)..(40): n equals a,t,g, or c
  misc_feature (53)..(53): n equals a,t,g, or c
  misc_feature (58)..(58): n equals a,t,g, or c
  misc_feature (119)..(119): n equals a,t,g, or c
gaacctgtancttgntcttgattgtctggatgtcctgaancctttgggacatnagaanataattgagcaatgaactggaaggcttaggcattcgcttgaacaggaaaccccccaacctn

SEQ ID NO: 3360 - DNA, 602 bp, Homo sapiens
  misc_feature (219)..(219): n equals a,t,g, or c
  misc_feature (297)..(297): n equals a,t,g, or c
  misc_feature (312)..(312): n equals a,t,g, or c
  misc_feature (424)..(424): n equals a,t,g, or c
  misc_feature (524)..(524): n equals a,t,g, or c
  misc_feature (530)..(530): n equals a,t,g, or c
  misc_feature (538)..(538): n equals a,t,g, or c
  misc_feature (597)..(597): n equals a,t,g, or c
  misc_feature (601)..(601): n equals a,t,g, or c
gaaaaaatactgtatgatatagaaatgccataccccctacaattatttgggcttttcagtgaaaattttcaatgagtcacatcattttcttccaattttttcatacaggaaaacatggttatatattataaatgcctctaccttagtctctctggtctttggataatcttgcatattgctactgaaatttgggagttcctcctccatacagcagagtanatacagagtgctgccaggagctgccaccctgagcacagaaggctactctgcagcagccttgggactgggccacatggncatagaagcagccanaaaggaagaaagggtggggtgaagccaaaattcaagccaggcattttcaacttcagcccttagctagtgaggtcattttccatgtaatctctggttccactagattcaatgnctcttaaatggtgaacacacaaaatctgaacccatcccatgaccatccagaccaacacaatgatgcttgcattcctgggcattggcattggatcaggaantagtgngagtccanaattaagcctgggctttgaggtaccctttgaccccactttcatgagggcttggacttanagang

SEQ ID NO: 3361 - DNA, 433 bp, Homo sapiens
  misc_feature (1)..(1): n equals a,t,g, or c
  misc_feature (8)..(8): n equals a,t,g, or c
  misc_feature (20)..(20): n equals a,t,g, or c
  misc_feature (49)..(49): n equals a,t,g, or c
  misc_feature (66)..(66): n equals a,t,g, or c
  misc_feature (114)..(114): n equals a,t,g, or c
  misc_feature (173)..(173): n equals a,t,g, or c
  misc_feature (186)..(186): n equals a,t,g, or c
  misc_feature (233)..(233): n equals a,t,g, or c
  misc_feature (262)..(263): n equals a,t,g, or c
  misc_feature (266)..(266): n equals a,t,g, or c
  misc_feature (269)..(269): n equals a,t,g, or c
  misc_feature (280)..(280): n equals a,t,g, or c
  misc_feature (287)..(288): n equals a,t,g, or c
  misc_feature (305)..(305): n equals a,t,g, or c
  misc_feature (325)..(325): n equals a,t,g, or c
  misc_feature (332)..(332): n equals a,t,g, or c
  misc_feature (379)..(379): n equals a,t,g, or c
  misc_feature (392)..(392): n equals a,t,g, or c
  misc_feature (401)..(401): n equals a,t,g, or c
  misc_feature (403)..(403): n equals a,t,g, or c
  misc_feature (406)..(406): n equals a,t,g, or c
ngggagtnagcctgtttccntccatgggtgggaagacttcagcacaaangaaagactaattcttgncaggcatttttgaaaaggctgattatgtgtatcaaggtacagcatcgnagggttcccctaaacttgccctgtttttgtttttttaggtttgctatccccttactgancggtctctactangtggctgtgattaaatgtcccaagcaaggatagggaaggggaatggntgagcctctggagatcattgtaaccaatnntgncanacctgtttggngcagtgnngagcaaacctagataangacctgtttggggcatgacnggagcanaatctcctttaacaaccaagcagttcctcattcacatcaaccagagncgaggctgtgatnacttaggangntancaatcctaataagccttcagtgccatt

SEQ ID NO: 3362 - DNA, 59 bp, Homo sapiens
  misc_feature (38)..(39): n equals a,t,g, or c
  misc_feature (47)..(47): n equals a,t,g, or c
  misc_feature (54)..(54): n equals a,t,g, or c
  misc_feature (57)..(57): n equals a,t,g, or c
gagataatacttgtctcctgaaatctgtggccataaannaggcttgnatatggncanag

SEQ ID NO: 3363 - DNA, 54 bp, Homo sapiens
  misc_feature (3)..(4): n equals a,t,g, or c
  misc_feature (9)..(9): n equals a,t,g, or c
  misc_feature (12)..(13): n equals a,t,g, or c
gcnnatctntannttttaaatcaaatactgaataaagaatgaagatcttcctat

SEQ ID NO: 3364 - DNA, 518 bp, Homo sapiens
  misc_feature (472)..(472): n equals a,t,g, or c
  misc_feature (488)..(488): n equals a,t,g, or c
  misc_feature (496)..(496): n equals a,t,g, or c
  misc_feature (503)..(504): n equals a,t,g, or c
gctcaaggttgtgcctggctacgctcacactgttgggcaaaagcacagacagatatgctccatttccaagcatgtgggagctgagttccatctctttcaggttaacatatgtgtttctatgcctgactctcaaccttggacctgtacctctgcaatcacttggccctggatggatgagggagggtggcatgtgaatagaaactggaccagggagaccaccaaggaatgatgtgccctcgagcaagaggaatttaagtttatgtcattataaagctctgaagatatttcaatgattatgatggacaaaatggagctcttaaataatcatacagggaggcaagtgtgatcttactgaagaatgaagagtctaatgtagtggttccatgttgttttgggagttgcagtctgggttctcagggatcttcactaccacccctcaccttgccttgacttgttacactgattctgctgntgaggactaaaaggtnggaaagcngaatatnntattcaaatgcata

SEQ ID NO: 3365 - DNA, 494 bp, Homo sapiens
  misc_feature (234)..(234): n equals a,t,g, or c
  misc_feature (251)..(251): n equals a,t,g, or c
  misc_feature (316)..(316): n equals a,t,g, or c
  misc_feature (327)..(327): n equals a,t,g, or c
  misc_feature (345)..(345): n equals a,t,g, or c
  misc_feature (372)..(372): n equals a,t,g, or c
  misc_feature (394)..(394): n equals a,t,g, or c
  misc_feature (426)..(426): n equals a,t,g, or c
  misc_feature (452)..(452): n equals a,t,g, or c
  misc_feature (459)..(459): n equals a,t,g, or c
  misc_feature (469)..(469): n equals a,t,g, or c
  misc_feature (494)..(494): n equals a,t,g, or c
gtacttctctggttttggggttacttgtaaataagtctacgtatataacatgtctcgtggattttgcatgctacactaatctctgttaaatctatcccctctttattcagagcatgctgtcaaggtcctttaattccaattttactactgtaagcagttttcactgtggcagctctagggatctgcatggcagccagggcagtcttgccttgagtgttgcagacagaagaggtnctggtgggcacattttncgagtgagtacctacactagaccaatacttttagcttgtagaagagaaaaccccaaattttaagngtttttaatgnttccaggaaaaaaaatgnttactctggggttagaaaccttgattncctctgagttcttccatggctnagttctaaatctttcttcagagctgataaatncattatctcctgagtttcttttggtnataaacnaatgatgtantcagcccttggtttatgcaaaaaan

SEQ ID NO: 3366 - DNA, 477 bp, Homo sapiens
  misc_feature (2)..(2): n equals a,t,g, or c
  misc_feature (6)..(6): n equals a,t,g, or c
  misc_feature (14)..(14): n equals a,t,g, or c
  misc_feature (24)..(24): n equals a,t,g, or c
  misc_feature (33)..(33): n equals a,t,g, or c
  misc_feature (65)..(65): n equals a,t,g, or c
  misc_feature (84)..(84): n equals a,t,g, or c
  misc_feature (118)..(118): n equals a,t,g, or c
  misc_feature (131)..(131): n equals a,t,g, or c
  misc_feature (161)..(161): n equals a,t,g, or c
  misc_feature (171)..(171): n equals a,t,g, or c
  misc_feature (175)..(175): n equals a,t,g, or c
  misc_feature (182)..(182): n equals a,t,g, or c
  misc_feature (187)..(188): n equals a,t,g, or c
  misc_feature (208)..(208): n equals a,t,g, or c
  misc_feature (223)..(223): n equals a,t,g, or c
  misc_feature (230)..(230): n equals a,t,g, or c
  misc_feature (239)..(239): n equals a,t,g, or c
  misc_feature (250)..(250): n equals a,t,g, or c
  misc_feature (252)..(252): n equals a,t,g, or c
  misc_feature (256)..(256): n equals a,t,g, or c
  misc_feature (272)..(273): n equals a,t,g, or c
  misc_feature (278)..(278): n equals a,t,g, or c
  misc_feature (289)..(289): n equals a,t,g, or c
  misc_feature (293)..(293): n equals a,t,g, or c
  misc_feature (300)..(300): n equals a,t,g, or c
  misc_feature (305)..(305): n equals a,t,g, or c
  misc_feature (308)..(308): n equals a,t,g, or c
  misc_feature (327)..(327): n equals a,t,g, or c
  misc_feature (331)..(331): n equals a,t,g, or c
  misc_feature (387)..(387): n equals a,t,g, or c
  misc_feature (454)..(454): n equals a,t,g, or c
  misc_feature (466)..(466): n equals a,t,g, or c
  misc_feature (474)..(475): n equals a,t,g, or c
gncaantataagtnattacatgtntttatttgngtgtgattaaaagcataaatgttcaatgtcancattgaaaatatatcacanttttgtaacctttatctggagcatttcttcattnacttatatatcangaatattaaaaaaaaaatggactggaccantcaatgccantganccctgcntttgnngctttacccatacttgcaanggtgatgctgtgaangctgaanactggtcangaaattggaanancttntaaagaacattttttnncacancaaacctggtntctnaaaattnctatnttnttctgaaaagtgcccagtntctnggaacacttaaaataaattgtcactgaaataaaaccttgaccttcagaaaatgganaacctgaggttatcttcaaaagacagaattgctaaatttttcaactaaaatcttgaacactattacnactaggaggtgntcctttgnntg

SEQ ID NO: 3367 - DNA, 255 bp, Homo sapiens
  misc_feature (40)..(40): n equals a,t,g, or c
  misc_feature (194)..(194): n equals a,t,g, or c
  misc_feature (223)..(223): n equals a,t,g, or c
  misc_feature (233)..(233): n equals a,t,g, or c
  misc_feature (248)..(248): n equals a,t,g, or c
  misc_feature (250)..(250): n equals a,t,g, or c
gtctatacccattttgggtatagaagataaaactattggnatttcgtttcttttctgtacccaaaatggaggttaaaagttacactaaaaataacacgattgcaccaaagaaagcgtcccatcgtatcctgtcagacacgtcggacgaggaggacgcgagtgtcaccgtggggacaggagagaagctgagactnttggcacataccgatattgcctggtagtnaagacaccanagccttctaatgccnancagtt

SEQ ID NO: 3368 - DNA, 100 bp, Homo sapiens
  misc_feature (18)..(18): n equals a,t,g, or c
  misc_feature (46)..(46): n equals a,t,g, or c
  misc_feature (61)..(61): n equals a,t,g, or c
  misc_feature (65)..(65): n equals a,t,g, or c
  misc_feature (77)..(77): n equals a,t,g, or c
gaatatccctggccagantgatgccttgctgaaggttacgctgtcntttgggagagcgatnctcntgcctcagactnttgagtatttgggacaacaggca

SEQ ID NO: 3369 - DNA, 94 bp, Homo sapiens
  misc_feature (80)..(80): n equals a,t,g, or c
  misc_feature (83)..(83): n equals a,t,g, or c
  misc_feature (85)..(85): n equals a,t,g, or c
  misc_feature (87)..(88): n equals a,t,g, or c
gctagttctagatcgcgagcagccacccactgggagtcttgtttttatttataataaaattgttggggacacctcaaaanagnananntgaaaa

SEQ ID NO: 3370 - DNA, 274 bp, Homo sapiens
  misc_feature (228)..(228): n equals a,t,g, or c
  misc_feature (247)..(247): n equals a,t,g, or c
  misc_feature (250)..(250): n equals a,t,g, or c
  misc_feature (254)..(254): n equals a,t,g, or c
  misc_feature (264)..(264): n equals a,t,g, or c
gcacttgcagaagatttcagccccggccacgatgtttgctgtcagcggatggaaaagtcttcctcaatttatggttcataccccattcttctgaagtgctggttatgttcaaaactctgccagaaaaggcagcttttaaagccttaaagcgaactctacagctgatagctcctctgcatgatatcgtggcctaccttgtcagttttgctaagcttggcaattgtccancatgttttgaatttctcgnagnaccnaccctttganaggtgactgg

SEQ ID NO: 3371 - DNA, 109 bp, Homo sapiens
  misc_feature (9)..(9): n equals a,t,g, or c
  misc_feature (67)..(67): n equals a,t,g, or c
  misc_feature (69)..(69): n equals a,t,g, or c
  misc_feature (100)..(100): n equals a,t,g, or c
  misc_feature (106)..(107): n equals a,t,g, or c
aatgtccgnacacggtccccaattgccgggtcgacccacgcgtccgtgtcaccattgcttttgacantnttcaacactgagcaaaactccggggcaaaantggggnnaa

SEQ ID NO: 3372 - DNA, 157 bp, Homo sapiens
  misc_feature (2)..(2): n equals a,t,g, or c
  misc_feature (6)..(6): n equals a,t,g, or c
  misc_feature (23)..(23): n equals a,t,g, or c
  misc_feature (42)..(42): n equals a,t,g, or c
  misc_feature (56)..(56): n equals a,t,g, or c
  misc_feature (109)..(109): n equals a,t,g, or c
  misc_feature (123)..(123): n equals a,t,g, or c
  misc_feature (142)..(142): n equals a,t,g, or c
  misc_feature (144)..(145): n equals a,t,g, or c
cnacgncatggccatggcctganaactcttccagtatatgtngcagaaggagcgantggaaccgctccacctggcaactgccgaccctcacagaagctgctgaaattcntgaataagcacttnatctggagatcacagtccnannggtgaacaaatt

SEQ ID NO: 3373 - DNA, 66 bp, Homo sapiens
  misc_feature (45)..(45): n equals a,t,g, or c
  misc_feature (53)..(54): n equals a,t,g, or c
  misc_feature (56)..(56): n equals a,t,g, or c
  misc_feature (66)..(66): n equals a,t,g, or c
gctcttacggtgcaatcctgccactatagcggcaggattgcaccntaagaggnnangttctaaatn

SEQ ID NO: 3374 - DNA, 88 bp, Homo sapiens
  misc_feature (61)..(61): n equals a,t,g, or c
  misc_feature (78)..(78): n equals a,t,g, or c
  misc_feature (80)..(80): n equals a,t,g, or c
  misc_feature (84)..(84): n equals a,t,g, or c
cggcaagaatggcagaacttaccaaacaattaaaagagaaattccttttgaacccttgaanttattgaaaccggaacntnacgnattt

SEQ ID NO: 3375 - DNA, 522 bp, Homo sapiens
  misc_feature (283)..(283): n equals a,t,g, or c
  misc_feature (341)..(341): n equals a,t,g, or c
  misc_feature (345)..(345): n equals a,t,g, or c
  misc_feature (350)..(351): n equals a,t,g, or c
  misc_feature (353)..(353): n equals a,t,g, or c
  misc_feature (355)..(355): n equals a,t,g, or c
  misc_feature (359)..(359): n equals a,t,g, or c
  misc_feature (378)..(378): n equals a,t,g, or c
  misc_feature (382)..(382): n equals a,t,g, or c
  misc_feature (389)..(389): n equals a,t,g, or c
  misc_feature (397)..(397): n equals a,t,g, or c
  misc_feature (445)..(445): n equals a,t,g, or c
  misc_feature (452)..(452): n equals a,t,g, or c
  misc_feature (513)..(513): n equals a,t,g, or c
  misc_feature (515)..(515): n equals a,t,g, or c
  misc_feature (517)..(517): n equals a,t,g, or c
gccgcacatgagccatgagagcagctgcaaggggcagctgaataattatctggaggtaactgggtttgattcagactctgggaacaaagtccatagactggagctcctgggttgaggggtgtctgttattgctcaatccagggtcagaagaggactgggtagctcattgtgtgtcttttacaatggtaacgacttttccttttctcacgagtcttctgagttagagggaatgacaaaaacagccaaaggattaaaggttcaatagctgagctggaaatactangatatgtggctggactaaaccaccatgaaaagcaaaaagaaagtgggagatgaactangtangaatnnananatanggagggaccactgattcanaagngacttancaacgatnataacttgcaattatataccttttaaaataactctcatactgatctgncactgangaatacttcctacatgggacctgtgcttaaaaacataatgtggattttaggcccacactgntncnggaat

SEQ ID NO: 3376 - DNA, 536 bp, Homo sapiens
  misc_feature (374)..(374): n equals a,t,g, or c
  misc_feature (412)..(412): n equals a,t,g, or c
  misc_feature (436)..(436): n equals a,t,g, or c
  misc_feature (444)..(444): n equals a,t,g, or c
  misc_feature (471)..(471): n equals a,t,g, or c
  misc_feature (491)..(491): n equals a,t,g, or c
  misc_feature (510)..(510): n equals a,t,g, or c
  misc_feature (514)..(514): n equals a,t,g, or c
gagataactgccaaaaatcaccagaaaaatacttttcaatttatgagcagattattacaagagcaatttaccaagacctaccaatgaacaatgaaaactatgaactgttattctaaagctaatagaaagatgtggttttcatgtccatttccatcatctgcacaatgtaacctttaaaaatatttcttaaagtgttaagtttatgggagcaaaaaaatattgaaaaattatcagaaagttcacaaaaaccttacaaactcacatgtcatcagattaaatgttctcagagagcctgcagtttttcacactccctgcaacctcatggtcatcgctccacagcaagataaatgggtgacaagacaatcctcttctantttggttggcaaatgtcaatatcagcatactttcaagnctttctatgtaaatctgcaaatanagcctggnctttgatttaacttatttgagtgctgnataagactcttagaatgacnggttcttctggtttgacanaagnaaggcctttatctatgtctcaa

SEQ ID NO: 3377 - DNA, 52 bp, Homo sapiens
  misc_feature (3)..(4): n equals a,t,g, or c
  misc_feature (13)..(13): n equals a,t,g, or c
  misc_feature (40)..(40): n equals a,t,g, or c
  misc_feature (45)..(45): n equals a,t,g, or c
gannacgcgtgcntagacagcagagcacacaagcttgtangacangagccat

SEQ ID NO: 3378 - DNA, 68 bp, Homo sapiens
  misc_feature (2)..(2): n equals a,t,g, or c
  misc_feature (18)..(18): n equals a,t,g, or c
  misc_feature (32)..(32): n equals a,t,g, or c
  misc_feature (54)..(54): n equals a,t,g, or c
anatataataaatgaganataataagagatantatatataaataagtataaaantaggtaaaaatatg

SEQ ID NO: 3379 - DNA, 100 bp, Homo sapiens
  misc_feature (4)..(4): n equals a,t,g, or c
  misc_feature (23)..(23): n equals a,t,g, or c
  misc_feature (47)..(47): n equals a,t,g, or c
  misc_feature (70)..(70): n equals a,t,g, or c
  misc_feature (91)..(91): n equals a,t,g, or c
ccgngagatcgggacgcgcaacnggccgttccgggttttgttaaatnacattgtattggcagcaacagtntaacaagaggagtaagcaagngtggtaaac

SEQ ID NO: 3380 - DNA, 84 bp, Homo sapiens
  misc_feature (29)..(29): n equals a,t,g, or c
  misc_feature (46)..(46): n equals a,t,g, or c
  misc_feature (66)..(66): n equals a,t,g, or c
  misc_feature (73)..(73): n equals a,t,g, or c
  misc_feature (83)..(83): n equals a,t,g, or c
ggtgggctgcagtgatgactttggctttntttccaaaaatgacggnagccatactgtgatccctgnccccaantgctgcacana

SEQ ID NO: 3381 - DNA, 92 bp, Homo sapiens
  misc_feature (45)..(45): n equals a,t,g, or c
  misc_feature (78)..(78): n equals a,t,g, or c
  misc_feature (86)..(86): n equals a,t,g, or c
  misc_feature (89)..(89): n equals a,t,g, or c
  misc_feature (91)..(91): n equals a,t,g, or c
ggtgatttaacagtgtgggatgataaaatgaggtgtctgcatagngaaaaagcacatgatcttggaattacctgctgngatttttnttnana

SEQ ID NO: 3382 - DNA, 93 bp, Homo sapiens
  misc_feature (31)..(31): n equals a,t,g, or c
  misc_feature (44)..(44): n equals a,t,g, or c
  misc_feature (64)..(64): n equals a,t,g, or c
  misc_feature (83)..(83): n equals a,t,g, or c
  misc_feature (90)..(90): n equals a,t,g, or c
gcgagagtaaggaaataaagggaattgcctntggctagagagtnggttaggtgttaatacctgntagagatgtaacggatatnacctccnttt

SEQ ID NO: 3383 - DNA, 87 bp, Homo sapiens
  misc_feature (39)..(39): n equals a,t,g, or c
  misc_feature (59)..(59): n equals a,t,g, or c
  misc_feature (62)..(63): n equals a,t,g, or c
  misc_feature (82)..(82): n equals a,t,g, or c
gcacttgcagaagatttcagccccggccacgatgtttgntgtcagaggatggaaaagtnttnntaaatttatggttcatacnccatt

SEQ ID NO: 3384 - DNA, 122 bp, Homo sapiens
  misc_feature (14)..(14): n equals a,t,g, or c
  misc_feature (17)..(17): n equals a,t,g, or c
  misc_feature (29)..(29): n equals a,t,g, or c
  misc_feature (32)..(32): n equals a,t,g, or c
  misc_feature (71)..(71): n equals a,t,g, or c
  misc_feature (101)..(101): n equals a,t,g, or c
  misc_feature (110)..(110): n equals a,t,g, or c
gaggtacacggcanctngagaggaatgcnccnggagaaaagaccaacgcactgaaaagaagccgacttagnagttcaaatacagatgacacccagctgccnagcgaaaangccaaggaacaa

SEQ ID NO: 3385 - DNA, 102 bp, Homo sapiens
  misc_feature (9)..(9): n equals a,t,g, or c
  misc_feature (23)..(23): n equals a,t,g, or c
  misc_feature (32)..(32): n equals a,t,g, or c
  misc_feature (37)..(37): n equals a,t,g, or c
  misc_feature (80)..(80): n equals a,t,g, or c
agcgaatcnagtacctccaaganggaagactntctgngagttctactcccataagtcagatgccctcaacatgatcggtnttgtgcgacctgcaagtatgag

SEQ ID NO: 3386 - DNA, 339 bp, Homo sapiens
  misc_feature (3)..(3): n equals a,t,g, or c
  misc_feature (7)..(7): n equals a,t,g, or c
  misc_feature (26)..(26): n equals a,t,g, or c
  misc_feature (34)..(34): n equals a,t,g, or c
  misc_feature (37)..(37): n equals a,t,g, or c
  misc_feature (284)..(284): n equals a,t,g, or c
  misc_feature (295)..(295): n equals a,t,g, or c
  misc_feature (301)..(301): n equals a,t,g, or c
  misc_feature (317)..(317): n equals a,t,g, or c
  misc_feature (333)..(333): n equals a,t,g, or c
gcntcanaataagtaaagtttaacantgattcancanttgtcattatcaaagaataaaagactcaagaatatgcaatactggggagactgctgagtcactgtggccatttttagataaaccttttcctgtttataataacacatgctgattgtaggaaactagaaaatacatgaaagtgcagagaaaagactaaaagtcatctatacttcaggtcgtagaaataaccactctgaacagcacacttctttttacactattgttttacactgttgggattacatanatatatatgtntgtatnccactttgtgaacatnattctatgtgaactanaaatgg

SEQ ID NO: 3387 - DNA, 67 bp, Homo sapiens
  misc_feature (34)..(34): n equals a,t,g, or c
  misc_feature (50)..(50): n equals a,t,g, or c
  misc_feature (55)..(56): n equals a,t,g, or c
  misc_feature (67)..(67): n equals a,t,g, or c
gttgacgcgtgggtagttctagatcgcgagcggncgcccttttttttttntcccnnttcccccccan

SEQ ID NO: 3388 - DNA, 282 bp, Homo sapiens
  misc_feature (14)..(14): n equals a,t,g, or c
  misc_feature (24)..(24): n equals a,t,g, or c
  misc_feature (35)..(35): n equals a,t,g, or c
  misc_feature (39)..(39): n equals a,t,g, or c
  misc_feature (49)..(49): n equals a,t,g, or c
  misc_feature (165)..(165): n equals a,t,g, or c
  misc_feature (188)..(188): n equals a,t,g, or c
  misc_feature (221)..(221): n equals a,t,g, or c
  misc_feature (239)..(239): n equals a,t,g, or c
  misc_feature (250)..(250): n equals a,t,g, or c
  misc_feature (257)..(257): n equals a,t,g, or c
gcccgtttcccggncaatttttcncccttttttcncccncaattaaagncccaatttccaaaaaaaaacttgggggaacccaaaaacttgggggccctttcttttccctttttttccccccttgggggggaacccaaaaaaatttttaaagggggggcccctttnaaagttccccttttaacccgggnccatttgccccttgggcccttaatttcttgggncttctttcctttcttttncccccttgggncctgggntcttggtcttcttgaagcttcttgg

SEQ ID NO: 3389 - DNA, 90 bp, Homo sapiens
  misc_feature (53)..(53): n equals a,t,g, or c
  misc_feature (60)..(62): n equals a,t,g, or c
  misc_feature (82)..(82): n equals a,t,g, or c
gatgagagctgccataagagggatccctgagcagtgagactcaggatggaatnattggannnaattgcctcctactttgcangagggcaa

SEQ ID NO: 3390 - DNA, 60 bp, Homo sapiens
  misc_feature (3)..(3): n equals a,t,g, or c
  misc_feature (33)..(33): n equals a,t,g, or c
  misc_feature (47)..(47): n equals a,t,g, or c
  misc_feature (57)..(57): n equals a,t,g, or c
gtngacgcgtgggcgcgcgcacagagctctggngcgccgctcccagncacagccttncgc

SEQ ID NO: 3391 - DNA, 208 bp, Homo sapiens
  misc_feature (10)..(10): n equals a,t,g, or c
  misc_feature (25)..(25): n equals a,t,g, or c
  misc_feature (35)..(35): n equals a,t,g, or c
  misc_feature (37)..(37): n equals a,t,g, or c
  misc_feature (45)..(45): n equals a,t,g, or c
  misc_feature (48)..(48): n equals a,t,g, or c
  misc_feature (60)..(60): n equals a,t,g, or c
  misc_feature (157)..(157): n equals a,t,g, or c
  misc_feature (165)..(165): n equals a,t,g, or c
  misc_feature (172)..(172): n equals a,t,g, or c
  misc_feature (175)..(175): n equals a,t,g, or c
  misc_feature (188)..(188): n equals a,t,g, or c
gcttgaaatnagtgagagcagactnaccaaacctngntggtgganctntgtgttccgttngcctctaggtggcagtcacagcatttataagtcctgtcatattcttaactgagattttgagtttgagccctgggaacattggagactaccaaaactncctagttntggcctnttncttgaaaattganaaagggaagaactgaaacat

SEQ ID NO: 3392 - DNA, 94 bp, Homo sapiens
  misc_feature (6)..(6): n equals a,t,g, or c
  misc_feature (8)..(8): n equals a,t,g, or c
  misc_feature (42)..(42): n equals a,t,g, or c
  misc_feature (46)..(46): n equals a,t,g, or c
  misc_feature (94)..(94): n equals a,t,g, or c
cacgcntncgtaaaaaatgaaggggataatatatgataaatnatgntctgatatcctcctacagtagtttaaattgacagaaaaatttgaatgn

SEQ ID NO: 3393 - DNA, 111 bp, Homo sapiens
  misc_feature (3)..(3): n equals a,t,g, or c
  misc_feature (48)..(48): n equals a,t,g, or c
  misc_feature (55)..(55): n equals a,t,g, or c
  misc_feature (59)..(59): n equals a,t,g, or c
  misc_feature (63)..(63): n equals a,t,g, or c
  misc_feature (107)..(107): n equals a,t,g, or c
ggngagtatagggaaagctgggacgcctggagggaacgggccggaatncccgggngganccangtgtgcggggttggagttatatggagaaaggagagatattaagnatag

SEQ ID NO: 3394 - DNA, 100 bp, Homo sapiens
  misc_feature (61)..(61): n equals a,t,g, or c
  misc_feature (75)..(76): n equals a,t,g, or c
  misc_feature (82)..(82): n equals a,t,g, or c
  misc_feature (90)..(90): n equals a,t,g, or c
gcactgggagaagaacctctcataccctcggtgctgcagtggcccagctcactcggcccanacaccatgtgtgannaggatnaccatcgngctcgtgtgt

SEQ ID NO: 3395 - DNA, 349 bp, Homo sapiens
  misc_feature (21)..(21): n equals a,t,g, or c
  misc_feature (321)..(321): n equals a,t,g, or c
  misc_feature (324)..(324): n equals a,t,g, or c
  misc_feature (326)..(326): n equals a,t,g, or c
  misc_feature (333)..(333): n equals a,t,g, or c
  misc_feature (338)..(338): n equals a,t,g, or c
ggactgacaacactccacacntaacaacccaacagaatgaaagacaggtcctttgctaggtatactgtttacctcagtctccactatcccattacacacaaggtctagcattcaataaaaaattaggatacataccaaaaagcaaggcaaataatgactccttatcaagagataaagtagtcaacagaaacagaccaaggagtaatgcacccagatgttagaacccatcaaacagggactttaaccaaggtgagcattataaaagatatagttgaaaaggtggacagataggaaacttcagccaaacaatgaaaactatanaananaacatanatgcngaaaaaaattg

SEQ ID NO: 3396 - DNA, 343 bp, Homo sapiens
  misc_feature (231)..(231): n equals a,t,g, or c
  misc_feature (298)..(298): n equals a,t,g, or c
  misc_feature (302)..(302): n equals a,t,g, or c
  misc_feature (321)..(321): n equals a,t,g, or c
  misc_feature (334)..(334): n equals a,t,g, or c
  misc_feature (338)..(338): n equals a,t,g, or c
gcggacgcgtgggctgacagtgtcttacacaatgatttatacacataggtacaaagtaaataagacacattgtcaagctttctttagatgtaagtattttcaaaattatttttaaaatgactttcaaaggctttaaacatagactatcaaaatcattgacattttctgatacatttctaagttcaaagttatttggggagtatcttttttttaaaaaaacagacagatgangcaaccatatattttatatcttacattaccacctacatagatcttttgagcattatattaaattatnctantatattggaggctactgantggaatcatttgnaaanggcat

SEQ ID NO: 3397 - DNA, 245 bp, Homo sapiens
  misc_feature (137)..(137): n equals a,t,g, or c
  misc_feature (144)..(144): n equals a,t,g, or c
  misc_feature (160)..(160): n equals a,t,g, or c
  misc_feature (171)..(171): n equals a,t,g, or c
  misc_feature (224)..(224): n equals a,t,g, or c
  misc_feature (238)..(238): n equals a,t,g, or c
  misc_feature (245)..(245): n equals a,t,g, or c
ggtagatattaaaaattattttttctaaaattaatgttatactaaaatcatagtttgaattgctgacatattaattgtggattaaataatctatatcttacagactgaatcatattcatgttgttgatgtcctttanaacaganaatgggtaatgtgtanattaactatanagacattaccagtgtacataaaagctattaaaaatcttaatattgtaatttancactgtattccctntacctan

SEQ ID NO: 3398 - DNA, 77 bp, Homo sapiens
  misc_feature (6)..(6): n equals a,t,g, or c
  misc_feature (57)..(57): n equals a,t,g, or c
  misc_feature (65)..(65): n equals a,t,g, or c
gcctangcgttcgctgcgaagctgaggatgagtgatggggtggaggcagtaacaggngcggcganaggagaagtgat

SEQ ID NO: 3399 - DNA, 237 bp, Homo sapiens
  misc_feature (208)..(208): n equals a,t,g, or c
  misc_feature (212)..(212): n equals a,t,g, or c
  misc_feature (216)..(216): n equals a,t,g, or c
  misc_feature (219)..(219): n equals a,t,g, or c
  misc_feature (234)..(234): n equals a,t,g, or c
ggcaatatctgttgcagctcacccttttacatagtccccagattattttgactgatggaattaacccagggaacaacaatggggggctcagctccactctgtgtcactctgggaactgtgcaaccaagaataaactaggattttgttttggcatagcaggtgaggaaacacaggctgtggtctcttgcaaaagtctgtctgaaacttntctnactntantcctattctcattanact

SEQ ID NO: 3400 - DNA, 63 bp, Homo sapiens
  misc_feature (28)..(28): n equals a,t,g, or c
  misc_feature (30)..(31): n equals a,t,g, or c
  misc_feature (37)..(37): n equals a,t,g, or c
  misc_feature (54)..(54): n equals a,t,g, or c
gaataaacatttgtgtacaaaatgaaananntacaanataaagaatataaaaanatgaaaaaa

SEQ ID NO: 3401 - DNA, 435 bp, Homo sapiens
  misc_feature (7)..(7): n equals a,t,g, or c
  misc_feature (26)..(26): n equals a,t,g, or c
  misc_feature (39)..(39): n equals a,t,g, or c
  misc_feature (47)..(47): n equals a,t,g, or c
  misc_feature (89)..(89): n equals a,t,g, or c
  misc_feature (141)..(141): n equals a,t,g, or c
  misc_feature (264)..(264): n equals a,t,g, or c
  misc_feature (283)..(283): n equals a,t,g, or c
gacttcngtaagctcacctggaaccntacgactcattanagggaaanctggtacgcctgcaggtaccggtccggaattcccgggtcganccacgcgtccgaagatattcctttttttgtcctagagaacttattttcctgngaaaatgcctaccacaaagaagacattgatgttcttatcaagctttttcaccagccttgggtccttcattgtaatttgctctattcttgggacacaagcatggatcaccagtacaattgctgntagagactctgcttcaaangggagcattttcatcacttacggactttttcgtggggagagtagtgaagaattgagtcacggacttgcagaaccaaagaaaaagattgcagttttagagatactgaataattcttcccaaaaaactctgcattcggtgactatcctgacctg

SEQ ID NO: 3402 - DNA, 422 bp, Homo sapiens
  misc_feature (12)..(12): n equals a,t,g, or c
  misc_feature (37)..(37): n equals a,t,g, or c
  misc_feature (80)..(80): n equals a,t,g, or c
  misc_feature (104)..(104): n equals a,t,g, or c
  misc_feature (217)..(217): n equals a,t,g, or c
  misc_feature (267)..(267): n equals a,t,g, or c
  misc_feature (269)..(269): n equals a,t,g, or c
  misc_feature (272)..(272): n equals a,t,g, or c
  misc_feature (297)..(297): n equals a,t,g, or c
  misc_feature (312)..(312): n equals a,t,g, or c
  misc_feature (322)..(322): n equals a,t,g, or c
  misc_feature (357)..(358): n equals a,t,g, or c
  misc_feature (372)..(372): n equals a,t,g, or c
  misc_feature (411)..(411): n equals a,t,g, or c
  misc_feature (417)..(417): n equals a,t,g, or c
cttatatgggancctctacgactcattatagggaaanctggtacgcctgcaggtacacggtccggaattcccgggtcganccacgcgtccgaacgctgatgtcntgcagaaattatatctgagtgcatttggctggactagctatttccctttgtcacttgatgatgctgcaagggaatttctcagtttgttctgctccaggagaacttcttgtcancatgggcaactctgaaagccttctctgattagcctcccaagttttctggntntantaaaattggaagcagtatatatgtngctaaatttcaatantgtgcactgncgtagtacatctacttttaaggacttggtaccttnnatttaatatattangtaaaaccatgtaaaactggcattttttataagttaaanattgtngacta

SEQ ID NO: 3403 - DNA, 406 bp, Homo sapiens
  misc_feature (1)..(1): n equals a,t,g, or c
  misc_feature (9)..(9): n equals a,t,g, or c
  misc_feature (14)..(14): n equals a,t,g, or c
  misc_feature (21)..(21): n equals a,t,g, or c
  misc_feature (63)..(63): n equals a,t,g, or c
  misc_feature (156)..(156): n equals a,t,g, or c
  misc_feature (172)..(172): n equals a,t,g, or c
  misc_feature (294)..(294): n equals a,t,g, or c
  misc_feature (324)..(324): n equals a,t,g, or c
  misc_feature (345)..(345): n equals a,t,g, or c
  misc_feature (372)..(372): n equals a,t,g, or c
nacgactcnttatngggaaanctggtacgcctgcaggtaccggtccggaattcccgggtcganccacgcgtccgcccacgcgtccgcacggcgtccagggcgaccagccgcgggccgcagggcatggaccttcaggccgccggggcccaggcgcanggggccgcggagccgnctcggggcccgccgctgcctagcgcgcggggggcgccccccagcccggaggctggctttgctacagctgaccactccggtcaggagagagagactgagaaggctatggatcgactagcccgnggaacacagagcattcctaatgacagtccngcccggggtgagggcacccantctgaagaggaaggctttgccatggangaatgaggactctgatggagaactgaatacctga

SEQ ID NO: 3404 - DNA, 74 bp, Homo sapiens
  misc_feature (52)..(52): n equals a,t,g, or c
  misc_feature (54)..(54): n equals a,t,g, or c
  misc_feature (56)..(56): n equals a,t,g, or c
  misc_feature (61)..(61): n equals a,t,g, or c
  misc_feature (68)..(68): n equals a,t,g, or c
gcaaaaatctattgtggtatgcacttgattaacttattcatgtgaaagtttncncnaatanataatangatgat

SEQ ID NO: 3405 - DNA, 66 bp, Homo sapiens
  misc_feature (43)..(43): n equals a,t,g, or c
  misc_feature (47)..(47): n equals a,t,g, or c
  misc_feature (53)..(53): n equals a,t,g, or c
  misc_feature (61)..(61): n equals a,t,g, or c
  misc_feature (63)..(63): n equals a,t,g, or c
gcggacgcgtgggcagacttccagaatgaggtctgtgctggcncttnccttcncacacgancntag

SEQ ID NO: 3406 - DNA, 68 bp, Homo sapiens
  misc_feature (14)..(14): n equals a,t,g, or c
  misc_feature (33)..(34): n equals a,t,g, or c
  misc_feature (43)..(43): n equals a,t,g, or c
  misc_feature (57)..(57): n equals a,t,g, or c
gcccacgcgtccgngagcggccgcccttttttnntgtttttgntggaaatatatagntgcactgagtg

SEQ ID NO: 3407 - DNA, 403 bp, Homo sapiens
  misc_feature (268)..(268): n equals a,t,g, or c
  misc_feature (396)..(396): n equals a,t,g, or c
  misc_feature (400)..(403): n equals a,t,g, or c
gaagccaacaaggaagaagggggagaaatggatttgggcagccagacagcactgtctgctttacccgcctacctccatgtatgaattgtttggttcaaagggtgctgcacaggattcctcagggctacacgagttaaagacaaagattcaaggaccctggaagagtctctctgtcaaggcagtgctggcatctgcagcaagatagagctccctgcagggtgtccctggtgaaaactgcagacaagtgctctgaggtgctgctgcagtnggctcctcaccagaccagttctgcagcgtggtttgagtgttgttcctggctgcaaacctgcttctccagcccgctactgattctggaagctgccaaatatccttttaatgaattccttttctgctaanaaannnn

SEQ ID NO: 3408 - DNA, 105 bp, Homo sapiens
  misc_feature (22)..(22): n equals a,t,g, or c
  misc_feature (39)..(39): n equals a,t,g, or c
  misc_feature (42)..(43): n equals a,t,g, or c
  misc_feature (91)..(91): n equals a,t,g, or c
acacaggggggggaaaaaaggncaacggggttaaacagnccnncctggcccagggggtttaaaccgcggggggtacccggggggaaaattntttacacacgggag

SEQ ID NO: 3409 - DNA, 76 bp, Homo sapiens
  misc_feature (30)..(30): n equals a,t,g, or c
  misc_feature (62)..(62): n equals a,t,g, or c
  misc_feature (64)..(64): n equals a,t,g, or c
  misc_feature (66)..(66): n equals a,t,g, or c
  misc_feature (75)..(75): n equals a,t,g, or c
ggtgagaacaagagagctgtaagacgcatncgtaatgattggggggggctaaaaaaaaaatntntncccccgggnc

SEQ ID NO: 3410 - DNA, 108 bp, Homo sapiens
  misc_feature (1)..(1): n equals a,t,g, or c
  misc_feature (18)..(19): n equals a,t,g, or c
  misc_feature (41)..(41): n equals a,t,g, or c
  misc_feature (82)..(82): n equals a,t,g, or c
  misc_feature (96)..(96): n equals a,t,g, or c
nggggaaaaaaagccagnnggctaacaggcaaacgccaagnggttaaacgcggggttacaccgggaaaattttacacacagngagttacgggaacncccaaccgaccg

SEQ ID NO: 3411 - DNA, 106 bp, Homo sapiens
  misc_feature (15)..(15): n equals a,t,g, or c
  misc_feature (30)..(30): n equals a,t,g, or c
  misc_feature (41)..(41): n equals a,t,g, or c
  misc_feature (54)..(54): n equals a,t,g, or c
  misc_feature (80)..(80): n equals a,t,g, or c
ctagggggggggggnaaaaaaaaggtcccnacgggggtttnaaacaggaccccncctgcccccagggggtttaaaccgcngggggtttacaccggggggaaaaatt

SEQ ID NO: 3412 - DNA, 100 bp, Homo sapiens
  misc_feature (3)..(3): n equals a,t,g, or c
  misc_feature (16)..(16): n equals a,t,g, or c
  misc_feature (53)..(53): n equals a,t,g, or c
  misc_feature (61)..(61): n equals a,t,g, or c
  misc_feature (78)..(78): n equals a,t,g, or c
acngggtccggaattncccgggtcgacccacgcgtccgcccacgcgttcgaantgtttggncaggatgagatgatcgnggggggggggttattaaaaaag

SEQ ID NO: 3413 - DNA, 111 bp, Homo sapiens
  misc_feature (7)..(7): n equals a,t,g, or c
  misc_feature (46)..(46): n equals a,t,g, or c
  misc_feature (76)..(76): n equals a,t,g, or c
  misc_feature (85)..(85): n equals a,t,g, or c
  misc_feature (99)..(99): n equals a,t,g, or c
  misc_feature (108)..(108): n equals a,t,g, or c
gaacagngggtaaaaaggccacggggttacagaccatctgcccagnggttaaccgcgggggtacccggggaaaatntacacccgnggggtacgggaacncccaacggnccg

SEQ ID NO: 3414 - DNA, 450 bp, Homo sapiens
  misc_feature (4)..(4): n equals a,t,g, or c
  misc_feature (317)..(317): n equals a,t,g, or c
  misc_feature (326)..(326): n equals a,t,g, or c
  misc_feature (374)..(374): n equals a,t,g, or c
  misc_feature (405)..(405): n equals a,t,g, or c
  misc_feature (415)..(415): n equals a,t,g, or c
  misc_feature (432)..(432): n equals a,t,g, or c
  misc_feature (434)..(434): n equals a,t,g, or c
gcanttatatggtacttttttattgttcatggctttttttgcacatattatataattttattcttacaagaaggcccaacctattttataggattaagattttgaacataggatgatgacatgatttgacaaatatcacacttctgtaatctaaatctttcacttcgttcaaaacctcgttaaaaattgtatatcctttgtgaaactgtctttcactgccctcactctaagataatttcccagttaaaaaaaattcctaagcaattttgtgtgctgtccatgctatactactaccatcatatctgtcttgtacttgntcttaattnttttatgggcacattttatgttttcctgaccatattgtaaattcttcntcctttcttaaatctttccacctgagatgtncctggtatanaaccagatgaacattangnactttatgaatacttt

SEQ ID NO: 3415 - DNA, 484 bp, Homo sapiens
  misc_feature (462)..(462): n equals a,t,g, or c
  misc_feature (481)..(481): n equals a,t,g, or c
gcctcaagtccttattgttgaggagtcgatggtggggtcatgtgggaccatgtcagctgtgtgcagtgttaagtgtgggtgctgcagagcctgttttacttatggtaaagtaaagttcatgccatggactaaacctggttttctggaactgctgcttgcttctattaaaattaccagcagattgcatgtctggatctgcataccagcaggtggaatcagttgctttgctgactaatttacaagtggaagaaatatctgtctttgcaactgcaacctgttagagtctccttgtaactagggccattagtcaggaaaccgtatgatgaattctagtacatacttctatgtatacacattgtcaagactaaattttaaaaactacaaggaaagtagttcagaatcttacacaacaactgatcataattttccttataccactatatttttgggattaccagtgtnaccaaaggattctttaacnaat

SEQ ID NO: 3416 - DNA, 486 bp, Homo sapiens
  misc_feature (451)..(451): n equals a,t,g, or c
  misc_feature (455)..(455): n equals a,t,g, or c
  misc_feature (457)..(457): n equals a,t,g, or c
  misc_feature (472)..(472): n equals a,t,g, or c
  misc_feature (480)..(480): n equals a,t,g, or c
gcacccgggcccagagtgacagcagccagacgctgggctcctccatggactgcagcactgcccgcgaggagccgtcctctgagcccggcccttctcccctgccgctgccatcccagcagcaggtggaggaggccacagtccaggacctgctgtcctccctgtcggaggacccctgcccttcccagaaggccttggacccagcccccctcgcccggcccagcccagcgggctcggcccaaaccagccccgagctggaacacagggtaagtctgttcaaccagaagaaccaggagggcttcactgtctttcagatcaggcctgtcatccacttccagcccactgtgcccatgctggaggacaagttcagatctttggaatccaaagagcaaaagctgcacagggtccctgaggcctaaacctgcatgggctgggtgaaatgaagggagacagncatntnaaaactctctgggancttgaagnttgcaa

SEQ ID NO: 3417 - DNA, 282 bp, Homo sapiens
  misc_feature (46)..(46): n equals a,t,g, or c
  misc_feature (77)..(77): n equals a,t,g, or c
  misc_feature (171)..(171): n equals a,t,g, or c
  misc_feature (190)..(190): n equals a,t,g, or c
  misc_feature (219)..(219): n equals a,t,g, or c
  misc_feature (231)..(231): n equals a,t,g, or c
  misc_feature (253)..(253): n equals a,t,g, or c
  misc_feature (257)..(257): n equals a,t,g, or c
gattttctgtatgggtatttagaaattctttatatgaaaaataatngctggttcaaaatagaccattttaacaaagngactatatttctttttacgaaaatgctatttttctatgatgtaaacaattgttaggcggcagatttttaaggaagtattattttatttaagagnctgtatccctttgtgtganaggaacccaaagagggttcacttttgctntaaagctctgtnccttacccactgacaactctgntacntttattttatccgagaaaatgtcaa

SEQ ID NO: 3418 - DNA, 90 bp, Homo sapiens
  misc_feature (33)..(33): n equals a,t,g, or c
  misc_feature (62)..(62): n equals a,t,g, or c
  misc_feature (84)..(85): n equals a,t,g, or c
  misc_feature (89)..(89): n equals a,t,g, or c
gggagaaatcttgtcagggaaatcaggtattangtggtatctaatcataaggtttttgtggnctttaaatggattgactacctnnatgnc

SEQ ID NO: 3419 - DNA, 103 bp, Homo sapiens
  misc_feature (2)..(2): n equals a,t,g, or c
  misc_feature (29)..(29): n equals a,t,g, or c
  misc_feature (63)..(63): n equals a,t,g, or c
  misc_feature (75)..(75): n equals a,t,g, or c
  misc_feature (85)..(85): n equals a,t,g, or c
  misc_feature (101)..(101): n equals a,t,g, or c
antgctgagacagctaaagatgttggctnggaagcaaccattcatttaaagagtgcgtaccanccttactactcngagggagttnggcagtggaataaaantc

SEQ ID NO: 3420 - DNA, 439 bp, Homo sapiens
  misc_feature (4)..(4): n equals a,t,g, or c
  misc_feature (341)..(341): n equals a,t,g, or c
  misc_feature (381)..(381): n equals a,t,g, or c
  misc_feature (391)..(391): n equals a,t,g, or c
  misc_feature (413)..(413): n equals a,t,g, or c
  misc_feature (434)..(434): n equals a,t,g, or c
gccnaatgcgcattagttcgatctcaggagtgagggcatgggtgctaaggtccatgtcctaaaggagaagaatccagaccatcagctaaggtccccaaataaacactaagttgaactaacgaagtcagattgctaagacagctaggatgttggcttggaagcagccattcatttaaagagtgcgtaacagctcactagtcgaggagtttggcgtggataataatcgggcatcaagtgttttaccgaagctatgggatacgtaagtatcggtaggggagcattccactctgcgttgaaggcgaacgtgagctttactggagcgtgtggaaaagcaaatgtangtataagtaacgataaagggggtgagaaaccccctcgccncaagactaangtttcctgatcaacgctaatcngatcaagggttagtccgggtncctaa

SEQ ID NO: 3421 - DNA, 472 bp, Homo sapiens
  misc_feature (297)..(297): n equals a,t,g, or c
  misc_feature (305)..(305): n equals a,t,g, or c
  misc_feature (312)..(312): n equals a,t,g, or c
  misc_feature (319)..(320): n equals a,t,g, or c
  misc_feature (324)..(324): n equals a,t,g, or c
  misc_feature (330)..(330): n equals a,t,g, or c
  misc_feature (338)..(338): n equals a,t,g, or c
  misc_feature (344)..(344): n equals a,t,g, or c
  misc_feature (347)..(348): n equals a,t,g, or c
  misc_feature (356)..(356): n equals a,t,g, or c
  misc_feature (388)..(388): n equals a,t,g, or c
  misc_feature (398)..(398): n equals a,t,g, or c
  misc_feature (427)..(427): n equals a,t,g, or c
  misc_feature (432)..(432): n equals a,t,g, or c
  misc_feature (444)..(444): n equals a,t,g, or c
gggccactccaataggtgctgagtgtacagagtggaataagacagagacctgccctcaagagcaaagtagatcatgcatagagtgtgatgtatgtgtaataaatatgtttcacacaaacaaggcctgtcagctaaagaagtttgaacatttgggttactatttcttgtggttataacttaatgaaaacaatgcagtacaggacatatattttttaaaataagtctgatttaattgggcactatttatttacaaatgttttgctcaatagattgctcaaatcaaggtttctttttaanaaatcaancatggtnagtctgnnttanaaaatnacccgaangaaaanttnnaaattggncacttgaaaatcttagggaaaaaattaattcnaataaatttnccattttacctttaagaactttaaatggngaacntttaaaaaagcnatttttttttaaaccttcctaaagtttt

SEQ ID NO: 3422 - DNA, 320 bp, Homo sapiens
  misc_feature (297)..(297): n equals a,t,g, or c
  misc_feature (311)..(311): n equals a,t,g, or c
  misc_feature (313)..(313): n equals a,t,g, or c
  misc_feature (315)..(315): n equals a,t,g, or c
  misc_feature (317)..(317): n equals a,t,g, or c
gcggacgcgtgggttttaaaaaagctaggcttgattgtttattctgcatggtccacttctgccttccttcctcttctattacccttttcttattctagactgtttttaaactcagttatgcttgctttcaccaaagccttaacctttcctgtgattagaaaaagatgcttatgtttccattacttttcctacaagaaaacgcattctcaaattcatattcactatacagtgtgtggcataacaccaagcttaaatggtcactcagtggacttcacaataatggccactttatgcttntggatgcaaaacgntngnanagt

SEQ ID NO: 3423 - DNA, 288 bp, Homo sapiens
  misc_feature (262)..(262): n equals a,t,g, or c
  misc_feature (276)..(277): n equals a,t,g, or c
  misc_feature (281)..(281): n equals a,t,g, or c
  misc_feature (285)..(285): n equals a,t,g, or c
gtgtctgttctagtctgggtttctattacattcttgagtccttgtaagaaggtgtcaattctgttggctgtttaacaacacaggttggttggtcttaattgacaacctacaatatctatactccaggtttgtgccagagataatgaacttgaattttctgcttcccagttcttgtaattggattgtatgaaatattcttttttttgtgatttaccaaagtaaaattttttttttagaagtttagaagcatgtacaagtttanaagaattttacaannactntttntaa

SEQ ID NO: 3424 - DNA, 59 bp, Homo sapiens
  misc_feature (35)..(35): n equals a,t,g, or c
  misc_feature (41)..(41): n equals a,t,g, or c
  misc_feature (43)..(43): n equals a,t,g, or c
  misc_feature (54)..(54): n equals a,t,g, or c
gggctttgctcatgagagatgtcaggcttcctggnggcatngnggctttgagcnctgat

SEQ ID NO: 3425 - DNA, 138 bp, Homo sapiens
  misc_feature (124)..(124): n equals a,t,g, or c
  misc_feature (131)..(131): n equals a,t,g, or c
  misc_feature (133)..(134): n equals a,t,g, or c
  misc_feature (136)..(136): n equals a,t,g, or c
gctagagaacaagtgtgtgcctgcccagtcagtgggtgcccctcagccttggccacaggacagatgtgaggccatgaactgatggcatgggagcacggggctggggtggcccagccgtcccganaacactnanntncc

SEQ ID NO: 3426 - DNA, 63 bp, Homo sapiens
  misc_feature (4)..(5): n equals a,t,g, or c
  misc_feature (41)..(41): n equals a,t,g, or c
  misc_feature (56)..(56): n equals a,t,g, or c
  misc_feature (63)..(63): n equals a,t,g, or c
gcannggtcggtagtttgagaccagcttgactgggcatggngggggaccctttatntcctgan

SEQ ID NO: 3427 - DNA, 63 bp, Homo sapiens
  misc_feature (31)..(31): n equals a,t,g, or c
  misc_feature (42)..(43): n equals a,t,g, or c
  misc_feature (46)..(46): n equals a,t,g, or c
  misc_feature (52)..(52): n equals a,t,g, or c
gctcctcctccagcaggaggtggtggtgtanttgatggtgannctnacatcngcgagagagtt

SEQ ID NO: 3428 - DNA, 125 bp, Homo sapiens
  misc_feature (73)..(73): n equals a,t,g, or c
  misc_feature (79)..(79): n equals a,t,g, or c
  misc_feature (89)..(89): n equals a,t,g, or c
  misc_feature (94)..(94): n equals a,t,g, or c
  misc_feature (117)..(117): n equals a,t,g, or c
gcgtcactagacgacacggctgtcttctttcctggagaatttctcaaggactgctggctggaaacttaacggntaatgnggatctgacngtagnttgccaaattaagaaaacgtttntaccctgt

SEQ ID NO: 3429 - DNA, 383 bp, Homo sapiens
  misc_feature (54)..(54): n equals a,t,g, or c
  misc_feature (60)..(60): n equals a,t,g, or c
  misc_feature (129)..(129): n equals a,t,g, or c
  misc_feature (182)..(182): n equals a,t,g, or c
  misc_feature (192)..(192): n equals a,t,g, or c
  misc_feature (200)..(200): n equals a,t,g, or c
  misc_feature (202)..(202): n equals a,t,g, or c
  misc_feature (310)..(310): n equals a,t,g, or c
  misc_feature (315)..(315): n equals a,t,g, or c
  misc_feature (348)..(348): n equals a,t,g, or c
  misc_feature (354)..(354): n equals a,t,g, or c
  misc_feature (381)..(381): n equals a,t,g, or c
taatgtaaaattagatcacgagttcctttgtagctaagaaaatttgttacactngattanagctatatttaaataataacctgtgtgcaggaatggatattatgcctcattgctaagttatgtgaaaanattgtagaaactctttcaggcttgattttgtagttttttttggctgctttccnatataatgancacttgtnanatggccaactggagaatttctcatggataaaaatactataaaaccaaaatattgcttcttgtatatcatttaaatacagatagtgccatacattgaagggactaaaangtaanatttggcttcattttcaaaataattttatttgntattgncacagtagcaatagtaaaatgaagcanat

SEQ ID NO: 3430 - DNA, 387 bp, Homo sapiens
  misc_feature (33)..(33): n equals a,t,g, or c
  misc_feature (42)..(42): n equals a,t,g, or c
  misc_feature (53)..(53): n equals a,t,g, or c
  misc_feature (88)..(88): n equals a,t,g, or c
  misc_feature (107)..(107): n equals a,t,g, or c
  misc_feature (110)..(110): n equals a,t,g, or c
  misc_feature (168)..(168): n equals a,t,g, or c
  misc_feature (174)..(174): n equals a,t,g, or c
  misc_feature (177)..(177): n equals a,t,g, or c
  misc_feature (188)..(188): n equals a,t,g, or c
  misc_feature (200)..(200): n equals a,t,g, or c
  misc_feature (213)..(213): n equals a,t,g, or c
  misc_feature (225)..(225): n equals a,t,g, or c
  misc_feature (230)..(230): n equals a,t,g, or c
  misc_feature (238)..(238): n equals a,t,g, or c
  misc_feature (244)..(244): n equals a,t,g, or c
  misc_feature (283)..(283): n equals a,t,g, or c
  misc_feature (308)..(308): n equals a,t,g, or c
  misc_feature (332)..(332): n equals a,t,g, or c
  misc_feature (346)..(346): n equals a,t,g, or c
  misc_feature (381)..(381): n equals a,t,g, or c
  misc_feature (383)..(383): n equals a,t,g, or c
cgcgtgcatcttacgcgtcagatgaactaccgnctacgtggnctgcttaagcngagtatacttttctcctgcttttctggaagagaanagcatgtgttctagtgctnacngcgcggccttcacgtccgcttctccccaagtggtggcagtacctggccataggaaggnggattntancagcctgcacntttaaaattgangctgatgtcttanctcgatctttgnttatngctgcttnttctangcttcaaagtgtgctgaattctatgaaaattacaatgancagtctaacctttgtaacactttantacttactggcacatttcactganaccatttgaaacantgttaccttctgaaagtcattttaaatgtatttgnanaata

SEQ ID NO: 3431 - DNA, 341 bp, Homo sapiens
  misc_feature (89)..(89): n equals a,t,g, or c
  misc_feature (266)..(266): n equals a,t,g, or c
  misc_feature (269)..(269): n equals a,t,g, or c
  misc_feature (299)..(299): n equals a,t,g, or c
  misc_feature (313)..(313): n equals a,t,g, or c
  misc_feature (340)..(340): n equals a,t,g, or c
gcgcgcatgagggccccgtccatggaccgcgcggccgtggcgagggtgggcgcggtagcgagcgccagcgtgtgcgccctggtggcggnggtggtgctggctcagtacatattcaccttgaagaggaagacggggcggaagaccaagatcatcgagatgaagattggataaccaagaaatgactaatcaagagtctgccgtacatgtgaaaatgatgccagaattccagaaaagttcagttcgaatcaagaaccctacaagagtanaanaaattatctgtggtcttatcaaaggagganctgccaaacttcanataataacggactttgatatgacactna

SEQ ID NO: 3432 - DNA, 123 bp, Homo sapiens
  misc_feature (97)..(97): n equals a,t,g, or c
  misc_feature (110)..(111): n equals a,t,g, or c
  misc_feature (116)..(117): n equals a,t,g, or c
gtgtgaggctgccgagcggacagcgactcccggggaagcccgcgctccgggagcgggagcaggagcaggagcagcgccgtcccacgccagaggcgancgacgggcgccgnnagagnngagagc

SEQ ID NO: 3433 - DNA, 459 bp, Homo sapiens
  misc_feature (2)..(2): n equals a,t,g, or c
  misc_feature (17)..(17): n equals a,t,g, or c
  misc_feature (85)..(85): n equals a,t,g, or c
  misc_feature (229)..(229): n equals a,t,g, or c
  misc_feature (237)..(237): n equals a,t,g, or c
  misc_feature (388)..(388): n equals a,t,g, or c
  misc_feature (393)..(393): n equals a,t,g, or c
  misc_feature (420)..(420): n equals a,t,g, or c
  misc_feature (458)..(459): n equals a,t,g, or c
gncgcagattcatgcancattccatatttttttaaaaaaaggttacactgtgcaccgacgtggagctagaaggaaaagcatgaantctcatgtttgctgactataaaaataaatcatagtaataatattattgaacattctactttaaaaattattaataaaaccataaatgaaacacttgagcacactttaaaaagtacataaacccatgagtccatatgtgtaattntatgttgnctgttttattatccaggatttcatactcagatgagcattagcatcaggaaagcctgaaatgccttaattgtgaactgatacgcaggaaaatgaaatatgtaagcacattggtgaccttggtctttacagacatcatgatcagccttcagcnatacngaacaaatgagaaattagaagcaattnaagaaccgtgtgatggtgtgaaacccacttttgaccgnn

SEQ ID NO: 3434 - DNA, 100 bp, Homo sapiens
  misc_feature (51)..(51): n equals a,t,g, or c
  misc_feature (74)..(74): n equals a,t,g, or c
  misc_feature (84)..(84): n equals a,t,g, or c
  misc_feature (87)..(87): n equals a,t,g, or c
  misc_feature (89)..(89): n equals a,t,g, or c
gggacctggtggtgctgctgtttgaaaccgccctgctatcttcttgtcggncttaaccctgaccaccccattgnggaaacctgnggnanaaggctgaagc

SEQ ID NO: 3435 - DNA, 296 bp, Homo sapiens
  misc_feature (226)..(226): n equals a,t,g, or c
  misc_feature (242)..(242): n equals a,t,g, or c
  misc_feature (267)..(267): n equals a,t,g, or c
  misc_feature (273)..(273): n equals a,t,g, or c
  misc_feature (296)..(296): n equals a,t,g, or c
gcccacgcgtccgagttaatagaagaacatgaacatttttgttatgtattgaaatccaagagatccgttccgtttatcttaacacacaaagtgtatactgtcacatataaattatgccttacaggtagggagagtagacacagttgacacagcgtttttgatgctcagtcactgtgaccaaaaactcttctattcgtgtgttgccttcatagagggcgatctttanaaatttgagaaattcnaaatttgagaaattcctacatttgnattganattgctactatttaaatgacccn

SEQ ID NO: 3436 - DNA, 82 bp, Homo sapiens
  misc_feature (25)..(25): n equals a,t,g, or c
  misc_feature (27)..(27): n equals a,t,g, or c
  misc_feature (44)..(45): n equals a,t,g, or c
  misc_feature (56)..(56): n equals a,t,g, or c
gctcatcagagaagattgtcaaaangngaagctgtgggatgaannggtttcacatnttgtggaaggaccaaattttctgaaa

SEQ ID NO: 3437 - DNA, 171 bp, Homo sapiens
  misc_feature (25)..(25): n equals a,t,g, or c
  misc_feature (39)..(39): n equals a,t,g, or c
  misc_feature (116)..(116): n equals a,t,g, or c
  misc_feature (125)..(125): n equals a,t,g, or c
  misc_feature (138)..(138): n equals a,t,g, or c
  misc_feature (155)..(155): n equals a,t,g, or c
  misc_feature (158)..(158): n equals a,t,g, or c
ggttttgcagtcttctgcttacctntgagtcactggctntcatgttactatatctattgttgttttatgatctattttgagtatggtgcttatgatcttggaactaacgcctattntctatatgnagattattctatnatataccattcagtctnatngaattaaatgata

SEQ ID NO: 3438 - DNA, 176 bp, Homo sapiens
  misc_feature (157)..(157): n equals a,t,g, or c
  misc_feature (167)..(168): n equals a,t,g, or c
  misc_feature (173)..(173): n equals a,t,g, or c
  misc_feature (176)..(176): n equals a,t,g, or c
gatcgcgactatgggagctccggggggaaagatcaaccggccccgaacggtgactgtgtgggggccgcgactttgtttcctcaagcgttcctgagcccttttatctcgcacgagatgggatcagagctgaagaagaagctgttcaaacgccggcggntgttgaatcnngagcnagn

SEQ ID NO: 3439 - DNA, 278 bp, Homo sapiens
  misc_feature (240)..(240): n equals a,t,g, or c
  misc_feature (245)..(245): n equals a,t,g, or c
  misc_feature (255)..(255): n equals a,t,g, or c
  misc_feature (269)..(269): n equals a,t,g, or c
  misc_feature (277)..(277): n equals a,t,g, or c
gcggacgcttgggcaatctgctagtatctattttacaaaatgcagagccaggtccctcagcccagactcagtcagacatgttcactaatgactcaagtgagccttcggtactcctggtgcccgcccggccagaccgtcagcttgataattactaaagcaaaggcctgggtgggagaacaggtttctagtttttacccaagtcaagctgcacatctattatttaaaaattcaaagtcttanaaccnaaaatttggncatgaaccattaangaatttana

SEQ ID NO: 3440 - DNA, 53 bp, Homo sapiens
  misc_feature (4)..(4): n equals a,t,g, or c
  misc_feature (28)..(28): n equals a,t,g, or c
  misc_feature (44)..(44): n equals a,t,g, or c
  misc_feature (47)..(47): n equals a,t,g, or c
  misc_feature (52)..(52): n equals a,t,g, or c
gganaaatcttacagaagagaaactgtnaagcaggggttatcanggnaaatnt

SEQ ID NO: 3441 - DNA, 385 bp, Homo sapiens
  misc_feature (184)..(184): n equals a,t,g, or c
  misc_feature (322)..(322): n equals a,t,g, or c
  misc_feature (330)..(330): n equals a,t,g, or c
  misc_feature (362)..(362): n equals a,t,g, or c
  misc_feature (372)..(372): n equals a,t,g, or c
  misc_feature (379)..(379): n equals a,t,g, or c
ggtcaccatcactgaagagtctgggtgaactggggtactagctcccaggctggaggtggcctctgacagacatggcctctgaggagtgtagcaccaaacacggacccaaaagcacccctcagaaaaggaaagggatgaaggggtcatttgcctgttttacacatttatccagatcaggacctgnaagggaagacctccttcactgttgctgagactgcgagctcttggaagacggtgactgtctttttgtctctctctctccccagaactcagcagagtaacccatgacttgtttgactgaacagagtgcccatgggttcantgctctgntctagtctccacctgccagtttccttctgacnctgctatgancaacccncatatt

SEQ ID NO: 3442 - DNA, 425 bp, Homo sapiens
  misc_feature (34)..(34): n equals a,t,g, or c
  misc_feature (232)..(232): n equals a,t,g, or c
  misc_feature (245)..(245): n equals a,t,g, or c
  misc_feature (267)..(268): n equals a,t,g, or c
  misc_feature (313)..(313): n equals a,t,g, or c
  misc_feature (337)..(337): n equals a,t,g, or c
  misc_feature (368)..(368): n equals a,t,g, or c
  misc_feature (375)..(375): n equals a,t,g, or c
  misc_feature (412)..(412): n equals a,t,g, or c
  misc_feature (415)..(415): n equals a,t,g, or c
gcaattctatactagtattccaggtgtagaaagnggctttcccagctcgcaggtgtttccaaatcttgtcttctgattgaaaatttgcttcccagatgacatttctcagtttttctttttgtgaattgcttaaccacctaagtgttctttcagttttttgcttacaattttaatgtgtctcattgctactggtcctccttctaatgtagctgagcttgttaattctactttnggaaaatgtcaantggctttccctttcctctaatnntccagcttcatgcatcccctggccataagatactttcagactgtntgatatattctatcacttgtcagncttatgtccctgtggttgactatataagcangctttanggtttgggacttgtatttaggattgatagtaaaggtntcntgaaagccta

SEQ ID NO: 3443 - DNA, 466 bp, Homo sapiens
  misc_feature (5)..(5): n equals a,t,g, or c
  misc_feature (232)..(232): n equals a,t,g, or c
  misc_feature (258)..(258): n equals a,t,g, or c
  misc_feature (267)..(267): n equals a,t,g, or c
  misc_feature (279)..(279): n equals a,t,g, or c
  misc_feature (297)..(297): n equals a,t,g, or c
  misc_feature (350)..(350): n equals a,t,g, or c
  misc_feature (356)..(357): n equals a,t,g, or c
  misc_feature (364)..(364): n equals a,t,g, or c
  misc_feature (403)..(403): n equals a,t,g, or c
  misc_feature (418)..(418): n equals a,t,g, or c
  misc_feature (436)..(436): n equals a,t,g, or c
  misc_feature (441)..(441): n equals a,t,g, or c
  misc_feature (461)..(461): n equals a,t,g, or c
gaaangaagttccaggatacggctatactgacaaactcatcttggcattaattgtgactgaaatactaacgattttgattatacttttctgcctcattgtggtttaggattgggtgtgtgtgtctcctctctgaatggcactcaaatgtttgctgactcctactctgcgtgactggggtgtacagctatggactgatgcatcccatcccatcatctttcacgagcaaagcangtctcttttttgacagcttgaagaanaatctgtanggaatccagaangagcattcatgaagatgntacaagcccggaagaattacacaagcactgagctgactgttgagccggagganccctcnnacagcantggcatcaacttgtcaggctttgggagttgagcagctanacaccatatgactanagtgatgttatctgcgcnctaantacatttgcctatttctcancaatt

SEQ ID NO: 3444 - DNA, 118 bp, Homo sapiens
  misc_feature (7)..(7): n equals a,t,g, or c
  misc_feature (10)..(10): n equals a,t,g, or c
  misc_feature (18)..(18): n equals a,t,g, or c
  misc_feature (22)..(22): n equals a,t,g, or c
  misc_feature (50)..(50): n equals a,t,g, or c
  misc_feature (110)..(110): n equals a,t,g, or c
  misc_feature (113)..(114): n equals a,t,g, or c
atctaanctnaggggcgntgtnccccttcacaaagccaagggatctggtnctacccatccccgcagtgtgcactaaggggccccggcaggccatgtctgcatttcggtgnctnnttga

SEQ ID NO: 3445 - DNA, 468 bp, Homo sapiens
  misc_feature (5)..(5): n equals a,t,g, or c
  misc_feature (9)..(9): n equals a,t,g, or c
  misc_feature (14)..(14): n equals a,t,g, or c
  misc_feature (30)..(30): n equals a,t,g, or c
  misc_feature (35)..(35): n equals a,t,g, or c
  misc_feature (451)..(451): n equals a,t,g, or c
  misc_feature (454)..(454): n equals a,t,g, or c
  misc_feature (462)..(462): n equals a,t,g, or c
  misc_feature (464)..(464): n equals a,t,g, or c
  misc_feature (468)..(468): n equals a,t,g, or c
aaacngtangtctnaaaacacagaattgcnacctnccaacaaatcagtcctttgatctactaaggcaaatctgctttgaaattgttaatattaggggtaacctagtaaccagatttgtaacaagacatttattttctttacacggtgaaaagtgataaacctttttacatttgttgtatcaagggtccattgtagtttgaacaataagtaaaagttcaatatttgataagaattttatgtgaaaagtttgcctggtagagattgtggcattcttaatcctcatattttttaataaggcttaccactggttagaagtgtcattaggatgttgttgctgaaagagttgaaatttaagacaatccacattgagcccatgagaaaagaattgcctctgctgagtttcatgtaagtatcttaaaacatatgaatatccctataaatttgatatcgnggncaggtcanantaan

SEQ ID NO: 3446 - DNA, 70 bp, Homo sapiens
  misc_feature (14)..(14): n equals a,t,g, or c
  misc_feature (42)..(42): n equals a,t,g, or c
  misc_feature (49)..(50): n equals a,t,g, or c
  misc_feature (62)..(62): n equals a,t,g, or c
gcccacgcgtccgnaatttttaaaaacctgtcaatggttatnggatggnnatatacaaatangtgtattt

SEQ ID NO: 3447 - DNA, 211 bp, Homo sapiens
  misc_feature (2)..(2): n equals a,t,g, or c
  misc_feature (32)..(32): n equals a,t,g, or c
  misc_feature (35)..(35): n equals a,t,g, or c
  misc_feature (68)..(68): n equals a,t,g, or c
  misc_feature (96)..(96): n equals a,t,g, or c
  misc_feature (109)..(109): n equals a,t,g, or c
  misc_feature (140)..(140): n equals a,t,g, or c
  misc_feature (169)..(169): n equals a,t,g, or c
  misc_feature (182)..(182): n equals a,t,g, or c
  misc_feature (207)..(207): n equals a,t,g, or c
  misc_feature (210)..(210): n equals a,t,g, or c
anttgagcaccacgccttccccagcttgcagnagnacaccccaagcgctgcttttcacctgtaccttngttctattattattattattattgctgntgttgcatcggtnactgtgggcatggaatgcctgaggctggcantctgggttggtcacaccactctctgctgngttgacttactgntgtcttcattaaagcttttttacgnggna

SEQ ID NO: 3448 - DNA, 229 bp, Homo sapiens
  misc_feature (30)..(30): n equals a,t,g, or c
  misc_feature (53)..(53): n equals a,t,g, or c
  misc_feature (72)..(72): n equals a,t,g, or c
  misc_feature (148)..(148): n equals a,t,g, or c
  misc_feature (163)..(163): n equals a,t,g, or c
  misc_feature (172)..(172): n equals a,t,g, or c
  misc_feature (191)..(191): n equals a,t,g, or c
  misc_feature (220)..(220): n equals a,t,g, or c
gcccacgcgtccgtctagatcgcgagcggncgccctttttttttttttttcanaagagctacattgtgtcantggacatttttaaaaactgtgatttttaataatgtccaatgactgcaagtcggcctggattttcacttgcaaaggntacagctgcattgtnaggtctccnagccctgcagagagctccntccactggttagcagtgtgttgtgttttncattcattt

SEQ ID NO: 3449 - DNA, 460 bp, Homo sapiens
  misc_feature (29)..(29): n equals a,t,g, or c
  misc_feature (45)..(45): n equals a,t,g, or c
  misc_feature (50)..(50): n equals a,t,g, or c
  misc_feature (59)..(59): n equals a,t,g, or c
  misc_feature (69)..(69): n equals a,t,g, or c
  misc_feature (115)..(115): n equals a,t,g, or c
  misc_feature (126)..(126): n equals a,t,g, or c
  misc_feature (167)..(167): n equals a,t,g, or c
  misc_feature (320)..(320): n equals a,t,g, or c
  misc_feature (402)..(402): n equals a,t,g, or c
  misc_feature (406)..(406): n equals a,t,g, or c
  misc_feature (437)..(437): n equals a,t,g, or c
  misc_feature (446)..(446): n equals a,t,g, or c
  misc_feature (453)..(453): n equals a,t,g, or c
ttggccaggggtaacccggggtcccgggnaaatttccccgggggnttcgnaccccacgncggtcccgcntgcaagtcttggattgggcaacccgggcttccccatttcccgggcntccagccctcncaaatccggacccccattttcgggcttgcaaagcctcgggnacctaagctccgggccctcgggtctatccgggttgcatcctccctccctgttccggatcttatcttgcgccagcgcctactccaggatcccgtagccagacctcaagccatggctggtcccttctcccgtctgtgtccgccgccgggactcangctctgctttggcggacggggtctctaccgtgggtttgtcgacgaactgacgactgcagtaacgacggaggtgatcccgacntganacccaactcgaaagacacaactgatggcagnactgaccanagctatnacggttg

SEQ ID NO: 3450 - DNA, 165 bp, Homo sapiens
  misc_feature (20)..(20): n equals a,t,g, or c
  misc_feature (44)..(44): n equals a,t,g, or c
  misc_feature (46)..(46): n equals a,t,g, or c
  misc_feature (49)..(49): n equals a,t,g, or c
  misc_feature (98)..(98): n equals a,t,g, or c
  misc_feature (109)..(109): n equals a,t,g, or c
  misc_feature (120)..(120): n equals a,t,g, or c
  misc_feature (149)..(149): n equals a,t,g, or c
  misc_feature (157)..(157): n equals a,t,g, or c
gaaacaattggagagccctntctggagggctctcagagtagctntntgnccattgttctgaattaacttgtgtcccaccctggacaataaatggacanataaacccttngaaatacaagncaccaccccgtgagggattaagagggcancctggttnacttagtg

SEQ ID NO: 3451 - DNA, 86 bp, Homo sapiens
  misc_feature (37)..(37): n equals a,t,g, or c
  misc_feature (50)..(50): n equals a,t,g, or c
  misc_feature (55)..(55): n equals a,t,g, or c
  misc_feature (73)..(73): n equals a,t,g, or c
  misc_feature (81)..(81): n equals a,t,g, or c
gcaccaatggaagcagctggcttcactgctcaggtgnttatgggtgaggncattnaggccaaataagcgccgnctgtgccnctgta

SEQ ID NO: 3452 - DNA, 175 bp, Homo sapiens
  misc_feature (157)..(157): n equals a,t,g, or c
  misc_feature (159)..(159): n equals a,t,g, or c
  misc_feature (168)..(169): n equals a,t,g, or c
  misc_feature (174)..(174): n equals a,t,g, or c
gggaaaagagctgagagtttatgctgaaatggatttatagaatatttgtaaatctatttttagtgtttgttcgtttttttaactgttcattcctttgtgcagagtgtatatctctgcctgggcaagagtgtggaggtgccgaggtgtcttcattctntngcacatttnnacagna

SEQ ID NO: 3453 - DNA, 119 bp, Homo sapiens
  misc_feature (15)..(15): n equals a,t,g, or c
  misc_feature (41)..(41): n equals a,t,g, or c
  misc_feature (69)..(69): n equals a,t,g, or c
  misc_feature (87)..(87): n equals a,t,g, or c
  misc_feature (91)..(91): n equals a,t,g, or c
  misc_feature (110)..(110): n equals a,t,g, or c
acttgagagcccctnacaaagaatccacactgtccatgtcngggagcagtggtggtcaacagccctcanggattgaatgagggtgtnaagnggtatgaaccggatcattntgctatcca

SEQ ID NO: 3454 - DNA, 440 bp, Homo sapiens
gtcacttttctatgggtaatttcctggttcaaattacattattatattttggctgatgaattaagacgtatctaaatcagacatgtcagattagacatatcagatttagctttaagaaagtccaaaactgtccattctcaggttctgagcaggtcttttgctgagtttcagggtctgagatgtatggcatcacatggcaggtggtacctgagagcccacctgaggagggggctttctgctggagagggagggagcttcagtgaggaacctgtggggacagccatctgtcaagcattggtctgggctctggggctataaagacacagagaaaggcatgtaaagagagaagaaaaatacagcctaggggctttgctggaggaagctggaatgctgtgggggtccggacaaggcggcaacctaacccagatttgcccagggaa

SEQ ID NO: 3455 - DNA, 137 bp, Homo sapiens
  misc_feature (103)..(103): n equals a,t,g, or c
  misc_feature (114)..(114): n equals a,t,g, or c
  misc_feature (123)..(123): n equals a,t,g, or c
  misc_feature (130)..(131): n equals a,t,g, or c
gcggacgcgtgggccattatttccccttcaaacaaataatagtagtgtgacctttcacttaattcctactcccttaatgtgagagagacaaaatgagctgaanaaggaattaantgaaaggtnacactannattatt

SEQ ID NO: 3456 - DNA, 218 bp, Homo sapiens
  misc_feature (2)..(2): n equals a,t,g, or c
  misc_feature (25)..(25): n equals a,t,g, or c
  misc_feature (29)..(29): n equals a,t,g, or c
  misc_feature (32)..(32): n equals a,t,g, or c
  misc_feature (68)..(68): n equals a,t,g, or c
  misc_feature (114)..(114): n equals a,t,g, or c
  misc_feature (134)..(134): n equals a,t,g, or c
  misc_feature (164)..(164): n equals a,t,g, or c
  misc_feature (181)..(181): n equals a,t,g, or c
  misc_feature (189)..(189): n equals a,t,g, or c
  misc_feature (217)..(217): n equals a,t,g, or c
gnggaatcccccccctcatagggcntccnttnagattaaaccgcaagcatcccaaacatcattcaagnggggggaaaaaagggacgtcgtggtgaaccgccgcttcgtcgaagngggtgaacaccgcgggtgcnccgcgggaagaatcttctccccgcggggtnccgcagcactccacagnccgctgcnccgcggtcgtaatcttgcgatcgccctnt

SEQ ID NO: 3457 - DNA, 103 bp, Homo sapiens
  misc_feature (2)..(2): n equals a,t,g, or c
  misc_feature (35)..(35): n equals a,t,g, or c
  misc_feature (47)..(47): n equals a,t,g, or c
  misc_feature (63)..(63): n equals a,t,g, or c
  misc_feature (85)..(85): n equals a,t,g, or c
  misc_feature (102)..(102): n equals a,t,g, or c
tnttggccttggccttggaccggccttccttgggnggttggaaatgnaaaattggggaaaagnggggtcttaattggttggggtnccccggaaaattctagnt

SEQ ID NO: 3458 - DNA, 221 bp, Homo sapiens
  misc_feature (8)..(8): n equals a,t,g, or c
  misc_feature (11)..(11): n equals a,t,g, or c
  misc_feature (48)..(48): n equals a,t,g, or c
  misc_feature (69)..(69): n equals a,t,g, or c
  misc_feature (88)..(88): n equals a,t,g, or c
  misc_feature (160)..(160): n equals a,t,g, or c
  misc_feature (182)..(182): n equals a,t,g, or c
  misc_feature (204)..(204): n equals a,t,g, or c
  misc_feature (208)..(208): n equals a,t,g, or c
  misc_feature (210)..(210): n equals a,t,g, or c
catcatcnggngagaaagaacgtcctcgtgatcaaccgcctctcgacnagtgatcaccgccgtgctccnccgagatagattctccccnccgggtgctgcagcaacccaccaccggctgctccgcagtggccttgggccatcgtggggcctcgtcgccttngtcgaaactttctagggaaagnggcaaatggggacgccgcgtantatntngggtcgagacc

SEQ ID NO: 3459 - DNA, 110 bp, Homo sapiens
  misc_feature (2)..(2): n equals a,t,g, or c
  misc_feature (8)..(8): n equals a,t,g, or c
  misc_feature (20)..(20): n equals a,t,g, or c
  misc_feature (68)..(68): n equals a,t,g, or c
  misc_feature (70)..(70): n equals a,t,g, or c
  misc_feature (101)..(101): n equals a,t,g, or c
  misc_feature (107)..(107): n equals a,t,g, or c
tnataganagaccctcgctntcccttaatcaaccagacgctcgattttccagaaagatccagtctcgntnaatgccttagaaaatgcaagtaaggttaggnctcttngag

SEQ ID NO: 3460 - DNA, 559 bp, Homo sapiens
  misc_feature (373)..(373): n equals a,t,g, or c
  misc_feature (419)..(419): n equals a,t,g, or c
  misc_feature (428)..(428): n equals a,t,g, or c
  misc_feature (472)..(472): n equals a,t,g, or c
  misc_feature (510)..(510): n equals a,t,g, or c
  misc_feature (523)..(523): n equals a,t,g, or c
  misc_feature (549)..(549): n equals a,t,g, or c
  misc_feature (554)..(554): n equals a,t,g, or c
gaagcaattgacttgttctttaaccatcctatgagaaaggaacaaacaatttggtcaattactatcctgtcaatgcaaatgaaatggcaaaagcaaaacaataaaaacactttcagaagtaaaaactaattttgtattttcagaaacagatttttttcaaagtgaaaatttatttcttgtatcagtaatgtgacttactgcccaatggcaacaaatgctgtgaatgagtttgtccaaatgtaatttaaaatatatatcttgtaatgctaaaaataggttctacaaagtaattttattatgaaaaatcttaaagttgcctcaactcgtaaagcataacaggtatgtctgtttcactatatctgcattgtaaggnctattctgaattcatttgggaagaatggtgaaataaatccctaaangcctctttnctatgcattaaaatagaaaaatcctatgggattacattcatgtnggctttctaaataatgccaaaagctcattttattaagnataatctgcctanccatgccttaaataaactactttggntttanaaaaa

SEQ ID NO: 3461 - DNA, 355 bp, Homo sapiens
  misc_feature (5)..(6): n equals a,t,g, or c
  misc_feature (236)..(236): n equals a,t,g, or c
  misc_feature (265)..(265): n equals a,t,g, or c
  misc_feature (271)..(271): n equals a,t,g, or c
  misc_feature (314)..(314): n equals a,t,g, or c
  misc_feature (344)..(344): n equals a,t,g, or c
  misc_feature (349)..(349): n equals a,t,g, or c
gccanntgacaagtcacaccctccccattagtatcctgttaggggaaaatagtagcagagtcattgttacaggtgtactatggctgtatttttagagattaatttgtgtagattgtgtaaattcctgttgtctgaccttggtggtgggagggggagactatgtgtcatgatttcaatgattgtttaattgtaggtcaatgaaatatttgcttatttatattcagagatgtaccatngttaaagaggcgtcttgtattttcttccnatttgnaatgtatcttatttatatatgaagtaagttctgaaaactgttnatggtattttagtgcatttgtgagccaaanagaanagatta

SEQ ID NO: 3462 - DNA, 158 bp, Homo sapiens
  misc_feature (1)..(1): n equals a,t,g, or c
  misc_feature (3)..(3): n equals a,t,g, or c
  misc_feature (6)..(6): n equals a,t,g, or c
  misc_feature (91)..(91): n equals a,t,g, or c
  misc_feature (96)..(96): n equals a,t,g, or c
  misc_feature (125)..(125): n equals a,t,g, or c
  misc_feature (131)..(131): n equals a,t,g, or c
  misc_feature (143)..(143): n equals a,t,g, or c
ngnatncctagggaaaacccctcactataggttaaagctggtacgcctgcaggtaccggtccggaattcccgggtcgacccacgcgtccgnccacncgtccggtgtgcctccgactcggaacggnttccgnggccggggcagngagggccgggggcgg

SEQ ID NO: 3463 - DNA, 78 bp, Homo sapiens
  misc_feature (7)..(7): n equals a,t,g, or c
  misc_feature (56)..(57): n equals a,t,g, or c
  misc_feature (60)..(60): n equals a,t,g, or c
  misc_feature (65)..(65): n equals a,t,g, or c
gataatntacagccagagagtaactcagcaattgtgtagtccagcatttctacaanntangtatncacatgtacctta

SEQ ID NO: 3464 - DNA, 93 bp, Homo sapiens
  misc_feature (45)..(47): n equals a,t,g, or c
  misc_feature (63)..(63): n equals a,t,g, or c
  misc_feature (90)..(90): n equals a,t,g, or c
gaatttccttatggagaaagacaatgtatactttggcagagtagnnntaaaaagaatttttantatttcatacatttctaaatttttaangga

SEQ ID NO: 3465 - DNA, 264 bp, Homo sapiens
  misc_feature (130)..(130): n equals a,t,g, or c
  misc_feature (231)..(231): n equals a,t,g, or c
gcttaagtagtgtgttaatgattgaaactgtaattgccttcgggttgtgctttagtctgtaaatgtaatttttaataatacttacatttacagtggcatgtcacaaacttcagcaactttccagttgtanagtaagcaagcaccttaagtagtgtgttaatgattgaaactgtaattgccttcgggttgtgctttagtctgtaaaattctaaaggagagctgctaaattgntttcttaataaacatttttctcatttgtaaaaa

SEQ ID NO: 3466 - DNA, 379 bp, Homo sapiens
  misc_feature (333)..(333): n equals a,t,g, or c
  misc_feature (336)..(336): n equals a,t,g, or c
ggtaaaatcctttgttaaaatttaagaaagatctaagtttctgcctcagagtacttttcagtcacataaaagggcctctaaagaaagactaatggtgtgactgaccaatccattcaatcaaacaatagcgcgtccaagaaacttaaggggatggtccttatcctgcagccatttcagcagaatctcaaggtagaggagggcttatctgaaaaagatttgtgcgtgtggcttttgtttaatgcaaagaaccccagtgagattcctaggacccccacaaagctttaagaggaatgtattttaaggatcacttactagtttggattaaaaggggtnaanaaaagtacaaaatgaaaaagatgcctttggacccccaaacttt

SEQ ID NO: 3467 - DNA, 56 bp, Homo sapiens
  misc_feature (28)..(28): n equals a,t,g, or c
  misc_feature (41)..(41): n equals a,t,g, or c
  misc_feature (53)..(53): n equals a,t,g, or c
  misc_feature (55)..(55): n equals a,t,g, or c
gcagatataaatcatgtctgaacagacntcggaggggctcntacaggggagananc

SEQ ID NO: 3468 - DNA, 260 bp, Homo sapiens
  misc_feature (196)..(196): n equals a,t,g, or c
  misc_feature (215)..(215): n equals a,t,g, or c
  misc_feature (217)..(217): n equals a,t,g, or c
  misc_feature (250)..(250): n equals a,t,g, or c
  misc_feature (257)..(257): n equals a,t,g, or c
gaaaagcttaaagaaggttttactgatccagatgttgtccagagacttcgagccttgagggttcttggtgctgatgttggtgaaggtgtgcgcggggatcagtaaaagcttaaagaaggttttcacaggtcactgggctgtggtgagagaaggcctcacgaacccttggattccggataactggtcttggggcggngtggcttctgaacactgcnantgctaccgagttctacactgaaaaggactggancaagaangac

SEQ ID NO: 3469 - DNA, 83 bp, Homo sapiens
  misc_feature (7)..(7): n equals a,t,g, or c
  misc_feature (14)..(14): n equals a,t,g, or c
  misc_feature (31)..(31): n equals a,t,g, or c
  misc_feature (48)..(48): n equals a,t,g, or c
  misc_feature (58)..(58): n equals a,t,g, or c
ggaattnagatgtnaccgtcttggccatccnccttgggaacgtatatnaattcctaanctaccttaaatgcataatcacaaaa

SEQ ID NO: 3470 - DNA, 460 bp, Homo sapiens
  misc_feature (240)..(240): n equals a,t,g, or c
  misc_feature (431)..(431): n equals a,t,g, or c
  misc_feature (439)..(439): n equals a,t,g, or c
  misc_feature (443)..(443): n equals a,t,g, or c
  misc_feature (453)..(453): n equals a,t,g, or c
  misc_feature (456)..(456): n equals a,t,g, or c
ggcacctcagaaggggaaaagctaaacccagagctgtcagtccctctatcccttctcctgtccaggggcccagagagaaacacacctacccctggccttgccagagtggcttctgaggactccctgcccagcccagctttcactggggggagacgaggagaggcaatggtggtcttggcaacagaatgctcagcccctcgtggcaggacttgacaagggcaagcttgaccaggaagctgncatcagggatcttcccctgccccgcaaagctaggctccagctgcaggcgggctcccaccctctgctcctggccttgggcaagggcactcagcgcctcgcctgcccctgccttggccaatgcgaggtccttccttatccccaccatggggtccatggtctatttattctcgcccagcttaccctctacacanacactgtnctgngtgcacactnctncctt

SEQ ID NO: 3471 - DNA, 67 bp, Homo sapiens
  misc_feature (35)..(35): n equals a,t,g, or c
  misc_feature (46)..(46): n equals a,t,g, or c
  misc_feature (58)..(59): n equals a,t,g, or c
  misc_feature (61)..(61): n equals a,t,g, or c
ggagcgagcctctctggtcccgacgggggtggccngggtctcctcnactcctgacganngnccaccg

SEQ ID NO: 3472 - DNA, 63 bp, Homo sapiens
  misc_feature (7)..(7): n equals a,t,g, or c
  misc_feature (35)..(35): n equals a,t,g, or c
  misc_feature (45)..(45): n equals a,t,g, or c
  misc_feature (48)..(48): n equals a,t,g, or c
gggtggntgaagtgtacgaccttgcggccagcaangggggcggtnatngagggcctggatcgg

SEQ ID NO: 3473 - DNA, 61 bp, Homo sapiens
  misc_feature (40)..(40): n equals a,t,g, or c
  misc_feature (48)..(48): n equals a,t,g, or c
  misc_feature (53)..(53): n equals a,t,g, or c
  misc_feature (60)..(61): n equals a,t,g, or c
gaatgaattgactttcataaaaaggtatagaacctgttgntgggcatnatggnaagggann

SEQ ID NO: 3474 - DNA, 462 bp, Homo sapiens
  misc_feature (5)..(5): n equals a,t,g, or c
  misc_feature (263)..(263): n equals a,t,g, or c
  misc_feature (404)..(404): n equals a,t,g, or c
  misc_feature (441)..(441): n equals a,t,g, or c
  misc_feature (444)..(444): n equals a,t,g, or c
  misc_feature (454)..(454): n equals a,t,g, or c
  misc_feature (461)..(461): n equals a,t,g, or c
gtgcntttattttcagggggtacttggcaataacattctgcagacccaccttgtgctatttaggagcataagctggaaacgccctgccagctgctgcttgtcaatggatctaaacttctacttttacagtctaatgaagacccagcccttctctatctggggacaatctgtgagtttggtcagtgtctgccattttatgtcttatgctcattatcaacaattaacacaaagaacagataggatcttggctgtttctgccttanggaaagagcaattttttatggcaattagaatataaaacttaatatcaaaccattcatattaaagtcacaggctattctaaaatatgtctaatataaacaataaatctggttattatcattctactcaaatcttttctttgngctttagagggtccaataaggtactattccagaacanganaataggaaanagctcang

SEQ ID NO: 3475 - DNA, 251 bp, Homo sapiens
gggtggtggctgcacagtagacgccccctcacggcttcccccacacgctcccgccccctcgctcgcccatcgcgcttccctcacaggctctgcagtcctcccccacagacgccttcccccttggactctcattcccttttccacggagccccgcgctttcgtgagccccctcgaggaacctggtctccgcatccagttaccacctcctgcctcagaggccatctgagcccttcgcacctcgcccctcagta

SEQ ID NO: 3476 - DNA, 73 bp, Homo sapiens
gcggacgcgtgggttggacattgagtctgctgtgtctgagtgcactcaataaagattctcctgctttaaaaaa

SEQ ID NO: 3477 - DNA, 148 bp, Homo sapiens
  misc_feature (4)..(5): n equals a,t,g, or c
  misc_feature (35)..(35): n equals a,t,g, or c
  misc_feature (104)..(104): n equals a,t,g, or c
  misc_feature (109)..(109): n equals a,t,g, or c
  misc_feature (117)..(117): n equals a,t,g, or c
  misc_feature (132)..(132): n equals a,t,g, or c
  misc_feature (143)..(143): n equals a,t,g, or c
gccnnaagcctggagggtctgaccatcactttganaacaattccagactcccaccccagccccaaggcttcggggaaatgtgggtttgctggtctctctgtcgncttcncccacctntcctggacctagcangccctcagtcntagct

SEQ ID NO: 3478 - DNA, 50 bp, Homo sapiens
  misc_feature (8)..(8): n equals a,t,g, or c
  misc_feature (35)..(35): n equals a,t,g, or c
  misc_feature (50)..(50): n equals a,t,g, or c
gctatcancattgtttcaaaatagtcatttttagnactggggaaaaatan

SEQ ID NO: 3479 - DNA, 587 bp, Homo sapiens
  misc_feature (430)..(430): n equals a,t,g, or c
  misc_feature (435)..(435): n equals a,t,g, or c
  misc_feature (464)..(464): n equals a,t,g, or c
  misc_feature (478)..(478): n equals a,t,g, or c
  misc_feature (487)..(487): n equals a,t,g, or c
  misc_feature (514)..(514): n equals a,t,g, or c
  misc_feature (520)..(520): n equals a,t,g, or c
  misc_feature (531)..(531): n equals a,t,g, or c
  misc_feature (560)..(561): n equals a,t,g, or c
gaaaaaattgtttttttgcgtgctatttttgtgacacacttcttatgtttcaggcatagtgccagctgttaacagttatagtgagaaaagggacagacacaatttttgctcttatagggcttatagacagtggtgatgccacagggagggcatggagaggtgaggatggcatgtgttttcttcctacaatctccatcagaacccccattcgtttctgtgttcagttgacatttctcaaccttagtaagtattatgcaatggaagcaaaggcccccctacccaaacagattatttccttccacctgtgtagaaattctggactcctaccatttatagtcaagttcgggagatagacattaaacaaatagttgatcaaagaatcacttaattacagttaacatcagcagtgcatacaaagtacagagagcanaggangggggcacagcctgaggccctcagaaggntccccagaactcanaatctgcanaattcagactcagcccagctgacttantggtanaaagccccaanaaccaggaaaagagccttggggaccctanncctttgaggaagaaaccaatgtgtca

SEQ ID NO: 3480 - DNA, 58 bp, Homo sapiens
  misc_feature (6)..(6): n equals a,t,g, or c
  misc_feature (40)..(40): n equals a,t,g, or c
  misc_feature (46)..(46): n equals a,t,g, or c
  misc_feature (50)..(50): n equals a,t,g, or c
gatgantcgcactgttcgttcatcagtggctgaagggggnggaagnagtncaccattc

SEQ ID NO: 3481 - DNA, 146 bp, Homo sapiens
  misc_feature (7)..(7): n equals a,t,g, or c
  misc_feature (16)..(16): n equals a,t,g, or c
  misc_feature (37)..(37): n equals a,t,g, or c
  misc_feature (68)..(68): n equals a,t,g, or c
  misc_feature (79)..(79): n equals a,t,g, or c
  misc_feature (109)..(109): n equals a,t,g, or c
  misc_feature (120)..(120): n equals a,t,g, or c
  misc_feature (142)..(142): n equals a,t,g, or c
aacaggncatattcgngccctcgggccttacatcacntgtctcggtgtgcggaagaagagtgccactnacaatatacgnagcccttgactgttcgagacggttgctganaattgtcgatntagaggagcgtcaaaaggagtncgta

SEQ ID NO: 3482 - DNA, 390 bp, Homo sapiens
  misc_feature (55)..(55): n equals a,t,g, or c
  misc_feature (68)..(68): n equals a,t,g, or c
  misc_feature (345)..(345): n equals a,t,g, or c
  misc_feature (364)..(364): n equals a,t,g, or c
  misc_feature (372)..(372): n equals a,t,g, or c
  misc_feature (383)..(383): n equals a,t,g, or c
  misc_feature (388)..(388): n equals a,t,g, or c
gataatagtgcttattgttcaggtcacatttcaatgaaagaagttttgttttctntattccttttccnagaaacttttctacttacaaaaacaatcattttaaactacaaaagccaagaacttacaaaccaacgccacagacaactttcctcatcatgactgctttcagaaatgtaggaaaactgtgaaaataccatattgtattttaatcaagtatctgtttcattggatattttagaataagtaattagaattcattttaaaattaccagtcaatttatgtttttatcaagttagaattttctgtgatttctgataaatggtaatattacttggaaaggattntactttttttgaaattaanttcatgantacattggaangcctnat

SEQ ID NO: 3483 - DNA, 59 bp, Homo sapiens
  misc_feature (2)..(2): n equals a,t,g, or c
  misc_feature (38)..(38): n equals a,t,g, or c
  misc_feature (47)..(47): n equals a,t,g, or c
  misc_feature (54)..(54): n equals a,t,g, or c
gnttaagcagcatggaagaacagcttaagaccattcantggttgctnctacccnttcag

SEQ ID NO: 3484 - DNA, 56 bp, Homo sapiens
  misc_feature (24)..(24): n equals a,t,g, or c
  misc_feature (32)..(32): n equals a,t,g, or c
  misc_feature (47)..(48): n equals a,t,g, or c
gatgacgcgtgggattttttgtanccacaggnttccaaggacttcannttattatt

SEQ ID NO: 3485 - DNA, 110 bp, Homo sapiens
  misc_feature (2)..(2): n equals a,t,g, or c
  misc_feature (5)..(5): n equals a,t,g, or c
  misc_feature (8)..(8): n equals a,t,g, or c
  misc_feature (51)..(51): n equals a,t,g, or c
  misc_feature (73)..(73): n equals a,t,g, or c
  misc_feature (101)..(101): n equals a,t,g, or c
  misc_feature (107)..(107): n equals a,t,g, or c
  misc_feature (109)..(109): n equals a,t,g, or c
cntanaanaaaagcaaaagggtggctttctcttcaggattataatatttangctacgcagtggcaatggagangaacatagcatgtttgtatgaatggaanaatatnant

SEQ ID NO: 3486 - DNA, 64 bp, Homo sapiens
  misc_feature (7)..(7): n equals a,t,g, or c
  misc_feature (44)..(44): n equals a,t,g, or c
  misc_feature (50)..(50): n equals a,t,g, or c
  misc_feature (57)..(57): n equals a,t,g, or c
  misc_feature (63)..(63): n equals a,t,g, or c
gcagctnctcaggttcagactgacaggaagatgacgatgacgangagacnacaggantgttana

SEQ ID NO: 3487 - DNA, 306 bp, Homo sapiens
  misc_feature (264)..(264): n equals a,t,g, or c
  misc_feature (271)..(271): n equals a,t,g, or c
  misc_feature (278)..(278): n equals a,t,g, or c
  misc_feature (290)..(290): n equals a,t,g, or c
  misc_feature (300)..(300): n equals a,t,g, or c
gggggagtgatcacatttttcacaacagtaagttaagaatttcagttactgacatccctcagtcctgattaaacctatttgatttcaccagtttttaacccatcatatgtttgggtttcttctccccagtccctgactccacctcttctgccacaaacgtcagcatggtggtatcagccggcccttggtccagcgagaaggcagagatgaacattctagaaatcaacgagaaattgcgcccccagttggcagagaacaaacagnagttcanaaacctnaaagagagatgntttctaactnaactgg

SEQ ID NO: 3488 - DNA, 59 bp, Homo sapiens
  misc_feature (15)..(15): n equals a,t,g, or c
  misc_feature (22)..(22): n equals a,t,g, or c
  misc_feature (37)..(37): n equals a,t,g, or c
  misc_feature (56)..(56): n equals a,t,g, or c
  misc_feature (59)..(59): n equals a,t,g, or c
gtttaaagtggactnatttcanatacaaagcttagangagataccatgagtttatnatn

SEQ ID NO: 3489 - DNA, 107 bp, Homo sapiens
  misc_feature (63)..(63): n equals a,t,g, or c
  misc_feature (72)..(72): n equals a,t,g, or c
  misc_feature (89)..(89): n equals a,t,g, or c
  misc_feature (92)..(92): n equals a,t,g, or c
  misc_feature (106)..(106): n equals a,t,g, or c
ggcaccatcttcctccatttgactttttaatgctttacaacttcaggctaaagggaggggatnttgtgatgngttctcctcccaacatngcnagcggccgctctana

SEQ ID NO: 3490 - DNA, 196 bp, Homo sapiens
  misc_feature (63)..(63): n equals a,t,g, or c
  misc_feature (105)..(105): n equals a,t,g, or c
  misc_feature (172)..(172): n equals a,t,g, or c
  misc_feature (185)..(185): n equals a,t,g, or c
  misc_feature (191)..(192): n equals a,t,g, or c
gctttcctatgttgttgaaactaaaaaattcacttttagctgtgatcactctaggcctcacanaattcgagttaatcttctgtcaaggttaactaagcattatantctcatgaaaatattacatgaggattataaatccattttttgttcttattctgcacacttgcttcangagaatctgttcnactcannaata

SEQ ID NO: 3491 - DNA, 198 bp, Homo sapiens
  misc_feature (158)..(158): n equals a,t,g, or c
  misc_feature (171)..(171): n equals a,t,g, or c
  misc_feature (178)..(178): n equals a,t,g, or c
  misc_feature (182)..(182): n equals a,t,g, or c
  misc_feature (195)..(195): n equals a,t,g, or c
gggcaattgattagtaatgtcagtcgtggttgccagaccagggagtggctgtaggtatgtgtaggggaagtcacacatgcaaaaagcacctgggttctttcctgacctggttgggttgctctgggcaagtcatgtcccctctggccttggggtccctntgttaaatggcanggctgantcantggcttctgggtnact

SEQ ID NO: 3492 - DNA, 170 bp, Homo sapiens
  misc_feature (127)..(127): n equals a,t,g, or c
  misc_feature (145)..(145): n equals a,t,g, or c
  misc_feature (149)..(149): n equals a,t,g, or c
  misc_feature (169)..(170): n equals a,t,g, or c
gggggtcctcatataatatgaggcgcagagaataggtccaggcaactgtttaacaaaaacacagggctgtgctaactcgcgagatgacgtatacagcctgacacctgcccggtgccggaaggttaanaggagggttcagacttcngtcnaaggcctgaattgaagcccnn

SEQ ID NO: 3493 - DNA, 66 bp, Homo sapiens
  misc_feature (6)..(6): n equals a,t,g, or c
  misc_feature (18)..(18): n equals a,t,g, or c
  misc_feature (35)..(35): n equals a,t,g, or c
  misc_feature (48)..(48): n equals a,t,g, or c
  misc_feature (62)..(62): n equals a,t,g, or c
gtctanatcgcgagcggncgctctagaggatccangcttacgtacaangtgcatgcgaccancata

SEQ ID NO: 3494 - DNA, 137 bp, Homo sapiens
  misc_feature (112)..(113): n equals a,t,g, or c
  misc_feature (121)..(121): n equals a,t,g, or c
  misc_feature (133)..(133): n equals a,t,g, or c
  misc_feature (137)..(137): n equals a,t,g, or c
gcccacgcgtccgattagagaaggataagtaggaaaacatattcaagactactgtagctgatcaatattcaaattgatgtgttttaaaatttattttaaggttttacaaccnnaacataancatgctttgacncgcn

SEQ ID NO: 3495 - DNA, 68 bp, Homo sapiens
  misc_feature (39)..(39): n equals a,t,g, or c
  misc_feature (50)..(51): n equals a,t,g, or c
  misc_feature (55)..(55): n equals a,t,g, or c
  misc_feature (60)..(60): n equals a,t,g, or c
gcggaataaatgttttctcattcaaacagcatcccaggncgagcatctannccangattntataatcc

SEQ ID NO: 3496 - DNA, 228 bp, Homo sapiens
  misc_feature (169)..(169): n equals a,t,g, or c
  misc_feature (191)..(191): n equals a,t,g, or c
  misc_feature (199)..(199): n equals a,t,g, or c
  misc_feature (208)..(208): n equals a,t,g, or c
  misc_feature (214)..(214): n equals a,t,g, or c
gcagcgtcagagagaaagaactgactgaaacgtttgagatatataggaaacatcaaaaggtgataaaatttccctagaatctccactatctcaaagatgaagaaagttctcctcctgatcacagccatcttggcagtggctgttggtttcccagtctctcaagaccagnaacgagaaaaaagaagtatcantgacagcnatgaattancttcanggttttttgtgttc

SEQ ID NO: 3497 - DNA, 146 bp, Homo sapiens
  misc_feature (7)..(7): n equals a,t,g, or c
  misc_feature (19)..(19): n equals a,t,g, or c
  misc_feature (28)..(28): n equals a,t,g, or c
  misc_feature (31)..(31): n equals a,t,g, or c
  misc_feature (88)..(88): n equals a,t,g, or c
  misc_feature (104)..(104): n equals a,t,g, or c
  misc_feature (111)..(111): n equals a,t,g, or c
  misc_feature (113)..(113): n equals a,t,g, or c
  misc_feature (129)..(129): n equals a,t,g, or c
gaacctnttggaccccttngaataccgnaantatatggaaagctggtacgcctgcaggtaccggtccggaattaccgggtcgacccangcgtccgagcggatgnagcgctntngtcttctgaggctctnggtgccctgtccttttc

SEQ ID NO: 3498 - DNA, 385 bp, Homo sapiens
  misc_feature (378)..(378): n equals a,t,g, or c
  misc_feature (385)..(385): n equals a,t,g, or c
gctgacttttctgacttgtttcttgagggacttggaaaaggggaaggtattattcacacagatgtgtgtatgaagcctaaataacatccaactttttttccaaaaacatagtaagagtttaaccataaatagaagagtaatattcctttaaatttcttacaggcatgtaaaattttatgtgtttatagagagatgctaactgtcagcatatagtatttatattggggcaagaagggttaaatcaaatcttttaatttaagtaagcatagttcctttaaagatcaagtagtatttatactctgaaaagagtaccaagcttagttcagttatttattcatccattttttttctattggttctcctctggggggaaatggngttttgn

SEQ ID NO: 3499 - DNA, 159 bp, Homo sapiens
  misc_feature (3)..(3): n equals a,t,g, or c
  misc_feature (8)..(8): n equals a,t,g, or c
  misc_feature (20)..(20): n equals a,t,g, or c
  misc_feature (23)..(23): n equals a,t,g, or c
  misc_feature (28)..(28): n equals a,t,g, or c
  misc_feature (34)..(34): n equals a,t,g, or c
  misc_feature (37)..(38): n equals a,t,g, or c
  misc_feature (45)..(45): n equals a,t,g, or c
  misc_feature (54)..(54): n equals a,t,g, or c
  misc_feature (98)..(98): n equals a,t,g, or c
  misc_feature (100)..(100): n equals a,t,g, or c
  misc_feature (114)..(114): n equals a,t,g, or c
  misc_feature (127)..(127): n equals a,t,g, or c
  misc_feature (147)..(147): n equals a,t,g, or c
ggnaccanttgctgtgtatnctngctcnggttcntcnnctcactncttattctnaacgacggattatgtgacagtgaccgaagataagatggatttgntnattatctcacacgntgtaaatgttgancctttttgatctgtttgttngcaaaggccctg

SEQ ID NO: 3500 - DNA, 497 bp, Homo sapiens
  misc_feature (233)..(233): n equals a,t,g, or c
  misc_feature (252)..(252): n equals a,t,g, or c
  misc_feature (454)..(454): n equals a,t,g, or c
  misc_feature (461)..(461): n equals a,t,g, or c
  misc_feature (483)..(483): n equals a,t,g, or c
  misc_feature (491)..(491): n equals a,t,g, or c
  misc_feature (493)..(493): n equals a,t,g, or c
gggcatggtatcaaattatgtaaagaaaaacttggtaaacaagaaattgtcaaatttataatcatagctacgtatttgaacacagcgcttagaaattgtcagataaagagttcaaaatagaggaaacattttgaattatatagtgcacaaattttaatagctatagaacatttgttttcaaatgccatgaaaaaatgaccatgaagcaaaaaccacaatatttttttgtttgntgataggtaaggaattcangggtccatcctgtcatcacaatgcaatgaaacaaaaaattagcaagtggatagcaataaatcaatttttaaaaatcagacaaaagaaaacactgtccttgtaatgcttgcatttaaaaggaaataaaaacttatgaaagagaatctttattttatttaagcagttctagattatacaaaatgttgaaacatctcaatttggnctctgangctagcataatccttattccanaaaattgntnatca

SEQ ID NO: 3501 - DNA, 58 bp, Homo sapiens
  misc_feature (16)..(17): n equals a,t,g, or c
  misc_feature (37)..(37): n equals a,t,g, or c
  misc_feature (44)..(45): n equals a,t,g, or c
gttgacgcgttggttnnacctcaagaccatgcggtangtgaggnngctctgcgtgcgc

SEQ ID NO: 3502 - DNA, 358 bp, Homo sapiens
  misc_feature (189)..(189): n equals a,t,g, or c
  misc_feature (228)..(228): n equals a,t,g, or c
  misc_feature (284)..(284): n equals a,t,g, or c
  misc_feature (316)..(316): n equals a,t,g, or c
  misc_feature (328)..(328): n equals a,t,g, or c
  misc_feature (343)..(343): n equals a,t,g, or c
  misc_feature (356)..(356): n equals a,t,g, or c
gcagatcacagggtgagggccacctccacacccaccccctctggagaaggcctggaagagctgagaccttgctttgagactcctcagcacccctccagttttgcctgagaaggggcagatgttcccggagcagaagacgtctccccttctctgcctcacctggtcgccaatccatgctctctttctttnctctgtctactccttatcccttggtttagaggaacccangatgtggcctttagcaaaactggacaatgtccaaacccactcatgactgcatgacngagccgagccatgtgtctttacacctcgctgntgcacatctcanggaactgaccctcangcacaccttgcanaa

SEQ ID NO: 3503 - DNA, 319 bp, Homo sapiens
  misc_feature (193)..(193): n equals a,t,g, or c
  misc_feature (195)..(195): n equals a,t,g, or c
  misc_feature (260)..(260): n equals a,t,g, or c
  misc_feature (270)..(270): n equals a,t,g, or c
  misc_feature (288)..(288): n equals a,t,g, or c
  misc_feature (308)..(308): n equals a,t,g, or c
  misc_feature (311)..(311): n equals a,t,g, or c
gaaaaaaacagctctctttaaaacagctttttcagccattttacattacttattaactagtctaaggaatgttattctgtgagttttaattacaaaatacatttgttttaatattgtcttttgaattaacattctgtcttttagaaatacttcgtgtaggtcacagtttgtgaaggaaatcctaatatggttngnggttgaatgttagtgactttaattcattgtataatggttattttccatttaatatatcttgaagnagttgttcanagaataggtgttcataancatgggacttgcattgaagnggnttgaataa

SEQ ID NO: 3504 - DNA, 76 bp, Homo sapiens
  misc_feature (15)..(15): n equals a,t,g, or c
  misc_feature (23)..(23): n equals a,t,g, or c
  misc_feature (49)..(49): n equals a,t,g, or c
  misc_feature (72)..(72): n equals a,t,g, or c
gccatcaccgaattngggagctnttcaaaatgaagtttaatccctttgngactttccgacccgaagcaaggnatcg

SEQ ID NO: 3505 - DNA, 175 bp, Homo sapiens
  misc_feature (11)..(11): n equals a,t,g, or c
  misc_feature (13)..(13): n equals a,t,g, or c
  misc_feature (41)..(41): n equals a,t,g, or c
  misc_feature (71)..(71): n equals a,t,g, or c
  misc_feature (74)..(74): n equals a,t,g, or c
  misc_feature (110)..(110): n equals a,t,g, or c
  misc_feature (116)..(116): n equals a,t,g, or c
  misc_feature (146)..(147): n equals a,t,g, or c
  misc_feature (155)..(155): n equals a,t,g, or c
ttgtttgtggngnaaggctgggtaagcccaagaagactccngtgggggggggccgcttgcttttgggccgngangggagccccaagcccgggaagcaagccctcttttcngaaagngcccggccgggaccttcttcaaagggcggnnggaaaacnggaaagggaaaaggcccccg

SEQ ID NO: 3506 - DNA, 549 bp, Homo sapiens
  misc_feature (12)..(12): n equals a,t,g, or c
  misc_feature (62)..(62): n equals a,t,g, or c
  misc_feature (73)..(73): n equals a,t,g, or c
  misc_feature (229)..(230): n equals a,t,g, or c
  misc_feature (236)..(236): n equals a,t,g, or c
  misc_feature (241)..(241): n equals a,t,g, or c
  misc_feature (243)..(243): n equals a,t,g, or c
  misc_feature (250)..(251): n equals a,t,g, or c
  misc_feature (254)..(254): n equals a,t,g, or c
  misc_feature (263)..(263): n equals a,t,g, or c
  misc_feature (272)..(272): n equals a,t,g, or c
  misc_feature (300)..(300): n equals a,t,g, or c
  misc_feature (304)..(304): n equals a,t,g, or c
  misc_feature (327)..(327): n equals a,t,g, or c
  misc_feature (353)..(353): n equals a,t,g, or c
  misc_feature (369)..(369): n equals a,t,g, or c
  misc_feature (414)..(414): n equals a,t,g, or c
  misc_feature (437)..(437): n equals a,t,g, or c
  misc_feature (475)..(475): n equals a,t,g, or c
  misc_feature (529)..(529): n equals a,t,g, or c
  misc_feature (540)..(541): n equals a,t,g, or c
  misc_feature (549)..(549): n equals a,t,g, or c
gggatttctgcnacgcctgccggtaccggtccggaattcccgggtcgacccacgcgtccgcncagcttctgtnaccatggatttaagaccatgttggatccaaaagttggcctgaaaccctgaagctgatgcttcacagctgggctgtaagtcagacttgaacccagctgatatgcaaggtcatggcgtgcccagggtggtgacagttgaacaaagtgtatagtacgtnncaagcngtggnantggaaanntgnataccaaanggactttgnaggaccaaaggttttaaaaggcaattgntatnacctccacactgactagggtagnggggtgcattaggtttcaaattgggnacttttaacactttangtgcctgactgctgttcttttactgacttgattcaagtcactcgnagctttattggtctgaaccaagntccttgttcccaggttacagacctgcctatcgttccantaatcctgtttaacttgaatgaaagggaatttgccttaaatggaaaagttcctnggttttaaaanngacttttn

SEQ ID NO: 3507 - DNA, 521 bp, Homo sapiens
  misc_feature (1)..(1): n equals a,t,g, or c
  misc_feature (23)..(24): n equals a,t,g, or c
  misc_feature (31)..(31): n equals a,t,g, or c
  misc_feature (97)..(97): n equals a,t,g, or c
  misc_feature (397)..(397): n equals a,t,g, or c
  misc_feature (406)..(406): n equals a,t,g, or c
  misc_feature (439)..(439): n equals a,t,g, or c
  misc_feature (462)..(462): n equals a,t,g, or c
  misc_feature (467)..(467): n equals a,t,g, or c
  misc_feature (492)..(492): n equals a,t,g, or c
  misc_feature (518)..(518): n equals a,t,g, or c
ncagtgtaacttacagtttcctnnaaaaaanaaaaaagtaaacctggcagctatagaatacactatgtgcatttataatagctattttatatattgnagtatcaacatttttaaattaaatgttttacattcacaagtggtggggagtcttgtcattaaggtgtgtgtaatttagagtccagttggttttcttctgactgcacttgttctcatagtagtaaaatgctatgcgcatttataccttgcataagtcctcattctaccacatgttaaccctctagctgataatgcaaacactaactgggggattttatttataagggctctagaaaaaaccgagttattcacaccagcatcatcttaactaacattcttgaactaggtagtgcagcttttnttgtgttgngtggttggtctcataactaggttgagttttctnctctgctgaggaaacagtaccgnagctnctttcttgtggcattcgcattatanaaacttggtgtgggggagggagcccnaaa

SEQ ID NO: 3508 - DNA, 594 bp, Homo sapiens
  misc_feature (4)..(4): n equals a,t,g, or c
  misc_feature (414)..(414): n equals a,t,g, or c
  misc_feature (554)..(554): n equals a,t,g, or c
  misc_feature (569)..(569): n equals a,t,g, or c
  misc_feature (572)..(572): n equals a,t,g, or c
  misc_feature (576)..(577): n equals a,t,g, or c
ggtnatgatcaccgagaccgcggcggagcctacggtccctgcagtgcctgctgctgaggaggccaccgaagctcggggacgcgaggagccggcgtggccctggaaagacgccccgatccggacgctggtgcagcgcatccaccagctgcaggctgagcgcgcgcagggcttccgccgactggaggaaggccaccgccagtacctgcgcagcggccctgactacgacttcgcgcgctaccggagcacagtgcacggggtgacccaggccttcgccgccgcctcgcgggaggtgctggcggtggaagcagagctgggcgggcctcgcaggcagccgctgctcgccggccacgtgcgcagctgcaggatctggagcagacgcggctgggcacggtggccctgctgcagttgatggangacgccagagctggcggggcaaggaggacgctgtacggatgcagcaagctgaaaatgaaggtaatttaaaccatggaagcgatcaacgagggtctccaggaccttaaggtttgatgcggaatctgccgagtgatggcggnttcccaaggattgcnccnaggnnagatgggaaaacggggc

SEQ ID NO: 3509 - DNA, 88 bp, Homo sapiens
  misc_feature (32)..(32): n equals a,t,g, or c
  misc_feature (56)..(56): n equals a,t,g, or c
  misc_feature (61)..(61): n equals a,t,g, or c
  misc_feature (63)..(64): n equals a,t,g, or c
gattggattttcggcggttgatcccagggtgnctgagtggcggtgaccgaggcggngagcngnngcccggcgccgaccctgagtgcag

SEQ ID NO: 3510 - DNA, 53 bp, Homo sapiens
  misc_feature (2)..(3): n equals a,t,g, or c
  misc_feature (11)..(11): n equals a,t,g, or c
  misc_feature (51)..(52): n equals a,t,g, or c
gnncacgcgtncgagtttggtaagttttaagaaatatcatccaacaaaggnnc

SEQ ID NO: 3511 - DNA, 103 bp, Homo sapiens
  misc_feature (65)..(65): n equals a,t,g, or c
  misc_feature (71)..(71): n equals a,t,g, or c
  misc_feature (74)..(74): n equals a,t,g, or c
  misc_feature (82)..(82): n equals a,t,g, or c
  misc_feature (85)..(85): n equals a,t,g, or c
aaagagctgcactgtgcgatagtaccgagtacctgatatgaaagcctttgccctgctaattcganttgggnttngctctcgnacngggatccatttgcgtgtt

SEQ ID NO: 3512 - DNA, 161 bp, Homo sapiens
gcggacgcgtggggccctgcagagataaggcagctgggcctgagctagactcagtgtcctcctggggtaggacagggacacagggtgtcatgcctcaccctcccagcagggctggtgcttcaacatctcaatttgtacaaatacatccccccttcaaaaaa

SEQ ID NO: 3513 - DNA, 648 bp, Homo sapiens
  misc_feature (542)..(542): n equals a,t,g, or c
  misc_feature (580)..(580): n equals a,t,g, or c
  misc_feature (599)..(599): n equals a,t,g, or c
  misc_feature (608)..(608): n equals a,t,g, or c
  misc_feature (623)..(623): n equals a,t,g, or c
  misc_feature (645)..(645): n equals a,t,g, or c
ggatttttctctgtttggaaacaaaggaggcacagagcatggatagagataactcattgcacagtgttcagtgagcagaatatgaccatcctagcagcagggcttctgtgacttcctcagaagataaaacatgctccagtactttacagcctgttatcttgtcatcattgaccccgtttctctcctcactgctattctttaaccaaaggaaagagctcctgagagagacttgaaagtaatggttggaagggtggtttcagtgtaatggatacattctttttctcagaggccaatcccaggcattgtgaaagaaatggcttttcttatgaagacttcaaattttcccaactcttttcacaggtgttggggatgtcctttgcactgaccctgaactgccagattgacaaaaccagccagaccatagggctatgatctgcagtagttctgtggtgaagagacttgtttcatctccggaaatgcaaaaccatttatagcatgaagccctacatgatcactgcaggatgatcctcctccatcctttncctttttaggtcccctgtcttatacaaccagagaagtnggtgttggccaggcacatncccatcttnagccagcaagacaantctttcacttcacttgaccggnagc

SEQ ID NO: 3514 - DNA, 58 bp, Homo sapiens
  misc_feature (6)..(7): n equals a,t,g, or c
  misc_feature (38)..(38): n equals a,t,g, or c
  misc_feature (40)..(41): n equals a,t,g, or c
gcccanncgtccggatggtgatggtggtggtgatcacntnnctgctgagccactacaa

SEQ ID NO: 3515 - DNA, 218 bp, Homo sapiens
  misc_feature (106)..(106): n equals a,t,g, or c
  misc_feature (137)..(137): n equals a,t,g, or c
  misc_feature (148)..(148): n equals a,t,g, or c
  misc_feature (178)..(178): n equals a,t,g, or c
  misc_feature (186)..(186): n equals a,t,g, or c
  misc_feature (198)..(198): n equals a,t,g, or c
gctgaccctgggcaagcccactgcccccccatcccctcaccccgggtaagcccactgcccctcccgtcccccaactgactgaccctaggcaagcccactgcccccncatcccctcaccccgggtaagcccactgccncttccaccgcncactgaccccgggcaagccgagtattcctnatggaccncaggcaaggacnctggcacaacatggacccca

SEQ ID NO: 3516 - DNA, 165 bp, Homo sapiens
  misc_feature (1)..(1): n equals a,t,g, or c
  misc_feature (6)..(6): n equals a,t,g, or c
  misc_feature (14)..(14): n equals a,t,g, or c
  misc_feature (31)..(31): n equals a,t,g, or c
  misc_feature (98)..(98): n equals a,t,g, or c
  misc_feature (104)..(104): n equals a,t,g, or c
  misc_feature (109)..(110): n equals a,t,g, or c
  misc_feature (164)..(164): n equals a,t,g, or c
ngccgncacgcatncttgtaccggtccggcnttcccgggtcgacccacgcgtccgcaacctccttttcaccctcccaacattgctttgaggctaaganaaacantttgnntaaaccagacatttgtccaaggagtaaatactgattcatgcttgctatactgcnt

SEQ ID NO: 3517 - DNA, 97 bp, Homo sapiens
  misc_feature (42)..(43): n equals a,t,g, or c
  misc_feature (50)..(50): n equals a,t,g, or c
  misc_feature (65)..(65): n equals a,t,g, or c
  misc_feature (85)..(85): n equals a,t,g, or c
gacctgtatccttggcccttttttttttttttttttcctggnngccttcnacattgttccttttncctatatttccttccctatnagaatcaaaggc

SEQ ID NO: 3518 - DNA, 612 bp, Homo sapiens
  misc_feature (1)..(2): n equals a,t,g, or c
  misc_feature (6)..(6): n equals a,t,g, or c
  misc_feature (18)..(18): n equals a,t,g, or c
  misc_feature (27)..(27): n equals a,t,g, or c
  misc_feature (411)..(411): n equals a,t,g, or c
  misc_feature (462)..(462): n equals a,t,g, or c
  misc_feature (500)..(500): n equals a,t,g, or c
  misc_feature (504)..(504): n equals a,t,g, or c
  misc_feature (511)..(511): n equals a,t,g, or c
  misc_feature (530)..(530): n equals a,t,g, or c
  misc_feature (572)..(572): n equals a,t,g, or c
  misc_feature (574)..(574): n equals a,t,g, or c
  misc_feature (605)..(606): n equals a,t,g, or c
nntggnatttcgtagggnaccttcctntgtaaggaccgctggtacgcctgcaggtaccggtccggaattcccgggtcgacccacgcgtccggaaaaagggctactgtatctttaaaaacaggaagttgaacccaagctgtgaaaagccagtggtgctctgtgcatggtgctgtgcggagcctggtgctgtagtgttgtgctgggactttcttgactcttgggcaggtcacatcctacaggagctcagcagaccagtgtaacaacagttaatgcatctatcctgatccctgaatttccacattggacaatggtgcatgcctcacacctgagcctgcttcctccatgctgtcattgggttcgggggcctacacttaacaattttaaagtgcaagagtcaaacattttcaacangttgctataattttcctccctaattggtgccatttctccatttgatcattntctttttttctttctccctcttcatcactttaatatanctgnctgaaantctggtgcattcattcggntctttgaaatgagaatgtgggcttaatttttgggacgttgcnanaaaagttggcctgatgggaacacacttatannaccaag

SEQ ID NO: 3519 - DNA, 391 bp, Homo sapiens
  misc_feature (1)..(1): n equals a,t,g, or c
  misc_feature (7)..(7): n equals a,t,g, or c
  misc_feature (9)..(9): n equals a,t,g, or c
  misc_feature (14)..(14): n equals a,t,g, or c
  misc_feature (20)..(20): n equals a,t,g, or c
  misc_feature (208)..(208): n equals a,t,g, or c
  misc_feature (354)..(354): n equals a,t,g, or c
  misc_feature (360)..(360): n equals a,t,g, or c
  misc_feature (364)..(364): n equals a,t,g, or c
  misc_feature (384)..(384): n equals a,t,g, or c
  misc_feature (388)..(388): n equals a,t,g, or c
naaaccntntgganaccctnactatagggaaagctggtacgcctgcaggtaccggtccggaattcccgggtggtgctctgtctggaggcgaacctggggcccagctcggtggaaccattttcagctgtgtaccccagtaagtgcttggcctttcagatcatagtttctctcatgtgcgtaagaaggggtgggtcaggatggaggcggnttccaaacaccagtcttccatgccaacatctgccccctagacttggcaaaaaccagaacaataaggacaatgccataagttgttcatgaaactaaatgcatccagtctaatggattatcctttattctgagatgacgccttctttntttganattnaaaagcccttttggaaaatnaaangat

SEQ ID NO: 3520 - DNA, 555 bp, Homo sapiens
  misc_feature (48)..(48): n equals a,t,g, or c
  misc_feature (210)..(210): n equals a,t,g, or c
  misc_feature (229)..(229): n equals a,t,g, or c
  misc_feature (400)..(400): n equals a,t,g, or c
  misc_feature (451)..(451): n equals a,t,g, or c
  misc_feature (519)..(519): n equals a,t,g, or c
  misc_feature (538)..(538): n equals a,t,g, or c
  misc_feature (543)..(543): n equals a,t,g, or c
  misc_feature (553)..(554): n equals a,t,g, or c
ggtttattttactgttttataggaaacttgggaagtaagcaggacttnccaggcctcttgtcttgtgttatggggaaccacaggacccatcaggcatttttagtttcatttaccaggcagtttattgattgcaacacttagcatacatgattcacaaagttctcattcttgataattttctgcccaaatgtagcttcctgagaagggcangagtgatccatcacgtggngggtgttcatgtttctggttggctccagccccttcccttgaatcctgtgctttaacagctggaatccttcagtgtgtttgggtggctcactgcttatcaaatattcaaggcctacaaccattgcagcctttctcatacctccactcttgaagcttctgcttaggctaactnttgtctcttccctgcctttaattgaaactctggaattctctgggcctttgnttttacctatttcctgttcaaagtcttgtaattattgggatggaaaagtgacaaactctgatcatttntaagaacacttgtaaaatnggcangccccttccnna

SEQ ID NO: 3521 - DNA, 576 bp, Homo sapiens
  misc_feature (14)..(14): n equals a,t,g, or c
  misc_feature (313)..(313): n equals a,t,g, or c
  misc_feature (342)..(342): n equals a,t,g, or c
  misc_feature (346)..(346): n equals a,t,g, or c
  misc_feature (354)..(354): n equals a,t,g, or c
  misc_feature (382)..(383): n equals a,t,g, or c
  misc_feature (391)..(391): n equals a,t,g, or c
  misc_feature (429)..(429): n equals a,t,g, or c
  misc_feature (438)..(438): n equals a,t,g, or c
  misc_feature (462)..(462): n equals a,t,g, or c
  misc_feature (499)..(499): n equals a,t,g, or c
  misc_feature (501)..(501): n equals a,t,g, or c
  misc_feature (527)..(527): n equals a,t,g, or c
  misc_feature (559)..(559): n equals a,t,g, or c
  misc_feature (566)..(566): n equals a,t,g, or c
ggtaatttgtactntgaactaaccataacactatacatgtgttaatacattttgttgtaacatttaaaaaaatgtagttatagacttgatccatccaccaccctcagatgcagatagaaaatttttgagaaaattccagggatccaaagacaacctaaagctaatcttgggattccttcatatttcacagtacagaagataagtcccatttcaaaagataatacaggaaatgataaaatttatgtctttgagagaatagttatgttcttagcatcaactttgataaagggtagatgttccttatgaactaatncatctttcatttgggttggttctttgctnggtncagaggtnttcatattttggttacagtgatactggnnattaaagngcttaataaaatggttaaatataaattatatccatganttatataanatagatggttttattggtatatgntatttaaatttcaagtttatgctgggtattactacangnttattctgagatggtttcatggcccnaattttaattgatattgggatccaatggtttnaccgganttttataaag

SEQ ID NO: 3522 - DNA, 103 bp, Homo sapiens
  misc_feature (40)..(40): n equals a,t,g, or c
  misc_feature (46)..(46): n equals a,t,g, or c
  misc_feature (60)..(60): n equals a,t,g, or c
  misc_feature (65)..(65): n equals a,t,g, or c
  misc_feature (86)..(86): n equals a,t,g, or c
cactggagcctctgctgtgcttctggaactgcccaactcnctgggnaggcccaagccacnaagtnacggaaacaactgcgttttcngcccataatgaaccaga

SEQ ID NO: 3523 - DNA, 581 bp, Homo sapiens
  misc_feature (542)..(542): n equals a,t,g, or c
  misc_feature (553)..(553): n equals a,t,g, or c
  misc_feature (566)..(566): n equals a,t,g, or c
  misc_feature (568)..(568): n equals a,t,g, or c
  misc_feature (575)..(575): n equals a,t,g, or c
gccggcggcgctgggaggtggagtcgttgctgttgctgtttgtgagcctgtggcgcggcttctgtgggccggaaccttaaaggtgagtaactctcggtggctaatgagaagctacaaaagggtccgctttgctggtgcgcgactgcgcgtttccgttctttactgcttctcgcggcgtccgtccgcccctcgccttcctcacgttcaggccgagcgccgcgtgggccgcagccggaggcggcggagccgagggggcgcgggcggcggcgaggctgcccccgcgaggaatgcgggatcctggggttccccgcacgtggctggtgcccaggcagttccgcggttgcttagagacgggactgtggctgccctcatccccattgcgtctttttttttttttttttttacctccaccgccttctagtctcaccgaaggcttgtggccatctctgtaaagtttctggggaggtgggcacggggtaaacgccggagggttctgtggagcctatgggactgactggaggccaaagaactttgggccgcanatgtacaccancgtcacttttttngnctgttanggcctt

SEQ ID NO: 3524 - DNA, 191 bp, Homo sapiens
  misc_feature (66)..(66): n equals a,t,g, or c
  misc_feature (89)..(89): n equals a,t,g, or c
  misc_feature (98)..(98): n equals a,t,g, or c
  misc_feature (105)..(105): n equals a,t,g, or c
  misc_feature (129)..(129): n equals a,t,g, or c
  misc_feature (151)..(151): n equals a,t,g, or c
  misc_feature (162)..(162): n equals a,t,g, or c
ggtcttctttaggtagcagaggtgcagaaaggagtatagatgacataggtcacctcattcatgaangcctacagaatctcctgtccctncagccacanagcaacntgattgtactaaaattctagaacntccatatagtatacatgctttncagcactaganaggcgtacaggtaagagataattagactg

SEQ ID NO: 3525 - DNA, 66 bp, Homo sapiens
  misc_feature (14)..(14): n equals a,t,g, or c
  misc_feature (42)..(42): n equals a,t,g, or c
  misc_feature (45)..(46): n equals a,t,g, or c
  misc_feature (50)..(50): n equals a,t,g, or c
ggaaaaacacaagntgtatcagactcactgattttcatcagngtnnaccncaagtgggtcttcctg

SEQ ID NO: 3526 - DNA, 347 bp, Homo sapiens
  misc_feature (10)..(10): n equals a,t,g, or c
  misc_feature (15)..(16): n equals a,t,g, or c
  misc_feature (20)..(20): n equals a,t,g, or c
  misc_feature (23)..(23): n equals a,t,g, or c
  misc_feature (223)..(223): n equals a,t,g, or c
  misc_feature (301)..(301): n equals a,t,g, or c
  misc_feature (321)..(321): n equals a,t,g, or c
  misc_feature (328)..(328): n equals a,t,g, or c
  misc_feature (340)..(340): n equals a,t,g, or c
  misc_feature (347)..(347): n equals a,t,g, or c
aagacttcanatgannatcntgnactatccttaaagctggtacgcctgcaggtaccggtccggaattcccgggtcgacccacgcgtccgcccacgcgtccgctgttctaacagacatataaaggaagtgctatggatggaagcacagaggaagaagaggttaatagtgtctaagaacctagaagggatgaagatgaaaattgagatttgaaaggtgagaaagncattaagacaaggatgacttaaaggtattccaaactcctaagaaatacagggagttttggtggatgcagaatgattgncgaaggctgtcaaagtttcnattaacngaaatctcttantggtaan

SEQ ID NO: 3527 - DNA, 397 bp, Homo sapiens
  misc_feature (3)..(3): n equals a,t,g, or c
  misc_feature (7)..(7): n equals a,t,g, or c
  misc_feature (11)..(11): n equals a,t,g, or c
  misc_feature (24)..(24): n equals a,t,g, or c
  misc_feature (375)..(376): n equals a,t,g, or c
  misc_feature (379)..(379): n equals a,t,g, or c
  misc_feature (388)..(388): n equals a,t,g, or c
  misc_feature (391)..(391): n equals a,t,g, or c
ggngatntatnagctagagaggtnttccgtactacagggaaagctggtacgcctgcaggtaccggtccggaattcccgggtcgacccacgcgtccgacgccatccagccaggacatctgcaggtaacactctgcttcagatgctgccatgatcagtgtgcagccagaaataagcattagtgtctgtaggttcttgaatttccatttgcttaatcaatctgcctttggtctaaacagttggcgagttttatgtgtggtttgctcaccaagttacccatgctagtctcatttcttcactatgatgtctattctcttttaaaattgcttttactttctgtgcttttatcccactgttctgcatgcagttccagtgcanngtnttctgatgntgnaccaca

SEQ ID NO: 3528 - DNA, 230 bp, Homo sapiens
  misc_feature (9)..(9): n equals a,t,g, or c
  misc_feature (15)..(15): n equals a,t,g, or c
  misc_feature (61)..(61): n equals a,t,g, or c
  misc_feature (77)..(77): n equals a,t,g, or c
  misc_feature (88)..(88): n equals a,t,g, or c
  misc_feature (116)..(116): n equals a,t,g, or c
  misc_feature (165)..(166): n equals a,t,g, or c
  misc_feature (171)..(171): n equals a,t,g, or c
  misc_feature (187)..(187): n equals a,t,g, or c
  misc_feature (226)..(226): n equals a,t,g, or c
ccaagtttntgggtnaaattaccgccacgttcaactttattaaggggggggaaaaaaggcnttgggggttaaacggncccttggccanagggttaaccccgggggttccccggggnaaaatttttccccccgggggggttccggaaaacccccaaacggccgttnnccggnttggggggccttaacnttaaccggaaatgggggccggaaatggaaaagttttttncgga

SEQ ID NO: 3529 - DNA, 164 bp, Homo sapiens
  misc_feature (6)..(6): n equals a,t,g, or c
  misc_feature (9)..(9): n equals a,t,g, or c
  misc_feature (11)..(11): n equals a,t,g, or c
  misc_feature (23)..(23): n equals a,t,g, or c
  misc_feature (82)..(82): n equals a,t,g, or c
  misc_feature (85)..(85): n equals a,t,g, or c
  misc_feature (91)..(91): n equals a,t,g, or c
  misc_feature (97)..(97): n equals a,t,g, or c
  misc_feature (138)..(138): n equals a,t,g, or c
gcccangcntncgtacaattccnagcattcctgtggtgccagaactaccttgcccgaaagcctgtgcgagatttaccccgtnttncgcctncctccnaccggaaaactctgaggacatgaatagtcgccaggcttggnggctcttgctctcccaaggcagagga

SEQ ID NO: 3530 - DNA, 155 bp, Homo sapiens
  misc_feature (3)..(3): n equals a,t,g, or c
  misc_feature (23)..(23): n equals a,t,g, or c
  misc_feature (68)..(68): n equals a,t,g, or c
  misc_feature (87)..(87): n equals a,t,g, or c
  misc_feature (138)..(138): n equals a,t,g, or c
  misc_feature (150)..(150): n equals a,t,g, or c
  misc_feature (154)..(154): n equals a,t,g, or c
canttcccaggacgccccattgntctccctccgctttcctgcccggaggaagccacaccgtgtctttncagggggccaggaaacagntgtgggccagaggaatggaggggctgtgggatgaacacgatgacagccganattcgactctgnccana

SEQ ID NO: 3531 - DNA, 573 bp, Homo sapiens
  misc_feature (27)..(27): n equals a,t,g, or c
  misc_feature (34)..(34): n equals a,t,g, or c
  misc_feature (36)..(36): n equals a,t,g, or c
  misc_feature (56)..(56): n equals a,t,g, or c
  misc_feature (88)..(88): n equals a,t,g, or c
  misc_feature (99)..(99): n equals a,t,g, or c
  misc_feature (121)..(121): n equals a,t,g, or c
  misc_feature (125)..(125): n equals a,t,g, or c
  misc_feature (144)..(144): n equals a,t,g, or c
  misc_feature (147)..(147): n equals a,t,g, or c
  misc_feature (173)..(173): n equals a,t,g, or c
  misc_feature (187)..(187): n equals a,t,g, or c
  misc_feature (230)..(230): n equals a,t,g, or c
  misc_feature (233)..(234): n equals a,t,g, or c
  misc_feature (262)..(262): n equals a,t,g, or c
  misc_feature (290)..(290): n equals a,t,g, or c
  misc_feature (292)..(292): n equals a,t,g, or c
  misc_feature (326)..(326): n equals a,t,g, or c
  misc_feature (354)..(354): n equals a,t,g, or c
  misc_feature (369)..(370): n equals a,t,g, or c
  misc_feature (374)..(374): n equals a,t,g, or c
  misc_feature (384)..(384): n equals a,t,g, or c
  misc_feature (406)..(406): n equals a,t,g, or c
  misc_feature (427)..(427): n equals a,t,g, or c
  misc_feature (439)..(439): n equals a,t,g, or c
  misc_feature (450)..(450): n equals a,t,g, or c
  misc_feature (467)..(467): n equals a,t,g, or c
  misc_feature (506)..(506): n equals a,t,g, or c
  misc_feature (531)..(531): n equals a,t,g, or c
  misc_feature (534)..(534): n equals a,t,g, or c
  misc_feature (562)..(562): n equals a,t,g, or c
  misc_feature (571)..(571): n equals a,t,g, or c
gcccacgcgtccgggttgttttccttnaatctcncnctaccttcctcagaacctgntacaaggaaagatttatagactcgaaagcgtnaatgactgatnagacccatatgattgctcctgntgtntctgatattttaaaaaatnganttataaagagataaaaataaataatnaatggaaaaacttntggcatgggagagacatttagggaaagaagtcatttcagcctnccnnaacacacacatgcacacacacatacagnctatatcacacaatggaggtgaggaccnantcaatctaggctcatgactggctccatgggacanatgggtgggacaagtcatcctgctgcantcaggtagcagagannaccnaggagactangatgacagagacaaaataactngagaaaagatacaggagctanggggagagggtngaggtttgacnaagctctctcttcccantaagggagagttggaagccacagatgtaggtacagcccnttgttttccagatgatgaaacaggngcngtgatgttaagagcccccagtagtggtncatgtaccnag

SEQ ID NO: 3532 - DNA, 55 bp, Homo sapiens
  misc_feature (33)..(33): n equals a,t,g, or c
  misc_feature (39)..(39): n equals a,t,g, or c
  misc_feature (41)..(41): n equals a,t,g, or c
  misc_feature (47)..(47): n equals a,t,g, or c
  misc_feature (52)..(52): n equals a,t,g, or c
gctatttctagaatcgcgagcggccgccctttngggttngntttttnggggngaa

SEQ ID NO: 3533 - DNA, 583 bp, Homo sapiens
  misc_feature (418)..(418): n equals a,t,g, or c
  misc_feature (464)..(464): n equals a,t,g, or c
  misc_feature (471)..(471): n equals a,t,g, or c
  misc_feature (496)..(496): n equals a,t,g, or c
  misc_feature (515)..(515): n equals a,t,g, or c
  misc_feature (540)..(540): n equals a,t,g, or c
  misc_feature (542)..(542): n equals a,t,g, or c
  misc_feature (576)..(576): n equals a,t,g, or c
gccaaataataactccagatttcataattccagtttttacattccgttatctttctggtacaaccattcccattcagccttaaatctgagtcctttttagcagcaacttttttcctgggatcctccttcgtggtcttctaagtcagtgttagttttgaaatttttggccctgcataagttctgcatagcatctaatgtcaaaatagaaccaactggtaatcacagtattatttagtgtggtttccatgacaacaaaaatacatacgaagaaaacttctcaggttactatgctgaaattccaaaatgtctgagttttgaatagtgatcactttgttctggtattgacgcaattatattaggaaaaaagttggttgactgtttttgtttaattgacttctaaaatgttcaaattgtctanttctaaaagtttactaaatgcctagtgcagttaaacatactcttgnttaaagngtgtgttgctaaaattttttactgncattacttaaataatctgngtggcaaaaatgtgtggtcaagcantnttcccctcctttttttatcctcctattttcaggnagtcaaa

SEQ ID NO: 3534 - DNA, 55 bp, Homo sapiens
  misc_feature (32)..(32): n equals a,t,g, or c
  misc_feature (34)..(34): n equals a,t,g, or c
  misc_feature (41)..(41): n equals a,t,g, or c
  misc_feature (51)..(52): n equals a,t,g, or c
gcttaatgatggattgagttatctgggtggtntntagccantcatgggcanngta

SEQ ID NO: 3535 - DNA, 91 bp, Homo sapiens
  misc_feature (29)..(29): n equals a,t,g, or c
  misc_feature (42)..(42): n equals a,t,g, or c
  misc_feature (63)..(63): n equals a,t,g, or c
  misc_feature (83)..(83): n equals a,t,g, or c
  misc_feature (85)..(85): n equals a,t,g, or c
ggaaaaccccccattttcgggctaaaatnaccccacttcacnttaatcagtgtggtaaaaagncctggggctcaccggcactngnccaggg

SEQ ID NO: 3536 - DNA, 137 bp, Homo sapiens
  misc_feature (3)..(3): n equals a,t,g, or c
  misc_feature (15)..(16): n equals a,t,g, or c
  misc_feature (25)..(25): n equals a,t,g, or c
  misc_feature (52)..(52): n equals a,t,g, or c
  misc_feature (85)..(85): n equals a,t,g, or c
  misc_feature (90)..(90): n equals a,t,g, or c
  misc_feature (93)..(93): n equals a,t,g, or c
  misc_feature (96)..(96): n equals a,t,g, or c
ggngctgggtctctnngtcccgcanccgtgaggaggacggtctgcatactcnctgcccgccggctccctcccccgcgtccctgcnaccgncgnggntaagatggcctaaggagtgcaagtatctgatgaagtatgtt

SEQ ID NO: 3537 - DNA, 105 bp, Homo sapiens
  misc_feature (32)..(32): n equals a,t,g, or c
  misc_feature (53)..(53): n equals a,t,g, or c
  misc_feature (58)..(58): n equals a,t,g, or c
  misc_feature (76)..(76): n equals a,t,g, or c
  misc_feature (79)..(79): n equals a,t,g, or c
aaacgtaaataagtggcgagaaaaaggacttngggataaaccggacacatggncgaangggataaccccggggggnacncgggggaaaatgtgacgcacgggggg

SEQ ID NO: 3538 - DNA, 50 bp, Homo sapiens
  misc_feature (28)..(28): n equals a,t,g, or c
  misc_feature (32)..(32): n equals a,t,g, or c
  misc_feature (44)..(44): n equals a,t,g, or c
gttgccatagcatgtgtggtaggtgttnctgnattttgtttgtngaaaat

SEQ ID NO: 3539 - DNA, 534 bp, Homo sapiens
  misc_feature (5)..(5): n equals a,t,g, or c
  misc_feature (7)..(7): n equals a,t,g, or c
  misc_feature (16)..(16): n equals a,t,g, or c
  misc_feature (20)..(20): n equals a,t,g, or c
  misc_feature (23)..(23): n equals a,t,g, or c
  misc_feature (31)..(33): n equals a,t,g, or c
  misc_feature (36)..(38): n equals a,t,g, or c
  misc_feature (40)..(40): n equals a,t,g, or c
  misc_feature (44)..(44): n equals a,t,g, or c
  misc_feature (47)..(47): n equals a,t,g, or c
  misc_feature (60)..(60): n equals a,t,g, or c
  misc_feature (94)..(94): n equals a,t,g, or c
  misc_feature (107)..(107): n equals a,t,g, or c
  misc_feature (128)..(128): n equals a,t,g, or c
  misc_feature (163)..(163): n equals a,t,g, or c
  misc_feature (167)..(167): n equals a,t,g, or c
  misc_feature (213)..(213): n equals a,t,g, or c
  misc_feature (239)..(239): n equals a,t,g, or c
  misc_feature (243)..(243): n equals a,t,g, or c
  misc_feature (251)..(251): n equals a,t,g, or c
  misc_feature (316)..(316): n equals a,t,g, or c
  misc_feature (338)..(338): n equals a,t,g, or c
  misc_feature (353)..(353): n equals a,t,g, or c
  misc_feature (367)..(368): n equals a,t,g, or c
  misc_feature (408)..(408): n equals a,t,g, or c
  misc_feature (421)..(421): n equals a,t,g, or c
  misc_feature (433)..(433): n equals a,t,g, or c
  misc_feature (457)..(457): n equals a,t,g, or c
  misc_feature (483)..(483): n equals a,t,g, or c
  misc_feature (506)..(506): n equals a,t,g, or c
  misc_feature (521)..(521): n equals a,t,g, or c
  misc_feature (529)..(529): n equals a,t,g, or c
gatcncntgcattcantacngtnttaaatannnacnnnanttgngangactataactcgngtgtctactggacctcgggaaccaaccaatctanaccttgtcagccngatagccaaccctaggcgaanatagccccacctaggggggccccacctctcgctgntggngctcgcgtgtccgtaactctttgcacccctttaactgtggtaaggnagaaggtccctcctgggagaccctgngcgnacgcgaancaccgtgcctcagttctccaatgtaacaattggactcgtccttgtcgatcaagtcggttcttggnattagcccctaggctgtccaanttcgcgcacaagcangaggaactagcaannggaggctaggattgggtaggggtatgagggtgcgttgttnaacctgtctcttnggcacccctctnctctccttcttggccaccccttangcaattttgggcaattggtccccttngacctcgtgttatgccaattctntccaatttaaccatncttggaanttggc

SEQ ID NO: 3540 - DNA, 56 bp, Homo sapiens
  misc_feature (7)..(7): n equals a,t,g, or c
  misc_feature (22)..(22): n equals a,t,g, or c
  misc_feature (25)..(25): n equals a,t,g, or c
  misc_feature (30)..(30): n equals a,t,g, or c
  misc_feature (38)..(38): n equals a,t,g, or c
ggtggcngcagtctggggtcgncgncatcnactgctcntgggccaggcatggacaa

SEQ ID NO: 3541 - DNA, 464 bp, Homo sapiens
  misc_feature (450)..(450): n equals a,t,g, or c
ggctggcatagtggtgcacagtttactgtaacagctcagcccacctccagcagacagtgccatccaggaaaccaggcgctgccaggaattccagccctggccccaccttcccttcagcagtccgtgttgtctgggtagtctgtggccagtgtagccctgttgcagagtgaggtctccgctgaaaggagaactggcgtggtcgttgtttgaaaagaatcaggccccagcaaggttcactggaagctaacactggacgcagcagagtctgggtctgacaggaggtcagcgtcaccattttgagggtgatggacatgttttctgcactctagcactgtgtggaagcgctggctgacagcagcctggctgtccgaattccaaagaaatgggctccttctaaatattcaggtgctgctgcatactcgggagcacacgctttccttgcccttgcangtgggggtgtcctt

SEQ ID NO: 3542 - DNA, 463 bp, Homo sapiens
  misc_feature (409)..(409): n equals a,t,g, or c
  misc_feature (417)..(417): n equals a,t,g, or c
  misc_feature (419)..(419): n equals a,t,g, or c
  misc_feature (422)..(422): n equals a,t,g, or c
ggggaaataatagggaaaatacctattttatatgatgggggaaaaaaagtaatctttaaactggctggcccagagtttacattctaatttgcattgtgtcagaaacatgaaatgcttccaagcatgacaacttttaaagaaaaatatgatactctcagattttaagggggaaaactgttctctttaaaatatttgtctttaaacagcaactacagaagtggaagtgcttgatatgtaagtacttccacttgtgtatattttaatgaatattgatgttaacaagaggggaaaacaaaacacaggttttttcaatttatgctgctcatccaaagttgccacagatgatacttccaagtgataattttatttataaactaggtaaaatttggtgtggtccttttagaccacngatgcccntncanaccccatcttgctctaatgatcaaaacatgcttgaataact

SEQ ID NO: 3543 - DNA, 510 bp, Homo sapiens
  misc_feature (426)..(426): n equals a,t,g, or c
  misc_feature (483)..(483): n equals a,t,g, or c
  misc_feature (486)..(487): n equals a,t,g, or c
  misc_feature (489)..(489): n equals a,t,g, or c
ggggcagggctgagagcttggcagagactggaccatggcgtccccgccccagggctcgctcgtgtccaaagccaactccaagctgtgaacactgtaagcgctcgagtcctcctgggcagtgcagcaccgcggcccccgcccgcaagcctgcttggcgcagcgccttgctggcagccggcgcctcctagcccgccctctctgggctggcttgggcttctcgcttactctactctcctccgctctcggtcaaggtcggcggccttggatgctcgttcgcttctctttttaaaatgtctttttgtccctccccacctctttcctgtgatcatttattcactcggtccccgcccgccaacacacacatttatgaacccccactttttttttccttctccttttccttcccctcctcagggagcctcctcnttcagtcagtccatttgtcccttgatctggcctttgttgtccttaagtccccacggnttnntnttcacaagatgaataaaattt

SEQ ID NO: 3544 - DNA, 466 bp, Homo sapiens
  misc_feature (462)..(462): n equals a,t,g, or c
gcatatctgagctgtgtatcattttgtactccatagaggggctattgtgaagccacagccaaaatgttgatacaaaagatacgttctaatacttattcattcattgactatatgagaatagctcagggcctggtaaaactctggcaaacaagagatattgaatgaagtaggggatggctaatgatatttgggaggttgagaccagaatcagtatttggacaataatggagtaatactgcaggttgtcttcctccagtctgtccctaaaagaagagcaatttagaaaatggcaatacccagcaatgtgtttaaaatgctgagcaagtcgtaaaaagaaatatcttgtccacgttatgctgactatcagaggtctcctggtgttgcactgttactgggagcactgctaccatctttaaaaatgtaaatccctgctatttgctatccccctggggctcctgtgtnaaaa

SEQ ID NO: 3545 - DNA, 456 bp, Homo sapiens
  misc_feature (320)..(320): n equals a,t,g, or c
  misc_feature (440)..(441): n equals a,t,g, or c
  misc_feature (456)..(456): n equals a,t,g, or c
ggaagatttaaggaagaaaacttttcgatttcctttgaaaaatagaacacaaaactggcttgtaaatgtttttagaatgatgaataagtcattaattaattcagtgacgtatgttttctaggatccctctggctgttgtgctgagaacagaaggggtcaagggagtgggggagtaaaaatggaagcagggtgacgcatgcaggagtccagacaaaagacgggtgattttgctcaggttggtagcaacagaggtaatgagaagtagttggattttggatatattttgaaggaaggacctataagatttgctgatggcttanaagttaggtatgagttaagtcaaaaatgataccacagtttttggcctgaacaactggaaggacagaattaccattaactgatatggggaagaccgtggaaagaacagttttttggcattnngataaataatacacn

SEQ ID NO: 3546 - DNA, 447 bp, Homo sapiens
  misc_feature (385)..(385): n equals a,t,g, or c
  misc_feature (423)..(423): n equals a,t,g, or c
  misc_feature (440)..(440): n equals a,t,g, or c
gggcctccataggagtgacatttgctggtgtcagaagcttggcaagaggggaggatgatcagaccctgcatggacagttcgaattggagctctctgcagagtccaggaagagagctctggatgggagggaagccatggggtggaaaagatagcttccaatggaaggcagtgaaaactcgccataagtgaaggagaagaaggaggccaaggagagggggcaggaatggcagccggcagccaggcggtcagtggagcaggtgctcaggaggcccacaggagagcttcgtggaaggagtggacagtgtctgaggcaaggggcaaaaggcatctgctggagctggtgaccccagcttggtgccccccaaagccagagtacgaggctganaggatgcaggtgtcctcctaggaggtttgagtcataangcacgaggcagaagcantggggga

SEQ ID NO: 3547 - DNA, 378 bp, Homo sapiens
  misc_feature (47)..(47): n equals a,t,g, or c
  misc_feature (125)..(125): n equals a,t,g, or c
  misc_feature (154)..(154): n equals a,t,g, or c
  misc_feature (181)..(181): n equals a,t,g, or c
  misc_feature (195)..(195): n equals a,t,g, or c
  misc_feature (206)..(206): n equals a,t,g, or c
  misc_feature (208)..(208): n equals a,t,g, or c
  misc_feature (219)..(219): n equals a,t,g, or c
  misc_feature (222)..(222): n equals a,t,g, or c
  misc_feature (233)..(234): n equals a,t,g, or c
  misc_feature (237)..(238): n equals a,t,g, or c
  misc_feature (245)..(245): n equals a,t,g, or c
  misc_feature (254)..(254): n equals a,t,g, or c
  misc_feature (272)..(272): n equals a,t,g, or c
  misc_feature (297)..(297): n equals a,t,g, or c
  misc_feature (313)..(313): n equals a,t,g, or c
  misc_feature (316)..(316): n equals a,t,g, or c
  misc_feature (349)..(349): n equals a,t,g, or c
  misc_feature (376)..(376): n equals a,t,g, or c
ggacctgataagggaagatgaagaataagaaatgcctttgggacatncagatatgaaggtggaagaagtggttggtgctcaaggaaggggtctgagctagaggtagcaatgaggtgtgaaatatntatggatggaagtttaagttacgggcatngtgctgttacttacagagagagaccanagtgatgaggatgnttaagattgancntctgaggatcnttnacattgaaaanncanngtataanatgataagncagaaaaaggggcaagantgtaatcagagaggtagagaataanctagttaagtatatanagnatgcaaaggacagggagcatttctggaaatggngatcagggttaaaggctgacagatggnaa

SEQ ID NO: 3548 - DNA, 479 bp, Homo sapiens
  misc_feature (402)..(402): n equals a,t,g, or c
  misc_feature (452)..(452): n equals a,t,g, or c
  misc_feature (456)..(456): n equals a,t,g, or c
  misc_feature (477)..(477): n equals a,t,g, or c
ggaaaaagaaaagatggactagtgttcagatgctttccttgattcagaatcagcatgcctcttaaatactgaatatactaagatacacaaaacagtaatttagctttttcatattgatacatgaacttagtatttgatctcagcaaatttagtaaaataatcaggagcttttgatttgccacaaaaaatcattcctctaaactttatgaattgagaaaacttgtctttatttgatgattccagttttgatgttttgtgttattggtgaagttcagaaactcagaaacatagttgattccatagaaaattcaattcttgaagagtagaactttgaaggtgcaggatgaatatgtgtgttatgaatatgggtcatactttatgcttatgtaactgaacatgtanttttactggggcttccctttcttcattgcaaaaatacaacttatcctcantacntaatttattgactactacacnta

SEQ ID NO: 3549 - DNA, 142 bp, Homo sapiens
  misc_feature (10)..(10): n equals a,t,g, or c
  misc_feature (54)..(54): n equals a,t,g, or c
  misc_feature (70)..(70): n equals a,t,g, or c
  misc_feature (95)..(95): n equals a,t,g, or c
  misc_feature (99)..(99): n equals a,t,g, or c
  misc_feature (102)..(102): n equals a,t,g, or c
ccgactactntagggaaagctggtacgcctgcaggtaccggtccggaattcccnggtcgacccattcgtncggtaaaaaaccgttaggtcctggnattnatnaaatcacctttgttagaaaatgctgcgccttttaatgttg

SEQ ID NO: 3550 - DNA, 382 bp, Homo sapiens
  misc_feature (257)..(257): n equals a,t,g, or c
  misc_feature (318)..(318): n equals a,t,g, or c
  misc_feature (327)..(327): n equals a,t,g, or c
  misc_feature (331)..(331): n equals a,t,g, or c
  misc_feature (359)..(359): n equals a,t,g, or c
  misc_feature (368)..(368): n equals a,t,g, or c
ggcacgagctcgtgccggggccatagctgttactgaaggaagtagcctacgtccacgcctacaactgaagtctcttgacaaacacctcacccctgcctccgggatgaaagggggtaacctagacctgaatgggcttgaccatctcacaactgctcgcgtgacgaccgcattcgtggcaggtaagaagattgctgtatcaactcaagaaagcagtaacttcactgtctttgtattttgaattgcaacaacaactgtgntatcaacaatgaagcaatgatatctaagaacaaaagagtatttgccaacagtcatcataanatcaagtgnttgnataaggcagaacaagctgtcacagaccngtgcgtcantaatatatggggat

SEQ ID NO: 3551 - DNA, 460 bp, Homo sapiens
ggaactagcccggttgatgagcatgttgatattaacggcctggcttggccaaagcttccggcccagcacgctttagcatcagctggttattctgagaacattcttttcaaaacactctacaggacaaacaggccgagaggttcctttgtccacagctggcctctgaaactgagcagactctcaaagggttgagaagaaccccgaggaggctatcgtctgcactcagaggctgaaacgtttgaaaacaggtgcgggagggggcggggaggatggtcagtgacagcacattcttcagcaaacatgtgtcatttgtgcttttaccagagcggagttttaattcctaaaatataacagcctggtgcaggggctggaagaagagggcgcgttttatgtgcaactctgctaagggcttggttgctgaatgaaaggtttggttccatggaggttcaggtacctttcg

SEQ ID NO: 3552 - DNA, 125 bp, Homo sapiens
aaatgaaaacaccatagttctgctcagataacccaaattcactaatgttttactgttcgatataaaataaaaatgaaactatgtcatgctgataatgtttaccaagttatacttgaaataagtgt

SEQ ID NO: 3553 - DNA, 500 bp, Homo sapiens
  misc_feature (357)..(357): n equals a,t,g, or c
ccacaaccatatgatgagagatacagggtttaaacatggacaactcctgttaaaacctttatcaatgtgttcatcaactcagtaaccacagagttctgtcaacagctaaaaagagtttagaaaaagaggaagagctttgtttgtttactcctttgctgtgtacatccaaaatacaatggtgggagaagatttgttctagtttttcccaaagatactccttagggaatgcactcaaaagaacaaaataggttttctatgactccacagaaatagaatctgtagtattatttttgcttaaatgtgattaggtgtgaacattgctttgttatttgtttcctgattccagatttggaatanatagcccttgatacaggatttggagaagattttggtattaatcaatcatagacttcaggagatgatttcaataggtccttttctggaatttcatttcagtatagaaactgtatgggcagaatttttattattattattattat

SEQ ID NO: 3554 - DNA, 358 bp, Homo sapiens
cttaccaagtttaaacacaaaatttatcataacaaaaatactactaatataactactgtttccatgtcccatgatcccctctcttcctccccaccctgaaaaaaatgagttcctattttttctgggagagggggggattgattagaaaaaaatgtagtgtgttccatttaaaattttggcatatggcattttctaacttaggaagccacaatgttcttggcccatcatgacattgggtagcattaactgtaagttttgtgcttccaaatcactttttggtttttaagaatttcttgatactcttatagcctgccttcaattttgatcctttattctttctatttgtcaggtgcacaag

SEQ ID NO: 3555 - DNA, 371 bp, Homo sapiens
  misc_feature (360)..(360): n equals a,t,g, or c
  misc_feature (366)..(366): n equals a,t,g, or c
gtttggcgtgacatacctggaggactattcggcagagtacatcattcagcaaggtggctggggcactgtgtttagtcttgagtcagaggaggaggaataccctggaatcactgcagaagatagcaatgacatttacatcctgcccagcgacaactctggacaagtcagtcccccagagtctccaactgtgaccacttcctggcagtctgagagcttacctgtgtcactgtcggctagccagagttggcacacagaaagcctgccagtgtcactaggccctgagtcctggcagcagattgcaatggatcctgaagaagtgaaaagcttagacagcaacggagctggagagaagagtgagancaactnctcta

SEQ ID NO: 3556 - DNA, 367 bp, Homo sapiens
  misc_feature (5)..(6): n equals a,t,g, or c
  misc_feature (18)..(18): n equals a,t,g, or c
  misc_feature (20)..(20): n equals a,t,g, or c
  misc_feature (329)..(329): n equals a,t,g, or c
ctccnncccccccacctngngtacccacaagggcacatccttgtcacctttgcccccagccccccagactttcagccacagcttctttctcaactgaagacctggggaaggggtgctgtctgtgttctttcttccacttctgccctctcctagccttgagggtagatggtgtggttcttcagtattggatagtgcctgctctgcggacaaaggagaagtttaaattgtccgtagagaagggcatatgattggggcctttgggaaatggtaccaggtgagaagggggagcatggaggaaagatgtaatgggtactccttcttttcaaagncttatcctttaaaggaaaggcggtctctggagaaactg

SEQ ID NO: 3557 - DNA, 452 bp, Homo sapiens
caccttcaaactgtcacttcacgcaagactttaaaactggataataatattgcctcattatgttaacttttacggatgtgaaaagaatgatccctaaaagtataatcataattgttatctaataactattttaattcagtgtgaacatatgcatattcttatattacaatttctaaaataggaggcttgagagatgctatagtccattctttgaatgttctgatgaagcccaaaaagagttagtaaactgcttaacataacatggggactttgtgtcagagcattcagatgaggcttaagatatacttgccctgcatctttctaatatagagtgatagatgacttttaaaaatgtataaagcatctaaaggctgcacctggagtgatactgaagtaatgatttaacttacataaaagcttcttttttcttatttaaactaggaaaacctctg

SEQ ID NO: 3558 - DNA, 446 bp, Homo sapiens
  misc_feature (22)..(22): n equals a,t,g, or c
ggcagagataggatacatttgnattcttttctattttaataggaactatcatttcccagcatttttaaggatacaatctcctaattaaatttaaatgatataatatcctaattaaacagttattataaaaagtatagtgtgctccctaacttttgacatttcaaatttttaaaagaaatttaaaacatcaccactagcctgcactaggagcagcctgtaataacagtttttaaaagctttctgaactatttgacaagatttcttagtgctgaggccatatgctgtagcctttaagctatttcttcctatcagtttcattatcacctgcctctgagtctccaatatcatcagtaagcacatgcagaatcataattatgccatgtacaagttctttgataacatgtacagttttcttcttaattctttatcaaatgcattgatcgtgg

SEQ ID NO: 3559 - DNA, 531 bp, Homo sapiens
ctctgagctgctgccacctgctgggctggagctggagctggagctgcgaattcggagtcccggttccctgtgccacctggcgagctcagcaaactaaaagtctctttgtcttcatcgtttccggcactgatgtgagcacatcataagcacaagacctggacacctttacaatcagagggcctaggactggagctctggatctgaccggagcaaagaggaagcacgcaaatccggacatgacgacgaggaggcagtagagacccatcctcaactgttcttgtcctagagcctctttccctacttctaaatgagtggaaagccacccacaagcccgtgagtgaggatgcccttggtaaacccaggtgatcacaccctgggcaggccctgccccacagggccccatcccgctgctccccagcctgtcctcaccaactgcccaggcaggagcaaagcccacggggaggacctgtgaccacaggcaaggaccacggaccccagccccagggattttgacctcaagaaaggaaacat

SEQ ID NO: 3560 - DNA, 531 bp, Homo sapiens
ggctaagccaggactgcttttctggagtgataatgtgcttgcctgtgtctaagagaaagtaccctggctgataaatgggacttggattttaaataccattggataataaatgtatgtgatggctttggagcaaattgattgacaatggctaggagacagcttcccaaggctggaaagaggggagtgcggaacatgcctccaccataccactgcccacctcctgtgacctctgcagcaaaacctgaagccccaaagaggcagcttctcaaagtaaaagtggaatgaagttcctggtgacctgaattcccatggaggaaagaggaaaaggacattatgcaaggagatggcatctcgtgtccctggtgaaccaattccattaggaagacggtgcagtgtgaggtggacctggacctggataaaatgggtgtttaacaagtatttgttgagtaggtggtggaggaggcacgactagatgcagggtctagctgagttgacaagagctaacaccaggtgtggaccaggacaggggga

SEQ ID NO: 3561 - DNA, 471 bp, Homo sapiens
  misc_feature (13)..(13): n equals a,t,g, or c
  misc_feature (29)..(29): n equals a,t,g, or c
  misc_feature (38)..(38): n equals a,t,g, or c
  misc_feature (43)..(43): n equals a,t,g, or c
  misc_feature (55)..(55): n equals a,t,g, or c
  misc_feature (81)..(81): n equals a,t,g, or c
  misc_feature (92)..(92): n equals a,t,g, or c
  misc_feature (96)..(96): n equals a,t,g, or c
  misc_feature (274)..(274): n equals a,t,g, or c
  misc_feature (461)..(461): n equals a,t,g, or c
gactcatctcatnaagggaacaaagatgngctccaccnggtgnggccgctctagnaactagtgggtcccccgggctgcagnaattcggcagngcgncctgggctccagctttggctctggcgcgggctccagctccttcagccgcaccagctcctccagggccgtggttgtgaagaagatcgagacacgtgatgggaagctggtgtctgagtcctctgacgtcctgcccaagtgaacagctgcggcagcccctcccagcctacccctcctgcgnctgccccagagcctgggaaggaggccgctatgcagggtagcactgggaacaggagacccacctgaggctcagccctagccctcagcccacctggggagtttactacctggggaccccccttgcccatgcctccagctacaaaacaattcaattgctttttttttttggtccaaaataaaacctcagntagctctgcc

SEQ ID NO: 3562 - DNA, 756 bp, Homo sapiens
  misc_feature (214)..(214): n equals a,t,g, or c
  misc_feature (422)..(422): n equals a,t,g, or c
  misc_feature (432)..(432): n equals a,t,g, or c
  misc_feature (475)..(475): n equals a,t,g, or c
  misc_feature (541)..(541): n equals a,t,g, or c
  misc_feature (564)..(564): n equals a,t,g, or c
  misc_feature (617)..(617): n equals a,t,g, or c
  misc_feature (685)..(685): n equals a,t,g, or c
  misc_feature (717)..(717): n equals a,t,g, or c
  misc_feature (720)..(720): n equals a,t,g, or c
  misc_feature (741)..(741): n equals a,t,g, or c
  misc_feature (755)..(755): n equals a,t,g, or c
gctggtattgacgcaattatattaggaaaaaagttggttgactgtttttgtttaattgacttctaaaatgttcaaattgtctagttctaaaagtttactaaatgcctagtgcagttaaacatactcttgtttaagtgtgtgttgctaaattttttactgtcattactaaataatctgtgtggcaaaatgtgtgtcagcacttttccctcctttnttatctcctattttcaggagtcaaatgtagccataaactgtatccttgtctgacactttagctaaaaatttccagttaggggagtttattgccaaattaaatttggctgttccccccaacccatatagatattaaggaaggtgtacttaaaaaatgtttggactgcttttaaaacctgagcaatgtcattaatccatatgtggactantgatgaatanatattttcataagagtttaaatgctgatatttggtggaagtanagagtaactcatattctatcaattcaagtattcttactatggttgctttccctatttgttcaatanactgataatactggaatttatanagtttgagccattacaacttttgtgaggatgtgtttcaaacatttctggacanatcttattttgtatttctggaaaaatgttataatcttctaaaaccgcttaaaaaccaatgctcccaanctgaatattcttgaaaaaatttgtttttattnatnccatttgacatttccaatcantgctccatatacant

SEQ ID NO: 3563 - DNA, 357 bp, Homo sapiens
  misc_feature (173)..(173): n equals a,t,g, or c
  misc_feature (175)..(175): n equals a,t,g, or c
  misc_feature (178)..(178): n equals a,t,g, or c
  misc_feature (182)..(183): n equals a,t,g, or c
  misc_feature (186)..(186): n equals a,t,g, or c
  misc_feature (234)..(234): n equals a,t,g, or c
  misc_feature (243)..(243): n equals a,t,g, or c
  misc_feature (247)..(247): n equals a,t,g, or c
  misc_feature (303)..(303): n equals a,t,g, or c
  misc_feature (306)..(306): n equals a,t,g, or c
  misc_feature (317)..(317): n equals a,t,g, or c
  misc_feature (349)..(349): n equals a,t,g, or c
  misc_feature (353)..(353): n equals a,t,g, or c
cccacgcgtccgcccacgcgtccgtgaaaatcaagatcaagcgagcttttgcccttctgctccacgggaggtttctgtcctccctgagctcgccttaggacacctgcgttaccgtttgacaggtgtaccgccccagtcaaactccccacctggcactgtccccggagcgggtngngcncggnnggngcgcggccgggcgcttggcgccagaagcgagagcccctcggggctcgnccccccgcntcancgggtcagtgaaaaaacgatcagagtagtggtatttcaccggcggcccgcaaggancgngaaacccgggnccggggccccttcgcggggaaaacgggggggngccngggg

SEQ ID NO: 3564 - DNA, 59 bp, Homo sapiens
  misc_feature (16)..(16): n equals a,t,g, or c
  misc_feature (35)..(35): n equals a,t,g, or c
  misc_feature (52)..(53): n equals a,t,g, or c
gaatcccggctccganccccggactcgcgcccgcncgcacgcccgcaccttnnccctcc

SEQ ID NO: 3565 - DNA, 156 bp, Homo sapiens
  misc_feature (8)..(8): n equals a,t,g, or c
  misc_feature (23)..(23): n equals a,t,g, or c
  misc_feature (36)..(36): n equals a,t,g, or c
  misc_feature (51)..(51): n equals a,t,g, or c
  misc_feature (69)..(69): n equals a,t,g, or c
  misc_feature (105)..(105): n equals a,t,g, or c
  misc_feature (112)..(112): n equals a,t,g, or c
  misc_feature (139)..(139): n equals a,t,g, or c
  misc_feature (154)..(154): n equals a,t,g, or c
gagcttgnagggaacgaacttgntagaatacttggnaaaagagaaactaangaaagaagctgccaaaangcttgagcagtcaaaagaggcagatatagattccantgatganagtgatattgaggaagatattgaccanccatcagctcataanac

SEQ ID NO: 3566 - DNA, 482 bp, Homo sapiens
  misc_feature (478)..(482): n equals a,t,g, or c
gaagatatttatctatgaagatataaatggtgcagagagactttcatctgtggattgcgttgtttcttagggttcctagcactgatgcctgcacaagcatgtgatatgtgaaataaaatggattcttctatagctaaatgagttccctctggggagagttctggtactgcaatcacaatgccagatggtgtttatgggctatttgtgtaagtaagtggtaagatgctatgaagtaagtgtgtttgttttcatcttatggaaactcttgatgcatgtgcttttgtatggaataaattttggtgcaatatgatgtcattcaactttgcattgaattgaattttggttgtatttatatgtattatacctgtcacgcttctagttgcttcaaccattttataaccatttttgtacatattttacttgaaaatattttaaatggaaatttaaataaacatttgatagtttacataaaaaaaannnnn

SEQ ID NO: 3567 - DNA, 60 bp, Homo sapiens
  misc_feature (2)..(2): n equals a,t,g, or c
  misc_feature (10)..(10): n equals a,t,g, or c
  misc_feature (23)..(23): n equals a,t,g, or c
  misc_feature (53)..(53): n equals a,t,g, or c
  misc_feature (55)..(55): n equals a,t,g, or c
tncaagatgncggagcaggagtnggtggctcagttgtacatgaccctgaaggncnaggag

SEQ ID NO: 3568 - DNA, 573 bp, Homo sapiens
  misc_feature (376)..(376): n equals a,t,g, or c
  misc_feature (407)..(407): n equals a,t,g, or c
  misc_feature (416)..(416): n equals a,t,g, or c
  misc_feature (444)..(444): n equals a,t,g, or c
  misc_feature (491)..(491): n equals a,t,g, or c
  misc_feature (495)..(495): n equals a,t,g, or c
  misc_feature (529)..(529): n equals a,t,g, or c
  misc_feature (549)..(549): n equals a,t,g, or c
  misc_feature (567)..(567): n equals a,t,g, or c
  misc_feature (571)..(571): n equals a,t,g, or c
cccacgcgtccgtaaatgagaagtaaaattttctaagttaataaagatgaagaatgggtgactattatgatgaaccataactaaatgtcttattaaagcaactgagtgtctagccctaaattaaccaggtaaaaactgttaacactaacctgaagttttgtgaataactgttctttaacttattgagatgttgcaagaaatgcacatccagggtggactgggagctatgaaatgactaaattcctccttgcagtgtttaccttcaagattgtataggtaatctctcctcttcttcccccagtccccattacttattgcacactgttttaactgactccgttttgatattaatcaccaggaccataaactcatcaanaggaatttctggagtatactcacgactgtcnttgatttangttcctaaatttttttaggatagggtanggttgtgcctgggcagaaattcctttttgggcctaaatttttaactntccntttccccagcttggcctggagtcctccccttaanccggggttttcccccttaancacccaatggatgggaancccngg

SEQ ID NO: 3569 - DNA, 435 bp, Homo sapiens
  misc_feature (5)..(5): n equals a,t,g, or c
  misc_feature (180)..(180): n equals a,t,g, or c
  misc_feature (192)..(192): n equals a,t,g, or c
  misc_feature (330)..(330): n equals a,t,g, or c
  misc_feature (347)..(347): n equals a,t,g, or c
  misc_feature (365)..(365): n equals a,t,g, or c
  misc_feature (375)..(376): n equals a,t,g, or c
  misc_feature (413)..(413): n equals a,t,g, or c
ggagnaattggtcaaaagtggctttttgtttccccaaggggaaagactggctttgtaattataattttttccttatttattttacttaaaactggtagagtctaagtattatatgaagtgcccatgattctgtcagtaaatttgaacatatttttattagttaatgtcagtttaagttgnccttttgtttgnttctatttttaaggtgaattttaatttctatctgaaatcagttaagataccttgagaaaaactgcagtgagaggagataaatatcctttttcaggaggaactgatatctctggctaaatatttgccttttattatggnttctaaatcagctattntcttcagctttaatttcntaaaattaannaactattttaaaaattcctgtagatggtggaaataantaaaaattcctggcgcagtggg

SEQ ID NO: 3570 - DNA, 409 bp, Homo sapiens
  misc_feature (20)..(20): n equals a,t,g, or c
  misc_feature (256)..(256): n equals a,t,g, or c
  misc_feature (367)..(368): n equals a,t,g, or c
  misc_feature (377)..(377): n equals a,t,g, or c
  misc_feature (395)..(395): n equals a,t,g, or c
  misc_feature (408)..(408): n equals a,t,g, or c
gattctttttccctttcgtnactttgctcatgtactgtattccttcaacttcattaatgaatccatttggaagcagtgaaaaaggcaactcagaaagctaagaagaaatagatagaggaatactcagagctatctgagtattttctttagtttgttagctctttggagctttgaaactggaaagacccagggagtgatgtggagaaagagactgagcttgtaagacacaggagcagtgagctaagggagatggagnagtggggacaaattctggcacattctgtctacactctgggtagatagaggagggaggatggagcacccatggagggggtatgttggtgacagcattttcccaccagccagnngtaacaagnggctgatttgggggaaangatggcatacacna

SEQ ID NO: 3571 - DNA, 101 bp, Homo sapiens
  misc_feature (43)..(43): n equals a,t,g, or c
  misc_feature (61)..(61): n equals a,t,g, or c
  misc_feature (66)..(66): n equals a,t,g, or c
  misc_feature (82)..(82): n equals a,t,g, or c
  misc_feature (100)..(100): n equals a,t,g, or c
gaagaaagctacatgaattaattgtactctatgggaaaatttntttggaaagatattttgnaaaanttttttttccaagtanaaactttatgaaacttgnt

SEQ ID NO: 3572 - DNA, 393 bp, Homo sapiens
  misc_feature (287)..(287): n equals a,t,g, or c
  misc_feature (329)..(329): n equals a,t,g, or c
  misc_feature (343)..(343): n equals a,t,g, or c
  misc_feature (346)..(346): n equals a,t,g, or c
  misc_feature (360)..(360): n equals a,t,g, or c
  misc_feature (378)..(378): n equals a,t,g, or c
gagataaggttcaaaagtgttataagaagatattcctttttttgtcctagagaacttattttcctgtgaaaatgcctaccacaaagaagacattgatgttcttatcaagctttttcaccagccttgggtccttcattgtaatttgctctattcttgggacacaagcatggatcaccagtacaattgctgttagagactctgcttcaaatgggagcattttcatcacttacggactttttcgtggggagagtagtgaagaattgagtcacggacttgcagaaccaaanaaaaagttttgcagtttttagaaaatactgaataattctttnccaaaaaaaacctntgncatttcggggggantattcctggttccctggngcctgaagtttgaat

SEQ ID NO: 3573 - DNA, 333 bp, Homo sapiens
  misc_feature (143)..(143): n equals a,t,g, or c
  misc_feature (164)..(164): n equals a,t,g, or c
  misc_feature (244)..(244): n equals a,t,g, or c
gaaaagaactttcgagacttagaaaagtagccttcgtatgccagatactagcatattattagcaatctagaaaattcagttgtatggcctggctcattctctgatactggataaaatgattcataatcattaattcaattttnattagttatgttccaaaatgncactgagtattttaaacaaaagtagtaggtaagataactgactataaggaatgagtacagtaattttcctttttctaggncaccaacaatggctggaggtttgtttgccatgaacagacagtatttccatggaacttggacagtatgatagtggcatggatatctgggg

SEQ ID NO: 3574 - DNA, 158 bp, Homo sapiens
  misc_feature (7)..(7): n equals a,t,g, or c
  misc_feature (23)..(23): n equals a,t,g, or c
  misc_feature (38)..(39): n equals a,t,g, or c
  misc_feature (88)..(88): n equals a,t,g, or c
  misc_feature (110)..(110): n equals a,t,g, or c
  misc_feature (125)..(125): n equals a,t,g, or c
  misc_feature (131)..(131): n equals a,t,g, or c
  misc_feature (154)..(154): n equals a,t,g, or c
cacagangcacatcagtcccgangcttcctgtgaggtnnacgctccgcagcccagcccagccgggagaccacgtggccattggcggtntcctgaccttgggccagtgaanctgccagccttccangagcanggcggccggagagctgcccctgnagta

SEQ ID NO: 3575 - DNA, 76 bp, Homo sapiens
  misc_feature (32)..(32): n equals a,t,g, or c
  misc_feature (45)..(45): n equals a,t,g, or c
  misc_feature (55)..(55): n equals a,t,g, or c
  misc_feature (59)..(59): n equals a,t,g, or c
  misc_feature (64)..(64): n equals a,t,g, or c
tcgacccacgcgtccgcccacgcgtccggtgnttagtatccccgncctgtgggcngccncagtntcccctcctaag

SEQ ID NO: 3576 - DNA, 433 bp, Homo sapiens
  misc_feature (5)..(5): n equals a,t,g, or c
  misc_feature (60)..(60): n equals a,t,g, or c
  misc_feature (63)..(63): n equals a,t,g, or c
  misc_feature (85)..(85): n equals a,t,g, or c
  misc_feature (94)..(94): n equals a,t,g, or c
  misc_feature (141)..(141): n equals a,t,g, or c
  misc_feature (191)..(191): n equals a,t,g, or c
  misc_feature (197)..(197): n equals a,t,g, or c
  misc_feature (219)..(219): n equals a,t,g, or c
  misc_feature (266)..(266): n equals a,t,g, or c
  misc_feature (283)..(283): n equals a,t,g, or c
  misc_feature (299)..(299): n equals a,t,g, or c
  misc_feature (319)..(319): n equals a,t,g, or c
  misc_feature (331)..(331): n equals a,t,g, or c
  misc_feature (362)..(362): n equals a,t,g, or c
  misc_feature (387)..(387): n equals a,t,g, or c
  misc_feature (394)..(394): n equals a,t,g, or c
  misc_feature (405)..(405): n equals a,t,g, or c
  misc_feature (432)..(432): n equals a,t,g, or c
ctatntggaaagctggccgcctgcaggtaccggtccggaattcccgggttgacccacgcnttnggtttttttcttcagtaacaanagaaacccnagttgggagtttaacaaataactgactaccactcactcatgcatttntatttccaattaaagcaaagcactgtgctgtgctcagataataatagttngtaagnaaaagtttttagttttcagtgntcaggttatagaatataactgaccataaaaattacctgcaggtattnactttttatgaactagnttttaaattaccaagnaattactggtgtcattttgntttatgacaganacacgtatctaacaaacaaacaaacagtgancttctccatgggtcaaggacttccntacaatntctcctgagtnaacttttgtgaaaataatacctaaggnt

SEQ ID NO: 3577 - DNA, 454 bp, Homo sapiens
  misc_feature (338)..(338): n equals a,t,g, or c
  misc_feature (402)..(402): n equals a,t,g, or c
  misc_feature (406)..(407): n equals a,t,g, or c
  misc_feature (439)..(440): n equals a,t,g, or c
ggggggtccagtctgtgatccttggtgctgtgtgccccactccagcctggggaccccacttcagaaggtaggggccgtgtcccgcggtgctgactgaggcctgcttccccctccccctcctgctgtgctggaattccacagggaccagggccaccgcagggactgtctcagaagacttgatttttccgtccctttttctccacactccactgacaaacgtccccagcggtttccacttgtggggcttcaagtgttttcaagcacaacccaccacaacaagcaagtgcatttcagtcgttgtgcttttttgtttgtgctaaagtcttactaatttaaanatgtgtcggcaccagttaattaatttccatggtcagtcagcttgctgtcttcgtgcgagtgcangctnncctgttgggtccagcagcagggcatcatgtanntggcgacagtgaac

SEQ ID NO: 3578 - DNA, 465 bp, Homo sapiens
  misc_feature (373)..(373): n equals a,t,g, or c
  misc_feature (382)..(382): n equals a,t,g, or c
  misc_feature (413)..(413): n equals a,t,g, or c
  misc_feature (431)..(431): n equals a,t,g, or c
  misc_feature (460)..(460): n equals a,t,g, or c
gcttggccgagatcggcgccgtgactctggtcagcgccccgcgtccagactctcggcaccacagcctggccctgacatccttcaagcgccagcaagaggagagcttccaggagcagagcgccttggcagctgaggcccgggagacccgtcgtcaggagctcctggagaagattacggagggccaggctgctaagaagcagaaactagaacaggcttcaggggccagctcaagccaggaggccggctcgagccaggctgccaaagaggatgagaccagtgatggccaggcttcgggagagcaggaggaagctggcccctcgtcttcccaagcaggaccctcaaatggggtagcccccttgccagatctgctctncttgtccanctggccactgcaggcctcgaccggtcaaggncaggcccctggactggcntgtccagtctaaagactggcccacccggncgcct

SEQ ID NO: 3579 - DNA, 68 bp, Homo sapiens
  misc_feature (9)..(9): n equals a,t,g, or c
  misc_feature (54)..(54): n equals a,t,g, or c
  misc_feature (56)..(56): n equals a,t,g, or c
  misc_feature (61)..(61): n equals a,t,g, or c
  misc_feature (68)..(68): n equals a,t,g, or c
ggggagacncgcgggtctggctgcgagagaccatgggggctcagctaagcggcngncgtgnctgcccn

SEQ ID NO: 3580 - DNA, 387 bp, Homo sapiens
  misc_feature (7)..(7): n equals a,t,g, or c
  misc_feature (14)..(14): n equals a,t,g, or c
  misc_feature (211)..(211): n equals a,t,g, or c
  misc_feature (232)..(232): n equals a,t,g, or c
  misc_feature (313)..(313): n equals a,t,g, or c
  misc_feature (345)..(346): n equals a,t,g, or c
  misc_feature (370)..(370): n equals a,t,g, or c
  misc_feature (382)..(382): n equals a,t,g, or c
taatggngaatggnaaattgtaagcgttaatattttgttaaaattcgcgttaaatttttgttaaatcagctcattttttaaccaataggccgaaatcggcaaaatcccttataaatcaaaagaatagaccgagatagggttgagtgttgttccagtttggaacaagtagtccactattaaagaacgtggactccaacgtacaaagggcganaaaccgtctatcagggcgatngcccactacgtgaaccatcaccctaatcaagttttttggggtcgaggtgccgttaaagcactaaatcggaaccccaaaggnagcccccgattttagagcctgacgggggaaanncggcgaacttggcgagaaaagcangggaagaaaccnaaaga

SEQ ID NO: 3581 - DNA, 232 bp, Homo sapiens
  misc_feature (34)..(34): n equals a,t,g, or c
  misc_feature (38)..(38): n equals a,t,g, or c
  misc_feature (78)..(78): n equals a,t,g, or c
  misc_feature (95)..(95): n equals a,t,g, or c
  misc_feature (104)..(104): n equals a,t,g, or c
  misc_feature (108)..(108): n equals a,t,g, or c
  misc_feature (114)..(114): n equals a,t,g, or c
  misc_feature (118)..(118): n equals a,t,g, or c
  misc_feature (154)..(154): n equals a,t,g, or c
  misc_feature (180)..(180): n equals a,t,g, or c
  misc_feature (182)..(182): n equals a,t,g, or c
  misc_feature (202)..(202): n equals a,t,g, or c
  misc_feature (224)..(224): n equals a,t,g, or c
ggcacgagctactcagaggaaggggcggttggtncggnctccattgttcgtgttttaaggcgccatgaggggtgacanaggccgtggtcgtggtnggcgctttngttncagagnaggnccagaggagggttcaagccctttgttaccacatatnccattggacttctatttgtgtgaaanangccttttcccgggtcaaagncagcaactgtggaaactttctncaatgagg

SEQ ID NO: 3582 - DNA, 310 bp, Homo sapiens
  misc_feature (172)..(172): n equals a,t,g, or c
  misc_feature (187)..(187): n equals a,t,g, or c
  misc_feature (195)..(195): n equals a,t,g, or c
  misc_feature (229)..(229): n equals a,t,g, or c
  misc_feature (274)..(274): n equals a,t,g, or c
  misc_feature (282)..(282): n equals a,t,g, or c
tttgcaagttacttgaaaaggtttgtgattttccaacgccctgagtaattctagccaaaatgcgtgactcgcctcacactagatgcttgctgtaattgtgtctctgtattaaactgaccgttctttggagcttcggaatggaccaggaggaaaaggtaaataccaacctcgntacaacctcagaggnatcaacgncctcctgctacagacgcatctgttctcgcctggntcctgccggctgccctgggagaggccacaaaatgccctccacggngacaaggnctgagaaccttcgggacggccgctgccg

SEQ ID NO: 3583 - DNA, 152 bp, Homo sapiens
  misc_feature (11)..(11): n equals a,t,g, or c
  misc_feature (20)..(20): n equals a,t,g, or c
  misc_feature (68)..(68): n equals a,t,g, or c
  misc_feature (75)..(75): n equals a,t,g, or c
  misc_feature (91)..(91): n equals a,t,g, or c
  misc_feature (103)..(103): n equals a,t,g, or c
  misc_feature (150)..(150): n equals a,t,g, or c
aggactaagtnctcattgtncaaatagagctgttcaacatcactaaaacatttaagaaaagccctganatcagtnattcctacaagtttangtagtagacagntactatccagctctaagtctcaactgctctttaatactgtacttttntt

SEQ ID NO: 3584 - DNA, 141 bp, Homo sapiens
  misc_feature (8)..(9): n equals a,t,g, or c
  misc_feature (65)..(65): n equals a,t,g, or c
  misc_feature (70)..(70): n equals a,t,g, or c
  misc_feature (85)..(85): n equals a,t,g, or c
  misc_feature (108)..(108): n equals a,t,g, or c
  misc_feature (118)..(118): n equals a,t,g, or c
tagaacgnnactccgtgcagagtaccggtccggaattcccgggtcgacccacgcgtccgagcatntctanttgtctcaacccttnaagcaatatgtattataaactcngagaacagangtgcaatgtgtatgggaggaaca

SEQ ID NO: 3585 - DNA, 133 bp, Homo sapiens
  misc_feature (7)..(7): n equals a,t,g, or c
  misc_feature (16)..(17): n equals a,t,g, or c
  misc_feature (64)..(64): n equals a,t,g, or c
  misc_feature (90)..(90): n equals a,t,g, or c
  misc_feature (119)..(119): n equals a,t,g, or c
  misc_feature (124)..(124): n equals a,t,g, or c
  misc_feature (133)..(133): n equals a,t,g, or c
ttggaanaccgcctannaaggacgcctgcaggtaccggtccggaattcccgggcccaacagatngcgcagcctgaatggcgaatgggacngctccctgtaacaggcgcattaagccgcngcggngtgtggcgn

SEQ ID NO: 3586 - DNA, 544 bp, Homo sapiens
  misc_feature (37)..(37): n equals a,t,g, or c
  misc_feature (40)..(40): n equals a,t,g, or c
  misc_feature (78)..(78): n equals a,t,g, or c
  misc_feature (115)..(115): n equals a,t,g, or c
  misc_feature (161)..(161): n equals a,t,g, or c
  misc_feature (248)..(248): n equals a,t,g, or c
  misc_feature (461)..(461): n equals a,t,g, or c
  misc_feature (493)..(493): n equals a,t,g, or c
  misc_feature (526)..(526): n equals a,t,g, or c
  misc_feature (529)..(529): n equals a,t,g, or c
  misc_feature (539)..(539): n equals a,t,g, or c
gcgtctccacttgtggaaagccacaggaagagaaggnaanaccagcgcatgcccagtgggaacgccgtgctccatggncgtggagggcacgggtgccacccacaaaccacaccangaggcgctgcagccaccagggccccaggctcgttttcctttatagncgaagcaaaaaacacaagaccctccgcccgagtaaattcttcagccacgaagggatggatgtgcatctgccctaagtcagattgaancctcctcctaggctccaggaggagcatgtgcaggaagggttggcctgacccaaaaccggcaccccagctccttcctccagctccccgcacccaccggccctgacctggcttcccctcggctgtgtagggacaaagccgaagcccagtgccatgactgcccgcggattgaaaaacagaaacacaaaactttgactttgacttgcgaaattgaancaaggttttcatttttactctcccttggtttnagttctcagaaaagaaagaatcctgaccttganaangaaggcccanttgaa

SEQ ID NO: 3587 - DNA, 412 bp, Homo sapiens
  misc_feature (260)..(260): n equals a,t,g, or c
  misc_feature (283)..(283): n equals a,t,g, or c
  misc_feature (285)..(285): n equals a,t,g, or c
  misc_feature (291)..(291): n equals a,t,g, or c
  misc_feature (347)..(347): n equals a,t,g, or c
  misc_feature (357)..(357): n equals a,t,g, or c
  misc_feature (359)..(359): n equals a,t,g, or c
  misc_feature (383)..(383): n equals a,t,g, or c
  misc_feature (392)..(392): n equals a,t,g, or c
gcattatcctgttcagagcttggagatgtacaagggacataggagcaatttacactgacacacagctgctgtaccagtgaaaacgaggctttgcaagcttgtacctactatataacatgtgcttggttgatggccatgcattttcagtcagaatttatatataaatatatgcacccatttttttgagtgcatataatttagacctaaaaatccttatgattaggtgaaacaccaaaaatataaggaaaataacacaacanaggaatagcttagcctgaacagngngatggncccagctactacatcagatgcggtttttttgctcccttatgttcttcggatatggntatggcattngnaggcttggaggtaaagaactgaanataactggngctggatagaggagccttat

SEQ ID NO: 3588 - DNA, 89 bp, Homo sapiens
  misc_feature (38)..(38): n equals a,t,g, or c
  misc_feature (51)..(52): n equals a,t,g, or c
  misc_feature (58)..(58): n equals a,t,g, or c
  misc_feature (68)..(68): n equals a,t,g, or c
gcacgggccggaggtcccggggctgctgggcgcgggcngtgggctgcgcgnngaccgntggactgggncccgggcacgccccgccaagc

SEQ ID NO: 3589 - DNA, 270 bp, Homo sapiens
  misc_feature (105)..(105): n equals a,t,g, or c
  misc_feature (118)..(118): n equals a,t,g, or c
  misc_feature (157)..(157): n equals a,t,g, or c
  misc_feature (239)..(239): n equals a,t,g, or c
  misc_feature (241)..(241): n equals a,t,g, or c
  misc_feature (249)..(249): n equals a,t,g, or c
  misc_feature (252)..(252): n equals a,t,g, or c
  misc_feature (269)..(269): n equals a,t,g, or c
gcccacgcgtccgcggtacgcgtgggcaagcacctaagttttcggggtgacagtccctccccctcatcctttgcagaggtaacccagggctggagtcgggagaangctgatgacatanattccaatccctgcctccttccatctcggaccgttggangcagggcctgcaccccagtgggaagcaaaggaagccaccgctcaaagacacccccccacccaaaaaaaaggggaaaaaaaananactcggtnatngacaaaccggtttttant

SEQ ID NO: 3590 - DNA, 123 bp, Homo sapiens
  misc_feature (12)..(12): n equals a,t,g, or c
  misc_feature (46)..(46): n equals a,t,g, or c
  misc_feature (74)..(74): n equals a,t,g, or c
  misc_feature (83)..(83): n equals a,t,g, or c
  misc_feature (94)..(94): n equals a,t,g, or c
  misc_feature (112)..(112): n equals a,t,g, or c
aatcacactgtncaaaccttcttctctcctgttaacaatgggcaancccccaactatataaatattcacagagnagaacaaantgtgtgtgttnggggggccccacaaaccngttctccccac

SEQ ID NO: 3591 - DNA, 97 bp, Homo sapiens
  misc_feature (64)..(64): n equals a,t,g, or c
gcggacgcgtgggcggacgcgtgggcggacgcgtgggcaggaagatggaatgcaccaactctcngtctctgtgggtacatgccaggcctgtccattt

SEQ ID NO: 3592 - DNA, 345 bp, Homo sapiens
  misc_feature (22)..(22): n equals a,t,g, or c
  misc_feature (35)..(35): n equals a,t,g, or c
  misc_feature (61)..(61): n equals a,t,g, or c
  misc_feature (64)..(64): n equals a,t,g, or c
  misc_feature (85)..(85): n equals a,t,g, or c
  misc_feature (112)..(112): n equals a,t,g, or c
  misc_feature (115)..(115): n equals a,t,g, or c
  misc_feature (117)..(117): n equals a,t,g, or c
  misc_feature (125)..(125): n equals a,t,g, or c
  misc_feature (131)..(131): n equals a,t,g, or c
  misc_feature (164)..(164): n equals a,t,g, or c
  misc_feature (167)..(167): n equals a,t,g, or c
  misc_feature (182)..(182): n equals a,t,g, or c
  misc_feature (199)..(199): n equals a,t,g, or c
  misc_feature (211)..(211): n equals a,t,g, or c
  misc_feature (240)..(240): n equals a,t,g, or c
  misc_feature (265)..(265): n equals a,t,g, or c
  misc_feature (271)..(271): n equals a,t,g, or c
  misc_feature (273)..(273): n equals a,t,g, or c
gcttcttaaaattaacgcactnccacttaattagngggaaaaaagcttgggttaccgcctngcnagggttaccggggtccggggnaaatttcccccgggggtccgaaccccnacngncggttccngaactnaagtttcttaagaatccgcggaaagcggggccngcntccttaagaaagggnatccccaaaggcctttnaccgtttaccgnccgtttggcaattgcggaacggttccatnaagcttctttccttattaagttggntcaccntnaaaaatttcaaatttccactggggccggtccgtttttaacaaaccgttccgtgaacttggggggaaaaaacc

SEQ ID NO: 3593 - DNA, 167 bp, Homo sapiens
  misc_feature (6)..(6): n equals a,t,g, or c
  misc_feature (9)..(9): n equals a,t,g, or c
  misc_feature (26)..(26): n equals a,t,g, or c
  misc_feature (63)..(63): n equals a,t,g, or c
  misc_feature (78)..(78): n equals a,t,g, or c
  misc_feature (125)..(125): n equals a,t,g, or c
  misc_feature (128)..(128): n equals a,t,g, or c
  misc_feature (130)..(130): n equals a,t,g, or c
  misc_feature (152)..(152): n equals a,t,g, or c
accctnctnccactttaattttttanaagaaaaaaagctttgggggttaaccgccctttgggngacccgtttaacccnggggtttcccgggggaaaatttccccccggggggtttccgaaccccnacngncggtttcccggcggggaacggncggtttggggggctt

SEQ ID NO: 3594 - DNA, 343 bp, Homo sapiens
  misc_feature (164)..(164): n equals a,t,g, or c
  misc_feature (308)..(309): n equals a,t,g, or c
  misc_feature (311)..(311): n equals a,t,g, or c
  misc_feature (314)..(314): n equals a,t,g, or c
  misc_feature (330)..(330): n equals a,t,g, or c
gactaattataaatagctgtagttagtgagacatatgcatatttctgtgtacttgtttttataaaatgtatttgattaaattgacttttacctgctatatgatattattctctttctttatggttatcagggaaagaaccacaaagaaacgggttcttaaggancaagttaggatgttctttggtcacttgaaaccaaaactgaatgtctttcaacccaactgaatgttcttcatgaaatactggaattaaatgaagggaactgcttattctaattcttatatcagttttaaaaccatattatttttnnanccngaaaaccggaaggatnagttccctcccga

SEQ ID NO: 3595 - DNA, 65 bp, Homo sapiens
  misc_feature (10)..(10): n equals a,t,g, or c
  misc_feature (12)..(12): n equals a,t,g, or c
  misc_feature (31)..(31): n equals a,t,g, or c
  misc_feature (39)..(39): n equals a,t,g, or c
ggggtttcgntngcgaggactcttcggggangtggcctncgcttgtatacactgcgacccccgag

SEQ ID NO: 3596 - DNA, 159 bp, Homo sapiens
  misc_feature (11)..(11): n equals a,t,g, or c
  misc_feature (23)..(23): n equals a,t,g, or c
  misc_feature (35)..(35): n equals a,t,g, or c
  misc_feature (41)..(41): n equals a,t,g, or c
  misc_feature (100)..(100): n equals a,t,g, or c
  misc_feature (103)..(103): n equals a,t,g, or c
  misc_feature (115)..(115): n equals a,t,g, or c
  misc_feature (117)..(117): n equals a,t,g, or c
  misc_feature (126)..(126): n equals a,t,g, or c
ttgagatgggnggtctaatctcnatttactaatanggaaanctggtacccctgcaggtaccggtccggaattcccgggtcgacccacgcgtccggggaangtnagctgggattanancgtcatgantgggaaaacccaaagactggcccccatcttctt

SEQ ID NO: 3597 - DNA, 486 bp, Homo sapiens
  misc_feature (96)..(96): n equals a,t,g, or c
  misc_feature (134)..(134): n equals a,t,g, or c
  misc_feature (266)..(266): n equals a,t,g, or c
  misc_feature (354)..(354): n equals a,t,g, or c
  misc_feature (366)..(366): n equals a,t,g, or c
  misc_feature (379)..(380): n equals a,t,g, or c
  misc_feature (408)..(408): n equals a,t,g, or c
  misc_feature (420)..(420): n equals a,t,g, or c
  misc_feature (474)..(474): n equals a,t,g, or c
  misc_feature (481)..(481): n equals a,t,g, or c
gcacattatctatacaaagagccatactcagtgaaagataaattacctcctaaactaaagtcccctctgaggtacaacagaaattaaaataattgnttctcttctcaactctatgtaggcacgtattttccatnatgggataaatgttttcatttcaagtgccaatgtgtgaactgtaataaacattactgctttcattttttgtaggtatggaggttacattaactgttatagttgcggagctgaattttaatgtcaggtaattntgtttagtccaaactggttttgaactataaacaattatggatatgtattttttggtttctttgaccccaaagggaaatgggggtttangtcaaattgatnttttatcaaaatnnatctgtttctcaaagcaaaatctctgtntgattgaagatnattcattatttacatatagggtaaacagactttactgcctattgagatcataantgagatntggat

SEQ ID NO: 3598 - DNA, 84 bp, Homo sapiens
  misc_feature (20)..(20): n equals a,t,g, or c
  misc_feature (56)..(56): n equals a,t,g, or c
  misc_feature (66)..(67): n equals a,t,g, or c
  misc_feature (79)..(79): n equals a,t,g, or c
ggaaaggaagggcgtgtcgngggtgtgagcgtgtcgttgactgggaaaacccaggntcttctcctnnttttggtcgcgntgctt

SEQ ID NO: 3599 - DNA, 177 bp, Homo sapiens
  misc_feature (14)..(14): n equals a,t,g, or c
  misc_feature (48)..(48): n equals a,t,g, or c
  misc_feature (71)..(71): n equals a,t,g, or c
  misc_feature (85)..(85): n equals a,t,g, or c
  misc_feature (87)..(87): n equals a,t,g, or c
  misc_feature (108)..(108): n equals a,t,g, or c
  misc_feature (165)..(165): n equals a,t,g, or c
  misc_feature (177)..(177): n equals a,t,g, or c
ccattaggaagaanactggtacgcgtgcaggtaccggtccggaattcncgggtcgacccacgcttccgcanagaagaaggtcagnanaaggtggttctttccttaaanggcaactcctgcccaagccccatatcccttaaactcaataaagtgtccctttcattnactgggagcagn

SEQ ID NO: 3600 - DNA, 99 bp, Homo sapiens
  misc_feature (2)..(3): n equals a,t,g, or c
  misc_feature (19)..(19): n equals a,t,g, or c
  misc_feature (32)..(32): n equals a,t,g, or c
  misc_feature (35)..(35): n equals a,t,g, or c
  misc_feature (56)..(56): n equals a,t,g, or c
  misc_feature (68)..(68): n equals a,t,g, or c
  misc_feature (74)..(74): n equals a,t,g, or c
  misc_feature (94)..(94): n equals a,t,g, or c
gnntgggggaaaggaaagngatacgcctggcnggnaccggtccggaattcccgggncgacccacgcgnccgcgnacgcgtgggcggacgcgtgnggcaa

SEQ ID NO: 3601 - DNA, 51 bp, Homo sapiens
  misc_feature (24)..(25): n equals a,t,g, or c
  misc_feature (36)..(36): n equals a,t,g, or c
gcggacgcgtgggtacgaatggtnnagcgccaggtnccccacgaacgtgcg

SEQ ID NO: 3602 - DNA, 99 bp, Homo sapiens
  misc_feature (11)..(11): n equals a,t,g, or c
  misc_feature (16)..(16): n equals a,t,g, or c
  misc_feature (22)..(23): n equals a,t,g, or c
  misc_feature (25)..(25): n equals a,t,g, or c
  misc_feature (36)..(36): n equals a,t,g, or c
  misc_feature (43)..(43): n equals a,t,g, or c
  misc_feature (51)..(51): n equals a,t,g, or c
  misc_feature (54)..(54): n equals a,t,g, or c
gggggggggtngggtntgactnngntattcaaatcngagcccnataagganttntggtacgcctgcaggtaccggtccggaattcccgggtcgacccac

SEQ ID NO: 3603 - DNA, 292 bp, Homo sapiens
  misc_feature (80)..(80): n equals a,t,g, or c
  misc_feature (82)..(82): n equals a,t,g, or c
  misc_feature (99)..(99): n equals a,t,g, or c
  misc_feature (114)..(115): n equals a,t,g, or c
  misc_feature (121)..(121): n equals a,t,g, or c
  misc_feature (152)..(152): n equals a,t,g, or c
  misc_feature (163)..(163): n equals a,t,g, or c
  misc_feature (187)..(187): n equals a,t,g, or c
  misc_feature (203)..(203): n equals a,t,g, or c
  misc_feature (230)..(230): n equals a,t,g, or c
  misc_feature (261)..(261): n equals a,t,g, or c
  misc_feature (275)..(275): n equals a,t,g, or c
  misc_feature (283)..(283): n equals a,t,g, or c
gcccacgcgtccgcggacgcgtggggtgctccacctgcccaaagcagcctgcaagtccagggcacaggctgccttttggnanggagggctggcccatangtgctgctggctccnngggggnaggctgggcctcagggggggggggattcctnctgagcaccgnggggcacccagggaacaagggcgntcagggaatcctgctnccggcacccctgtgccgctggcatganggccgtgttcccactgtgaaggatgaaagangcaaggccctcaangaaccgtnttctcagaa

SEQ ID NO: 3604 - DNA, 110 bp, Homo sapiens
  misc_feature (12)..(12): n equals a,t,g, or c
  misc_feature (18)..(18): n equals a,t,g, or c
  misc_feature (42)..(42): n equals a,t,g, or c
gggggggggggnggggtntgattacggcctctctaatacgantcactatagggaaagctggtacgcctgcaggtaccggtccggtaattcccgggtcgacccacgcgtcc

SEQ ID NO: 3605 - DNA, 63 bp, Homo sapiens
  misc_feature (26)..(26): n equals a,t,g, or c
  misc_feature (38)..(39): n equals a,t,g, or c
  misc_feature (59)..(59): n equals a,t,g, or c
  misc_feature (63)..(63): n equals a,t,g, or c
ggacccacgcgtccgcgtcacgcgtnggcggacgcgtnngtctaaaaaaaaaaaaaaangggn

SEQ ID NO: 3606 - DNA, 99 bp, Homo sapiens
  misc_feature (2)..(2): n equals a,t,g, or c
  misc_feature (6)..(6): n equals a,t,g, or c
  misc_feature (24)..(24): n equals a,t,g, or c
  misc_feature (29)..(29): n equals a,t,g, or c
  misc_feature (44)..(44): n equals a,t,g, or c
  misc_feature (66)..(66): n equals a,t,g, or c
  misc_feature (95)..(95): n equals a,t,g, or c
  misc_feature (98)..(98): n equals a,t,g, or c
angcantaatggtatgcatcgggnccttnacctaaagggaaggnaagaccggtcccgccaagtcangttaccgtgttccggcaatgtccacgggntcnc

SEQ ID NO: 3607 - DNA, 108 bp, Homo sapiens
  misc_feature (7)..(7): n equals a,t,g, or c
  misc_feature (42)..(42): n equals a,t,g, or c
  misc_feature (52)..(52): n equals a,t,g, or c
  misc_feature (56)..(57): n equals a,t,g, or c
  misc_feature (84)..(84): n equals a,t,g, or c
gcaatancctggacgagctcatcctcaatgctggcaccctcnaggtcattgnccanncgcctcactctggacatgtccacaggnccctcctgggaccgcacggtccca

SEQ ID NO: 3608 - DNA, 105 bp, Homo sapiens
  misc_feature (2)..(2): n equals a,t,g, or c
  misc_feature (15)..(15): n equals a,t,g, or c
  misc_feature (31)..(31): n equals a,t,g, or c
  misc_feature (81)..(81): n equals a,t,g, or c
  misc_feature (86)..(86): n equals a,t,g, or c
  misc_feature (103)..(103): n equals a,t,g, or c
cntcatgagaaggancatggtacgcctgcangtaccggtccggaattcacgggtcgtgactgggaaaacccagaccatatncgtcncggaaatctagcttgantg

SEQ ID NO: 3609 - DNA, 63 bp, Homo sapiens
  misc_feature (5)..(5): n equals a,t,g, or c
  misc_feature (30)..(30): n equals a,t,g, or c
  misc_feature (36)..(36): n equals a,t,g, or c
  misc_feature (43)..(43): n equals a,t,g, or c
ggctnggattataccgtcctgactgggaanacccanttgcatnttatgctatgcggttcttac

SEQ ID NO: 3610 - DNA, 253 bp, Homo sapiens
  misc_feature (39)..(39): n equals a,t,g, or c
  misc_feature (57)..(57): n equals a,t,g, or c
  misc_feature (121)..(121): n equals a,t,g, or c
  misc_feature (123)..(123): n equals a,t,g, or c
  misc_feature (152)..(152): n equals a,t,g, or c
  misc_feature (164)..(164): n equals a,t,g, or c
  misc_feature (222)..(222): n equals a,t,g, or c
  misc_feature (228)..(228): n equals a,t,g, or c
  misc_feature (237)..(237): n equals a,t,g, or c
  misc_feature (244)..(244): n equals a,t,g, or c
ggctaactctcgcctcactgcggcctccccaatccaaanctcctgcctttcgggcanttcggcaagtccaactcctgcctgccaatggcctctttaaggccaaactcatttcctcacgtcngncattccaagccccgtttttcccttccggnagacctcttggnctctaatttgtttatctttttggtgtataaatcccaaaatattgaattttgggaatanttccancattatgtntcgaaanacaaaagag

SEQ ID NO: 3611 - DNA, 102 bp, Homo sapiens
  misc_feature (12)..(12): n equals a,t,g, or c
  misc_feature (77)..(77): n equals a,t,g, or c
  misc_feature (84)..(84): n equals a,t,g, or c
  misc_feature (89)..(89): n equals a,t,g, or c
  misc_feature (91)..(91): n equals a,t,g, or c
atcatagaggancatggtagcctgcatgtaccggtccggaattcacgggtcgtgactgggaaaacccaaaccataantctgtcncgatngncggctttacta

SEQ ID NO: 3612 - DNA, 231 bp, Homo sapiens
  misc_feature (60)..(60): n equals a,t,g, or c
  misc_feature (63)..(63): n equals a,t,g, or c
  misc_feature (69)..(69): n equals a,t,g, or c
  misc_feature (71)..(71): n equals a,t,g, or c
  misc_feature (93)..(93): n equals a,t,g, or c
  misc_feature (137)..(137): n equals a,t,g, or c
  misc_feature (181)..(181): n equals a,t,g, or c
  misc_feature (212)..(212): n equals a,t,g, or c
  misc_feature (224)..(224): n equals a,t,g, or c
  misc_feature (231)..(231): n equals a,t,g, or c
gtccctgaaaagttccaccatattttggggagtactcaacaccaacatcgcatgggcggnggnaaaatnanctttgccatcactggccattanaggtgtgggccaaaccatatgctcatggtgtgtgttgcaggaanagcagacattgtacctcaccagggagggcgggagaaactcagtngaggatgaggtggaacgtgtgatcaccattntggcagaatccncgaccan

SEQ ID NO: 3613 - DNA, 601 bp, Homo sapiens
  misc_feature (5)..(6): n equals a,t,g, or c
  misc_feature (27)..(27): n equals a,t,g, or c
  misc_feature (489)..(489): n equals a,t,g, or c
  misc_feature (491)..(491): n equals a,t,g, or c
ctggnnaacttactacctttggaaagntgcacgcctgcaggtaccggtccggaattcccgggtcgacccacgcgttcgatttctccctccagccagggcccaactcccacctgcctgggcgaatctcctccaaggaagtcccaggaggatggggaccaggaaggctgtggacccccatctccagggggccttcccagcctgatccctgtcctccaagttctggaggaggccgctgtagggtctggctgagcttcccacccactttccctggtcccaatcctttcttgtcctatacccagctggggttgctgccctgaacgaactgcgtgtggggccggcacatcctagcaggcagcccctggcgcctgctgcctcagggatgctccaaccaccctcgttctcctcgcagtggccctggctcccacccccatggagaacccaaagtcttactgtatataactccaggtgacgtttctatatttatagcangngttgaaaacccacgtgttttacacagaaccaccctctccaacccctcccttcccgaccccaacaaaacgtttttcaaaccccttacagttcctggggcaggcggaaacaa

SEQ ID NO: 3614 - DNA, 447 bp, Homo sapiens
  misc_feature (32)..(33): n equals a,t,g, or c
  misc_feature (52)..(52): n equals a,t,g, or c
  misc_feature (56)..(57): n equals a,t,g, or c
  misc_feature (81)..(83): n equals a,t,g, or c
  misc_feature (92)..(92): n equals a,t,g, or c
  misc_feature (210)..(210): n equals a,t,g, or c
  misc_feature (233)..(233): n equals a,t,g, or c
  misc_feature (259)..(259): n equals a,t,g, or c
  misc_feature (281)..(281): n equals a,t,g, or c
  misc_feature (386)..(386): n equals a,t,g, or c
  misc_feature (398)..(398): n equals a,t,g, or c
  misc_feature (416)..(416): n equals a,t,g, or c
  misc_feature (423)..(423): n equals a,t,g, or c
ggggggggggggtgggtgtgcggagggaagcnngcggcggcggcggcgcccngagnncctcgccctccgggctccgttaannntccttccgnggttcacctacggaaaccttgttacgacttttacttcctctagatagtcaagttcgaccgtcttctcagcgctccgccagggccgtgggccgaccccggcggggccgatccgagggcntcactaaaccatccaatcggtantagcgacgggcggtgtgtacaaaggncagggacttaatcaacgcaagnttatgacccgcacttactgggaattcctcgttcatggggaataattgcaatccccgatccccatcacgaatggggttcaacgggttacccgcgcctgccgcgtanggtaggcacacnctgagccattcaatgtangcgcgtncagcccggacatctaagggatcaa

SEQ ID NO: 3615 - DNA, 186 bp, Homo sapiens
  misc_feature (8)..(8): n equals a,t,g, or c
  misc_feature (11)..(11): n equals a,t,g, or c
  misc_feature (34)..(34): n equals a,t,g, or c
  misc_feature (53)..(53): n equals a,t,g, or c
  misc_feature (62)..(62): n equals a,t,g, or c
  misc_feature (108)..(108): n equals a,t,g, or c
  misc_feature (118)..(118): n equals a,t,g, or c
  misc_feature (134)..(134): n equals a,t,g, or c
  misc_feature (157)..(157): n equals a,t,g, or c
  misc_feature (167)..(167): n equals a,t,g, or c
ccccgggncgncccacgcgtccggtcccgcaagnaggtaccggctctactgcnacctcttcnagctccaccgccggcgcaagggcaaaggcaaaggcaaaggcggctngggagattcngccgtgaagcaagtgnagatagatggccttgtggtattnaagataatcnaacattatcaagaagaagg

SEQ ID NO: 3616 - DNA, 253 bp, Homo sapiens
  misc_feature (16)..(16): n equals a,t,g, or c
  misc_feature (34)..(34): n equals a,t,g, or c
  misc_feature (52)..(52): n equals a,t,g, or c
  misc_feature (62)..(62): n equals a,t,g, or c
  misc_feature (98)..(98): n equals a,t,g, or c
  misc_feature (122)..(122): n equals a,t,g, or c
  misc_feature (186)..(186): n equals a,t,g, or c
  misc_feature (246)..(246): n equals a,t,g, or c
aactatggtcccccgngctgcaggattcggcacnggacagcagcctctgagnctcgtgcctnatcgtgtctgtagatgaaccacaagaaccccgctcnctgtggtgctccacagagaggcgnggctggtcgtggcgcccactgagagcaccaccataatgtgtgtctgggatacctctgttgtatnattaaagaggtatatgcatttctatggcattaaaattagtaaaaaaaaaatgggggccgnccatgct

SEQ ID NO: 3617 - DNA, 309 bp, Homo sapiens
  misc_feature (144)..(144): n equals a,t,g, or c
  misc_feature (180)..(180): n equals a,t,g, or c
  misc_feature (229)..(229): n equals a,t,g, or c
  misc_feature (247)..(247): n equals a,t,g, or c
  misc_feature (309)..(309): n equals a,t,g, or c
aattcggcagaggtgatgggaagctggtgtctgagtcctctgacgtcctgcccaagtgaacagctgcggcacccctcccagcctacccctcctgcgctgccccagagcctgggaaggaggccgctatgcagggtagcactgggnaacaggagacccacctgaggctcagccctagccctnagcccacctggggagtttactacctggggaccccccttgcccatgcctncagcttacaaaacaattncaattgctttttttttttggtccaaaataaaacctcagtttagttttgccaaaaaaaaaaan

SEQ ID NO: 3618 - DNA, 477 bp, Homo sapiens
  misc_feature (10)..(10): n equals a,t,g, or c
  misc_feature (95)..(95): n equals a,t,g, or c
  misc_feature (299)..(299): n equals a,t,g, or c
  misc_feature (342)..(342): n equals a,t,g, or c
  misc_feature (346)..(346): n equals a,t,g, or c
  misc_feature (353)..(354): n equals a,t,g, or c
  misc_feature (358)..(358): n equals a,t,g, or c
  misc_feature (365)..(365): n equals a,t,g, or c
  misc_feature (367)..(367): n equals a,t,g, or c
  misc_feature (370)..(370): n equals a,t,g, or c
  misc_feature (375)..(375): n equals a,t,g, or c
  misc_feature (379)..(379): n equals a,t,g, or c
  misc_feature (385)..(385): n equals a,t,g, or c
  misc_feature (387)..(387): n equals a,t,g, or c
  misc_feature (389)..(391): n equals a,t,g, or c
  misc_feature (399)..(399): n equals a,t,g, or c
  misc_feature (403)..(403): n equals a,t,g, or c
  misc_feature (416)..(416): n equals a,t,g, or c
  misc_feature (418)..(418): n equals a,t,g, or c
  misc_feature (423)..(424): n equals a,t,g, or c
  misc_feature (427)..(429): n equals a,t,g, or c
  misc_feature (435)..(435): n equals a,t,g, or c
  misc_feature (449)..(449): n equals a,t,g, or c
  misc_feature (467)..(468): n equals a,t,g, or c
  misc_feature (473)..(473): n equals a,t,g, or c
aattcggcanagctccaagcatccttgactccaaaaaggtgactcccagtgccactgattccctgagtaaggctcagtttctgagaatcaatggnttcccccaacccccagcccagcctcagcccaatatctctgacctctggcctgattcctagaggtgaccagaatttaatgtcagggcctaaatagtcattgagtagattgcattcctattggtgccctcgaagacctcacttgtgcacctgtgggacccctgccggggcagataggacacgagctaaatgggtgctgggcaagtncctgtggacctgacaaggggacctgagcagtatgggaaggggntttnggaaagnnagtncccaccntntgnaattnaagnggtggntntnnnttttaggnggtngccaaatttggtntnagttnnttnnngaaggnctaaaggttttttnaaatttaaaagggtttcnnggtgnaaaa

SEQ ID NO: 3619 - DNA, 284 bp, Homo sapiens
  misc_feature (14)..(14): n equals a,t,g, or c
  misc_feature (181)..(181): n equals a,t,g, or c
  misc_feature (216)..(216): n equals a,t,g, or c
aattcggcagaggnatgcagagccctccccacctgtgtgtgcaggatcagaagcaagtccccagcatggccacagagctggcccatctccagggggatggccaagcctaggtgtgctggacactctcatctcatctttgtcactgttgcaggctcctgttcagaccctccatggtctgagncccctggaattgattggggacagatgatgccagtnttcattgagcagaagtactggttttgaattgttaacataaagaccatccctatttagaaaaaaaaaaa

SEQ ID NO: 3620 - DNA, 333 bp, Homo sapiens
  misc_feature (10)..(10): n equals a,t,g, or c
  misc_feature (15)..(15): n equals a,t,g, or c
  misc_feature (71)..(71): n equals a,t,g, or c
  misc_feature (205)..(205): n equals a,t,g, or c
  misc_feature (235)..(235): n equals a,t,g, or c
  misc_feature (254)..(254): n equals a,t,g, or c
  misc_feature (278)..(278): n equals a,t,g, or c
  misc_feature (302)..(302): n equals a,t,g, or c
  misc_feature (313)..(313): n equals a,t,g, or c
  misc_feature (326)..(326): n equals a,t,g, or c
aattcggcanagggnccagcggggtctccgagcccctgctctgggcgttgggcccaatggagcagggaagnccccaagcacagggcctgagggggtgatggaggcagcatccatggggtgtccctgtgctgaggggtgcagcagggcctgtggacacaaagaaggggggacaagaaggaacccgtgggctggcacttcaggggtntggactgggggtttgcatcatagaaagtgnaacctgtgcgtttgtgtgncatgtctgcgtacacatggctgtntgtgcgtgcaatgaactgtgcgtncccggccagtntgcgtgtgcgtgncgtgtgt

SEQ ID NO: 3621 - DNA, 280 bp, Homo sapiens
  misc_feature (34)..(34): n equals a,t,g, or c
  misc_feature (37)..(37): n equals a,t,g, or c
  misc_feature (40)..(40): n equals a,t,g, or c
  misc_feature (43)..(43): n equals a,t,g, or c
  misc_feature (46)..(46): n equals a,t,g, or c
  misc_feature (59)..(59): n equals a,t,g, or c
  misc_feature (67)..(67): n equals a,t,g, or c
  misc_feature (70)..(70): n equals a,t,g, or c
  misc_feature (77)..(77): n equals a,t,g, or c
  misc_feature (86)..(86): n equals a,t,g, or c
  misc_feature (90)..(90): n equals a,t,g, or c
  misc_feature (94)..(95): n equals a,t,g, or c
  misc_feature (99)..(99): n equals a,t,g, or c
  misc_feature (128)..(128): n equals a,t,g, or c
  misc_feature (130)..(130): n equals a,t,g, or c
  misc_feature (152)..(152): n equals a,t,g, or c
  misc_feature (157)..(157): n equals a,t,g, or c
  misc_feature (163)..(163): n equals a,t,g, or c
  misc_feature (170)..(170): n equals a,t,g, or c
  misc_feature (172)..(172): n equals a,t,g, or c
  misc_feature (178)..(178): n equals a,t,g, or c
  misc_feature (184)..(184): n equals a,t,g, or c
  misc_feature (186)..(186): n equals a,t,g, or c
  misc_feature (189)..(189): n equals a,t,g, or c
  misc_feature (210)..(210): n equals a,t,g, or c
  misc_feature (215)..(215): n equals a,t,g, or c
  misc_feature (245)..(245): n equals a,t,g, or c
  misc_feature (249)..(249): n equals a,t,g, or c
  misc_feature (280)..(280): n equals a,t,g, or c
gcacgagtgaaaagccatctttgcattgttcctnatncgnctnctngcccgccgcagtngcctccgncgnggcctgnctccgccgncggnactnncggnagctttatcgccagagtccctgaactctngntttctttttaatcccctgcatnggatnaccggngtgcccnancatgtnagacgnanccntagacaccagctaccgaaatnaccancaaggacttaaaaggagaagaaggaagttntggnaagaggcagaaaatgggaagagacgcccttn

SEQ ID NO: 3622 - DNA, 500 bp, Homo sapiens
  misc_feature (103)..(103): n equals a,t,g, or c
  misc_feature (138)..(138): n equals a,t,g, or c
  misc_feature (182)..(182): n equals a,t,g, or c
  misc_feature (239)..(239): n equals a,t,g, or c
  misc_feature (293)..(293): n equals a,t,g, or c
  misc_feature (317)..(317): n equals a,t,g, or c
  misc_feature (343)..(343): n equals a,t,g, or c
  misc_feature (376)..(376): n equals a,t,g, or c
  misc_feature (409)..(409): n equals a,t,g, or c
  misc_feature (415)..(415): n equals a,t,g, or c
  misc_feature (418)..(418): n equals a,t,g, or c
  misc_feature (451)..(451): n equals a,t,g, or c
  misc_feature (472)..(472): n equals a,t,g, or c
  misc_feature (485)..(485): n equals a,t,g, or c
  misc_feature (493)..(493): n equals a,t,g, or c
  misc_feature (499)..(499): n equals a,t,g, or c
aattcggcagagggcgctccatagggcagcaccatcaccaggtgcacagctgaggcccagggtctgcttcggaccccggccagaccccagcgaagcccctctntgcccctggacccagccctctcgtgtcagggtgtnttgggtggacgcttctcactcgtgcagacctggctgcccgtggncccgctggctgcacaggggaggttgcacaggtcagcagagtggctgcagggccgggntctgaaccgcaggcccatgggagacggggaggagatggtctcttccacaaccancttaacagatggaggcgctgaggnctcgggttcccctgggggcttggggnagaccacaaggttttagttcaaaattccagttncccaagtttttaaggaggttccccttgggcggncaaatnggncccaagtggtttttagattcttaagggcttgtnttgtcattttggccattaagnaaggggccaaagngcttaagnaacttnc

SEQ ID NO: 3623 - DNA, 478 bp, Homo sapiens
  misc_feature (14)..(14): n equals a,t,g, or c
  misc_feature (33)..(33): n equals a,t,g, or c
  misc_feature (49)..(49): n equals a,t,g, or c
  misc_feature (52)..(52): n equals a,t,g, or c
  misc_feature (152)..(152): n equals a,t,g, or c
  misc_feature (177)..(177): n equals a,t,g, or c
  misc_feature (285)..(286): n equals a,t,g, or c
  misc_feature (317)..(317): n equals a,t,g, or c
  misc_feature (325)..(325): n equals a,t,g, or c
  misc_feature (340)..(340): n equals a,t,g, or c
  misc_feature (342)..(342): n equals a,t,g, or c
  misc_feature (349)..(349): n equals a,t,g, or c
  misc_feature (367)..(367): n equals a,t,g, or c
  misc_feature (369)..(369): n equals a,t,g, or c
  misc_feature (411)..(411): n equals a,t,g, or c
  misc_feature (419)..(419): n equals a,t,g, or c
  misc_feature (450)..(450): n equals a,t,g, or c
  misc_feature (460)..(460): n equals a,t,g, or c
  misc_feature (474)..(474): n equals a,t,g, or c
aattcggcagagcnatcccacacggcgccgggnagggtggccacttggnctncaccctggcccagatcacctgctagagggcccaggaggtgcgatgccaccaaggacagggaggcactcgctttccggggcaggcccagaaagtgccagtnaatggtggggagagaaggcattgtntcctctctcggagttggtggaggggaaaattgtttgtgaacgatgctgcctcccgagccatctgctcaccgagaaacccaggatggtggagtggaatgaagccgtgcnncccatgccagttcccccggggcagccctcangttgctgntggacccggggtttntntttgcangtgccttggttgtgggtnanaaggatttgcatcaggagtatccgtgccctggaggatttctncttttggnaaaaaaaaaaaaaaaaatttgggggggcccntaccattggncttaggggggtttnaaat

SEQ ID NO: 3624 - DNA, 88 bp, Homo sapiens
  misc_feature (10)..(10): n equals a,t,g, or c
  misc_feature (56)..(57): n equals a,t,g, or c
  misc_feature (59)..(59): n equals a,t,g, or c
  misc_feature (84)..(84): n equals a,t,g, or c
aattcggcangagcagcattaaagtaaggcaaccaaaaaaaaaaaaaaaaaaaaanntnggggggggccccgttccccatttgnccct

SEQ ID NO: 3625 - DNA, 479 bp, Homo sapiens
  misc_feature (11)..(11): n equals a,t,g, or c
  misc_feature (43)..(43): n equals a,t,g, or c
  misc_feature (47)..(47): n equals a,t,g, or c
  misc_feature (94)..(94): n equals a,t,g, or c
  misc_feature (197)..(197): n equals a,t,g, or c
  misc_feature (224)..(224): n equals a,t,g, or c
  misc_feature (228)..(228): n equals a,t,g, or c
  misc_feature (230)..(230): n equals a,t,g, or c
  misc_feature (235)..(235): n equals a,t,g, or c
  misc_feature (256)..(256): n equals a,t,g, or c
  misc_feature (267)..(267): n equals a,t,g, or c
  misc_feature (278)..(278): n equals a,t,g, or c
  misc_feature (293)..(293): n equals a,t,g, or c
  misc_feature (300)..(300): n equals a,t,g, or c
  misc_feature (303)..(303): n equals a,t,g, or c
  misc_feature (311)..(311): n equals a,t,g, or c
  misc_feature (316)..(316): n equals a,t,g, or c
  misc_feature (330)..(330): n equals a,t,g, or c
  misc_feature (340)..(340): n equals a,t,g, or c
  misc_feature (346)..(346): n equals a,t,g, or c
  misc_feature (356)..(357): n equals a,t,g, or c
  misc_feature (359)..(360): n equals a,t,g, or c
  misc_feature (362)..(362): n equals a,t,g, or c
  misc_feature (369)..(369): n equals a,t,g, or c
  misc_feature (372)..(372): n equals a,t,g, or c
  misc_feature (377)..(377): n equals a,t,g, or c
  misc_feature (384)..(384): n equals a,t,g, or c
  misc_feature (387)..(387): n equals a,t,g, or c
  misc_feature (391)..(391): n equals a,t,g, or c
  misc_feature (399)..(400): n equals a,t,g, or c
  misc_feature (409)..(409): n equals a,t,g, or c
  misc_feature (430)..(430): n equals a,t,g, or c
  misc_feature (435)..(435): n equals a,t,g, or c
  misc_feature (439)..(440): n equals a,t,g, or c
  misc_feature (443)..(443): n equals a,t,g, or c
  misc_feature (447)..(447): n equals a,t,g, or c
  misc_feature (450)..(450): n equals a,t,g, or c
  misc_feature (456)..(456): n equals a,t,g, or c
  misc_feature (459)..(459): n equals a,t,g, or c
  misc_feature (465)..(465): n equals a,t,g, or c
  misc_feature (473)..(473): n equals a,t,g, or c
taacccccacnaaagggaacaaaagctggagctccaccgcggngcgnccgctctaggaactagtggatcccccgggctgcagggaattcggcanagggagctgcctgggactctctcatgcaatactggtcagctccttcgggacaagggaagggtacagtggcgtgggcctgactttcccgccagtgccccactgnaaagtttcttacgggcataggcgatgnaggngncatgnatccagggaaggccggggtgnattgtggctgnaatttgaactncgtttgtgcctggtnaacaatnatngtgacctnaatgncaggtccgaggttntgggtaacgnactggnagtgaccggnnanngnttggggntgnaaagnccttttncgncaanttttcctnnaaaggggcncttggtttttccccgaaaagnccccntttnntgncttnttnttgggnagnaccctncaaatggnggggca

SEQ ID NO: 3626 - DNA, 236 bp, Homo sapiens
  misc_feature (5)..(5): n equals a,t,g, or c
  misc_feature (8)..(8): n equals a,t,g, or c
  misc_feature (19)..(19): n equals a,t,g, or c
  misc_feature (28)..(28): n equals a,t,g, or c
  misc_feature (31)..(31): n equals a,t,g, or c
  misc_feature (36)..(36): n equals a,t,g, or c
  misc_feature (49)..(49): n equals a,t,g, or c
  misc_feature (62)..(62): n equals a,t,g, or c
  misc_feature (74)..(74): n equals a,t,g, or c
  misc_feature (98)..(98): n equals a,t,g, or c
  misc_feature (109)..(109): n equals a,t,g, or c
  misc_feature (114)..(114): n equals a,t,g, or c
  misc_feature (133)..(133): n equals a,t,g, or c
  misc_feature (156)..(156): n equals a,t,g, or c
  misc_feature (177)..(177): n equals a,t,g, or c
  misc_feature (182)..(182): n equals a,t,g, or c
  misc_feature (191)..(191): n equals a,t,g, or c
  misc_feature (194)..(194): n equals a,t,g, or c
  misc_feature (213)..(213): n equals a,t,g, or c
  misc_feature (216)..(216): n equals a,t,g, or c
  misc_feature (230)..(230): n equals a,t,g, or c
aattnggnagaggcaaggntgtaattanaangtagnagctagtatcttnttgaggttatttnatcgtagctatntgagagatttagcattgtgactgnatagtatggtngtagngaaattgttgaattgaagngtaagttctcgttggaagtgacngagggtgcaaaaagtgtattnattanaaaatatgntcnggtggtcattaggtcgagntgntccttaggataaanatttag

SEQ ID NO: 3627 - DNA, 391 bp, Homo sapiens
  misc_feature (58)..(58): n equals a,t,g, or c
  misc_feature (115)..(115): n equals a,t,g, or c
  misc_feature (139)..(140): n equals a,t,g, or c
  misc_feature (180)..(180): n equals a,t,g, or c
  misc_feature (227)..(227): n equals a,t,g, or c
  misc_feature (246)..(246): n equals a,t,g, or c
  misc_feature (255)..(255): n equals a,t,g, or c
  misc_feature (272)..(273): n equals a,t,g, or c
  misc_feature (276)..(276): n equals a,t,g, or c
  misc_feature (278)..(278): n equals a,t,g, or c
  misc_feature (286)..(286): n equals a,t,g, or c
  misc_feature (295)..(295): n equals a,t,g, or c
  misc_feature (298)..(298): n equals a,t,g, or c
  misc_feature (302)..(302): n equals a,t,g, or c
  misc_feature (312)..(312): n equals a,t,g, or c
  misc_feature (320)..(320): n equals a,t,g, or c
  misc_feature (322)..(322): n equals a,t,g, or c
  misc_feature (330)..(331): n equals a,t,g, or c
  misc_feature (334)..(334): n equals a,t,g, or c
  misc_feature (336)..(336): n equals a,t,g, or c
  misc_feature (338)..(339): n equals a,t,g, or c
  misc_feature (343)..(343): n equals a,t,g, or c
  misc_feature (345)..(345): n equals a,t,g, or c
  misc_feature (355)..(355): n equals a,t,g, or c
  misc_feature (359)..(359): n equals a,t,g, or c
  misc_feature (365)..(366): n equals a,t,g, or c
  misc_feature (385)..(385): n equals a,t,g, or c
ctggccacaagttgttttaaacagctagattgtgcattctactttttctcatcttatngcatcctatgggaagcacctccctgtgctactgtgatatcacctggctgtcatctgnaatggttccctgggagggacgtgnnctgtagtgtggtgtgtggcgtgccatctgacttcctagtncacattgcccggtggtctggggtatgggggacaaggactgggtggtngggactgtccttgggtctnccacccttnaaagctggtgcccagannagngnaaagtgtncccttccgnggnaatncccaaatttngacagggngnggtcacanntgntngnnctgnancttttggagnattngttggnnagcattaggttattgggtntggggg

SEQ ID NO: 3628 - DNA, 489 bp, Homo sapiens
  misc_feature (2)..(2): n equals a,t,g, or c
  misc_feature (170)..(170): n equals a,t,g, or c
  misc_feature (236)..(236): n equals a,t,g, or c
  misc_feature (253)..(253): n equals a,t,g, or c
  misc_feature (257)..(257): n equals a,t,g, or c
  misc_feature (291)..(291): n equals a,t,g, or c
  misc_feature (298)..(298): n equals a,t,g, or c
  misc_feature (304)..(304): n equals a,t,g, or c
  misc_feature (309)..(309): n equals a,t,g, or c
  misc_feature (330)..(330): n equals a,t,g, or c
  misc_feature (336)..(337): n equals a,t,g, or c
  misc_feature (350)..(350): n equals a,t,g, or c
  misc_feature (362)..(362): n equals a,t,g, or c
  misc_feature (367)..(368): n equals a,t,g, or c
  misc_feature (370)..(370): n equals a,t,g, or c
  misc_feature (372)..(372): n equals a,t,g, or c
  misc_feature (379)..(379): n equals a,t,g, or c
  misc_feature (381)..(382): n equals a,t,g, or c
  misc_feature (385)..(385): n equals a,t,g, or c
  misc_feature (390)..(390): n equals a,t,g, or c
  misc_feature (393)..(393): n equals a,t,g, or c
  misc_feature (395)..(395): n equals a,t,g, or c
  misc_feature (400)..(400): n equals a,t,g, or c
  misc_feature (403)..(404): n equals a,t,g, or c
  misc_feature (406)..(406): n equals a,t,g, or c
  misc_feature (408)..(408): n equals a,t,g, or c
  misc_feature (411)..(411): n equals a,t,g, or c
  misc_feature (413)..(413): n equals a,t,g, or c
  misc_feature (415)..(415): n equals a,t,g, or c
  misc_feature (417)..(418): n equals a,t,g, or c
  misc_feature (422)..(422): n equals a,t,g, or c
  misc_feature (426)..(427): n equals a,t,g, or c
  misc_feature (430)..(432): n equals a,t,g, or c
  misc_feature (434)..(434): n equals a,t,g, or c
  misc_feature (439)..(439): n equals a,t,g, or c
  misc_feature (445)..(445): n equals a,t,g, or c
  misc_feature (447)..(447): n equals a,t,g, or c
  misc_feature (452)..(453): n equals a,t,g, or c
  misc_feature (464)..(465): n equals a,t,g, or c
  misc_feature (475)..(475): n equals a,t,g, or c
  misc_feature (479)..(479): n equals a,t,g, or c
  misc_feature (489)..(489): n equals a,t,g, or c
anttcggcagagggagggtccatgggggcttggccaggcctaggcagaaagacaatgtcccagggatggagagccgtggacaccaactttcccatcatctgctccatgcaaggtaggcccaggctacaaggtgcagagaagagagtagcagagttggcctggactgtggnaggttgtttggggaaactgaggctggcagggaggggctggcagggtggccatatctaaggcgacanggctgcattggcctagnttgngatctcctagagaaggccctggagatgacacttnctggggncttttnaaatncagtggaataatttatggggnctcctnngattcccaaggtnctgtgctggggncactnngnanttggcancnntgnacccntanantgggnccnnantnttnanangnnatgngggnncgnnngncaatnggttcnanactgnnaatgcccagcnntttgggagtnttanggcgaaaatn

SEQ ID NO: 3629 - DNA, 360 bp, Homo sapiens
  misc_feature (15)..(15): n equals a,t,g, or c
  misc_feature (129)..(129): n equals a,t,g, or c
  misc_feature (162)..(162): n equals a,t,g, or c
  misc_feature (197)..(197): n equals a,t,g, or c
  misc_feature (203)..(203): n equals a,t,g, or c
  misc_feature (219)..(219): n equals a,t,g, or c
  misc_feature (241)..(241): n equals a,t,g, or c
  misc_feature (309)..(309): n equals a,t,g, or c
  misc_feature (315)..(315): n equals a,t,g, or c
  misc_feature (326)..(326): n equals a,t,g, or c
  misc_feature (349)..(349): n equals a,t,g, or c
aattcggcagaggtncaggacatcctcagagatagtctggaacaaaagctatcaatcctttcctttagaagatgtacagaaacatgagaaactcatggcagaattgtctcccaagggttcctctccctnatttctccattgtcttgacttctagcaaatttnctcatgagtgtacataccactaagttggccactcngattantctggacaaaacgggntgggactaagtctgatttattntatggcagcatttggattaagactaatcaacaggtacttccaagtagcaggtggggttctcagcttgncagtgntcctcagctgntgttcttgcaggggtcccagctnagaacaaattc

SEQ ID NO: 3630 - DNA, 338 bp, Homo sapiens
  misc_feature (306)..(306): n equals a,t,g, or c
  misc_feature (330)..(330): n equals a,t,g, or c
aattcggcagagtgggggcttcctacaaccttcaactataatcttcctaccaggtttgagaatagaccctgacttatcaggacaaagttaactatggcaccaccttgtgcattcagggcactagtcctgatggaaaactcagcctgctgaatgtccagaactctgaccaatcagtcattcctcctcttgtggaagggtgcaaataaggccatgggaatgaaaagctgcatgtgttttgcccagtgtggggcttcttacctctgtgggagagggggaataggaaagaatttctctggggaacagganaaaaaaaaaaaaggaagggggggnggggggag

SEQ ID NO: 3631 - DNA, 481 bp, Homo sapiens
  misc_feature (13)..(13): n equals a,t,g, or c
  misc_feature (282)..(282): n equals a,t,g, or c
  misc_feature (295)..(295): n equals a,t,g, or c
  misc_feature (349)..(349): n equals a,t,g, or c
  misc_feature (356)..(356): n equals a,t,g, or c
  misc_feature (360)..(360): n equals a,t,g, or c
  misc_feature (362)..(363): n equals a,t,g, or c
  misc_feature (373)..(373): n equals a,t,g, or c
  misc_feature (377)..(377): n equals a,t,g, or c
  misc_feature (383)..(384): n equals a,t,g, or c
  misc_feature (398)..(398): n equals a,t,g, or c
  misc_feature (401)..(401): n equals a,t,g, or c
  misc_feature (418)..(418): n equals a,t,g, or c
  misc_feature (424)..(425): n equals a,t,g, or c
  misc_feature (441)..(441): n equals a,t,g, or c
  misc_feature (465)..(465): n equals a,t,g, or c
aattcggcagagntggactctgatccctggttccccctgattctaggttccaatgcttcgacttagctcgaggcctgaagaggtcacagactggctgcaggcagagaacttctccactgccacggtgcttgacacttgggtccctgacggggagccagcttacttcggcataaagacctggggagctacagatgcttatgtccacaggagggccccacggaatcctgtcccggctggaggctgttcagaaggatgctgggggataagcccttaggcaccagnttaggacaacttncaagaaccagggccccgttgattgcaagttggcagttttgataacccttagagnccccagnattncnntttttgggtncccntttttnnagcaaaccccaaanccngtttaaaaaggaaaaanatgggnnaggccaaggtttaagnaaaagtttccttttggtttttttnggggcttcccataacc

SEQ ID NO: 3632 - DNA, 497 bp, Homo sapiens
  misc_feature (75)..(75): n equals a,t,g, or c
  misc_feature (91)..(91): n equals a,t,g, or c
  misc_feature (106)..(106): n equals a,t,g, or c
  misc_feature (112)..(113): n equals a,t,g, or c
  misc_feature (119)..(119): n equals a,t,g, or c
  misc_feature (134)..(134): n equals a,t,g, or c
  misc_feature (136)..(136): n equals a,t,g, or c
  misc_feature (140)..(140): n equals a,t,g, or c
  misc_feature (158)..(159): n equals a,t,g, or c
  misc_feature (164)..(164): n equals a,t,g, or c
  misc_feature (172)..(172): n equals a,t,g, or c
  misc_feature (178)..(178): n equals a,t,g, or c
  misc_feature (184)..(187): n equals a,t,g, or c
  misc_feature (202)..(203): n equals a,t,g, or c
  misc_feature (227)..(228): n equals a,t,g, or c
  misc_feature (230)..(231): n equals a,t,g, or c
  misc_feature (245)..(246): n equals a,t,g, or c
  misc_feature (297)..(297): n equals a,t,g, or c
  misc_feature (300)..(301): n equals a,t,g, or c
  misc_feature (331)..(331): n equals a,t,g, or c
  misc_feature (334)..(334): n equals a,t,g, or c
  misc_feature (352)..(352): n equals a,t,g, or c
  misc_feature (363)..(364): n equals a,t,g, or c
  misc_feature (366)..(366): n equals a,t,g, or c
  misc_feature (373)..(373): n equals a,t,g, or c
  misc_feature (399)..(399): n equals a,t,g, or c
  misc_feature (416)..(416): n equals a,t,g, or c
  misc_feature (420)..(420): n equals a,t,g, or c
  misc_feature (423)..(423): n equals a,t,g, or c
  misc_feature (432)..(432): n equals a,t,g, or c
  misc_feature (463)..(467): n equals a,t,g, or c
  misc_feature (482)..(482): n equals a,t,g, or c
  misc_feature (487)..(487): n equals a,t,g, or c
  misc_feature (490)..(491): n equals a,t,g, or c
aattcggcacgggctctaacgagtcacgtcaacatacaattcgaaagattgtaatccggacctcctattctaccnagaaaagtagatactngggcattcaaaacgnttcaanntgttcncagcccgttcttccnanactnatctccctccagcccctnncattntagccaantttctncactgnnnntacagttgttattgnngtccccaactgttgtgaattgccnngnngtttccccttctgnnaaaataatgtccatccttcaagggctacctcagatactgggtaacttagtnatnnctttgcagccaggagcggtggttcggctgnaantcttaacacattgggggncgtagtagggnngnttgggtnaggactaggggttttaaccagccggngggttttgggggatttntttntanaggggagtnttaacgggaactttttgttgggccatagtcnnnnnctggggaattggggnacggntannttttgg

SEQ ID NO: 3633 - DNA, 500 bp, Homo sapiens
  misc_feature (59)..(59): n equals a,t,g, or c
  misc_feature (129)..(129): n equals a,t,g, or c
  misc_feature (134)..(134): n equals a,t,g, or c
  misc_feature (143)..(143): n equals a,t,g, or c
  misc_feature (147)..(147): n equals a,t,g, or c
  misc_feature (150)..(150): n equals a,t,g, or c
  misc_feature (166)..(166): n equals a,t,g, or c
  misc_feature (190)..(190): n equals a,t,g, or c
  misc_feature (201)..(201): n equals a,t,g, or c
  misc_feature (216)..(216): n equals a,t,g, or c
  misc_feature (224)..(224): n equals a,t,g, or c
  misc_feature (229)..(229): n equals a,t,g, or c
  misc_feature (252)..(252): n equals a,t,g, or c
  misc_feature (255)..(255): n equals a,t,g, or c
  misc_feature (266)..(266): n equals a,t,g, or c
  misc_feature (270)..(270): n equals a,t,g, or c
  misc_feature (278)..(278): n equals a,t,g, or c
  misc_feature (288)..(288): n equals a,t,g, or c
  misc_feature (294)..(294): n equals a,t,g, or c
  misc_feature (307)..(307): n equals a,t,g, or c
  misc_feature (309)..(309): n equals a,t,g, or c
  misc_feature (314)..(314): n equals a,t,g, or c
  misc_feature (336)..(336): n equals a,t,g, or c
  misc_feature (351)..(351): n equals a,t,g, or c
  misc_feature (369)..(369): n equals a,t,g, or c
  misc_feature (373)..(373): n equals a,t,g, or c
  misc_feature (380)..(380): n equals a,t,g, or c
  misc_feature (385)..(385): n equals a,t,g, or c
  misc_feature (393)..(393): n equals a,t,g, or c
  misc_feature (409)..(409): n equals a,t,g, or c
  misc_feature (414)..(414): n equals a,t,g, or c
  misc_feature (428)..(428): n equals a,t,g, or c
  misc_feature (430)..(430): n equals a,t,g, or c
  misc_feature (434)..(434): n equals a,t,g, or c
  misc_feature (442)..(442): n equals a,t,g, or c
  misc_feature (446)..(446): n equals a,t,g, or c
  misc_feature (451)..(451): n equals a,t,g, or c
  misc_feature (456)..(456): n equals a,t,g, or c
  misc_feature (466)..(466): n equals a,t,g, or c
aattcggcagagtcgaccccaagaggacaggccgcatccccatccagcagggcctgctntccggggatggatcagtgtaagagctgggcccagctcctgcaggcacgcagtccaggtacggggaaggcntttgnacagacccnatantancaaggaaacggactgnagctgacaaggaagggccatgggncccttgcccgnaaaaggaccccctgnaggcgggnctgantggttcctggcccagcggcactngcnggggttaccgnttgncttaccgnttccggcctncccccnaccgttccccgangnttccntttcggctggaacaacggggcncaaagggaggccaanttgggggaaagttgcgtnttgnttcgggncccangttagggnttaagttaacaacttntttgnccttcaaaaggcangntttnattccccngggnaattnggttnttttcccttnttgttccaaaaccaatttgttttttatttatttt

SEQ ID NO: 3634 - DNA, 509 bp, Homo sapiens
  misc_feature (42)..(42): n equals a,t,g, or c
  misc_feature (53)..(53): n equals a,t,g, or c
  misc_feature (59)..(59): n equals a,t,g, or c
  misc_feature (107)..(107): n equals a,t,g, or c
  misc_feature (137)..(137): n equals a,t,g, or c
  misc_feature (146)..(146): n equals a,t,g, or c
  misc_feature (165)..(165): n equals a,t,g, or c
  misc_feature (180)..(180): n equals a,t,g, or c
  misc_feature (186)..(186): n equals a,t,g, or c
  misc_feature (265)..(265): n equals a,t,g, or c
  misc_feature (275)..(275): n equals a,t,g, or c
  misc_feature (320)..(320): n equals a,t,g, or c
  misc_feature (328)..(328): n equals a,t,g, or c
  misc_feature (335)..(335): n equals a,t,g, or c
  misc_feature (351)..(351): n equals a,t,g, or c
  misc_feature (377)..(377): n equals a,t,g, or c
  misc_feature (386)..(386): n equals a,t,g, or c
  misc_feature (392)..(392): n equals a,t,g, or c
  misc_feature (404)..(404): n equals a,t,g, or c
  misc_feature (408)..(408): n equals a,t,g, or c
  misc_feature (420)..(420): n equals a,t,g, or c
  misc_feature (426)..(427): n equals a,t,g, or c
  misc_feature (431)..(431): n equals a,t,g, or c
  misc_feature (440)..(440): n equals a,t,g, or c
  misc_feature (463)..(464): n equals a,t,g, or c
  misc_feature (473)..(473): n equals a,t,g, or c
  misc_feature (481)..(481): n equals a,t,g, or c
  misc_feature (486)..(486): n equals a,t,g, or c
aattcggcacgagaaaaaaaaaaaaggaaaaataaaaaagantcacttgccgnttttanatttgttcctccccaaaccaaagttataccttgatgtaaccagtgggnggaacttgagctgcttgggtaaataacccngaggaaatntgatgagagtaggcctgtnagataattttaggangatctnatggcacagcgtggaagaaaatcaggtttccctacagaatcggtcccaaaagaaaacttattttggttaaatttctggntttaggtagngctgatatcaaccctcatttgggctgttttatcaagctttggctncagcagtntggactngagttcgtcacagttnccgtaccatttgggaatttttggtcnctattccantcagtngacaattcgaantggntttcttaggggncatatnncccnggtgccatncactgggtgtttaggctgggctnntttgtccanggcccaangtaantccccaaggttggaaaaaaaaaa

SEQ ID NO: 3635 - DNA, 488 bp, Homo sapiens
  misc_feature (210)..(210): n equals a,t,g, or c
  misc_feature (292)..(292): n equals a,t,g, or c
  misc_feature (302)..(302): n equals a,t,g, or c
  misc_feature (349)..(349): n equals a,t,g, or c
  misc_feature (361)..(361): n equals a,t,g, or c
  misc_feature (380)..(380): n equals a,t,g, or c
  misc_feature (396)..(396): n equals a,t,g, or c
  misc_feature (402)..(403): n equals a,t,g, or c
  misc_feature (406)..(406): n equals a,t,g, or c
  misc_feature (414)..(414): n equals a,t,g, or c
  misc_feature (420)..(420): n equals a,t,g, or c
  misc_feature (430)..(430): n equals a,t,g, or c
  misc_feature (438)..(438): n equals a,t,g, or c
  misc_feature (449)..(449): n equals a,t,g, or c
  misc_feature (453)..(453): n equals a,t,g, or c
  misc_feature (456)..(456): n equals a,t,g, or c
  misc_feature (460)..(460): n equals a,t,g, or c
  misc_feature (483)..(483): n equals a,t,g, or c
aattcggcacgagccagtgaaatccaatttatgtgtagctgttttaattcttgggagaaccctaacagtggtagcttgatttctccagatccactgagaaaagatacaacatctgaatacatataacatgatttattcatcttaaaaatattttgttaagagtatctctaacttcattaataaaataaaattagaatgtttttaatcttnttcaaccaacctaattttgtagtattcctacttaactgagggtatcgagctaacttcagaggacacaagtgaggcaaaactnctaacttagnaacatcttttcagtcactccatggatgtgcagctgcttagcagttgnggccaaattaanggggcaaaattgttagcanagtatgtaaaattatnccattnncanatttcttnaaatgnctcaccctantttgttanataaaactgcntttntgnaatnggttcacacgttttttcatcttngttag

SEQ ID NO: 3636 - DNA, 499 bp, Homo sapiens
  misc_feature (2)..(2): n equals a,t,g, or c
  misc_feature (5)..(5): n equals a,t,g, or c
  misc_feature (11)..(11): n equals a,t,g, or c
  misc_feature (17)..(17): n equals a,t,g, or c
  misc_feature (27)..(27): n equals a,t,g, or c
  misc_feature (30)..(31): n equals a,t,g, or c
  misc_feature (47)..(49): n equals a,t,g, or c
  misc_feature (52)..(52): n equals a,t,g, or c
  misc_feature (149)..(149): n equals a,t,g, or c
  misc_feature (241)..(241): n equals a,t,g, or c
  misc_feature (265)..(265): n equals a,t,g, or c
  misc_feature (271)..(271): n equals a,t,g, or c
  misc_feature (281)..(281): n equals a,t,g, or c
  misc_feature (329)..(329): n equals a,t,g, or c
  misc_feature (337)..(337): n equals a,t,g, or c
  misc_feature (359)..(360): n equals a,t,g, or c
  misc_feature (371)..(371): n equals a,t,g, or c
  misc_feature (374)..(375): n equals a,t,g, or c
  misc_feature (380)..(380): n equals a,t,g, or c
  misc_feature (385)..(385): n equals a,t,g, or c
  misc_feature (387)..(387): n equals a,t,g, or c
  misc_feature (398)..(399): n equals a,t,g, or c
  misc_feature (432)..(432): n equals a,t,g, or c
  misc_feature (461)..(461): n equals a,t,g, or c
  misc_feature (464)..(464): n equals a,t,g, or c
  misc_feature (466)..(466): n equals a,t,g, or c
  misc_feature (474)..(474): n equals a,t,g, or c
  misc_feature (479)..(479): n equals a,t,g, or c
  misc_feature (481)..(481): n equals a,t,g, or c
  misc_feature (483)..(483): n equals a,t,g, or c
  misc_feature (495)..(495): n equals a,t,g, or c
  misc_feature (498)..(498): n equals a,t,g, or c
tnagncatctnctgaangaaactaganaannttgcttatggtaatgnnntanggaagagtcgcatgaacactctgttaaatctttatttttgtggaaatgagaaaaaagttagaagcatgctccaaacaagagcttgagaggcttgggnggtaaaaagatgtcgtttgtgaacattgggattaaagaggcactcaagtttagctcctgcttccaagtaagagttgtaaacttggatttcantagcacttagaaacactttccagnagccancttagagttncagagtatgcgttgaggacactttacccttctgggttacaggaaaagntcaggaanttgcctggacatgaaggcagtnngttgtccaganccnnttttnaaatncngcaagtaaaanntcaggtggtagcctcgaactctctgttgctctnccaggtagcagttgccaattcattctcanagntntttttggnccctngntnttcttagccttnggnt

SEQ ID NO: 3637 - DNA, 563 bp, Homo sapiens
  misc_feature (4)..(4): n equals a,t,g, or c
  misc_feature (19)..(19): n equals a,t,g, or c
  misc_feature (22)..(22): n equals a,t,g, or c
  misc_feature (34)..(34): n equals a,t,g, or c
  misc_feature (127)..(128): n equals a,t,g, or c
  misc_feature (330)..(330): n equals a,t,g, or c
  misc_feature (364)..(364): n equals a,t,g, or c
  misc_feature (377)..(377): n equals a,t,g, or c
  misc_feature (389)..(389): n equals a,t,g, or c
  misc_feature (391)..(391): n equals a,t,g, or c
  misc_feature (397)..(397): n equals a,t,g, or c
  misc_feature (422)..(422): n equals a,t,g, or c
  misc_feature (426)..(426): n equals a,t,g, or c
  misc_feature (453)..(453): n equals a,t,g, or c
  misc_feature (465)..(465): n equals a,t,g, or c
  misc_feature (471)..(471): n equals a,t,g, or c
  misc_feature (479)..(480): n equals a,t,g, or c
  misc_feature (488)..(488): n equals a,t,g, or c
  misc_feature (497)..(497): n equals a,t,g, or c
  misc_feature (500)..(500): n equals a,t,g, or c
  misc_feature (516)..(517): n equals a,t,g, or c
  misc_feature (520)..(520): n equals a,t,g, or c
  misc_feature (525)..(525): n equals a,t,g, or c
  misc_feature (537)..(537): n equals a,t,g, or c
  misc_feature (546)..(546): n equals a,t,g, or c
attngggcacgacaacagncancagttccagggncaatggtttgtgctcaattggctttaggcctttgttaccaaactgatcactgtggccctgagggtgctgttacttagaatattcccacctttnnctgagaggctgatgttggggtcacttccccctgaactaaagtccaggggctgcatgggtgagggttgagtaactcagtactctaaggaggaaaggaaggggaatatacactgttagttaacagtggttattcctgtattctctcttgtttggattctactgggggatttctttctttttttgagtctttattgacattaggnatgagagatagaaacagggtgagagaggaagtanaatttaaatgtgnattctttccacntnttaccngaactcaaccgtatttttgggatcnatanatccctacttttcccctggatttattnccaaaaatcttngggggnaccccagnnaatttggnaccctaaantcnggttaaattaaggccnnggnaaggnggttccgggggncaaattccngggggctttattttggg

SEQ ID NO: 3638 - DNA, 345 bp, Homo sapiens
  misc_feature (10)..(10): n equals a,t,g, or c
  misc_feature (56)..(56): n equals a,t,g, or c
  misc_feature (62)..(62): n equals a,t,g, or c
  misc_feature (65)..(65): n equals a,t,g, or c
  misc_feature (111)..(111): n equals a,t,g, or c
  misc_feature (124)..(124): n equals a,t,g, or c
  misc_feature (126)..(126): n equals a,t,g, or c
  misc_feature (130)..(130): n equals a,t,g, or c
  misc_feature (267)..(267): n equals a,t,g, or c
  misc_feature (270)..(270): n equals a,t,g, or c
  misc_feature (278)..(278): n equals a,t,g, or c
  misc_feature (291)..(292): n equals a,t,g, or c
  misc_feature (314)..(314): n equals a,t,g, or c
  misc_feature (322)..(322): n equals a,t,g, or c
  misc_feature (339)..(339): n equals a,t,g, or c
aattcggcanagagcaaagccagttcccttccaggaagcctgcagcgttcacgaanacaatntgnatgtgaatgctgctgcaggctgccaaggcacatgcatgctgctggnacagtctgtgcgnangggncgacttaggtgcaggtgccctgaatgcaggttcctatgcgtcactaggtaagagaactgattatggaaaattgtaccatgttctctccctgatctctgtgaagacaagttcatataccttaatcatttctattcatnctngtaatttnaggttggtccccnntggtttaaaaaaaattcttttnttgggggnacaaaatttttgggggnattttg

SEQ ID NO: 3639 - DNA, 508 bp, Homo sapiens
  misc_feature (11)..(11): n equals a,t,g, or c
  misc_feature (15)..(15): n equals a,t,g, or c
  misc_feature (25)..(25): n equals a,t,g, or c
  misc_feature (32)..(32): n equals a,t,g, or c
  misc_feature (34)..(34): n equals a,t,g, or c
  misc_feature (80)..(80): n equals a,t,g, or c
  misc_feature (92)..(92): n equals a,t,g, or c
  misc_feature (100)..(100): n equals a,t,g, or c
  misc_feature (146)..(146): n equals a,t,g, or c
  misc_feature (245)..(245): n equals a,t,g, or c
  misc_feature (274)..(274): n equals a,t,g, or c
  misc_feature (279)..(279): n equals a,t,g, or c
  misc_feature (295)..(295): n equals a,t,g, or c
  misc_feature (306)..(306): n equals a,t,g, or c
  misc_feature (320)..(320): n equals a,t,g, or c
  misc_feature (322)..(322): n equals a,t,g, or c
  misc_feature (339)..(339): n equals a,t,g, or c
  misc_feature (342)..(342): n equals a,t,g, or c
  misc_feature (355)..(355): n equals a,t,g, or c
  misc_feature (359)..(359): n equals a,t,g, or c
  misc_feature (361)..(361): n equals a,t,g, or c
  misc_feature (364)..(364): n equals a,t,g, or c
  misc_feature (368)..(368): n equals a,t,g, or c
  misc_feature (395)..(395): n equals a,t,g, or c
  misc_feature (398)..(398): n equals a,t,g, or c
  misc_feature (405)..(405): n equals a,t,g, or c
  misc_feature (410)..(410): n equals a,t,g, or c
  misc_feature (417)..(417): n equals a,t,g, or c
  misc_feature (431)..(431): n equals a,t,g, or c
  misc_feature (448)..(448): n equals a,t,g, or c
  misc_feature (465)..(465): n equals a,t,g, or c
  misc_feature (478)..(478): n equals a,t,g, or c
  misc_feature (481)..(481): n equals a,t,g, or c
  misc_feature (484)..(484): n equals a,t,g, or c
  misc_feature (488)..(488): n equals a,t,g, or c
  misc_feature (492)..(492): n equals a,t,g, or c
  misc_feature (496)..(496): n equals a,t,g, or c
  misc_feature (505)..(505): n equals a,t,g, or c
gaattcggcanaggnaaaggcctgnacttggngncgtcatcctccgccgaccatgccagctgcctggggccttctgctgntgctggaatgtnatcttttncttctgaactctggctgggagtgcagagttgcatctccctctggcntcctcacatgcttctgctcagggcccctgcccagccctcaatttagagtttctggtctaattcctgaccagtgatgtaattatttatcttcctgccctnatcctgggggtgcaaacagcaaacttggnatttntgtttcaggctttggnaaggttgggtnccagtttccatctncngtttagaagaactgggnggntgcctgctgtggngttngnggnttgnggttcaagggttcctgcttctgtgaantgnccaattntttgnttcaggnccagaacggtgagnagttggggatttggctnagggagggtaagttggngtttccagaggtnagntgngggnggangaanttagatggnagg

SEQ ID NO: 3640 - DNA, 509 bp, Homo sapiens
  misc_feature (11)..(11): n equals a,t,g, or c
  misc_feature (15)..(15): n equals a,t,g, or c
  misc_feature (71)..(71): n equals a,t,g, or c
  misc_feature (73)..(73): n equals a,t,g, or c
  misc_feature (82)..(82): n equals a,t,g, or c
  misc_feature (91)..(91): n equals a,t,g, or c
  misc_feature (126)..(127): n equals a,t,g, or c
  misc_feature (132)..(133): n equals a,t,g, or c
  misc_feature (206)..(206): n equals a,t,g, or c
  misc_feature (246)..(246): n equals a,t,g, or c
  misc_feature (296)..(296): n equals a,t,g, or c
  misc_feature (327)..(327): n equals a,t,g, or c
  misc_feature (333)..(333): n equals a,t,g, or c
  misc_feature (367)..(367): n equals a,t,g, or c
  misc_feature (372)..(372): n equals a,t,g, or c
  misc_feature (389)..(389): n equals a,t,g, or c
  misc_feature (406)..(406): n equals a,t,g, or c
  misc_feature (418)..(418): n equals a,t,g, or c
  misc_feature (421)..(421): n equals a,t,g, or c
  misc_feature (424)..(424): n equals a,t,g, or c
  misc_feature (435)..(435): n equals a,t,g, or c
  misc_feature (441)..(441): n equals a,t,g, or c
  misc_feature (447)..(447): n equals a,t,g, or c
  misc_feature (454)..(455): n equals a,t,g, or c
  misc_feature (457)..(458): n equals a,t,g, or c
  misc_feature (460)..(461): n equals a,t,g, or c
  misc_feature (465)..(465): n equals a,t,g, or c
  misc_feature (471)..(471): n equals a,t,g, or c
  misc_feature (474)..(474): n equals a,t,g, or c
  misc_feature (482)..(482): n equals a,t,g, or c
  misc_feature (488)..(488): n equals a,t,g, or c
  misc_feature (506)..(506): n equals a,t,g, or c
gaattcggcanagtncttcatgtttgttaggtggaggtgttttgttgctgttacttttaataaacatctcntntgtcattanaatggaggnaaggatgtttttctttatgcacaaaaagaagaaannatggnnatggtgttaatgttaatttctcaactttgtgtttaaatgtttaccatttaacaaatatcattaaggaaacagntttaaaattggaatttcctaaacattatagtggatgtttntgaataatttgcaaacaacaggtcaataggaaataaaaatggaatttttnaagttaatgtattattttttacttaaatccnttatcnttttgcagttgtcccgactttattagacaggggnttgtnaataaacctggggaccncaggctaggtttttttnggaccggccatntgntcngtttttggttngtttgnggttanggttagnntnngnnaatngtttangancgttttangtaggnttttcccacccccaggtnggt

SEQ ID NO: 3641 - DNA, 60 bp, Homo sapiens
  misc_feature (11)..(11): n equals a,t,g, or c
  misc_feature (14)..(14): n equals a,t,g, or c
  misc_feature (22)..(22): n equals a,t,g, or c
  misc_feature (27)..(27): n equals a,t,g, or c
  misc_feature (33)..(33): n equals a,t,g, or c
  misc_feature (60)..(60): n equals a,t,g, or c
aattcggcacnggntcagccgnaagtncctctncccaagaaagtctaggtgttgtccaan

SEQ ID NO: 3642 - DNA, 391 bp, Homo sapiens
  misc_feature (10)..(10): n equals a,t,g, or c
  misc_feature (18)..(18): n equals a,t,g, or c
  misc_feature (20)..(20): n equals a,t,g, or c
  misc_feature (49)..(49): n equals a,t,g, or c
  misc_feature (51)..(51): n equals a,t,g, or c
  misc_feature (66)..(66): n equals a,t,g, or c
  misc_feature (71)..(71): n equals a,t,g, or c
  misc_feature (235)..(236): n equals a,t,g, or c
  misc_feature (247)..(247): n equals a,t,g, or c
  misc_feature (253)..(253): n equals a,t,g, or c
  misc_feature (259)..(259): n equals a,t,g, or c
  misc_feature (272)..(272): n equals a,t,g, or c
  misc_feature (276)..(276): n equals a,t,g, or c
  misc_feature (281)..(282): n equals a,t,g, or c
  misc_feature (292)..(292): n equals a,t,g, or c
  misc_feature (302)..(302): n equals a,t,g, or c
  misc_feature (312)..(313): n equals a,t,g, or c
  misc_feature (317)..(317): n equals a,t,g, or c
  misc_feature (324)..(324): n equals a,t,g, or c
  misc_feature (329)..(330): n equals a,t,g, or c
  misc_feature (334)..(334): n equals a,t,g, or c
  misc_feature (338)..(338): n equals a,t,g, or c
  misc_feature (348)..(348): n equals a,t,g, or c
  misc_feature (354)..(354): n equals a,t,g, or c
  misc_feature (356)..(356): n equals a,t,g, or c
  misc_feature (358)..(358): n equals a,t,g, or c
  misc_feature (377)..(377): n equals a,t,g, or c
aattcggcanagcacacntntaatctcagctactcagtctcctgagtangnaagatggacacctgnccagncacacgacagctaattggttgggtgtggtggggctttccaatgattacttattaatgattacttatgaaaaacaacaacaaaaaagccatcttgaagctgcttttaatgagagaacaaatgtgctcccaagcaacagagcagcgaaaatttttttattactggnnttctaactttnccctgntaactntaactgtcttcangttncaccnnatgtgacttngggggggatnttttcaaccnngggnttttaanccccnntttntggnggggcttttnaaactnantntaaaattttgggggggaanttttaacagggggg

SEQ ID NO: 3643 - DNA, 389 bp, Homo sapiens
  misc_feature (10)..(10): n equals a,t,g, or c
  misc_feature (14)..(14): n equals a,t,g, or c
  misc_feature (90)..(90): n equals a,t,g, or c
  misc_feature (293)..(293): n equals a,t,g, or c
  misc_feature (298)..(298): n equals a,t,g, or c
  misc_feature (313)..(313): n equals a,t,g, or c
  misc_feature (332)..(332): n equals a,t,g, or c
  misc_feature (335)..(335): n equals a,t,g, or c
  misc_feature (357)..(357): n equals a,t,g, or c
  misc_feature (360)..(360): n equals a,t,g, or c
  misc_feature (364)..(364): n equals a,t,g, or c
  misc_feature (381)..(381): n equals a,t,g, or c
aattcggcanaggnatccatgaagttgggcagggctacaccaatgccaagctttcgtgcatgttttttaatagaaattgtggcacaagtntgatatatcttataaatgggaacttattaagagagtgctttggtgatacctgggctgtctcaagcctgtgtgttcttcaaagattttgtctttgtaacttgtttatccatttggtgataaggtagctaatggcaattttgtagaattctgtttctcttttcctgtctctttctttgtttcctattttccacagttccgtaggnctcangtatgttcttttttnccatcttcaaagtctttgnacnctcacacatggcataatggggncanatancccatttaaggggcccnaaagggtt

SEQ ID NO: 3644 - DNA, 429 bp, Homo sapiens
  misc_feature (10)..(10): n equals a,t,g, or c
  misc_feature (131)..(131): n equals a,t,g, or c
  misc_feature (138)..(138): n equals a,t,g, or c
  misc_feature (237)..(237): n equals a,t,g, or c
  misc_feature (270)..(270): n equals a,t,g, or c
  misc_feature (272)..(272): n equals a,t,g, or c
  misc_feature (276)..(276): n equals a,t,g, or c
  misc_feature (286)..(286): n equals a,t,g, or c
  misc_feature (288)..(288): n equals a,t,g, or c
  misc_feature (292)..(292): n equals a,t,g, or c
  misc_feature (310)..(310): n equals a,t,g, or c
  misc_feature (317)..(317): n equals a,t,g, or c
  misc_feature (319)..(319): n equals a,t,g, or c
  misc_feature (322)..(322): n equals a,t,g, or c
  misc_feature (331)..(331): n equals a,t,g, or c
  misc_feature (337)..(337): n equals a,t,g, or c
  misc_feature (354)..(354): n equals a,t,g, or c
  misc_feature (365)..(365): n equals a,t,g, or c
  misc_feature (388)..(388): n equals a,t,g, or c
  misc_feature (398)..(398): n equals a,t,g, or c
  misc_feature (403)..(403): n equals a,t,g, or c
  misc_feature (406)..(406): n equals a,t,g, or c
  misc_feature (421)..(421): n equals a,t,g, or c
aattcggcanagcctgcccttacagtagtgtagcgccccctccctctttcggctggtgtagaatagccagtagtgtagtgcggtgtgcttttacgtgaatggcgggtgggcagcgggcggcgggctccggncaccgtnctgtccttgaatctgcccgcggcggcccgtgttgtgttttgtgctgtgtccacgcgctaaggcgaccccctcccccgtactgacttctcctataagcgnttcttttcgcatagtcacgtaacttcccacccnancctnttcctgtgtntnaagnaatttttaataatctaanaatttananggnttttttttntttggncaaaaaataattaaaangtttttttttnaaaaaaaaaaaaaaaaaaatttngggggggggncccgnaanccatttggccctaangggggggg

SEQ ID NO: 3645 - DNA, 497 bp, Homo sapiens
  misc_feature (2)..(2): n equals a,t,g, or c
  misc_feature (14)..(14): n equals a,t,g, or c
  misc_feature (305)..(305): n equals a,t,g, or c
  misc_feature (340)..(340): n equals a,t,g, or c
  misc_feature (352)..(352): n equals a,t,g, or c
  misc_feature (358)..(358): n equals a,t,g, or c
  misc_feature (383)..(383): n equals a,t,g, or c
  misc_feature (385)..(385): n equals a,t,g, or c
  misc_feature (397)..(397): n equals a,t,g, or c
  misc_feature (422)..(422): n equals a,t,g, or c
  misc_feature (434)..(434): n equals a,t,g, or c
  misc_feature (437)..(437): n equals a,t,g, or c
  misc_feature (439)..(440): n equals a,t,g, or c
  misc_feature (461)..(461): n equals a,t,g, or c
  misc_feature (466)..(466): n equals a,t,g, or c
  misc_feature (481)..(481): n equals a,t,g, or c
anttcggcagagtncataacctaatggccttggacaccagattctttcccattctgtccatgaatcatcttccccacacacaatcattcatatctactcacctaacagcaacactggggagagcctggagcatccggtacttgccctatgggagaggggacgctggaggagtggctgcatgtatctgaataatacagaccctgtcctttctcccagtgctgggatttctccatgtgagggggcagcaggacacccagggatctagcgtgggggaggagaggagcctaatgagaaaatgaccattncaaagcctgcccttcattgggtctggtttcaagtnttccaaaccagntttggntggttagcagagacttcaagggtgntncagccaaacgtntttggggcattaccatgacctgggngggggaaggtgnacntnnggacgtttgagggttccagcntaggnagccaggggccttgnacaaaaaggggggttg

SEQ ID NO: 3646 - DNA, 379 bp, Homo sapiens
  misc_feature (68)..(68): n equals a,t,g, or c
  misc_feature (92)..(92): n equals a,t,g, or c
  misc_feature (141)..(141): n equals a,t,g, or c
  misc_feature (145)..(145): n equals a,t,g, or c
  misc_feature (183)..(183): n equals a,t,g, or c
  misc_feature (190)..(190): n equals a,t,g, or c
  misc_feature (202)..(203): n equals a,t,g, or c
  misc_feature (215)..(215): n equals a,t,g, or c
  misc_feature (231)..(231): n equals a,t,g, or c
  misc_feature (245)..(245): n equals a,t,g, or c
  misc_feature (256)..(256): n equals a,t,g, or c
  misc_feature (269)..(269): n equals a,t,g, or c
  misc_feature (278)..(278): n equals a,t,g, or c
  misc_feature (284)..(284): n equals a,t,g, or c
  misc_feature (291)..(291): n equals a,t,g, or c
  misc_feature (296)..(296): n equals a,t,g, or c
  misc_feature (300)..(300): n equals a,t,g, or c
  misc_feature (302)..(302): n equals a,t,g, or c
  misc_feature (309)..(309): n equals a,t,g, or c
  misc_feature (312)..(312): n equals a,t,g, or c
  misc_feature (315)..(315): n equals a,t,g, or c
  misc_feature (318)..(318): n equals a,t,g, or c
  misc_feature (322)..(322): n equals a,t,g, or c
  misc_feature (324)..(325): n equals a,t,g, or c
  misc_feature (328)..(328): n equals a,t,g, or c
  misc_feature (330)..(330): n equals a,t,g, or c
  misc_feature (338)..(340): n equals a,t,g, or c
  misc_feature (345)..(345): n equals a,t,g, or c
  misc_feature (350)..(350): n equals a,t,g, or c
  misc_feature (354)..(354): n equals a,t,g, or c
  misc_feature (356)..(356): n equals a,t,g, or c
  misc_feature (365)..(365): n equals a,t,g, or c
aattcgacacgaggggacttttacaaccccgtggtgcccgaggtgcagaagcggagaatgggcgcggngcctgtacgtgggctgggcggccncggcgctgcagctgctggggggcgcgctgctctgctgctcgtttccccnacgngaagaagaagtacacggccaccaaggtcgtctactccncgccggntccaccggcccnngaagccagcctnggcacagttacgaccncaagactacgtgtnaagggacagangcaaggtagaccncaccaccancaccancagcatnaacancatnancatcggntgnttnttngggnanncangntcatttcnnnggtgnaagtnttgntnttggttggncaagtctatttttt

SEQ ID NO: 3647 - DNA, 497 bp, Homo sapiens
  misc_feature (10)..(10): n equals a,t,g, or c
  misc_feature (319)..(319): n equals a,t,g, or c
  misc_feature (342)..(342): n equals a,t,g, or c
  misc_feature (350)..(350): n equals a,t,g, or c
  misc_feature (373)..(373): n equals a,t,g, or c
  misc_feature (398)..(398): n equals a,t,g, or c
  misc_feature (405)..(405): n equals a,t,g, or c
  misc_feature (415)..(415): n equals a,t,g, or c
  misc_feature (437)..(437): n equals a,t,g, or c
  misc_feature (450)..(450): n equals a,t,g, or c
  misc_feature (462)..(462): n equals a,t,g, or c
  misc_feature (469)..(470): n equals a,t,g, or c
  misc_feature (487)..(487): n equals a,t,g, or c
aattcggcanaggtttgtgggagtgcagtagtaaagatttgaagatatgggaagaattgcatatcctggctatagtgaaaaatcatagtgtaaaaataaatgggaataaagtgggaaacactgtatcatgtttgctttgtacagctttaatggaaaaaggaaaggaaagaatacatatgaaaagaaggcagtcccttggcactgcctgttctcaatgctgtgtgctgtggactggggacactttaattaccacgtacaattttatggactgttcatgagaagcttctttttaactttttcatggattgccgttaaaggnaaatatagaaggatagaagaggntttttcancacgttgggcaggaactgttccnccctggtctatgggttagagcctgnaaactgncccaggttcnatcttttcagcatttttcttgngaactttctgtgnagggaagttccnggggccnntaaaaccagggtggtcnggaaggtatc

SEQ ID NO: 3648 - DNA, 441 bp, Homo sapiens
  misc_feature (2)..(2): n equals a,t,g, or c
  misc_feature (34)..(34): n equals a,t,g, or c
  misc_feature (39)..(39): n equals a,t,g, or c
  misc_feature (118)..(118): n equals a,t,g, or c
  misc_feature (162)..(162): n equals a,t,g, or c
  misc_feature (350)..(351): n equals a,t,g, or c
  misc_feature (385)..(385): n equals a,t,g, or c
  misc_feature (387)..(387): n equals a,t,g, or c
  misc_feature (412)..(412): n equals a,t,g, or c
  misc_feature (414)..(415): n equals a,t,g, or c
  misc_feature (420)..(420): n equals a,t,g, or c
  misc_feature (436)..(436): n equals a,t,g, or c
anttcggcagagaggccacaaggacctgccagcnttggnacctggtgatcagtgaaggggagagaggaaagagcaggagagctggatggcccggggcatctggtcagagaggccagtntttcagagttaaagttttcagaatgagagcacgtaccaggagtntcctcagggttggtttgctcaggtggaatggggcagaaggccacggactgacgggtgaagagacttaggccagggaggggatgggtcaccccctgaatgctgaagtcatccagggtggcagcaggaggtgatgcctgggagagattgactagtgggtcagtaagggagaaaagaaaggaggggcgttnntaacctttagaaggttgttcccttcgggaggatngnttttagcacgttggttcaaaatttncnncctgnagggaggcaagatttncattt

SEQ ID NO: 3649 - DNA, 510 bp, Homo sapiens
  misc_feature (15)..(15): n equals a,t,g, or c
  misc_feature (35)..(35): n equals a,t,g, or c
  misc_feature (65)..(65): n equals a,t,g, or c
  misc_feature (131)..(131): n equals a,t,g, or c
  misc_feature (138)..(138): n equals a,t,g, or c
  misc_feature (184)..(184): n equals a,t,g, or c
  misc_feature (235)..(235): n equals a,t,g, or c
  misc_feature (257)..(257): n equals a,t,g, or c
  misc_feature (303)..(303): n equals a,t,g, or c
  misc_feature (376)..(376): n equals a,t,g, or c
  misc_feature (391)..(391): n equals a,t,g, or c
  misc_feature (394)..(394): n equals a,t,g, or c
  misc_feature (399)..(399): n equals a,t,g, or c
  misc_feature (404)..(404): n equals a,t,g, or c
  misc_feature (409)..(409): n equals a,t,g, or c
  misc_feature (423)..(423): n equals a,t,g, or c
  misc_feature (428)..(428): n equals a,t,g, or c
  misc_feature (433)..(433): n equals a,t,g, or c
  misc_feature (447)..(447): n equals a,t,g, or c
  misc_feature (471)..(472): n equals a,t,g, or c
  misc_feature (474)..(474): n equals a,t,g, or c
  misc_feature (480)..(480): n equals a,t,g, or c
  misc_feature (484)..(485): n equals a,t,g, or c
  misc_feature (492)..(492): n equals a,t,g, or c
  misc_feature (502)..(502): n equals a,t,g, or c
  misc_feature (510)..(510): n equals a,t,g, or c
aattcggcagagggntgagtggatttaagataatnatgtcagtctccagagggaagatgccagantgaataagctactaggacagaagagtactgtatgcaagtggaatgtactgggaatcaagattttgnaagatgnatgcaattgcctggagatgacaaatcctagggccatgactatgtgnagtaggtggcagaggtgggtggaggaagaaatggtcagagctactaggccnaagagctaaagggccagagttnatagagattccaccttcatggaatgctggaatttggccaagaatgnttttcggacagagaggagaagaggaagaagtaagcccagacattccaagtttatccattcatttattaaccancaaattatttacagncanttacntggcnctttnaaatttttcccaancaccnttccntgttactttcaggngtttttaccccccttttaatcttnnancctttncccnnttcctcntttttaaagnttgattan

SEQ ID NO: 3650 - DNA, 338 bp, Homo sapiens
  misc_feature (155)..(155): n equals a,t,g, or c
  misc_feature (189)..(189): n equals a,t,g, or c
  misc_feature (199)..(199): n equals a,t,g, or c
  misc_feature (240)..(240): n equals a,t,g, or c
  misc_feature (294)..(294): n equals a,t,g, or c
  misc_feature (299)..(299): n equals a,t,g, or c
  misc_feature (302)..(302): n equals a,t,g, or c
  misc_feature (315)..(315): n equals a,t,g, or c
  misc_feature (329)..(329): n equals a,t,g, or c
aattcggcacaggatttaactaactccagggtctcagctcatctttctctagcccagcaagttcaagaggccttaattaagcaccgcagaggaccaaggaggtagaaattcatctctgaaagtggctctctctgggccctggcctggaagacccnctgctttcctggtgggcaccacgagggggcaggnacacatggtncttccatttcacctctgttggcctcctcccggtggtatttnaccgttgactcccatgcttgaaggtgggtctgtaaatggccgagggaccctgancattnagnggttgaaagggtncctgggaaaggttnggaggaatt

SEQ ID NO: 3651 - DNA, 335 bp, Homo sapiens
  misc_feature (14)..(14): n equals a,t,g, or c
  misc_feature (49)..(49): n equals a,t,g, or c
  misc_feature (244)..(244): n equals a,t,g, or c
  misc_feature (252)..(252): n equals a,t,g, or c
  misc_feature (255)..(256): n equals a,t,g, or c
  misc_feature (259)..(259): n equals a,t,g, or c
  misc_feature (264)..(264): n equals a,t,g, or c
  misc_feature (286)..(286): n equals a,t,g, or c
  misc_feature (327)..(327): n equals a,t,g, or c
aattcggcagaggntaagggcacatggcatgcatcttcaaagctgacancatttttataatactttggcttcctttttgtgtgttttttatagatgtttatagctgtcttcatatcttgttgatatgttgacacttggaagggactagagatgtaagtaaacaatctcaagcgtagattatatggcaatatgcagggtcccactgctagctaggtagtgctggagcctgtgtgcactctggctnctaaacantgnncangcttncagctggcaccacatactatgnacatgttttctgggaaagtttccttggaaaaatgactgttnagtaaaat

SEQ ID NO: 3652 - DNA, 330 bp, Homo sapiens
  misc_feature (10)..(10): n equals a,t,g, or c
  misc_feature (78)..(78): n equals a,t,g, or c
  misc_feature (208)..(208): n equals a,t,g, or c
  misc_feature (309)..(311): n equals a,t,g, or c
  misc_feature (319)..(319): n equals a,t,g, or c
aattcggcanagagcaagatggtggattactgctttcatagagtgtagacagacctctcagtagagacaacggttganttgggccttgtggatgagtaaagcttcatgaaaaacttaatatgttgcccttattttttacactttgcagaggactgacgttattttccatactggcatgtgggaagctgtcactgacttatgacttgtncattcattctaataaagtgacctcacagatgtgtttataaatgcattaaaatccaggcatgttttcagagaaagtttttagaatataaatgttataatgtnnnaaccacgncctttttttcc

SEQ ID NO: 3653 - DNA, 400 bp, Homo sapiens
  misc_feature (123)..(123): n equals a,t,g, or c
  misc_feature (171)..(171): n equals a,t,g, or c
  misc_feature (188)..(188): n equals a,t,g, or c
  misc_feature (274)..(274): n equals a,t,g, or c
  misc_feature (289)..(289): n equals a,t,g, or c
  misc_feature (296)..(296): n equals a,t,g, or c
  misc_feature (309)..(309): n equals a,t,g, or c
  misc_feature (333)..(333): n equals a,t,g, or c
  misc_feature (338)..(338): n equals a,t,g, or c
  misc_feature (358)..(358): n equals a,t,g, or c
  misc_feature (397)..(397): n equals a,t,g, or c
aattcggcagagggaaccaggtccctgcacggcacccacgcaggtgtcccggtctgcataagcctcgtgtgcctttgtaaagtccacctacacttttgaaccagctctcgctgcccgcatgtntttggcgctgtgctaggggcgggagttcttccagactcttggaccagnccgccctgaccaccagntctacttcccaacccccactgcctgagaggtctctatcagtgtcctgcctgaattctttccttcaagtgaagatgtgactgactanctcctcgagttgttnatgaggntgaaagaatgggnattaaaagcatttggtttaaagtnggtgntcaataaaattgttagtggnttttattcaaaaaaaaaaaaaaaaatttggggggggggnccg

SEQ ID NO: 3654 - DNA, 426 bp, Homo sapiens
  misc_feature (282)..(282): n equals a,t,g, or c
  misc_feature (319)..(319): n equals a,t,g, or c
  misc_feature (344)..(344): n equals a,t,g, or c
  misc_feature (349)..(349): n equals a,t,g, or c
  misc_feature (351)..(351): n equals a,t,g, or c
  misc_feature (371)..(371): n equals a,t,g, or c
  misc_feature (373)..(373): n equals a,t,g, or c
  misc_feature (403)..(403): n equals a,t,g, or c
  misc_feature (411)..(411): n equals a,t,g, or c
aattcggcacgagcttttccagcccacacagccatgtcatgattccattagtcatgattccatgactaatcctcaattggaaatgcccaccattgatgttcttcacttagagaaacattctgatgcaccttttcaaaactgtttttatgtttcctgttaagttatgcaatgtctctacttgggaaaaagtttggaaggggacatttgtaaccatacttacgtattttttgatgtttctccattacttttcattcatgtgggctgggcatataggaaaccaantattaaaacaaggtgggcacaagagtgtatgtggggntgagtaaggaaaatggaaagccagnaacantntttattacacaatggcattncncatttttggaaaacaggctgttgggacccngccctgtnaaaggaaggtttggg

SEQ ID NO: 3655 - DNA, 318 bp, Homo sapiens
  misc_feature (10)..(10): n equals a,t,g, or c
  misc_feature (13)..(13): n equals a,t,g, or c
  misc_feature (29)..(29): n equals a,t,g, or c
  misc_feature (249)..(249): n equals a,t,g, or c
  misc_feature (267)..(267): n equals a,t,g, or c
  misc_feature (296)..(296): n equals a,t,g, or c
  misc_feature (316)..(316): n equals a,t,g, or c
aattcggcanagnctttgtagttactgtnttgtggacggtcataagcctgggtgatgtgccaggatcatgggtccctcggagacccctttctctgtccctgaggaatatgtgagaaccagacggctcattttacgtcctttgagaagacagctgcggggacgtcttaggatgattcactgaggccagtcagtggtgggaccaagagctctggggaacataatttctatcagcctggcgtcttacttggncgccccctccactccctnacccacccctggcaaccctgtggtctttnttttgtgttagaccatcagntt

SEQ ID NO: 3656 - DNA, 298 bp, Homo sapiens
  misc_feature (198)..(198): n equals a,t,g, or c
  misc_feature (211)..(211): n equals a,t,g, or c
  misc_feature (220)..(220): n equals a,t,g, or c
  misc_feature (225)..(225): n equals a,t,g, or c
  misc_feature (288)..(288): n equals a,t,g, or c
aattcggcacagcttaatcacccttgctcctcctgggtgcctggaagatggactggcagagacctgtttgttgcgttttgtgctttgatgccaggaatgccgcctagtttatgtccccggtgggggcacacagcggggggcgccaggttttccttgtcccccagctgctctgccccttttccccttcttccctgactncaggcctgaaccngtcccgtgnctgtnaataaatctttgtgaaattaaaaaaaaaaaaaaaaaaaactcgggggggggcccggtaccaanttgggccctt

SEQ ID NO: 3657 - DNA, 579 bp, Homo sapiens
  misc_feature (1)..(2): n equals a,t,g, or c
  misc_feature (4)..(4): n equals a,t,g, or c
  misc_feature (13)..(13): n equals a,t,g, or c
  misc_feature (51)..(51): n equals a,t,g, or c
  misc_feature (98)..(98): n equals a,t,g, or c
  misc_feature (107)..(107): n equals a,t,g, or c
  misc_feature (119)..(119): n equals a,t,g, or c
  misc_feature (130)..(130): n equals a,t,g, or c
  misc_feature (132)..(132): n equals a,t,g, or c
  misc_feature (143)..(143): n equals a,t,g, or c
  misc_feature (147)..(147): n equals a,t,g, or c
  misc_feature (152)..(152): n equals a,t,g, or c
  misc_feature (170)..(170): n equals a,t,g, or c
  misc_feature (180)..(180): n equals a,t,g, or c
  misc_feature (185)..(185): n equals a,t,g, or c
  misc_feature (210)..(210): n equals a,t,g, or c
  misc_feature (213)..(213): n equals a,t,g, or c
  misc_feature (287)..(287): n equals a,t,g, or c
  misc_feature (319)..(319): n equals a,t,g, or c
  misc_feature (340)..(340): n equals a,t,g, or c
  misc_feature (415)..(415): n equals a,t,g, or c
  misc_feature (428)..(428): n equals a,t,g, or c
  misc_feature (446)..(446): n equals a,t,g, or c
  misc_feature (521)..(522): n equals a,t,g, or c
  misc_feature (543)..(543): n equals a,t,g, or c
  misc_feature (556)..(556): n equals a,t,g, or c
  misc_feature (569)..(569): n equals a,t,g, or c
nncncccacactntacaccgcagcctgccggcacggtccggcattcccggngtcttacgtgccaccacggcgttgtacctgtaggactctcattcggnatgattggnatagcttctggnatttgttcaantnttgggtatgtntaanctgtnatgtactagtgttctgtntgtcattgtnttgtnaattacaccataatgctaatttaanganactccaaatctcaatgaagccagctcacagtgctgtgtgccccggtcacctagcaagctgccgaaccaaaagantttgcaccccgctgcgggcccacgtggttggngccctgccctggcaggtcatnctgtgctcggaggccatctcgggcacaggcccaacccggccccaaccctccagaacagggctcacgttactcaancatcctggctgcnggtctgtctgaaacagcnggggcttgaggacgtttgtctgtcgtgatgggcaaggcaaaagtctggatgttgtgtgtatcgagaggccaaagnntgtggcaatgcaaggggaaanccgatttgtcctngtgaagcggcaantctgaaggtt

SEQ ID NO: 3658 - DNA, 191 bp, Homo sapiens
  misc_feature (12)..(12): n equals a,t,g, or c
  misc_feature (21)..(21): n equals a,t,g, or c
  misc_feature (151)..(151): n equals a,t,g, or c
  misc_feature (170)..(170): n equals a,t,g, or c
  misc_feature (176)..(176): n equals a,t,g, or c
  misc_feature (179)..(179): n equals a,t,g, or c
  misc_feature (189)..(189): n equals a,t,g, or c
gcacaactgctnagtagatgnttctgagtattacaaaaatcactggttattacctgcaggatattaaaaaacatttgaaaaagagaaaaagaactatcagcgtttagaaatgatgatagatattgaatctttgaattgaattttaacaatncattctagtaatcagagtntacttnttntatacaacangg

SEQ ID NO: 3659 - DNA, 465 bp, Homo sapiens
  misc_feature (293)..(293): n equals a,t,g, or c
  misc_feature (311)..(311): n equals a,t,g, or c
  misc_feature (313)..(314): n equals a,t,g, or c
  misc_feature (364)..(364): n equals a,t,g, or c
  misc_feature (373)..(373): n equals a,t,g, or c
  misc_feature (386)..(386): n equals a,t,g, or c
  misc_feature (411)..(411): n equals a,t,g, or c
  misc_feature (432)..(432): n equals a,t,g, or c
  misc_feature (436)..(436): n equals a,t,g, or c
tcgacccacgcgtccgcccacgcgtccgcccacgcgtccgcccacgcgtccggattaaacacacactctgctattttttcacttcttggaggtagaagtcgagtatgaggcagttattttttagagtgtggaattatagtctttccttgctcctagttattctgtatatctttactttgtaggtaaaaataaatgtttatttaaaacaatttttaaaattataaatttatttttatagccatatgtaggatataaagatttatatagattatatactcaagctacttaatgcnttaattctagctactcancnngaaatagtaaacagttttacggaaataaactctacagacagatgccgtangaggagccntggaagtagaaangtattcgccttgcacacggagtggntttagccgacaaccccagtangttnccataacggccataccttggaaatccacc

SEQ ID NO: 3660 - DNA, 316 bp, Homo sapiens
  misc_feature (22)..(22): n equals a,t,g, or c
  misc_feature (85)..(85): n equals a,t,g, or c
  misc_feature (124)..(124): n equals a,t,g, or c
  misc_feature (131)..(131): n equals a,t,g, or c
  misc_feature (157)..(157): n equals a,t,g, or c
  misc_feature (161)..(161): n equals a,t,g, or c
  misc_feature (175)..(175): n equals a,t,g, or c
  misc_feature (191)..(191): n equals a,t,g, or c
  misc_feature (242)..(242): n equals a,t,g, or c
  misc_feature (248)..(248): n equals a,t,g, or c
  misc_feature (275)..(275): n equals a,t,g, or c
  misc_feature (277)..(277): n equals a,t,g, or c
  misc_feature (302)..(302): n equals a,t,g, or c
ggcacgaggcgaggcctcacanccggcgctccaagttcggggctggaggcgtcccggcttcctccctcccggagacgggaccggncccggccccgcgccccgggtcgctcccggcggcccctanccacctnctgagtcctggcctccccgggcgcanacantcccagccggccgnagcctggacacgccgngggccccccagtctcccgcggctgctcccccaggcatggcacaggggcctngtctgnactatgggcagcagcacggggacaagnanggttcgtatttgatgcttggggggncaaaagttgatggt

SEQ ID NO: 3661 - DNA, 191 bp, Homo sapiens
  misc_feature (89)..(89): n equals a,t,g, or c
  misc_feature (106)..(106): n equals a,t,g, or c
  misc_feature (140)..(140): n equals a,t,g, or c
  misc_feature (142)..(142): n equals a,t,g, or c
  misc_feature (156)..(156): n equals a,t,g, or c
  misc_feature (163)..(163): n equals a,t,g, or c
gagaaaggacactctggacttcagccaacaggactcttgagctgaagtgcagatgaccacattcaaggaagaaccttctgccccagctntgcaagatgaaaagctntcccacttggctcttatacttccacaagagcttngncaggaccaggttgntactggntcagcaactctgcagaaaatgtcctccc

SEQ ID NO: 3662 - DNA, 426 bp, Homo sapiens
  misc_feature (27)..(27): n equals a,t,g, or c
  misc_feature (306)..(306): n equals a,t,g, or c
  misc_feature (320)..(321): n equals a,t,g, or c
  misc_feature (323)..(323): n equals a,t,g, or c
  misc_feature (357)..(357): n equals a,t,g, or c
  misc_feature (385)..(385): n equals a,t,g, or c
  misc_feature (418)..(418): n equals a,t,g, or c
  misc_feature (420)..(420): n equals a,t,g, or c
  misc_feature (424)..(424): n equals a,t,g, or c
ggccagtacagtattttttaaggcttntaaagatgattagctcaccttgagataacaatcaggtaagatcataacaatgtctcatgatgtaaaaaatattaaagatatcaatactaagtgacagtatcactctaatataatatggatcagagcatttattttggggaggaaaacagtggtgattaccggcattttattaaacttaaaactttgtagaaagcaaacaaaattgttcttgggagaaaatcaacttttagattaaaaaaattttaagtatctaggagtatttaaatccttttcccatanataaaagtacagtnntnttggtggcagaatgaaaatcatgcaacttctagnatatagactatataatcagattgacagnatatagaatacatttatcagactagaagatgangnttanaa

SEQ ID NO: 3663 - DNA, 710 bp, Homo sapiens
  misc_feature (3)..(3): n equals a,t,g, or c
  misc_feature (13)..(13): n equals a,t,g, or c
  misc_feature (82)..(82): n equals a,t,g, or c
  misc_feature (130)..(130): n equals a,t,g, or c
  misc_feature (143)..(143): n equals a,t,g, or c
  misc_feature (147)..(147): n equals a,t,g, or c
  misc_feature (154)..(154): n equals a,t,g, or c
  misc_feature (156)..(156): n equals a,t,g, or c
  misc_feature (162)..(162): n equals a,t,g, or c
  misc_feature (179)..(179): n equals a,t,g, or c
  misc_feature (194)..(194): n equals a,t,g, or c
  misc_feature (196)..(196): n equals a,t,g, or c
  misc_feature (202)..(202): n equals a,t,g, or c
  misc_feature (207)..(207): n equals a,t,g, or c
  misc_feature (209)..(209): n equals a,t,g, or c
  misc_feature (212)..(213): n equals a,t,g, or c
  misc_feature (219)..(219): n equals a,t,g, or c
  misc_feature (221)..(221): n equals a,t,g, or c
  misc_feature (223)..(223): n equals a,t,g, or c
  misc_feature (236)..(236): n equals a,t,g, or c
  misc_feature (249)..(249): n equals a,t,g, or c
  misc_feature (274)..(274): n equals a,t,g, or c
  misc_feature (277)..(277): n equals a,t,g, or c
  misc_feature (281)..(281): n equals a,t,g, or c
  misc_feature (284)..(284): n equals a,t,g, or c
  misc_feature (292)..(292): n equals a,t,g, or c
  misc_feature (295)..(296): n equals a,t,g, or c
  misc_feature (310)..(310): n equals a,t,g, or c
  misc_feature (324)..(325): n equals a,t,g, or c
  misc_feature (329)..(329): n equals a,t,g, or c
  misc_feature (331)..(331): n equals a,t,g, or c
  misc_feature (336)..(336): n equals a,t,g, or c
  misc_feature (342)..(342): n equals a,t,g, or c
  misc_feature (352)..(352): n equals a,t,g, or c
  misc_feature (362)..(362): n equals a,t,g, or c
  misc_feature (370)..(370): n equals a,t,g, or c
  misc_feature (379)..(379): n equals a,t,g, or c
  misc_feature (383)..(383): n equals a,t,g, or c
  misc_feature (392)..(392): n equals a,t,g, or c
  misc_feature (395)..(396): n equals a,t,g, or c
  misc_feature (401)..(401): n equals a,t,g, or c
  misc_feature (404)..(404): n equals a,t,g, or c
  misc_feature (414)..(414): n equals a,t,g, or c
  misc_feature (459)..(459): n equals a,t,g, or c
  misc_feature (490)..(490): n equals a,t,g, or c
  misc_feature (499)..(499): n equals a,t,g, or c
  misc_feature (537)..(537): n equals a,t,g, or c
  misc_feature (543)..(543): n equals a,t,g, or c
  misc_feature (553)..(553): n equals a,t,g, or c
  misc_feature (556)..(556): n equals a,t,g, or c
  misc_feature (561)..(561): n equals a,t,g, or c
  misc_feature (569)..(569): n equals a,t,g, or c
  misc_feature (573)..(573): n equals a,t,g, or c
  misc_feature (577)..(577): n equals a,t,g, or c
  misc_feature (607)..(607): n equals a,t,g, or c
  misc_feature (619)..(619): n equals a,t,g, or c
  misc_feature (656)..(656): n equals a,t,g, or c
  misc_feature (667)..(667): n equals a,t,g, or c
  misc_feature (681)..(681): n equals a,t,g, or c
  misc_feature (688)..(688): n equals a,t,g, or c
  misc_feature (710)..(710): n equals a,t,g, or c
ggnactggactgncttgattgacatggggaagggggttagtagactatgtggattgcggcagcagaggctgcagcctaacgngtggatttaatgaccagcacgcaaggcacaaagcattttgcacagtgnttgttttcctgtnttgnacttacnantaaggnctatgggagtaccatgnaaaacgtttgctgtnantccttnttttntnaanngttttngntnaaaatttgatcgncttaactactgcnaacatagcctatttttgggcttaanaanctgnatnggaaactntcnncgtgcagatgctgnactgttctagaagnntttngntaaangggctnctaatttgantgtaatggcntttaaagnatacaatcnaacnttaaaaagntgnnaaaanggncttggaaccntatctttagttacttgaagagtttctagtttttttaaaatacagnttatgttaaaataatttttattaatttaganaagacaatnaatggctgtgagaaaaacggatttcttttggaatttcnttttgnggccattgtnaangaatngtttttcntttntaancgacaattttcctttggttaaaacttaaantggacatttaanttttggcaatctaagaggttaatttctgagggggaanacttataagcngttaagtttgcctntgggggntgggaaattttaaactggggcn

SEQ ID NO: 3664 - DNA, 634 bp, Homo sapiens
  misc_feature (135)..(135): n equals a,t,g, or c
  misc_feature (211)..(211): n equals a,t,g, or c
  misc_feature (304)..(304): n equals a,t,g, or c
  misc_feature (353)..(353): n equals a,t,g, or c
  misc_feature (534)..(534): n equals a,t,g, or c
  misc_feature (539)..(539): n equals a,t,g, or c
  misc_feature (578)..(578): n equals a,t,g, or c
  misc_feature (581)..(581): n equals a,t,g, or c
  misc_feature (592)..(592): n equals a,t,g, or c
  misc_feature (618)..(618): n equals a,t,g, or c
gatctaacaaaggcaaaaaggagaaaaaggggtactatgaattaaagaataaaagatggatcagattatttgaagagaaacctcatcatatcccacaacgggaacaggaaaaaaaaaacacacaatacattttanagaagtggcaagacaaaggaaagcaggtttaggctcccaaaggagggacctctgagaagttacctccacgaagcanctcggctggtgccagagagaacatcggtacaggtctgggaatttccctgggagctggccccaagccacagccctccccagctccgtagtttgnttggtcttcctctcctgggctcaatcatcttggacaagcctcactgcanggaaaacccctggggagacacagggcttgctttcccagcagaaggtcagtgtctgaagagaaactgggggtcccccagggaccagattcggctccggtggtaaggtgccccaggtggcccaataggagaggttatcttctgggagctcttccaggaggagtccacagtgcttggcccaagnttctntcttgaagaatccaagcataaggagcctttgtttgggancanaggagccctgngccttcttgagtcacccaccagctcnagtgccctggacctgg

SEQ ID NO: 3665 - DNA, 507 bp, Homo sapiens
  misc_feature (14)..(14): n equals a,t,g, or c
  misc_feature (37)..(37): n equals a,t,g, or c
  misc_feature (81)..(81): n equals a,t,g, or c
  misc_feature (277)..(277): n equals a,t,g, or c
  misc_feature (287)..(287): n equals a,t,g, or c
  misc_feature (289)..(289): n equals a,t,g, or c
  misc_feature (334)..(334): n equals a,t,g, or c
  misc_feature (360)..(360): n equals a,t,g, or c
  misc_feature (369)..(369): n equals a,t,g, or c
  misc_feature (464)..(464): n equals a,t,g, or c
  misc_feature (470)..(470): n equals a,t,g, or c
  misc_feature (478)..(478): n equals a,t,g, or c
  misc_feature (485)..(485): n equals a,t,g, or c
  misc_feature (505)..(505): n equals a,t,g, or c
gggcggcgactgtnacggtgacgaagacggcggcggnggctgacggcatttaacaaggcggtgtggtttactccatgcagntgtcaggagacctctgtatggcttttcaattttagttgaaattctctctccatggccttttggagtcccttgctgtatctccgaagtaaatttcaattactctacatttcatcaatgttggagtggcaagaaaaaggaggaacagatttggggtgaaaagttttgttttctaggtctaacaaactgtaaaatgttnaaaatagcananatgggtgaaaaaaaaaccagagccctttggactttcgcgaaaganttttcaaggattacctgcttcagcanaccccatcntgtgaccttgatttctggatcaagttatgtgggggacaaacgaagcacaggctcttcagggatgctggaacagatggtggatcaaaatggacttnatcacncatctgtngaagttnccttggattgaaaaactcanga

SEQ ID NO: 3666 - DNA, 433 bp, Homo sapiens
  misc_feature (9)..(9): n equals a,t,g, or c
  misc_feature (393)..(393): n equals a,t,g, or c
  misc_feature (428)..(428): n equals a,t,g, or c
  misc_feature (430)..(430): n equals a,t,g, or c
  misc_feature (432)..(433): n equals a,t,g, or c
gcagtgttnctgtctcacatttgaaaccaattttgaaattgggtagaagattcgtcttgttgcctaaacaatgccttaaccccattctctccccagaagggtcctacatttcttaagctattttcagctcctccacacctactcacttgcaatacttgtcataacaggaagccagtttcatatactgtaatccccaaacacattgcacccacacgtggggagcgtgaggggctgagcgaggagcgaggaggccaggccttccaaaaactggaggggctgagcactgagccgctcccaaggtggggcgtccccactcccaagcccaggattcagaagccagaatccacatccagacattcttggtttcctttctcatgcagttgctggtgactnttttttttttaataaagcatttgagtaggcaaaananann

SEQ ID NO: 3667 - DNA, 378 bp, Homo sapiens
  misc_feature (10)..(10): n equals a,t,g, or c
  misc_feature (261)..(261): n equals a,t,g, or c
  misc_feature (288)..(288): n equals a,t,g, or c
  misc_feature (338)..(339): n equals a,t,g, or c
  misc_feature (365)..(365): n equals a,t,g, or c
  misc_feature (378)..(378): n equals a,t,g, or c
ggtgcttcanaggtagccttggagggttggctgggacagcatggccctgttgctaaccccctgttttggtgtgtatgtgtgtgccacctacccatgcttgtctctgcgccccggcgcacctggcggggtcccggcaggaagtgcagcggcggctgggtggctggaccggaccagagctcagtgcttttggggaactggtgttggagggcgcgttccgaggaggcggagggggtggcccccggctacgagggggtgagcggntgctcttcctgttctctcggatgctgntggtggccaagcgcagggggctggagtacacctacaaaggccacatcttnntgagtttggggatggggtggggctanaatactacctacn

SEQ ID NO: 3668 - DNA, 282 bp, Homo sapiens
  misc_feature (26)..(26): n equals a,t,g, or c
  misc_feature (62)..(62): n equals a,t,g, or c
  misc_feature (77)..(77): n equals a,t,g, or c
  misc_feature (98)..(98): n equals a,t,g, or c
  misc_feature (150)..(150): n equals a,t,g, or c
  misc_feature (157)..(157): n equals a,t,g, or c
  misc_feature (228)..(228): n equals a,t,g, or c
  misc_feature (276)..(276): n equals a,t,g, or c
  misc_feature (278)..(278): n equals a,t,g, or c
  misc_feature (280)..(280): n equals a,t,g, or c
  misc_feature (282)..(282): n equals a,t,g, or c
gtagatttaaaaatttcctgaaatanttgaaaaattatttttgaggagaaaattgtatccangaaacccataatgtnaggatacttgatttttatatncagataattctttcatgcactgaatggaagacagtatatctgtatattaatntttgttnagattatgaatcatttaacccttatcctttattcttgtaataagactatttaatggggttctcttgtgatntccatctttatcaatgcattcgtgttggtcttgatgtatactacctgngntnan

SEQ ID NO: 3669 - DNA, 242 bp, Homo sapiens
  misc_feature (227)..(227): n equals a,t,g, or c
  misc_feature (232)..(232): n equals a,t,g, or c
  misc_feature (236)..(237): n equals a,t,g, or c
  misc_feature (239)..(239): n equals a,t,g, or c
gggagctctgggggttggaacaggaatgcatattcaggcgagaggcattctgagctggccttagcttaattacttcatttgatttttaatatagacataaaaatgcagatgaaccagagcttttgtaatgaaaatcatttccgaaggaatatttcagaccccactccgtcacctccagcctgcagaatgcgtccagaaataaattctgtgtctgtgtgaaaaaaaanaaaanctannangat

SEQ ID NO: 3670 - DNA, 479 bp, Homo sapiens
  misc_feature (123)..(123): n equals a,t,g, or c
  misc_feature (267)..(267): n equals a,t,g, or c
  misc_feature (364)..(364): n equals a,t,g, or c
  misc_feature (366)..(366): n equals a,t,g, or c
  misc_feature (452)..(452): n equals a,t,g, or c
  misc_feature (464)..(465): n equals a,t,g, or c
  misc_feature (467)..(467): n equals a,t,g, or c
  misc_feature (479)..(479): n equals a,t,g, or c
gtacatttaaaaaataatgccttttaaaatgtgggtagaactttttttattaacatggctttaatttatagcaaccatttgttacctaatcacagtaacacaacaaaataattagtgtatcanctttgaagatctcatttcacaaaagctaaaaaacacgttatgatatatccattactcaaactcataagcccttttgcatgcattgggcatagatttcatggaaaatcaaaagcatttagtctactttctgacattttcatctgntctttgaactaccttaataaaaaaaaattgttgcccttatgtagggtcaagtgacgtttgtctgtctgaaaatttccttggatcagcttatttctgngnaacttatgtctttggtatacagctatttgcctttttaactgatttttaacaggatactttaccttgggacttggaacacttaatgnaagcttataaanncncatgaaccattn

SEQ ID NO: 3671 - DNA, 491 bp, Homo sapiens
  misc_feature (2)..(2): n equals a,t,g, or c
  misc_feature (11)..(11): n equals a,t,g, or c
  misc_feature (19)..(19): n equals a,t,g, or c
  misc_feature (47)..(47): n equals a,t,g, or c
  misc_feature (49)..(49): n equals a,t,g, or c
  misc_feature (144)..(144): n equals a,t,g, or c
  misc_feature (169)..(169): n equals a,t,g, or c
  misc_feature (314)..(314): n equals a,t,g, or c
  misc_feature (330)..(330): n equals a,t,g, or c
  misc_feature (370)..(370): n equals a,t,g, or c
  misc_feature (428)..(428): n equals a,t,g, or c
  misc_feature (444)..(444): n equals a,t,g, or c
  misc_feature (465)..(465): n equals a,t,g, or c
  misc_feature (468)..(469): n equals a,t,g, or c
tnaacccccanaagccagnggagacgccagtgcctaaaagacatttntntgtttctcctactctgcaatgtcattctgtggatcatgcctgccttcggggcccgccctcatttcagcaacacagtggaggtggatttctacggntactccctctgggcggtcatcagtnaacatctgcctccctttcggcatcttctaccgcatgcacgctgtgtccagcctgctggaggtctacgtgctgtcctgaggcctccaacagaggcatggggggcaggaagagggggctcagctcatgtgcccactcagacaccctntgggaatgaatcccanctggtgccatatgacagcccatttccttctggtcccaaantggaattttcacaaaagttatttttccaggttcaatttttaaatcacagtcaggacangcccattcaccccagnattaacgtggggcattaaggnganntggggaaagggagaccttttct

SEQ ID NO: 3672 - DNA, 64 bp, Homo sapiens
  misc_feature (28)..(28): n equals a,t,g, or c
  misc_feature (32)..(32): n equals a,t,g, or c
  misc_feature (36)..(36): n equals a,t,g, or c
  misc_feature (52)..(53): n equals a,t,g, or c
ggactagttctagatcgcgagcggacgntcgngatntggaaatattttgagnncgtgtctgcca

SEQ ID NO: 3673 - DNA, 100 bp, Homo sapiens
  misc_feature (16)..(17): n equals a,t,g, or c
  misc_feature (51)..(51): n equals a,t,g, or c
  misc_feature (58)..(58): n equals a,t,g, or c
  misc_feature (72)..(72): n equals a,t,g, or c
attatgggctaggggnnctgggggaccgggtgcaggggcccttagctcgtntctcgantccgcccgaatatnaatttggaacatgttgttgagttacctt

SEQ ID NO: 3674 - DNA, 445 bp, Homo sapiens
  misc_feature (275)..(275): n equals a,t,g, or c
  misc_feature (396)..(396): n equals a,t,g, or c
  misc_feature (419)..(419): n equals a,t,g, or c
  misc_feature (434)..(434): n equals a,t,g, or c
  misc_feature (444)..(445): n equals a,t,g, or c
ggtcattgacacactttcgaatccaggcagccacactccaagccaagtcttccctagagaacagcagcagatccatggtctcatcagtgtccttgtagctttgtgcagcagttccgggctggaagacagatacagctggacagagctcctgaaaacatttcaaaataccccctccccctgccctgccctgcctttggggtccaccggcactccagttggatggcacaacatagtgtatccgtgcagaagccgagctggcattttcaccagtgtanccaagggcctttgccaagggcagagcaggtggagccctctgcctgccctatcacacatacgggtacttgcttttcactgtgatgtttaagagaatgtatgaacagtttacattttccttanaaatacattgatgggatcacagntggctttaaaaccancaacaatctnn

SEQ ID NO: 3675 - DNA, 387 bp, Homo sapiens
  misc_feature (2)..(2): n equals a,t,g, or c
  misc_feature (7)..(7): n equals a,t,g, or c
  misc_feature (17)..(17): n equals a,t,g, or c
  misc_feature (21)..(21): n equals a,t,g, or c
  misc_feature (24)..(24): n equals a,t,g, or c
  misc_feature (297)..(297): n equals a,t,g, or c
  misc_feature (360)..(360): n equals a,t,g, or c
  misc_feature (363)..(365): n equals a,t,g, or c
gncactngaacacatgnggcncanccggcccgcctcgaagtgcctgggcactcggaaaactgttacctcagggactctatttaaatgcttgctttttctgcagcaccgcttggggaaatcctgtcaggatgaaaaggaaagttggagattttttaaatccctcttcgctttgctttattttcaagtacccaaacttggtttattctttttttcctttaatcttgaaggcttacccttggggggaattggttggggccaagccaaggccccccttggaacttccccaagaaaaatggncttgaaaggggtccccttctttcccaaggggggaagtttccccttggggggaagccaaggaanttnnnaaagggggccttattttccccc

SEQ ID NO: 3676 - DNA, 138 bp, Homo sapiens
  misc_feature (6)..(7): n equals a,t,g, or c
  misc_feature (15)..(15): n equals a,t,g, or c
  misc_feature (56)..(56): n equals a,t,g, or c
  misc_feature (62)..(62): n equals a,t,g, or c
  misc_feature (111)..(111): n equals a,t,g, or c
  misc_feature (120)..(120): n equals a,t,g, or c
  misc_feature (125)..(125): n equals a,t,g, or c
agtacnnggaagtangggcactcggtggaaaagattggacatagttgcactcacantcattnacattttgaccatgttgtgctcaacaagagtacagatcacaacgagacnctgcggaantctcncagactaccgtta

SEQ ID NO: 3677 - DNA, 577 bp, Homo sapiens
  misc_feature (6)..(6): n equals a,t,g, or c
  misc_feature (8)..(8): n equals a,t,g, or c
  misc_feature (302)..(302): n equals a,t,g, or c
  misc_feature (431)..(431): n equals a,t,g, or c
  misc_feature (516)..(516): n equals a,t,g, or c
  misc_feature (540)..(540): n equals a,t,g, or c
  misc_feature (557)..(557): n equals a,t,g, or c
  misc_feature (561)..(561): n equals a,t,g, or c
  misc_feature (565)..(565): n equals a,t,g, or c
gaaaantngaaattctcaagcagttttattcaattagaactttgcaaatatcaaattgtccgtatccttctggattcttgtctgaacattgcttatctgcgtacatatcacagtgttttcacatagggattgctgtatgttgaagtagttgaggtgtaatagccatataatctaatgtgatccatctgaataggcaaacccttgcacacctgtgtacctgttgaacattttcatcatttgcagttttttcttaacataagcactgttctgaatacttgtgaacaagtcacttgggagtttgntcatgggcgtgtatcttccaaagaggagtcttcacgttcaagctgggtaacacactatcagctgtagccctttcattttaaaaacatttccagtgctgcaaattactatggtgattgggaattcaactnggaaatatttttattttttaaaaagatagtacattcatatgaatcaaaataaaatccttaaaaaggtctatgaaaagtcttgctnccggccctacccactattctgcgnaagtccaccggttcctnacangaanttaaatttttag

SEQ ID NO: 3678 - DNA, 102 bp, Homo sapiens
  misc_feature (9)..(9): n equals a,t,g, or c
  misc_feature (27)..(27): n equals a,t,g, or c
  misc_feature (36)..(36): n equals a,t,g, or c
  misc_feature (74)..(74): n equals a,t,g, or c
  misc_feature (82)..(82): n equals a,t,g, or c
gctctagangatccaagcttacgtacnattgtgtgntactggtatatatggttctatatgcgtacattaaattnatattatntggccagtaagatttacaaa

SEQ ID NO: 3679 - DNA, 346 bp, Homo sapiens
  misc_feature (12)..(13): n equals a,t,g, or c
  misc_feature (278)..(278): n equals a,t,g, or c
  misc_feature (293)..(293): n equals a,t,g, or c
  misc_feature (297)..(297): n equals a,t,g, or c
  misc_feature (300)..(301): n equals a,t,g, or c
gattataatttnntgtgtaatagctattcattccttcatttatccaatcctcttaaaaaaatgtagctgaagagtttacacaaaaataaataagtcaagggatgtgaatgtagtcgttatgtgctgtgggagccaccctcggttggctgcgtaggcagggtgaactggtagcagtgtggaggtaaggaggtgaggcctggaatggagaaggggggtgtcagtgagatcagtggaggctgcagaggtccagcaatgctgaaggtctgaaatgaggcagngatgggttgaagatnagangcnnatattaaacttttatgaggtagaataggcaaatgttgatggctta

SEQ ID NO: 3680 - DNA, 131 bp, Homo sapiens
  misc_feature (3)..(3): n equals a,t,g, or c
  misc_feature (6)..(6): n equals a,t,g, or c
  misc_feature (12)..(12): n equals a,t,g, or c
  misc_feature (14)..(14): n equals a,t,g, or c
  misc_feature (19)..(19): n equals a,t,g, or c
  misc_feature (101)..(101): n equals a,t,g, or c
  misc_feature (104)..(104): n equals a,t,g, or c
  misc_feature (113)..(113): n equals a,t,g, or c
  misc_feature (115)..(115): n equals a,t,g, or c
  misc_feature (131)..(131): n equals a,t,g, or c
canggnttaaantnttagnaagaactgggataataaaaacagttacggagccactttatgaagtgaagagaaatatgataacctagaggcccaatgaggtnatnttccagaangntgagttatatttaaan

SEQ ID NO: 3681 - DNA, 74 bp, Homo sapiens
  misc_feature (7)..(7): n equals a,t,g, or c
  misc_feature (40)..(40): n equals a,t,g, or c
  misc_feature (45)..(45): n equals a,t,g, or c
  misc_feature (52)..(52): n equals a,t,g, or c
  misc_feature (54)..(54): n equals a,t,g, or c
gagtgantattggattctctttggtatgtcaataaaagtntatangtatgtnanaacggatttgaggaaaaaaa

SEQ ID NO: 3682 - DNA, 104 bp, Homo sapiens
  misc_feature (25)..(25): n equals a,t,g, or c
  misc_feature (27)..(27): n equals a,t,g, or c
  misc_feature (84)..(84): n equals a,t,g, or c
  misc_feature (87)..(87): n equals a,t,g, or c
  misc_feature (91)..(91): n equals a,t,g, or c
taccaggaggacgtaatgattaatnancctatcccaatgccttgtgactactctacgatgactgactatgcactgctgatgcantgngctnattcactatgggg

SEQ ID NO: 3683 - DNA, 490 bp, Homo sapiens
  misc_feature (352)..(352): n equals a,t,g, or c
  misc_feature (417)..(417): n equals a,t,g, or c
  misc_feature (427)..(427): n equals a,t,g, or c
  misc_feature (442)..(442): n equals a,t,g, or c
  misc_feature (473)..(473): n equals a,t,g, or c
  misc_feature (476)..(476): n equals a,t,g, or c
ggaagttcatcaatcagtgtgtctaagtgttcactggttatataccattttgtagtttcagctatctttccaacttcctaaatcatcaccttcatttgatcttgtttttttccactatcacttctttattgaccatataaagaatataagtgagttcttattttgttattgttcattttagtctaatttcatcaaaatatcacaatcttttaatttcattttaatttcaaagattaaatgaaacctacatagaaatgtgtgtaagatttgcatttgcattattttggcatcaatttgctatcctccctcatgcacacagaaatcatttccaccgtatgtgatttcaaacatncaagtgcagattaaaagcagttgtaaattatggttctcattttcatgatacaattataatataancttctcttgntgctgtaaccaattnccaccaacttcatatcttaccataaagtgancgntaatcctaaaaaaa

SEQ ID NO: 3684 - DNA, 53 bp, Homo sapiens
  misc_feature (27)..(27): n equals a,t,g, or c
  misc_feature (30)..(30): n equals a,t,g, or c
  misc_feature (39)..(39): n equals a,t,g, or c
  misc_feature (48)..(48): n equals a,t,g, or c
  misc_feature (52)..(52): n equals a,t,g, or c
ggcgagcggttttgcctttatttttanttntcctctttntctggccanatcnt

SEQ ID NO: 3685 - DNA, 63 bp, Homo sapiens
  misc_feature (2)..(2): n equals a,t,g, or c
  misc_feature (43)..(43): n equals a,t,g, or c
  misc_feature (47)..(47): n equals a,t,g, or c
gntttgtagagaacatatatgcataaacatagggcaattattnttcnaatggagacatataat

SEQ ID NO: 3686 - DNA, 456 bp, Homo sapiens
  misc_feature (3)..(3): n equals a,t,g, or c
  misc_feature (5)..(6): n equals a,t,g, or c
  misc_feature (230)..(230): n equals a,t,g, or c
  misc_feature (408)..(408): n equals a,t,g, or c
  misc_feature (417)..(417): n equals a,t,g, or c
  misc_feature (438)..(438): n equals a,t,g, or c
  misc_feature (455)..(456): n equals a,t,g, or c
ggntnntggctgtttcctaggcggagttagccctttcatttttctgcataaggctaatttatttttgcagccagatgtgggctgacagccatcactcagggcttccttcccccgccgttaggaggtctggaagacagtcacgttccccattttgcagaatccccatcaacattattgaagatggatgtatctttaaagcaaagattgattgtggatatcggagttatggngtcatttatcatggtgaatattatttagacttgggttgtacaaggctgtaacttgagacacagccaggggagggacaacctgaaaacgcggatccatgaattttaatggatggatgcttttttcaaagctcaactcactatagcgtgatttacttttcttactgcaaggaaacaagcnatttcaagncttaaagagacagcatgccantggtcctgtctgggggnn

SEQ ID NO: 3687 - DNA, 291 bp, Homo sapiens
  misc_feature (5)..(5): n equals a,t,g, or c
  misc_feature (179)..(179): n equals a,t,g, or c
  misc_feature (188)..(188): n equals a,t,g, or c
  misc_feature (227)..(228): n equals a,t,g, or c
  misc_feature (231)..(231): n equals a,t,g, or c
  misc_feature (280)..(280): n equals a,t,g, or c
  misc_feature (285)..(285): n equals a,t,g, or c
ggatnaagtaaaggacgagcaagttcctcaggaaatcaagaaagcagcggtcagagctgtattattctcctctttgatgtaataaagtcagctattagatatgagaaaaccatttcagaagcctggattaaggcaattgaaaacactgcctcagtatctgaacacaaggtctgcattgncttcattgntatctttaatgactgtattctggtctaataactcagttnnggngtcctaagaagtggagcattcagttaagataagtagtaaaatttttttngtttnttcttg

SEQ ID NO: 3688 - DNA, 231 bp, Homo sapiens
  misc_feature (81)..(81): n equals a,t,g, or c
  misc_feature (97)..(97): n equals a,t,g, or c
  misc_feature (152)..(152): n equals a,t,g, or c
  misc_feature (166)..(166): n equals a,t,g, or c
  misc_feature (191)..(191): n equals a,t,g, or c
  misc_feature (196)..(196): n equals a,t,g, or c
  misc_feature (214)..(214): n equals a,t,g, or c
ggagaaaatgatatttaagccaagaactcttagaagttagctaagaaagagatgggaaaatgagacgacattgctggagtngataaaactgcatgtnaaaggcaggaagatggggaaaaaaagttcagtaaagctggaatggggaaatgtantccgggactgaatnttaaagggctttatcaacctcagtnaagantttggaccttatgttganggtggctgataacatat

SEQ ID NO: 3689 - DNA, 387 bp, Homo sapiens
  misc_feature (158)..(158): n equals a,t,g, or c
  misc_feature (169)..(169): n equals a,t,g, or c
  misc_feature (199)..(200): n equals a,t,g, or c
  misc_feature (208)..(208): n equals a,t,g, or c
  misc_feature (220)..(220): n equals a,t,g, or c
  misc_feature (228)..(228): n equals a,t,g, or c
  misc_feature (231)..(231): n equals a,t,g, or c
  misc_feature (236)..(236): n equals a,t,g, or c
  misc_feature (248)..(248): n equals a,t,g, or c
  misc_feature (311)..(311): n equals a,t,g, or c
  misc_feature (343)..(343): n equals a,t,g, or c
  misc_feature (348)..(348): n equals a,t,g, or c
ggtcattttgaatctacatgaatgaacactttggattttgttgtagtttgattctagggtagaaccagtccatgctgtttttattttttatctccgaattgtagaatatgttactaacgtttccagtgctagactggcctcgaggctgccggttgagnagcagattttnggtatgaatgtgaactaaaccaggcttccnnataatagnctaggcaaaatnctaaaaantanttagnaacagttgtganagtataataagtgagaaagttttgaaataatattagaagtgaaaaggaggaaaatgtatgtgnaggagcagctaatcaagaggtggcttttttancacgntgactgaagatacgtgtatggatgactaaaaccaaggga

SEQ ID NO: 3690 - DNA, 109 bp, Homo sapiens
  misc_feature (64)..(64): n equals a,t,g, or c
  misc_feature (85)..(85): n equals a,t,g, or c
  misc_feature (89)..(89): n equals a,t,g, or c
  misc_feature (94)..(94): n equals a,t,g, or c
  misc_feature (105)..(105): n equals a,t,g, or c
gctcgtgccgaattcggcacgagggaagtgaagccccagcgagcggctgcaacggggccctgangaacaaccaacgggaagcggnggcnaatcngtgaacaactnggaa

SEQ ID NO: 3691 - DNA, 384 bp, Homo sapiens
  misc_feature (141)..(141): n equals a,t,g, or c
  misc_feature (258)..(258): n equals a,t,g, or c
  misc_feature (349)..(350): n equals a,t,g, or c
  misc_feature (352)..(352): n equals a,t,g, or c
  misc_feature (366)..(367): n equals a,t,g, or c
ggggaaactcggagtacctgcagctggcctctgtcactgactccacacaggtgaatgtgccccgctgcttacacttctcaggagtggggaaggtgcgacaggctgcatgcggtggcacgggctgtgcagtgttaaacgganaaggacatgtttttgtctggggctatggaattcttgggaaaggtccaaacctagtggaaagtgccgtccctgaaatgataccacccactctctttggcttgacggagttcaacccanaaatccaggtttcccgcatccgatgtggactcagccactttgctgcactgaccaacaaaggagagctgtttgtatggggcaagaacattcnnanggtgcctgggaatnngttcgccttgaaggacc

SEQ ID NO: 3692 - DNA, 481 bp, Homo sapiens
  misc_feature (305)..(305): n equals a,t,g, or c
  misc_feature (416)..(416): n equals a,t,g, or c
  misc_feature (421)..(421): n equals a,t,g, or c
  misc_feature (424)..(424): n equals a,t,g, or c
  misc_feature (449)..(449): n equals a,t,g, or c
  misc_feature (468)..(468): n equals a,t,g, or c
cggaaagcggctccgagccaggggctattgcaaagccagggtgcgctaccggacggagaggggagagccctgagcagagtgagcaacatcgcagccaaggcggaggccgaagaggggcgccaggcaccaatctccgcgttgcctcagccccggaggcgccccagagcgcttcttgtcccagcagagccactctgcctgcgcctgcctctcagtgtctccaactttgcgctggaagaaaaacttcccgcgcgccggcagaactgcagcgcctcctcttagtgactccgggagcttcggctgtagcnggctctgcgcgcccttccaacgaataatagaaattgttaattttaacaatccagagcaggccaacgaggctttgctctcccgacccgaactaaagctccctcgctccgtgngctgntangagcggtgtctcctggggctccaangcagcgagctgtgcccgangggttcggaaggc

SEQ ID NO: 3693 - DNA, 309 bp, Homo sapiens
  misc_feature (6)..(6): n equals a,t,g, or c
  misc_feature (13)..(13): n equals a,t,g, or c
  misc_feature (108)..(108): n equals a,t,g, or c
  misc_feature (149)..(149): n equals a,t,g, or c
  misc_feature (174)..(174): n equals a,t,g, or c
  misc_feature (178)..(178): n equals a,t,g, or c
  misc_feature (200)..(200): n equals a,t,g, or c
  misc_feature (209)..(209): n equals a,t,g, or c
  misc_feature (243)..(243): n equals a,t,g, or c
  misc_feature (264)..(264): n equals a,t,g, or c
  misc_feature (272)..(272): n equals a,t,g, or c
  misc_feature (278)..(278): n equals a,t,g, or c
  misc_feature (302)..(302): n equals a,t,g, or c
ttttanggtttcntaaaaagtatttaggtgacactatataagtacgcctgcaggtaccggtccggtaattcgcggccgcatcaaccgaaccggtgcgccgcaaactanggcgcctcgggccagggaacgcggtaagtaaccatggccancgctaacggggcccgtggtaaaacnggcncccggacagggaatccgccggncctgccgcnccccatcctcaacctggaggtcaagttcaccaanatatttatcatcaatggaatngcacgtantccaanattgggaaaaaagtttgctacatntaaccct

SEQ ID NO: 3694 - DNA, 440 bp, Homo sapiens
  misc_feature (161)..(161): n equals a,t,g, or c
  misc_feature (240)..(240): n equals a,t,g, or c
  misc_feature (277)..(277): n equals a,t,g, or c
  misc_feature (315)..(315): n equals a,t,g, or c
  misc_feature (327)..(327): n equals a,t,g, or c
  misc_feature (335)..(335): n equals a,t,g, or c
  misc_feature (410)..(410): n equals a,t,g, or c
  misc_feature (413)..(414): n equals a,t,g, or c
  misc_feature (424)..(424): n equals a,t,g, or c
  misc_feature (432)..(432): n equals a,t,g, or c
gataaggttcatgctttaaccagatccggaacatagacctgatatatttcaagtgtcatattttgcatttaaatttgccaaaaaggattgtccagtctccaacatcaataattcttctattccttcagctcttcctgaaccgatgactgctagtgaagcanctgctaggaaaagccaaataaaagccagaataacagataccattggaccaacagaaacctcaattgcaccaagacaaanaccaaaggccaactctgctactactgccactcccagngtgctgaccattcaaagttcagcaacacctgttaaagnccttgctcctgntgaattcngtaaccatagaccaaaaggggcactaagacctggaaatggccctgaaattttattgggtcagggacctcctcagnagnncgcacagcancatagagnactccagc

SEQ ID NO: 3695 - DNA, 166 bp, Homo sapiens
  misc_feature (1)..(1): n equals a,t,g, or c
  misc_feature (32)..(32): n equals a,t,g, or c
  misc_feature (35)..(35): n equals a,t,g, or c
  misc_feature (51)..(51): n equals a,t,g, or c
  misc_feature (65)..(65): n equals a,t,g, or c
  misc_feature (109)..(109): n equals a,t,g, or c
  misc_feature (117)..(117): n equals a,t,g, or c
  misc_feature (142)..(142): n equals a,t,g, or c
  misc_feature (152)..(152): n equals a,t,g, or c
  misc_feature (156)..(156): n equals a,t,g, or c
nggggccgcgctttccctcgtgaaggtcgctncangagtcatgcgtacatncgctcattttgctntggacgcactgatgttcccggctcgtcgccgtgccgcaatcacnaggctctncgaacgcctttcactgtgtatctgntatacattcncatntgcaaaaccc

SEQ ID NO: 3696 - DNA, 649 bp, Homo sapiens
  misc_feature (46)..(46): n equals a,t,g, or c
  misc_feature (94)..(94): n equals a,t,g, or c
  misc_feature (320)..(320): n equals a,t,g, or c
  misc_feature (323)..(323): n equals a,t,g, or c
  misc_feature (449)..(449): n equals a,t,g, or c
  misc_feature (543)..(543): n equals a,t,g, or c
  misc_feature (572)..(572): n equals a,t,g, or c
  misc_feature (603)..(603): n equals a,t,g, or c
  misc_feature (608)..(608): n equals a,t,g, or c
  misc_feature (616)..(616): n equals a,t,g, or c
  misc_feature (625)..(625): n equals a,t,g, or c
catcccccgggctgcaggaattcattgacgacgacaagttaacgtngactcaagatggctgtcttcgccttagtactcgtgtgaagttggcggngacggttcctgtcatcttcttgggcttatttggtgtgctgttgaaggggggagactagagaaatggcagggaacctcttatccggcgcaggtaggcgcctgtgggactgggtgcctctggcgtgcagaagcttctctcttggtgtgcctagattgatcggtataaggctcactctcccgccccccaaagtggttgatcgttggaacgagaaaagggccatgttcgnagngtatgacaacatcgggatcctgggaaactttgaaaagcaccccaaagaactgatcagggggcccatatggcttcgaggttggaaagggaatgaattgcaacggtgtatcccaaagaggaaaatggntggaaagtagaatggtcgctgatgacctgacaaccttaataaacgcatcccctatctctaccaacctttaaccgacatgggaggttcgataganagaaagtgagactttgaaaggtcattgcncctgagaaggaactgctttcctggaggacgnttgantttctganaaaaggctnttgaaaaaaaaaaaaggctaacgg

SEQ ID NO: 3697 - DNA, 310 bp, Homo sapiens
  misc_feature (172)..(172): n equals a,t,g, or c
  misc_feature (277)..(277): n equals a,t,g, or c
  misc_feature (280)..(280): n equals a,t,g, or c
  misc_feature (297)..(297): n equals a,t,g, or c
  misc_feature (305)..(305): n equals a,t,g, or c
  misc_feature (310)..(310): n equals a,t,g, or c
gcttttgatttataattgtggtgggggcggggaatcaagacaaccttagtcactttggtattaccataattcttgtcttttcagggttgtcctgttcagctgcataaaacatcatgtattctaggtatttcctaccttcacttacattattacttgccgatgtgctgccttnataaatgggtatattccgccacacatctagtaagcccccaatgcagtacacaatgtgtatcactgataaaactcgcacttctgccatgtcagtattatattcagnttnagtggtctttagcatantggcagtnctagn

SEQ ID NO: 3698 - DNA, 468 bp, Homo sapiens
  misc_feature (240)..(240): n equals a,t,g, or c
  misc_feature (243)..(243): n equals a,t,g, or c
  misc_feature (289)..(289): n equals a,t,g, or c
  misc_feature (300)..(300): n equals a,t,g, or c
  misc_feature (313)..(313): n equals a,t,g, or c
  misc_feature (316)..(316): n equals a,t,g, or c
  misc_feature (321)..(321): n equals a,t,g, or c
  misc_feature (326)..(326): n equals a,t,g, or c
  misc_feature (342)..(343): n equals a,t,g, or c
  misc_feature (354)..(354): n equals a,t,g, or c
  misc_feature (356)..(356): n equals a,t,g, or c
  misc_feature (358)..(359): n equals a,t,g, or c
  misc_feature (365)..(366): n equals a,t,g, or c
  misc_feature (372)..(372): n equals a,t,g, or c
  misc_feature (394)..(394): n equals a,t,g, or c
  misc_feature (409)..(409): n equals a,t,g, or c
  misc_feature (411)..(411): n equals a,t,g, or c
  misc_feature (415)..(415): n equals a,t,g, or c
  misc_feature (423)..(423): n equals a,t,g, or c
  misc_feature (425)..(427): n equals a,t,g, or c
  misc_feature (435)..(437): n equals a,t,g, or c
  misc_feature (439)..(439): n equals a,t,g, or c
  misc_feature (444)..(444): n equals a,t,g, or c
  misc_feature (448)..(448): n equals a,t,g, or c
  misc_feature (468)..(468): n equals a,t,g, or c
gaattcggcagaggggcagtcacatctcttcctccgaggccagtacctttccatttattctttgatcttcagggaactgcatagattgatcaaagtgtaaacaccatagggacccattctacacagagcaggactgcacagcgtcctgtgccacacccagcttcagcatttccacaccaagcagcaacagcaaatcacggaccactgatagatgtctattcttgtttggggacatggggntgnttattttctgttctattttgtgctttagtcccattcctttgcacanagtaggggtancccattcaattanctnttggnatggntttagggattgggttnnccctaaaaatnantnngggttnntttttnaaaaaaaaaaaaaaaaattcgnggggggggggcccgntncccnttgggccntnnngggggggnnnanagcgncgtnggggggggggggggggtgtn

SEQ ID NO: 3699 - DNA, 403 bp, Homo sapiens
  misc_feature (222)..(222): n equals a,t,g, or c
  misc_feature (269)..(269): n equals a,t,g, or c
  misc_feature (363)..(363): n equals a,t,g, or c
agcaagcccaggcggcggtggaaaggtgatggggctggaggacacacctaaacatgtggaatcccaatgccgggcagccagggccaaatccatatccccccaatattgggtgccctggaggttccaatcctgcccacccaccacctattaatccaccctttcccccaggcccctgtcctcctcccccaggagctccccatggcaatccagctttccccccangtggggcccctcatcctgtgcacagccagggtatccaggatgccaancgttgggtcctaccttctccataccaacgctgccctggaatcctctgtgaatccttggtctggcatgttgaccacatgatagtagacaagagancagagaaaatgaagaagtcataaaagatgcacagaccaaa

SEQ ID NO: 3700 - DNA, 136 bp, Homo sapiens
  misc_feature (2)..(2): n equals a,t,g, or c
  misc_feature (36)..(36): n equals a,t,g, or c
  misc_feature (68)..(68): n equals a,t,g, or c
  misc_feature (72)..(72): n equals a,t,g, or c
  misc_feature (88)..(88): n equals a,t,g, or c
  misc_feature (106)..(106): n equals a,t,g, or c
  misc_feature (116)..(116): n equals a,t,g, or c
gngccgcacccggggcctgggtgagactgcggcggnggcagggcgcggtacggccatatttgccggcncggncccacccgccgacaanaaaaagtgcgcgggctcncggcgggcgntcggactggcgctgggactt

SEQ ID NO: 3701 - DNA, 420 bp, Homo sapiens
  misc_feature (173)..(173): n equals a,t,g, or c
  misc_feature (183)..(183): n equals a,t,g, or c
  misc_feature (236)..(236): n equals a,t,g, or c
  misc_feature (276)..(276): n equals a,t,g, or c
  misc_feature (280)..(280): n equals a,t,g, or c
  misc_feature (289)..(289): n equals a,t,g, or c
  misc_feature (291)..(291): n equals a,t,g, or c
  misc_feature (297)..(297): n equals a,t,g, or c
  misc_feature (305)..(305): n equals a,t,g, or c
  misc_feature (313)..(313): n equals a,t,g, or c
  misc_feature (334)..(334): n equals a,t,g, or c
  misc_feature (338)..(338): n equals a,t,g, or c
  misc_feature (380)..(380): n equals a,t,g, or c
  misc_feature (387)..(387): n equals a,t,g, or c
  misc_feature (404)..(404): n equals a,t,g, or c
agaaattgaaacctggcgcaatagatatagtaccgcaagggaaagatgaaaaattataaccaagcataatatagcaaggactaacccctataccttctgcataatgaattaactagaaataactttgcaaggagagccaaagctaagacccccgaaaccagacgagctacctnagaacagctnaaagagcacacccgtctatgttgcaaaatagtgggaaagatttataggttgangcgacaaacctaccgagcctggtgatactggttgtccaanatanatcttagtncnactttnatttgccncagaaccnctaatcccctgttatttactnttancccaaaagaacgtctttggaccttgaaaacttttaaaaattnaatttanccctgttggcgggggcnccttaaaagttcaccc

SEQ ID NO: 3702 - DNA, 430 bp, Homo sapiens
  misc_feature (248)..(248): n equals a,t,g, or c
  misc_feature (346)..(346): n equals a,t,g, or c
  misc_feature (373)..(374): n equals a,t,g, or c
  misc_feature (382)..(382): n equals a,t,g, or c
  misc_feature (407)..(407): n equals a,t,g, or c
gccactccaccttactaccagacaaccttagccaaaccatttacccaaataaagtataggcgatagtaaattgaaacctggcgcaatagatatagtaccgcaagggaaagatgaaaaattataaccaagcataatatagcaaggactaacccctataccttctgcataatgaattaactagaaataactttgcaaggagagccaaagctaagacccccgaaaccagacgagctacctaagaacagctnaaagagcacacccgtctatgttgcaaaatatgggaaagatttataggttgaggcgaacaaacctaccgagcctggtgatactggttgttccaagatanaatcttatttccacttttaatttgccnncgaacccnctaatcccctgttaatttacttttngtcccaaaagaacactcttttgg

SEQ ID NO: 3703 - DNA, 506 bp, Homo sapiens
  misc_feature (21)..(21): n equals a,t,g, or c
  misc_feature (345)..(345): n equals a,t,g, or c
  misc_feature (437)..(437): n equals a,t,g, or c
  misc_feature (461)..(461): n equals a,t,g, or c
  misc_feature (468)..(468): n equals a,t,g, or c
  misc_feature (504)..(504): n equals a,t,g, or c
gccccaaacccactccacctnactaccagacaaccttagccaaaccatttacccaaataaagtataggcgatagaaattgaaacctggcgcaatagatatagtaccgcaagggaaagatgaaaaattataaccaagcataatatagcaaggactaacccctataccttctgcataatgaattaactagaaataactttgcaaggagagccaaagctaagacccccgaaaccagacgagctacctaagaacagctaaaagagcacacccgtctatgtagcaaaatagtgggaagatttatagggtagaggccgacaaacctaccgagcctggtgatagctggttgnccaagatagaatcttaagttaactttaaatttgccacagaacccttctaaatcccttggaaatttaactggtagtccaaagaggaacagctnttggacctaggaaaaaccttgganagagagnaaaaatttacaccatagtaggctaaagcagcaccanta

SEQ ID NO: 3704 - DNA, 494 bp, Homo sapiens
  misc_feature (26)..(26): n equals a,t,g, or c
  misc_feature (61)..(63): n equals a,t,g, or c
  misc_feature (210)..(211): n equals a,t,g, or c
  misc_feature (223)..(223): n equals a,t,g, or c
  misc_feature (234)..(234): n equals a,t,g, or c
  misc_feature (264)..(264): n equals a,t,g, or c
  misc_feature (291)..(291): n equals a,t,g, or c
  misc_feature (321)..(321): n equals a,t,g, or c
  misc_feature (329)..(329): n equals a,t,g, or c
  misc_feature (332)..(332): n equals a,t,g, or c
  misc_feature (340)..(340): n equals a,t,g, or c
  misc_feature (355)..(355): n equals a,t,g, or c
  misc_feature (422)..(422): n equals a,t,g, or c
  misc_feature (430)..(430): n equals a,t,g, or c
  misc_feature (451)..(451): n equals a,t,g, or c
  misc_feature (491)..(492): n equals a,t,g, or c
gatatcaagcttatcgataccgtcgnacctcgagttttttttttttttttttccttttttnnntttttttttgagatggagtctcactctgtcgcccaggctggatacctgagaacttgtaatccaatgagtagaaatgttggtactccatttatggctgtcaacctgccagttctcaggagtttgtataaaagcctaaatccgaaaggnnctaatcccattnggccccttgtntccttttctgttgcctttgcccactggctntggaaacaggggtctttctttctcctnggctatctttggatatggggctccgtcttntgtgccanctnagggaatncttttcaggcatggntaaggcattaaaaagcttcagtttcagtaacattttgagtgagtactctctgaagcttcgttggaanttaggttntttgcttgaaggtaacttttnggctaaaagtttttatcctaggttttggtttaggcccctnngt

SEQ ID NO: 3705 - DNA, 502 bp, Homo sapiens
  misc_feature (2)..(2): n equals a,t,g, or c
  misc_feature (20)..(20): n equals a,t,g, or c
  misc_feature (102)..(102): n equals a,t,g, or c
  misc_feature (122)..(122): n equals a,t,g, or c
  misc_feature (160)..(160): n equals a,t,g, or c
  misc_feature (190)..(190): n equals a,t,g, or c
  misc_feature (197)..(197): n equals a,t,g, or c
  misc_feature (264)..(264): n equals a,t,g, or c
  misc_feature (288)..(288): n equals a,t,g, or c
  misc_feature (311)..(311): n equals a,t,g, or c
  misc_feature (319)..(319): n equals a,t,g, or c
  misc_feature (355)..(355): n equals a,t,g, or c
  misc_feature (364)..(364): n equals a,t,g, or c
  misc_feature (377)..(377): n equals a,t,g, or c
  misc_feature (380)..(380): n equals a,t,g, or c
  misc_feature (403)..(403): n equals a,t,g, or c
  misc_feature (407)..(408): n equals a,t,g, or c
  misc_feature (417)..(417): n equals a,t,g, or c
  misc_feature (455)..(455): n equals a,t,g, or c
  misc_feature (460)..(460): n equals a,t,g, or c
  misc_feature (463)..(463): n equals a,t,g, or c
  misc_feature (465)..(466): n equals a,t,g, or c
  misc_feature (472)..(472): n equals a,t,g, or c
  misc_feature (485)..(485): n equals a,t,g, or c
  misc_feature (489)..(489): n equals a,t,g, or c
anttccccggggggagctcnggggggaaagatcaaccggccccgaacggtgactgtttgggggccgcgaactttttttcctcaagctttcctgagccctttnatctcgcacgaaatgggatnagtgaaggggccggggctgcctggtggaggggccccgntcgcggcgagcccactccatctgaattcgnatctttntccccggcaggagctgaagaagaagctgttcaaacgccggcgggtgttgaatcgggagcggcgtctnaggcaccgggtggtcggggctgtnatagaccaagggctgattcaggnggcaccanctcaagaagcgggcgttccattgcaagtggccaaanttaacattntcaaggaagaagngcngaaaattcttccagcaattccgntttnnccagaaagngaaggcagccttggaattggaagcccttttaaagccanccagnttntnnaccaanttaaaaggaaagnaggnaaagcccccagtt

SEQ ID NO: 3706 - DNA, 311 bp, Homo sapiens
  misc_feature (128)..(128): n equals a,t,g, or c
  misc_feature (153)..(153): n equals a,t,g, or c
  misc_feature (162)..(162): n equals a,t,g, or c
  misc_feature (177)..(178): n equals a,t,g, or c
  misc_feature (181)..(183): n equals a,t,g, or c
  misc_feature (225)..(225): n equals a,t,g, or c
  misc_feature (233)..(233): n equals a,t,g, or c
  misc_feature (241)..(241): n equals a,t,g, or c
  misc_feature (245)..(245): n equals a,t,g, or c
  misc_feature (296)..(296): n equals a,t,g, or c
ggcacgaggttatttgccacctatgtcatgattgaaatagttaattgatcctgtgaatcagttagcaaaacataactcaatggaaagataggcaaatgatacaaataagaaattcacaaaagaagaantactaagtctctagtgatgagaganatgtaaatnaaaatgaaacatgtnnggnnntcaagttgtcacaagttagacaatcatatccaatatttttanaggttgtnagactgtnaggnaatagccactgtcatatcatttttaaaggaatataaattatagggcctttngtttctttgggtttt

SEQ ID NO: 3707 - DNA, 452 bp, Homo sapiens
  misc_feature (226)..(226): n equals a,t,g, or c
  misc_feature (293)..(293): n equals a,t,g, or c
  misc_feature (308)..(308): n equals a,t,g, or c
  misc_feature (392)..(392): n equals a,t,g, or c
  misc_feature (407)..(407): n equals a,t,g, or c
  misc_feature (409)..(409): n equals a,t,g, or c
  misc_feature (444)..(444): n equals a,t,g, or c
  misc_feature (448)..(448): n equals a,t,g, or c
ggagccacacagggtgaggaggatgtgtatccactgggacgcttccgggcgggatgttgaatcccacaaaaggcaaggaggactgcagcacagggagtggcccagctcacatggggtaacaggcctctgtgcaggggtggtgtggcctggaattgtgagtgggagctcagatgggatgaagagggcagccccacggttggagcacatggagggtgatgagtgcagngctgaggctgagggaggggctgcagaatcatagggaccggtgacagagaaggggctggttagatgantaggtagtaaggatnatgggagcctggcttcccagtggcagacagagatgttggatttgatttcaaggtaatcttgaaattactgttgcaggctgctgnggaaaagcacatgananaaatattaatagtattttaaaaactaagacaaaangtanagaa

SEQ ID NO: 3708 - DNA, 402 bp, Homo sapiens
  misc_feature (281)..(281): n equals a,t,g, or c
  misc_feature (284)..(284): n equals a,t,g, or c
  misc_feature (287)..(287): n equals a,t,g, or c
  misc_feature (302)..(302): n equals a,t,g, or c
  misc_feature (373)..(373): n equals a,t,g, or c
  misc_feature (376)..(376): n equals a,t,g, or c
  misc_feature (384)..(384): n equals a,t,g, or c
  misc_feature (397)..(398): n equals a,t,g, or c
gagaagtctccgaatctcggaacctggagaagaaggatgtggaaactaccagttctgtcagtgtgaagaggaagcgtagacttgaggatgcattcattgtgatatccgatagtgatggagaggaaccaaaggaggaaaatgggttgcagaaaacgaagacaaaacagtcgaatagagcaaagtgtttggccaaaagaaaaattgcacagatgacagaagaagaacagtttgctctggctctcaaaatgagtgagcaggaagctagggaggtgaacagccangangangaagaagaggagctnttgaggaaagccattgcttgaaagcctgaatagttgcccggccttctgatgctttcggtaccagaatcttngancttttggncacttggacccgnntttc

SEQ ID NO: 3709 - DNA, 435 bp, Homo sapiens
  misc_feature (2)..(2): n equals a,t,g, or c
  misc_feature (28)..(28): n equals a,t,g, or c
  misc_feature (40)..(40): n equals a,t,g, or c
  misc_feature (67)..(67): n equals a,t,g, or c
  misc_feature (88)..(88): n equals a,t,g, or c
  misc_feature (137)..(137): n equals a,t,g, or c
  misc_feature (190)..(190): n equals a,t,g, or c
  misc_feature (198)..(198): n equals a,t,g, or c
  misc_feature (201)..(201): n equals a,t,g, or c
  misc_feature (204)..(204): n equals a,t,g, or c
  misc_feature (219)..(219): n equals a,t,g, or c
  misc_feature (247)..(248): n equals a,t,g, or c
  misc_feature (260)..(260): n equals a,t,g, or c
  misc_feature (265)..(265): n equals a,t,g, or c
  misc_feature (267)..(267): n equals a,t,g, or c
  misc_feature (272)..(272): n equals a,t,g, or c
  misc_feature (277)..(277): n equals a,t,g, or c
  misc_feature (279)..(279): n equals a,t,g, or c
  misc_feature (283)..(283): n equals a,t,g, or c
  misc_feature (292)..(292): n equals a,t,g, or c
  misc_feature (327)..(327): n equals a,t,g, or c
  misc_feature (331)..(331): n equals a,t,g, or c
  misc_feature (334)..(334): n equals a,t,g, or c
  misc_feature (338)..(338): n equals a,t,g, or c
  misc_feature (340)..(340): n equals a,t,g, or c
  misc_feature (356)..(356): n equals a,t,g, or c
  misc_feature (359)..(359): n equals a,t,g, or c
  misc_feature (371)..(373): n equals a,t,g, or c
  misc_feature (375)..(375): n equals a,t,g, or c
  misc_feature (378)..(378): n equals a,t,g, or c
  misc_feature (381)..(381): n equals a,t,g, or c
  misc_feature (388)..(389): n equals a,t,g, or c
  misc_feature (392)..(392): n equals a,t,g, or c
  misc_feature (397)..(397): n equals a,t,g, or c
  misc_feature (407)..(408): n equals a,t,g, or c
  misc_feature (414)..(414): n equals a,t,g, or c
  misc_feature (424)..(424): n equals a,t,g, or c
angggacaaaagttggaacctcacctgnggtgctggccgntctagaactagtggatcccccgggctncaggaattcggcacgagattnagaacagcttcatgactgcctccaagtagccaccgcctggatgcagatngccggagaggaccggcggctcggaggaagcccccaccgtgggcagggagcagncggccagnccnttngccccaggacctggntgccatactttcctgtatagtttcacgnntcatgttaattnctcangnaattnaaaangnaggncaaaagagntgttattttttttaaaaagtttttaaaaacagganagtnctngttngntgtacattttaaactngtnccccaaactttnnncnttnganccttttnnagngcccnagttggggtnncaaggncaggggtagncaagtaattca

SEQ ID NO: 3710 - DNA, 193 bp, Homo sapiens
  misc_feature (10)..(10): n equals a,t,g, or c
  misc_feature (15)..(15): n equals a,t,g, or c
  misc_feature (20)..(20): n equals a,t,g, or c
  misc_feature (51)..(51): n equals a,t,g, or c
  misc_feature (66)..(66): n equals a,t,g, or c
  misc_feature (106)..(106): n equals a,t,g, or c
  misc_feature (109)..(109): n equals a,t,g, or c
  misc_feature (166)..(166): n equals a,t,g, or c
  misc_feature (187)..(187): n equals a,t,g, or c
  misc_feature (189)..(189): n equals a,t,g, or c
ccatccggantcccnggtcntctgtgcaggttggaggatggttggttgtgncgagcgaggctgaangagccgggacgcggggctctgggcctcgggaactgagccngtnctcacctccgtaccttctccccgtcactgtccgcatcatggccctacttaccctaangacgtgggcctcatcaacggncncaaa

SEQ ID NO: 3711 - DNA, 365 bp, Homo sapiens
  misc_feature (1)..(1): n equals a,t,g, or c
  misc_feature (20)..(20): n equals a,t,g, or c
  misc_feature (23)..(23): n equals a,t,g, or c
  misc_feature (37)..(37): n equals a,t,g, or c
  misc_feature (40)..(40): n equals a,t,g, or c
  misc_feature (57)..(57): n equals a,t,g, or c
  misc_feature (62)..(62): n equals a,t,g, or c
  misc_feature (111)..(111): n equals a,t,g, or c
  misc_feature (157)..(157): n equals a,t,g, or c
  misc_feature (159)..(159): n equals a,t,g, or c
  misc_feature (167)..(167): n equals a,t,g, or c
  misc_feature (188)..(188): n equals a,t,g, or c
  misc_feature (257)..(257): n equals a,t,g, or c
  misc_feature (261)..(262): n equals a,t,g, or c
  misc_feature (311)..(312): n equals a,t,g, or c
  misc_feature (332)..(332): n equals a,t,g, or c
  misc_feature (341)..(341): n equals a,t,g, or c
  misc_feature (354)..(354): n equals a,t,g, or c
nccccactgaaaaagatgantangcctgccgtgtganccntgtgactttgtcacagnccaanatagttaagtgggatcgagacatgtaagcaacatcatggaggtttgaanatgccgcatttggattggattaattccaaattctgcttgcttgctntntaatttanatatggttaaacacttacacntaatgcacaaaatgtatggttataataatgtttacatggacatgatctactttataagtctactttgantgcnntctccatattatgatgtatctaaacaagttgctccacaggttactctannaaggctggcccttagaagtnggggaccanaagattctcttgnccaaacatcca

SEQ ID NO: 3712 - DNA, 443 bp, Homo sapiens
  misc_feature (287)..(287): n equals a,t,g, or c
  misc_feature (297)..(297): n equals a,t,g, or c
  misc_feature (328)..(328): n equals a,t,g, or c
  misc_feature (336)..(336): n equals a,t,g, or c
  misc_feature (371)..(371): n equals a,t,g, or c
  misc_feature (374)..(374): n equals a,t,g, or c
  misc_feature (378)..(378): n equals a,t,g, or c
  misc_feature (405)..(405): n equals a,t,g, or c
  misc_feature (417)..(417): n equals a,t,g, or c
gctagctgctctacggtcatctttgcttagagtatactttaacctggcttttaaagcagtagtaactgccccaccaaaggtcttaaaagccatttttggagcctattgcactgtggttctcctactgcaaatattttcatatgggaggatggttttctcttcatgtaagtccttggaattgattctaaggtgatgttcttagcactttaattcctgtcaaattttttgttctccccttctgccatcttaaatgtaagctgaaactggtctactgtgtctctagggtnaagccaaaanaacaaaaaaaattttactacttttgaaaatngccccaangttgcaaaattatataattctaacccttaaatcanttnaaanggttggctgcttttcaaccttggcccnctgtgaattccnacccaaggaagaaccctggaacaaaa

SEQ ID NO: 3713 - DNA, 477 bp, Homo sapiens
  misc_feature (286)..(286): n equals a,t,g, or c
  misc_feature (296)..(296): n equals a,t,g, or c
  misc_feature (299)..(299): n equals a,t,g, or c
  misc_feature (324)..(324): n equals a,t,g, or c
  misc_feature (330)..(330): n equals a,t,g, or c
  misc_feature (349)..(349): n equals a,t,g, or c
  misc_feature (362)..(362): n equals a,t,g, or c
  misc_feature (374)..(374): n equals a,t,g, or c
  misc_feature (376)..(376): n equals a,t,g, or c
  misc_feature (421)..(421): n equals a,t,g, or c
  misc_feature (446)..(446): n equals a,t,g, or c
  misc_feature (454)..(454): n equals a,t,g, or c
  misc_feature (466)..(466): n equals a,t,g, or c
  misc_feature (470)..(470): n equals a,t,g, or c
caaaattattggctaacttatacaataattttgattaataacctgagaagttaaaattattgtataagttagccaatagaatttttaggttaaaacaacagatggggggtttgtggagtgtttaatgtcatgggcatttttagtagcatagaccctttgttctgcatttgaatgtttcgtatatttttgtttcacagttaatcttccctccccaagtttgctattcaaatcaactgcctgaatgacatttcctagtaattctgaagttattttcctgaaggaatanttggtgaatnccnatgcaggttttttccataccaatancccccnccccggaaaaaaaaaaccnaaaccccccttantaaaaaaaccgncnctttttttgggggaaaaaattcccccaaaagggggaaaaaaaaanccttttaaccaaaattgggcccccnggggggangggggggggggnaatnttttaat

SEQ ID NO: 3714 - DNA, 349 bp, Homo sapiens
  misc_feature (246)..(246): n equals a,t,g, or c
  misc_feature (268)..(268): n equals a,t,g, or c
  misc_feature (283)..(283): n equals a,t,g, or c
  misc_feature (289)..(289): n equals a,t,g, or c
  misc_feature (301)..(301): n equals a,t,g, or c
  misc_feature (334)..(334): n equals a,t,g, or c
atcctatactggttatagttgatatgtaacagttggtggattttagatttctttggattgtgaaacaggggagctatgagagatgtgtccatgtgaaatttacagttactgcctagggagttaatgatcgttctgggtcagcttgaatgtccccattctataaattcaacacttattttctgaattcataaaaataaccaaaaaatgtgagctataatgtttccctcaagaacaaacagaaacganatttgccaaaaactaaaattcnacaaatgatttttantggganattgggctttgnctttagcgtgttaattggaagcactgccctttngaccggaattttact

SEQ ID NO: 3715 - DNA, 458 bp, Homo sapiens
  misc_feature (26)..(26): n equals a,t,g, or c
  misc_feature (62)..(62): n equals a,t,g, or c
  misc_feature (65)..(65): n equals a,t,g, or c
  misc_feature (80)..(80): n equals a,t,g, or c
  misc_feature (299)..(299): n equals a,t,g, or c
  misc_feature (319)..(319): n equals a,t,g, or c
  misc_feature (351)..(351): n equals a,t,g, or c
  misc_feature (356)..(357): n equals a,t,g, or c
  misc_feature (376)..(376): n equals a,t,g, or c
  misc_feature (403)..(403): n equals a,t,g, or c
  misc_feature (429)..(429): n equals a,t,g, or c
  misc_feature (434)..(434): n equals a,t,g, or c
  misc_feature (442)..(442): n equals a,t,g, or c
ccaatttcaaaatgtctcaatggtgntataataaataaacttcaacactctttatgataacnacnctgtgttatattctntgaatcctagcccatctgcgaagcaatgactgtgctcaccagtaaaagataacctttctttctgaaatagtcaaatacgaaattagaaaagccctccctattttaactacctcaactggtctgaaacacagattgtattctatgaatcccagaaagatgaaaaaaattttatacgtttgataaaacttataaatttcattgattaatctcctggaaaanattggtttaaaaaagaaaantgttaatggcaagaatttaaaaaaatattttntaaanncacaattattttattattnggaatatccaactggcttttttaaaanggtggccccccccttttttcccttgngtccnttgggctnggtcaaaaaattccct

SEQ ID NO: 3716 - DNA, 470 bp, Homo sapiens
  misc_feature (197)..(197): n equals a,t,g, or c
  misc_feature (230)..(230): n equals a,t,g, or c
  misc_feature (285)..(285): n equals a,t,g, or c
  misc_feature (330)..(330): n equals a,t,g, or c
  misc_feature (341)..(341): n equals a,t,g, or c
  misc_feature (357)..(357): n equals a,t,g, or c
  misc_feature (359)..(359): n equals a,t,g, or c
  misc_feature (424)..(424): n equals a,t,g, or c
gacgagtccatcacctgcaacttaaatgaacaagcttacatcccattttgagtgaagattttgaggtttttaatttaaaggctgtgtacagttatacttttttatacacctgttcatttctacttaaattatggcacagattgatgcgcaccagtcttgaggaaacgatctccctattcccttaccctgttactcanccacgccgtgtgttagcttagcctcaggtggcnagatgtttgaggaaaaggaattatgccaggaaagtggggaccgggtttatggtcngggtttcctattgggaatgctctttgttgctttttgggcatcctnaatggaaactnttacattagaaccttnangttggaactcccccccaaatccgcccatatttttaaaaatttattttccactcctattccttgcntttaaaacttgttactccttttttggcaaaattttaaccaattttt

SEQ ID NO: 3717 - DNA, 296 bp, Homo sapiens
  misc_feature (2)..(2): n equals a,t,g, or c
  misc_feature (5)..(5): n equals a,t,g, or c
  misc_feature (7)..(7): n equals a,t,g, or c
  misc_feature (9)..(9): n equals a,t,g, or c
  misc_feature (57)..(57): n equals a,t,g, or c
  misc_feature (191)..(191): n equals a,t,g, or c
  misc_feature (270)..(270): n equals a,t,g, or c
  misc_feature (276)..(276): n equals a,t,g, or c
  misc_feature (285)..(285): n equals a,t,g, or c
  misc_feature (290)..(290): n equals a,t,g, or c
  misc_feature (292)..(292): n equals a,t,g, or c
gnggngngngggtccggaattcccgggtcgacccacgcgtccgagtaaatctcatanaagcacatgaagaacagcagtgaaaccaaggattctagcaaggccagctattagcaaagcagtaagcaggaactggactagataccaaatgatggggaaacagactcatagacctaagaacatagaagaaaganatgttgacatcaacagaaaggcaaaaggggcaatgcagcatctcttgccttcctcctgggtttttcccccttaaattgntttgangattaaccnccaancnacac

SEQ ID NO: 3718 - DNA, 333 bp, Homo sapiens
  misc_feature (278)..(278): n equals a,t,g, or c
  misc_feature (290)..(291): n equals a,t,g, or c
  misc_feature (311)..(311): n equals a,t,g, or c
  misc_feature (333)..(333): n equals a,t,g, or c
gcttttaaaaacgaaccccatttttgtgtgtatgtggaatattactaccattcctgctgtcttgtctttagctctggagaaagttgagtcttttttttagtctataaaaatcagtgtctatataaatgttgttcaggcttccaatataacagatggttggggtttctagagcaaagggtttttggatttctcttttttctaggttaatgctttacgtccagttctttcttcattatttagaaaagccttaatttttttttttttttttaaaaaaagcnccgggcattttnnctaacaaaaaaaaaattttnttaaaaaaaaaaacccccatan

SEQ ID NO: 3719 - DNA, 348 bp, Homo sapiens
  misc_feature (67)..(67): n equals a,t,g, or c
  misc_feature (299)..(299): n equals a,t,g, or c
  misc_feature (323)..(323): n equals a,t,g, or c
  misc_feature (327)..(327): n equals a,t,g, or c
  misc_feature (340)..(341): n equals a,t,g, or c
gatccatttccctgttctatacaggtttctttgaaaagacacaggggttagggataaggaatagtanaatttataccatttttgctgcagagaatggctacagatggaggctggaaacctgctgttaatctctagaacacttccccacaccagtgtgccacacattagatactttattaagaaaatcacttcagtaaatgtttgaaaaattatttcctagatctcttctttttttccttccccaataaactttggttgcacacaaaaactgttactgaaccctatgaatctagaacttnacttccaaggaaaaccaattactnaatnttttcccctgaanngaaattg

SEQ ID NO: 3720 - DNA, 439 bp, Homo sapiens
  misc_feature (7)..(7): n equals a,t,g, or c
  misc_feature (41)..(41): n equals a,t,g, or c
  misc_feature (62)..(62): n equals a,t,g, or c
  misc_feature (98)..(98): n equals a,t,g, or c
  misc_feature (121)..(121): n equals a,t,g, or c
  misc_feature (133)..(133): n equals a,t,g, or c
  misc_feature (158)..(158): n equals a,t,g, or c
  misc_feature (181)..(181): n equals a,t,g, or c
  misc_feature (257)..(257): n equals a,t,g, or c
  misc_feature (266)..(266): n equals a,t,g, or c
  misc_feature (282)..(282): n equals a,t,g, or c
  misc_feature (293)..(293): n equals a,t,g, or c
  misc_feature (296)..(296): n equals a,t,g, or c
  misc_feature (301)..(301): n equals a,t,g, or c
  misc_feature (305)..(305): n equals a,t,g, or c
  misc_feature (334)..(334): n equals a,t,g, or c
  misc_feature (369)..(369): n equals a,t,g, or c
  misc_feature (392)..(392): n equals a,t,g, or c
  misc_feature (400)..(400): n equals a,t,g, or c
  misc_feature (407)..(407): n equals a,t,g, or c
  misc_feature (425)..(425): n equals a,t,g, or c
agcgcancaccacctttgagaagtctctgttgatgggcaangagttccagcgccgcgccaangccatgatgctgcgggcagctgtgctccgcaaccanatccatgtcaagtccccgcccanaaaaaggaccanggggaacttactccaccaacaccantcccggatgaacaccaacatgtnaagggtgaacttggcctccaagacatctgcaccccctccccacctccacggaactcggaactccaggcgctcaatnctgcctgcngccactaaagggcctngccatggtttnccncccancctnttttcctccctggggcttaagaagcagcngttctatttttgccttcctggaaagaaaagctcangctccaccttttgtttctttccnggaacaantgtcgcnccagccatggacattccnaacctcttcccctc

SEQ ID NO: 3721 - DNA, 484 bp, Homo sapiens
  misc_feature (41)..(41): n equals a,t,g, or c
  misc_feature (307)..(307): n equals a,t,g, or c
  misc_feature (342)..(342): n equals a,t,g, or c
  misc_feature (364)..(364): n equals a,t,g, or c
  misc_feature (374)..(374): n equals a,t,g, or c
  misc_feature (381)..(381): n equals a,t,g, or c
  misc_feature (384)..(384): n equals a,t,g, or c
  misc_feature (395)..(395): n equals a,t,g, or c
  misc_feature (410)..(410): n equals a,t,g, or c
  misc_feature (413)..(413): n equals a,t,g, or c
  misc_feature (446)..(446): n equals a,t,g, or c
  misc_feature (462)..(462): n equals a,t,g, or c
taaacttacagacactgaattaatttcccctgctactttgnaaaccagaaaataatgactggccattcgttacatctgtcttagttgaaaagcatattttttattaaattaattctgattgtatttgaaattattattcaattcacttatggcagaggaatatcaatcctaatgacttctaaaaatgtaactaattgaatcattatcttacatttactgtttaataagcatattttgaaaatgtatggctagagtgtcataataaaatggtatatctttcctttagtaattacattaaaattagtcntgttttggaattaattaagttccttttgggataangttgggggtaatgtggtccatnccccttaaanaaatccnacnggttaatatanccattttttattaanggnccctttggccaataaattaaccctgaaaacctncccccgaaaaaaaccnaaacttaatccccccccaaatg

SEQ ID NO: 3722 - DNA, 285 bp, Homo sapiens
  misc_feature (278)..(279): n equals a,t,g, or c
  misc_feature (281)..(281): n equals a,t,g, or c
  misc_feature (284)..(285): n equals a,t,g, or c
cttggtcagatttgaactcttcaatctcttgcactcaaagcttgttaagatagttaagcgtgcataagttaacttccaatttacatactctgcttagaatttgggggaaaatttagaaatataattgacaggattattggaaatttgttataatgaatgaaacattttgtcatataagattcatatttacttcttatacatttgataaagtaaggcatggttgtggttaatctggtttatttttgttccacaagttaaataaatcataaaacttgaannanaann

SEQ ID NO: 3723 - DNA, 385 bp, Homo sapiens
  misc_feature (87)..(87): n equals a,t,g, or c
  misc_feature (235)..(235): n equals a,t,g, or c
  misc_feature (246)..(246): n equals a,t,g, or c
  misc_feature (267)..(267): n equals a,t,g, or c
  misc_feature (273)..(273): n equals a,t,g, or c
  misc_feature (280)..(280): n equals a,t,g, or c
  misc_feature (320)..(320): n equals a,t,g, or c
  misc_feature (332)..(332): n equals a,t,g, or c
  misc_feature (335)..(335): n equals a,t,g, or c
  misc_feature (341)..(341): n equals a,t,g, or c
  misc_feature (349)..(349): n equals a,t,g, or c
ggctggagctgctgctgttctccctatcactcgtggggaagccaggcctggcgaggtgcaggcacttgctgaggtcacggcggccanactggagcccagaactctgtctgcacctaagcacagtgtcccttacctccagcatctgagtcccatcgtctaatgtggctttaacctcaggatcgggcctaattctagaatcctacctgcaagacaagcactgagactgaaacaggangattccttganttccaggaatttcaaatccancctgancaacatngtgaaaaccccatctctgcaaaaaaaatgaaaaattactnggctggggggtnccnttcctnttaaatcncttcccgggaagggtaagtttttaaaaatcccctaa

SEQ ID NO: 3724 - DNA, 387 bp, Homo sapiens
  misc_feature (2)..(2): n equals a,t,g, or c
  misc_feature (293)..(293): n equals a,t,g, or c
  misc_feature (320)..(320): n equals a,t,g, or c
  misc_feature (352)..(352): n equals a,t,g, or c
  misc_feature (373)..(373): n equals a,t,g, or c
  misc_feature (387)..(387): n equals a,t,g, or c
gnaaacagtagtttctctgccaaaaattaaaattaaaaaaaccgttgtctgttttagcaaaaccactgcttggtgagttattacaagatgtgtactattaaaaactcatctttttcttcagtgaatgtatattgagcatttactgtttgaaaatgcgttgggtagcaaggggagtctacaggggatatgagcctaatccgatacagagtctgccttcagggagttcacagcctcatgaggaatagaaatttctcactggtccctaaaactctcaaatataaggtcttgcagantgtcccttgcatcatgtttccttcctnaattacaagaaatagcatggaaaaaaaatgcnttatgttgactatagatttanatatagaatccccn

SEQ ID NO: 3725 - DNA, 84 bp, Homo sapiens
  misc_feature (40)..(41): n equals a,t,g, or c
  misc_feature (55)..(55): n equals a,t,g, or c
  misc_feature (57)..(57): n equals a,t,g, or c
  misc_feature (81)..(81): n equals a,t,g, or c
cccatgggtagccctgccccagggggcacatgctgtaatnncaacaagtgtggcnanatgagagatgaccatgtgtatccncct

SEQ ID NO: 3726 - DNA, 109 bp, Homo sapiens
  misc_feature (6)..(6): n equals a,t,g, or c
  misc_feature (23)..(23): n equals a,t,g, or c
  misc_feature (70)..(70): n equals a,t,g, or c
  misc_feature (86)..(86): n equals a,t,g, or c
  misc_feature (91)..(91): n equals a,t,g, or c
  misc_feature (103)..(103): n equals a,t,g, or c
ttaaanttaatttgagacatctnattttccctctaaaaaaatgaagaaatttttggatggtcccatcccncctccccctccccagngggcnctctaaagaatngaagct

SEQ ID NO: 3727 - DNA, 111 bp, Homo sapiens
  misc_feature (6)..(6): n equals a,t,g, or c
  misc_feature (33)..(33): n equals a,t,g, or c
  misc_feature (61)..(61): n equals a,t,g, or c
  misc_feature (70)..(70): n equals a,t,g, or c
  misc_feature (87)..(87): n equals a,t,g, or c
  misc_feature (108)..(108): n equals a,t,g, or c
aacccnaacgccagcaggaaccggtccggaaancccgggtcgacccacgcgtccgattttngagtttttntgatgccaatatcaacngggggatttttaaaaattgtnaaa

SEQ ID NO: 3728 - DNA, 155 bp, Homo sapiens
  misc_feature (140)..(140): n equals a,t,g, or c
  misc_feature (142)..(142): n equals a,t,g, or c
  misc_feature (145)..(145): n equals a,t,g, or c
  misc_feature (152)..(152): n equals a,t,g, or c
  misc_feature (154)..(154): n equals a,t,g, or c
gctcaaattcagccagctccagctgcccctggcacagaggagctgactgaggctccagtacagggcctgctccttcccctcctgttcccctcagtgtgccctgggccgggggccaggcatggtgggggtggggaggctgncngcngaggccnang

SEQ ID NO: 3729 - DNA, 381 bp, Homo sapiens
  misc_feature (6)..(6): n equals a,t,g, or c
  misc_feature (23)..(23): n equals a,t,g, or c
  misc_feature (39)..(39): n equals a,t,g, or c
  misc_feature (42)..(42): n equals a,t,g, or c
  misc_feature (45)..(45): n equals a,t,g, or c
  misc_feature (336)..(336): n equals a,t,g, or c
  misc_feature (347)..(347): n equals a,t,g, or c
  misc_feature (358)..(358): n equals a,t,g, or c
  misc_feature (360)..(360): n equals a,t,g, or c
  misc_feature (368)..(368): n equals a,t,g, or c
cttttnttaacaaaactcaaccncattaggggggaaaangcntgngttaccgccctgggccagggttacccgggtcccggggaaatttcccgggggtcgggacccacgcgtccgcccacgcgtccgggggaagaacattttgcttatgttttaaaggtatgtattggggtaagaggagcattatatatgggaacctctcacaaaacaggtgattattttcttattatactcaattttcaccctgaatagagtgttttgattatgtaagttagatcgtaagtagatggctctcttaaagacattttatggttttgttgttgttgtttgtttttcgantctattaaatnaaaggtcacantnggagtagncgatacagagaat

SEQ ID NO: 3730 - DNA, 106 bp, Homo sapiens
  misc_feature (25)..(25): n equals a,t,g, or c
  misc_feature (28)..(28): n equals a,t,g, or c
  misc_feature (44)..(44): n equals a,t,g, or c
  misc_feature (63)..(63): n equals a,t,g, or c
  misc_feature (76)..(76): n equals a,t,g, or c
gccgaacgcaggagaaccgatccgnatncccggtcacccacgcntccataaattacatgtctntgaaatttcattnggggcactaataaaattttcagaccctaat

SEQ ID NO: 3731 - DNA, 236 bp, Homo sapiens
  misc_feature (17)..(17): n equals a,t,g, or c
  misc_feature (21)..(21): n equals a,t,g, or c
  misc_feature (28)..(28): n equals a,t,g, or c
  misc_feature (40)..(40): n equals a,t,g, or c
  misc_feature (55)..(55): n equals a,t,g, or c
  misc_feature (123)..(123): n equals a,t,g, or c
  misc_feature (172)..(172): n equals a,t,g, or c
  misc_feature (219)..(219): n equals a,t,g, or c
  misc_feature (221)..(221): n equals a,t,g, or c
  misc_feature (224)..(224): n equals a,t,g, or c
  misc_feature (227)..(227): n equals a,t,g, or c
tcgacccgtacagatgntggncagaagnatcccttaaatnaattgtcttatcacntggtgtgtattaaggaatctgacatccacaccggtcaacagtttgcagctaaattcaaaaaactctgntgccaggaaattcagcacattctctgcacacgaaacctttgcaccaaangagagttatgactatctcaagacttctggcttggcgatgttcatatngnganganggagacttt

SEQ ID NO: 3732 - DNA, 137 bp, Homo sapiens
  misc_feature (6)..(6): n equals a,t,g, or c
  misc_feature (69)..(69): n equals a,t,g, or c
  misc_feature (87)..(87): n equals a,t,g, or c
  misc_feature (108)..(108): n equals a,t,g, or c
  misc_feature (117)..(117): n equals a,t,g, or c
  misc_feature (136)..(136): n equals a,t,g, or c
cttttnttttacggaacttcacctcattagggggaaaaaaggctgggtttaccggcccttggccagggnttacccgggttcccgggnaatttcccgggggtccgaacnccacgtcgntctcggaaaaaaaaaaaant

SEQ ID NO: 3733 - DNA, 486 bp, Homo sapiens
  misc_feature (446)..(446): n equals a,t,g, or c
  misc_feature (455)..(455): n equals a,t,g, or c
  misc_feature (472)..(472): n equals a,t,g, or c
  misc_feature (481)..(481): n equals a,t,g, or c
  misc_feature (484)..(484): n equals a,t,g, or c
ggtggagacctgggagagagtgttaggaagaccgaaaagggcaggacggggcctccactgcctcccatccctggtccgggcccacatagccttctttgtcacaatcagctcaggtatccaagatcagattacccacattcattatttgagcaactattcattgaacagttagaatatgtctcactctgtcagttgctggctagaagtagaaagtaccagatgagtgaaataattggccactatccttggtagctgatgactaagtaagagagagatgcaagacaacatgtggaaaatgccaaactgagtagcagtcacagttgacatgctgcagagagagctggccgggggtcagaagacctgggcaccagtcctgttcatttccagtgtggcctcgagtcattcacctgacctcctgaagttcattttcccaagaagttgtttantccaactgnccatcaaggatctttanggacccttntanct

SEQ ID NO: 3734 - DNA, 99 bp, Homo sapiens
  misc_feature (3)..(3): n equals a,t,g, or c
  misc_feature (24)..(24): n equals a,t,g, or c
  misc_feature (26)..(26): n equals a,t,g, or c
  misc_feature (45)..(45): n equals a,t,g, or c
  misc_feature (48)..(48): n equals a,t,g, or c
  misc_feature (51)..(51): n equals a,t,g, or c
  misc_feature (72)..(72): n equals a,t,g, or c
  misc_feature (96)..(96): n equals a,t,g, or c
agncgaagaggcggcaagaaaaancnagggagaagccaggtaccnccntgnaggaaacgcggtcgcggaaancccgggtcgacccacgcgtcccantca

SEQ ID NO: 3735 - DNA, 441 bp, Homo sapiens
  misc_feature (384)..(384): n equals a,t,g, or c
  misc_feature (405)..(405): n equals a,t,g, or c
  misc_feature (411)..(411): n equals a,t,g, or c
  misc_feature (424)..(424): n equals a,t,g, or c
  misc_feature (437)..(437): n equals a,t,g, or c
ggtacccagtggtggaagaccaacacacacctccgcagacagcccagcacgccagaaacggccacccgcaggccctgccagccgctcacgaggctgtctacagggagggcaagcccagcaccccggagtcctgcgtctcctcttcatcagccatcatcgccaagccaggagagtggctcccaagaggacgccaggaagagcctcgcccagcccccacggggaccccccgccagccaagggaggcgccccaggacccaggcaatggagtgaccaccaggtaagggggatatcacaaggccttgaacctgactcttggagctctgggagtgggccgccccacgccggatgcaagagcacccaggagacctggaaagcttctctgangcccaacctttgacaggggangctaangagcagtgtcaanattcccagcggantgca

SEQ ID NO: 3736 - DNA, 294 bp, Homo sapiens
  misc_feature (35)..(36): n equals a,t,g, or c
  misc_feature (78)..(78): n equals a,t,g, or c
  misc_feature (261)..(261): n equals a,t,g, or c
  misc_feature (287)..(287): n equals a,t,g, or c
  misc_feature (289)..(290): n equals a,t,g, or c
  misc_feature (292)..(292): n equals a,t,g, or c
ggaatttcttctggctcagaaatttcccctgtaannacaatatccattttttttattatggaagtagagtagcaaagngcaatttgctttataggaattgtttttataggcaaggatgaatttattccagagagcatagaatatctattgggttacttaatattactcattttgggtacagagccatttgcagcccattgtacttcaggaaacagctgagaaaatgatttgtgtgtaagaaggatgtttcccattcaattnccatgggtgtgggaggaggggctttncnngngg

SEQ ID NO: 3737 - DNA, 402 bp, Homo sapiens
  misc_feature (5)..(5): n equals a,t,g, or c
  misc_feature (196)..(196): n equals a,t,g, or c
  misc_feature (220)..(221): n equals a,t,g, or c
  misc_feature (224)..(224): n equals a,t,g, or c
  misc_feature (238)..(239): n equals a,t,g, or c
  misc_feature (258)..(258): n equals a,t,g, or c
  misc_feature (264)..(264): n equals a,t,g, or c
  misc_feature (267)..(267): n equals a,t,g, or c
  misc_feature (277)..(277): n equals a,t,g, or c
  misc_feature (292)..(292): n equals a,t,g, or c
  misc_feature (311)..(311): n equals a,t,g, or c
  misc_feature (334)..(334): n equals a,t,g, or c
  misc_feature (348)..(348): n equals a,t,g, or c
  misc_feature (380)..(380): n equals a,t,g, or c
  misc_feature (391)..(391): n equals a,t,g, or c
ggtanatatttttatcacattaagaaagtttccttctattattagtttgctgatatgttttcttatgtgaatgtatatcaaatataatcagatactttttctgtgttctatgaacatattcatgtaattttttctgttaatgtgatgaattgtattgattaaattttgaatgttacaaaaaagccatagcaataantcccttctaatctttatagcttcnnttnttccttcttgcctnnttgcactggctggtaccgntacggngtnaaatagaagngggaataatggacantcttgacttgttcccaatntcatggggaaagcttttaatatncatcattaagtaanattattgctatggctttttggtaaatattttnatcacattaanaaaggttcctt

SEQ ID NO: 3738 - DNA, 104 bp, Homo sapiens
  misc_feature (14)..(14): n equals a,t,g, or c
  misc_feature (43)..(43): n equals a,t,g, or c
  misc_feature (53)..(53): n equals a,t,g, or c
  misc_feature (63)..(63): n equals a,t,g, or c
  misc_feature (75)..(75): n equals a,t,g, or c
tgcagcatgctatngacaacatgaatgattctgagctcttggnactatacaantggcgataanctggtcaaacgnaatgagaattaagggaaatgcatgtacat

SEQ ID NO: 3739 - DNA, 270 bp, Homo sapiens
  misc_feature (233)..(233): n equals a,t,g, or c
  misc_feature (253)..(253): n equals a,t,g, or c
  misc_feature (259)..(259): n equals a,t,g, or c
ggtgtaaggaagacatttgcggtgcttcttgtcctataatgattcaagtatatagtagttcttgaaagagtgtgcatatattactcatctgcttaagagagtgggttaatggatatatcagaggagccaaatacatttttttcagaacttgaaaaccaaaggtcatcatgagtgcactcaaaagttaggacaagtttattacatttgggattttcatctgtagccgtatgaanaaccctttccaatataaaancatggnattaaattagc

SEQ ID NO: 3740 - DNA, 62 bp, Homo sapiens
  misc_feature (18)..(18): n equals a,t,g, or c
  misc_feature (20)..(20): n equals a,t,g, or c
  misc_feature (46)..(46): n equals a,t,g, or c
  misc_feature (48)..(48): n equals a,t,g, or c
  misc_feature (59)..(59): n equals a,t,g, or c
gaaaactgtggaatgtangnaaaccatactgcctaggttcctttgnantcatctgaaangga

SEQ ID NO: 3741 - DNA, 53 bp, Homo sapiens
  misc_feature (9)..(9): n equals a,t,g, or c
  misc_feature (22)..(22): n equals a,t,g, or c
  misc_feature (30)..(30): n equals a,t,g, or c
  misc_feature (43)..(43): n equals a,t,g, or c
  misc_feature (50)..(50): n equals a,t,g, or c
ggacacatnttcgaaacactanaaaacaanaaatactaccgtnaataaanaaa

SEQ ID NO: 3742 - DNA, 247 bp, Homo sapiens
ggagtgggttaggaggggccctcggggagggaagaacaaggagagagggaagtgagaggaaaggaggtttctccttcatctaaatcccaagtatacacccttctaaggtctgttctggcccttccctagggagtgccttcccctctacctgccaggtcccatagataaggatgtcctcccctgcaggcgcctggcctccatcacagcatgcccactcttgtgcccgctgcaacctcctctgactctt

SEQ ID NO: 3743 - DNA, 247 bp, Homo sapiens
ggtgagatcagctccttaaatggggatttgaaaacattagggcttcattatgtacacaacggcagtgcctcattcatcatgcaaaaatcactcccgttattaaaaatccctgtggcagctgcatgccggggcttggtggcatcgtgcctgctggggacagagcaggagctccacagccctgcctggtcaaagttgtggccacgggacaggggccccaagtcccagcctccctcttacacaggggccg

SEQ ID NO: 3744 - DNA, 368 bp, Homo sapiens
ggtcctgttagagaggagaaagactgtaatgaaactactagacccatttgggctaaagtttggcttttccttccttgagtcatagaacatatccatctcccaggaaatgtccttctctggcgtctgcttgcccttctgagtctgccttttttgcactgaacataagcactttatactaatgggtcacaaatcttgcagcccttaatttgggataagaccagattttcctgacatttttctttaacttaatggaactatcaaattatagggcaccactgactagactgatatgagatgaggctaaaagcctttgaacaccacgctgtagtctccaacagaaaaacaccaccaaaacagatacccatgtt

SEQ ID NO: 3745 - DNA, 99 bp, Homo sapiens
  misc_feature (22)..(22): n equals a,t,g, or c
  misc_feature (26)..(26): n equals a,t,g, or c
  misc_feature (37)..(37): n equals a,t,g, or c
  misc_feature (39)..(39): n equals a,t,g, or c
  misc_feature (44)..(44): n equals a,t,g, or c
  misc_feature (62)..(62): n equals a,t,g, or c
  misc_feature (68)..(68): n equals a,t,g, or c
  misc_feature (88)..(88): n equals a,t,g, or c
aaaaggggccgtagtagccgangatnatacacggacntntatanggggaatgattggtcctncctgcnggtactcggtccgttaattnccgggtcgacc

SEQ ID NO: 3746 - DNA, 278 bp, Homo sapiens
  misc_feature (243)..(243): n equals a,t,g, or c
  misc_feature (257)..(257): n equals a,t,g, or c
  misc_feature (270)..(270): n equals a,t,g, or c
  misc_feature (275)..(275): n equals a,t,g, or c
  misc_feature (278)..(278): n equals a,t,g, or c
gccgggtttctccaggcccttggcctggatggggatggggtcataggtctgcacagagcaggcgtagacccggctttctgggcagtgtgctgagttctcagttcctggccctgtgtacgctgaaaccctccctggtggtggagctggcaagagacctgctggagttcctgggcagcgtgaatggtctctgcagcagggcgagcctcgtcaccagcgtggtgtgggccatcggcgagtcctgtngggacctacgatcnggaggtgcacccntggancan

SEQ ID NO: 3747 - DNA, 303 bp, Homo sapiens
  misc_feature (264)..(264): n equals a,t,g, or c
  misc_feature (298)..(298): n equals a,t,g, or c
  misc_feature (301)..(301): n equals a,t,g, or c
aagttgagggagctcatatccaggcaggagccgagcaaggtgccctctacagacctctgctgtatatggctgtgaatatgttgctgttcttggttcctgtgaattcgtgattctggatgttctacattgtcctagaggccccaaaaaggatgggaagaggagcccatctgccctggtgctgaacatgtagggatcgtggctaccaccaccttcagctaccagcagatttgcagttcctctcttccttaaattccttgtgtgcanacaaaaataaaatcttcttcctctgatgaaaaanaanaa

SEQ ID NO: 3748 - DNA, 444 bp, Homo sapiens
  misc_feature (253)..(253): n equals a,t,g, or c
  misc_feature (259)..(259): n equals a,t,g, or c
  misc_feature (270)..(270): n equals a,t,g, or c
  misc_feature (332)..(332): n equals a,t,g, or c
  misc_feature (397)..(397): n equals a,t,g, or c
  misc_feature (402)..(402): n equals a,t,g, or c
gtaaaataaaaagcctcctgtttccccatcccacttcatgaaggtaatgactataacatttcttatgtgtactttcagattaattttacttatttaatagcatatgtccttaaaatattttcgacaaataggattatcattctcatactattatcgttctcatactgcatcctcctttttttgcttcatgatttttcttagaaatttttgataaccagcatatacagatttttacattctcttagcaaccagnatagtnacctagccccntgtttgacagaatgtttaaaattgtgtttattattttttcttgtcacaaaataatgctgcantggatttgtatatatatctttatattcttgaaatggacttagtaagtcagaggctttgtgaattntcagntttggtagattttaccatattgccctcctaaaaggttatacc

SEQ ID NO: 3749 - DNA, 50 bp, Homo sapiens
  misc_feature (9)..(9): n equals a,t,g, or c
  misc_feature (13)..(14): n equals a,t,g, or c
  misc_feature (37)..(37): n equals a,t,g, or c
gcccacgcntccnnccacgcgtccgaaaaaaaaaaanaggggaattttaa

SEQ ID NO: 3750 - DNA, 112 bp, Homo sapiens
  misc_feature (5)..(5): n equals a,t,g, or c
  misc_feature (46)..(46): n equals a,t,g, or c
  misc_feature (68)..(68): n equals a,t,g, or c
  misc_feature (74)..(74): n equals a,t,g, or c
  misc_feature (93)..(93): n equals a,t,g, or c
  misc_feature (104)..(104): n equals a,t,g, or c
ccaanaaagaaagcgaacgcccgaggaccgaccggaaaacccgggncgacccacgcgcccgttttcanttaacncaagtacgtttaattgggnacagaggaagntaaaagaa

SEQ ID NO: 3751 - DNA, 225 bp, Homo sapiens
  misc_feature (2)..(2): n equals a,t,g, or c
  misc_feature (188)..(188): n equals a,t,g, or c
  misc_feature (197)..(197): n equals a,t,g, or c
  misc_feature (203)..(203): n equals a,t,g, or c
  misc_feature (213)..(213): n equals a,t,g, or c
  misc_feature (218)..(218): n equals a,t,g, or c
gnagaagtctgagatgagaaaaaaatgatataatatccacctactacatagtgggtagtttatatactaaagttattgttatgagaaagaatggcttaggaatattatttaaaattaattaagggggtgttaaaaataaaataccaagtgtaaaaatgacaaaggcaagaagaaacagtatataatgngagtaaatnttaatntttccaaganagganacagtac

SEQ ID NO: 3752 - DNA, 204 bp, Homo sapiens
  misc_feature (51)..(51): n equals a,t,g, or c
  misc_feature (90)..(90): n equals a,t,g, or c
  misc_feature (138)..(138): n equals a,t,g, or c
  misc_feature (151)..(151): n equals a,t,g, or c
  misc_feature (180)..(180): n equals a,t,g, or c
  misc_feature (195)..(195): n equals a,t,g, or c
  misc_feature (202)..(202): n equals a,t,g, or c
gtttagattctgcctgtgtggtcattttaaaacatgtgtgacatatatcantaccttcattcttctatattttgtgtctcctccaacctncaactttttttgttttttgaaaaatgattctctaacacctcaacagtntaaggtaatttantacacatatatcagtatttttgtgatctnaaaaagcaacccatnttctaantt

SEQ ID NO: 3753 - DNA, 201 bp, Homo sapiens
  misc_feature (11)..(11): n equals a,t,g, or c
  misc_feature (13)..(13): n equals a,t,g, or c
  misc_feature (28)..(28): n equals a,t,g, or c
  misc_feature (32)..(32): n equals a,t,g, or c
  misc_feature (38)..(38): n equals a,t,g, or c
  misc_feature (81)..(81): n equals a,t,g, or c
  misc_feature (92)..(92): n equals a,t,g, or c
  misc_feature (121)..(121): n equals a,t,g, or c
  misc_feature (131)..(131): n equals a,t,g, or c
  misc_feature (163)..(163): n equals a,t,g, or c
  misc_feature (168)..(168): n equals a,t,g, or c
  misc_feature (184)..(184): n equals a,t,g, or c
agtggaaaacncnactatagggtttagntggnacgccngcaggtaccggtccggaattcccgggtcgacccacgcgttcgnccacgcgtttngggagcatctactggtgcaggcagacaanccaaatacanaaggaaaaggtggaaatgaacgcccaggcgtncaaanctctattcttaaccanttatgctaaaggcaaga

SEQ ID NO: 3754 - DNA, 50 bp, Homo sapiens
  misc_feature (28)..(29): n equals a,t,g, or c
  misc_feature (33)..(33): n equals a,t,g, or c
  misc_feature (38)..(38): n equals a,t,g, or c
gctgcaatgttacctgaggcttcatttnncttncccanccgtgccaccat

SEQ ID NO: 3755 - DNA, 63 bp, Homo sapiens
  misc_feature (14)..(14): n equals a,t,g, or c
tttggaatgcctgntggaacgtccgcaggtaccggtccggaattcccgggtcgacccacgcga

SEQ ID NO: 3756 - DNA, 355 bp, Homo sapiens
  misc_feature (5)..(5): n equals a,t,g, or c
  misc_feature (24)..(24): n equals a,t,g, or c
  misc_feature (39)..(39): n equals a,t,g, or c
  misc_feature (63)..(63): n equals a,t,g, or c
  misc_feature (93)..(93): n equals a,t,g, or c
  misc_feature (141)..(141): n equals a,t,g, or c
  misc_feature (189)..(189): n equals a,t,g, or c
  misc_feature (194)..(194): n equals a,t,g, or c
  misc_feature (231)..(231): n equals a,t,g, or c
  misc_feature (266)..(266): n equals a,t,g, or c
  misc_feature (288)..(288): n equals a,t,g, or c
  misc_feature (298)..(298): n equals a,t,g, or c
  misc_feature (333)..(333): n equals a,t,g, or c
  misc_feature (355)..(355): n equals a,t,g, or c
tatanggaaagttggtacgcctgnaggtaccgggccggnattcccgggtcgacccacgcgtcnggacctgaaactgatccacaggcatacagncaataaatgagctttcaatgaaagcaggtcaatagaagaaaataaatnatttcaattaatggactttcatatggaggtgggggagaccaacaatgntattntccctcacactacatacaaaagtaattggaggtgcantatacaccaaaacttaaaagttaaagatataaagnatttcaaggatactctgtaggnaaagattagnctaccaacaaggaggacactgaaaaatattataanaagacatgataaattagacttn

SEQ ID NO: 3757 - DNA, 281 bp, Homo sapiens
  misc_feature (2)..(2): n equals a,t,g, or c
  misc_feature (20)..(20): n equals a,t,g, or c
  misc_feature (38)..(38): n equals a,t,g, or c
  misc_feature (43)..(43): n equals a,t,g, or c
  misc_feature (75)..(75): n equals a,t,g, or c
  misc_feature (140)..(140): n equals a,t,g, or c
  misc_feature (164)..(164): n equals a,t,g, or c
  misc_feature (259)..(259): n equals a,t,g, or c
  misc_feature (271)..(271): n equals a,t,g, or c
  misc_feature (274)..(275): n equals a,t,g, or c
  misc_feature (280)..(280): n equals a,t,g, or c
cnttggaaacctttaggggnaaccgctatgaccatgantacgncaagctctaatacgactcactatatggaaagntggtacgcctgcaggtaccgggccggaattcccgggtcgacccacgcgtccgcttccattatccntaaatattgataaactcccaggcnccaaagaaaacattggcttaattgtctgaaaagaaacaagagaaaaacactggtatttttatgtctgtattcaatatggtataaaatataaaaantatattttaacntanngaaana

SEQ ID NO: 3758 - DNA, 67 bp, Homo sapiens
  misc_feature (49)..(49): n equals a,t,g, or c
  misc_feature (54)..(55): n equals a,t,g, or c
  misc_feature (60)..(60): n equals a,t,g, or c
  misc_feature (66)..(66): n equals a,t,g, or c
ggaaaaaattagagtgttcaaagcaggcccgagggggcgctcgagaggnaaggnntggtntgccgng

SEQ ID NO: 3759 - DNA, 475 bp, Homo sapiens
  misc_feature (319)..(319): n equals a,t,g, or c
  misc_feature (395)..(395): n equals a,t,g, or c
  misc_feature (458)..(458): n equals a,t,g, or c
  misc_feature (460)..(460): n equals a,t,g, or c
  misc_feature (469)..(469): n equals a,t,g, or c
  misc_feature (474)..(474): n equals a,t,g, or c
ggggggtaggaggaagagatccagtcccagatacaggtgaagaaatcccttccctggtcttcatgctccctgtacgccactgtctcttagatataattatccccaccctctgctcatttgtttcccagattcaatacattgtcaaagcctcttggtccttttttaacatctcacacttgtgtcattctctccattcccataaacctcaacaactgctcaaagtcctgcttgaccccttgttgccagtctttgaaatctttcttgcatatgactgcctcattaccttcctaaaatctagttcactcgcctactcaagaanacacaggggcctactgtggtgtattagataagttcacatttcttctctttactaatctttttacttcctttaccancacttcccttatataaattccatcattctaattagaatctggtttcccctacacattccctgncntctttcacncccana

SEQ ID NO: 3760 - DNA, 104 bp, Homo sapiens
  misc_feature (29)..(29): n equals a,t,g, or c
  misc_feature (35)..(35): n equals a,t,g, or c
  misc_feature (68)..(68): n equals a,t,g, or c
  misc_feature (73)..(73): n equals a,t,g, or c
  misc_feature (86)..(86): n equals a,t,g, or c
aggcccaccggggaaacacttaggaaaantcccgnaaggccccagcagggaccggaccggaagacccnggccnacccacgttttcnaaccatttaaaaccaaag

SEQ ID NO: 3761 - DNA, 103 bp, Homo sapiens
  misc_feature (7)..(7): n equals a,t,g, or c
  misc_feature (15)..(16): n equals a,t,g, or c
  misc_feature (34)..(34): n equals a,t,g, or c
  misc_feature (73)..(73): n equals a,t,g, or c
agctacnaaaaatannagcggaacaagcaaagcnaggcataaggtacagattccggctcgaagacaccagacngaagcaaacagctgcgcatccaaaccaaca

SEQ ID NO: 3762 - DNA, 112 bp, Homo sapiens
  misc_feature (3)..(3): n equals a,t,g, or c
  misc_feature (22)..(22): n equals a,t,g, or c
  misc_feature (42)..(42): n equals a,t,g, or c
  misc_feature (61)..(61): n equals a,t,g, or c
  misc_feature (82)..(82): n equals a,t,g, or c
  misc_feature (104)..(104): n equals a,t,g, or c
ganttcccggttcgattcacgnttccgacacgcggcagcccncgggagagctgggtcaggnccggaaaagccacacctgaanctgaggctggaagcccacgacntcctgatg

SEQ ID NO: 3763 - DNA, 116 bp, Homo sapiens
  misc_feature (2)..(2): n equals a,t,g, or c
  misc_feature (37)..(37): n equals a,t,g, or c
  misc_feature (44)..(44): n equals a,t,g, or c
  misc_feature (46)..(46): n equals a,t,g, or c
  misc_feature (87)..(87): n equals a,t,g, or c
  misc_feature (114)..(114): n equals a,t,g, or c
gngaccgttacacttgccagcgccctagcgcccgctnctttcgntntcttcccttcctttctcgccacgttcgccggctttccccgnaagctttaaaccgggggctcccttaangg

SEQ ID NO: 3764 - DNA, 144 bp, Homo sapiens
  misc_feature (28)..(29): n equals a,t,g, or c
  misc_feature (61)..(61): n equals a,t,g, or c
  misc_feature (87)..(87): n equals a,t,g, or c
  misc_feature (89)..(89): n equals a,t,g, or c
  misc_feature (103)..(103): n equals a,t,g, or c
  misc_feature (119)..(119): n equals a,t,g, or c
tgactcttaatgcctatggcaatatgannttacttgaagaaacatgatacatctttaatgnaaacacagcgccacttcacacactananaatgtgggagaccnaatatctgagttaggnaagaatttaaaaaaacacataaggg

SEQ ID NO: 3765 - DNA, 123 bp, Homo sapiens
  misc_feature (8)..(8): n equals a,t,g, or c
  misc_feature (11)..(11): n equals a,t,g, or c
  misc_feature (23)..(23): n equals a,t,g, or c
  misc_feature (56)..(56): n equals a,t,g, or c
  misc_feature (85)..(85): n equals a,t,g, or c
  misc_feature (112)..(112): n equals a,t,g, or c
  misc_feature (118)..(118): n equals a,t,g, or c
  misc_feature (122)..(122): n equals a,t,g, or c
tgaccagnggnggcaactgtgangcccgggccggtgaggaggaggagccgcagccnggagagaaggtcagcgccggcgggagcgnctgggccctccgcctccgtcctcacgnggcccnaccna

SEQ ID NO: 3766 - DNA, 655 bp, Homo sapiens
  misc_feature (1)..(1): n equals a,t,g, or c
  misc_feature (53)..(53): n equals a,t,g, or c
  misc_feature (55)..(55): n equals a,t,g, or c
  misc_feature (61)..(61): n equals a,t,g, or c
  misc_feature (72)..(72): n equals a,t,g, or c
  misc_feature (93)..(93): n equals a,t,g, or c
  misc_feature (309)..(309): n equals a,t,g, or c
  misc_feature (589)..(589): n equals a,t,g, or c
  misc_feature (631)..(631): n equals a,t,g, or c
  misc_feature (639)..(639): n equals a,t,g, or c
  misc_feature (644)..(644): n equals a,t,g, or c
  misc_feature (651)..(651): n equals a,t,g, or c
nggttcccctgcaggtcccggtccggaattcccgggtcgatccacgcgttcgntnccaganctttgttgtgngtgccccttgaggcgttcatncagcactgtttcagagaaatccctatttcaatctattcctatacgttagttattgaaaagcaatagacaatcacaaaaaacaagttgacctttttgtgttccttgagccaaagggccctcatgactgggcctcacaccgaataactcgttacaaaaagagctagggtcccagactgcgccaaaagcttcaggagactgctcctcgtctgtgcacanatgagtggccaactctggagcccaggttgttgcttcctagtctggtggtgaatccttcatagtctgaggtgcttatttagcaaattcaaccttaaacctgagtgcatggaaactattgatgcagtgtccaaggtggagaaaggtcagagtggatccagaggagccaagagaagacgtccagcatggtgacctgggctcaagtcaaggtccttatttctctgatttctggtcagaaaacacatcttcaggaaaatcacccctgactcacccaggctaagtnacaagcttttggtataaggtctcatcacaccatatgcctctntttaaaancaggncctgcanaaat

SEQ ID NO: 3767 - DNA, 240 bp, Homo sapiens
  misc_feature (5)..(7): n equals a,t,g, or c
  misc_feature (9)..(9): n equals a,t,g, or c
  misc_feature (86)..(86): n equals a,t,g, or c
  misc_feature (127)..(127): n equals a,t,g, or c
  misc_feature (179)..(179): n equals a,t,g, or c
  misc_feature (182)..(182): n equals a,t,g, or c
  misc_feature (197)..(197): n equals a,t,g, or c
  misc_feature (220)..(220): n equals a,t,g, or c
  misc_feature (230)..(230): n equals a,t,g, or c
aaaannnanggaaatccataatgaaacagcaaaaaagtactccgctgctgggtttggacaatgaacatgggattagtcccaagctngtagcttggaacggtagcatttttgcctgcgtgatccttgncagctattcacagaaggaaatcttccgaaactccgtctttcatttagccggngangctgttatccttctntgcaattagcattcatgtgggtntatcgctctntccaactctg

SEQ ID NO: 3768 - DNA, 179 bp, Homo sapiens
  misc_feature (21)..(21): n equals a,t,g, or c
  misc_feature (42)..(42): n equals a,t,g, or c
  misc_feature (50)..(50): n equals a,t,g, or c
  misc_feature (52)..(52): n equals a,t,g, or c
  misc_feature (62)..(62): n equals a,t,g, or c
  misc_feature (138)..(138): n equals a,t,g, or c
  misc_feature (150)..(150): n equals a,t,g, or c
  misc_feature (156)..(156): n equals a,t,g, or c
  misc_feature (167)..(167): n equals a,t,g, or c
  misc_feature (179)..(179): n equals a,t,g, or c
ccccagccagcctaagactangaatgtggagcctgaagatcnaagatccnancatgtacatngtatggaaatatgtgcatatttgtacataaaatgatattctgattgataaataaacagacaaaacttgaaaaaaanaaaaaatgcagnaatccnaagtaaatggnccgctaactagn

SEQ ID NO: 3769 - DNA, 521 bp, Homo sapiens
  misc_feature (23)..(23): n equals a,t,g, or c
  misc_feature (59)..(59): n equals a,t,g, or c
  misc_feature (71)..(71): n equals a,t,g, or c
  misc_feature (293)..(293): n equals a,t,g, or c
  misc_feature (435)..(435): n equals a,t,g, or c
  misc_feature (454)..(454): n equals a,t,g, or c
  misc_feature (461)..(461): n equals a,t,g, or c
  misc_feature (470)..(470): n equals a,t,g, or c
  misc_feature (501)..(501): n equals a,t,g, or c
gatattttcgcgcgcgcttttgnaaagtagctttggctacgtgggcgggcagatttttnaaagttccattngcactgcagcgctgtttgcgtcctaaatgcgatattgtaatgtttaatatccagctattatgtagctttatctttttcagcttctaatattttgttgctgtttaatttttttggcatgccttttagtcgagttgtatatacgaagtcacagtaagaaagccaattctaagactcctaaggaatattatcggttaaattacagaaggcaaatcccctctttangatgggagaatggacttgaagggaggaatgtggcaagggtccctcagaagtgagggagcccgctgttcctccttcaggcatttgcggatggcactggtgatcacaaaaaagcggagattacgctgccgggcgctcctgtggnagagggactggaacactgncccatgntgagtgaanaatgccatcaactttaccaggtgccccgtancctaaagccacgtccccact

SEQ ID NO: 3770 - DNA, 99 bp, Homo sapiens
  misc_feature (14)..(14): n equals a,t,g, or c
  misc_feature (21)..(22): n equals a,t,g, or c
  misc_feature (47)..(47): n equals a,t,g, or c
  misc_feature (55)..(55): n equals a,t,g, or c
  misc_feature (68)..(69): n equals a,t,g, or c
  misc_feature (82)..(82): n equals a,t,g, or c
  misc_feature (88)..(88): n equals a,t,g, or c
ggacgacacgtagntgacaannagggacccagaccccgccgggaccngaactccnggtttcgacccgnngcgctatacccgnttggantcaaaccccaa

SEQ ID NO: 3771 - DNA, 388 bp, Homo sapiens
  misc_feature (16)..(16): n equals a,t,g, or c
  misc_feature (33)..(33): n equals a,t,g, or c
  misc_feature (40)..(40): n equals a,t,g, or c
  misc_feature (53)..(53): n equals a,t,g, or c
  misc_feature (59)..(59): n equals a,t,g, or c
  misc_feature (118)..(118): n equals a,t,g, or c
  misc_feature (120)..(120): n equals a,t,g, or c
  misc_feature (127)..(127): n equals a,t,g, or c
  misc_feature (160)..(160): n equals a,t,g, or c
  misc_feature (176)..(176): n equals a,t,g, or c
  misc_feature (188)..(188): n equals a,t,g, or c
  misc_feature (200)..(200): n equals a,t,g, or c
  misc_feature (238)..(239): n equals a,t,g, or c
  misc_feature (264)..(265): n equals a,t,g, or c
  misc_feature (272)..(272): n equals a,t,g, or c
  misc_feature (277)..(278): n equals a,t,g, or c
  misc_feature (290)..(290): n equals a,t,g, or c
  misc_feature (336)..(336): n equals a,t,g, or c
  misc_feature (359)..(359): n equals a,t,g, or c
  misc_feature (376)..(376): n equals a,t,g, or c
  misc_feature (386)..(386): n equals a,t,g, or c
cgaaccgggccatcgngcctgatagacgggggntcgcccnatgacgttggagnccacgntcttaatagtggactcttgatccaaactggaacaacactcaaccctatctcggactatncntttgatntataagggattctgccgatttcggcctattggntaaaaaatgagctganttaacaaaaatntaacgcgaattntaacaaaatattaacgcttacaatttaggtggcacttnncggggaaaaggtgcaccgaaccccnnatttggngatanntctaaatacatncaaaaatgtatcccgctcatggagacaataaccctgataaatgctncaatatattgaaaaaggaagagnatgagcattcaacactnccgggcgccnta

SEQ ID NO: 3772 - DNA, 276 bp, Homo sapiens
  misc_feature (3)..(4): n equals a,t,g, or c
  misc_feature (52)..(52): n equals a,t,g, or c
  misc_feature (81)..(81): n equals a,t,g, or c
  misc_feature (90)..(90): n equals a,t,g, or c
  misc_feature (116)..(116): n equals a,t,g, or c
  misc_feature (122)..(122): n equals a,t,g, or c
  misc_feature (126)..(126): n equals a,t,g, or c
  misc_feature (131)..(131): n equals a,t,g, or c
  misc_feature (136)..(136): n equals a,t,g, or c
  misc_feature (146)..(146): n equals a,t,g, or c
  misc_feature (163)..(163): n equals a,t,g, or c
  misc_feature (224)..(224): n equals a,t,g, or c
  misc_feature (233)..(233): n equals a,t,g, or c
  misc_feature (242)..(243): n equals a,t,g, or c
  misc_feature (253)..(253): n equals a,t,g, or c
acnnctgcaggaccggccggaattcccgggtcgacccatgcgtccgggcatntttaaacaagacaaataaaaacgttaagngggaacaantcacagagagccacaaagcggatttnacacangccnagcanaccanaactctcggnagtggctacaagggaanaaaggactatgtggatccctgggggctatgcaaatacctacctcacaagagttgttgtaanaagactggnggtttgggnncaaaccttgngattaaagagtttgcaacgcatt

SEQ ID NO: 3773 - DNA, 382 bp, Homo sapiens
  misc_feature (7)..(7): n equals a,t,g, or c
  misc_feature (10)..(10): n equals a,t,g, or c
  misc_feature (38)..(38): n equals a,t,g, or c
  misc_feature (41)..(41): n equals a,t,g, or c
  misc_feature (49)..(49): n equals a,t,g, or c
  misc_feature (116)..(116): n equals a,t,g, or c
  misc_feature (185)..(185): n equals a,t,g, or c
  misc_feature (209)..(209): n equals a,t,g, or c
  misc_feature (254)..(254): n equals a,t,g, or c
  misc_feature (274)..(274): n equals a,t,g, or c
  misc_feature (317)..(317): n equals a,t,g, or c
  misc_feature (327)..(327): n equals a,t,g, or c
  misc_feature (348)..(348): n equals a,t,g, or c
  misc_feature (370)..(370): n equals a,t,g, or c
  misc_feature (374)..(374): n equals a,t,g, or c
tgagcanganttaccaacgtaataccaacgggctaganatnggtaacanccctcaaaccctacgagcttctgtaggctatctgcataatgtgcccattgtaggaaaagattggttncagcagacaccgtaagccatatagtactgtggtgcttagcaagaaggctttacttatctgtggatgttntcttcaaaagcagcttcaggtttntagttggttcacatgtcctttcaggtctattaacctgataggtcnggctgaggcgggggcaattnttatccaggtataatgtacccacggtttaactcctgcccaatngatgaatgcntggtcagaaggacctcatagnggtcttaccctttgaggggctngttngtgattca

SEQ ID NO: 3774 - DNA, 411 bp, Homo sapiens
  misc_feature (5)..(5): n equals a,t,g, or c
  misc_feature (14)..(14): n equals a,t,g, or c
  misc_feature (33)..(33): n equals a,t,g, or c
  misc_feature (35)..(35): n equals a,t,g, or c
  misc_feature (52)..(52): n equals a,t,g, or c
  misc_feature (175)..(175): n equals a,t,g, or c
  misc_feature (286)..(286): n equals a,t,g, or c
  misc_feature (301)..(301): n equals a,t,g, or c
  misc_feature (303)..(303): n equals a,t,g, or c
  misc_feature (326)..(326): n equals a,t,g, or c
  misc_feature (381)..(381): n equals a,t,g, or c
  misc_feature (383)..(383): n equals a,t,g, or c
  misc_feature (411)..(411): n equals a,t,g, or c
gtgtntctgcctantaccagtattagtgagacngnggattttatcagagttnaatgaaagaaagcttacccctgccctcactttgtgttttttatttttccccctttctcaagcaccacgtatttggacctgagaagtggcatagctgctaagttgacttttaataaaaaactgnttgtgcctgagggaaatatatgcctttttaaaaagtacctcagaacatgttcctagatcgtctcatcggttttgtttggtggggactgggaagttcagcaggaagtattgnctgtgtgtgatgacngngcagtattgccagtcggcaatgntgtattttgcattcttttatccctaactctgaatctaggactccatgaaaagccngngtcaccccaaaacattcttccaatacan

SEQ ID NO: 3775 - DNA, 122 bp, Homo sapiens
  misc_feature (4)..(5): n equals a,t,g, or c
  misc_feature (26)..(26): n equals a,t,g, or c
  misc_feature (56)..(56): n equals a,t,g, or c
  misc_feature (73)..(73): n equals a,t,g, or c
  misc_feature (113)..(113): n equals a,t,g, or c
  misc_feature (121)..(121): n equals a,t,g, or c
ggannacagccagagcgaagacgccnagactgcagaggaaacggaggctgagcggngagcaccaaggctggcncttccagcaccagccgcagcatcagggggcccgcccaaancaaggcang

SEQ ID NO: 3776 - DNA, 357 bp, Homo sapiens
  misc_feature (19)..(19): n equals a,t,g, or c
  misc_feature (21)..(21): n equals a,t,g, or c
  misc_feature (71)..(71): n equals a,t,g, or c
  misc_feature (76)..(76): n equals a,t,g, or c
  misc_feature (93)..(93): n equals a,t,g, or c
  misc_feature (101)..(101): n equals a,t,g, or c
  misc_feature (109)..(109): n equals a,t,g, or c
  misc_feature (144)..(144): n equals a,t,g, or c
  misc_feature (183)..(183): n equals a,t,g, or c
  misc_feature (203)..(203): n equals a,t,g, or c
  misc_feature (223)..(223): n equals a,t,g, or c
  misc_feature (225)..(227): n equals a,t,g, or c
  misc_feature (240)..(241): n equals a,t,g, or c
  misc_feature (245)..(245): n equals a,t,g, or c
  misc_feature (303)..(303): n equals a,t,g, or c
  misc_feature (312)..(312): n equals a,t,g, or c
  misc_feature (329)..(329): n equals a,t,g, or c
  misc_feature (341)..(341): n equals a,t,g, or c
  misc_feature (357)..(357): n equals a,t,g, or c
gctttactggatcacattngntacagaaacccaaactcattatgatgataatttgacccttttagaagaancctgngataatttacatgccanccataatngaatctcnggtacatggcacatgcattccagtatggaacactntctagccctacccctatcctttaaggctcaggggacagntactatcactgtgaagcctntcccgtaacactctggttangnnncaatattgccacnnaaantggatgtctaggttgtgggggttcgggggtcaatgcctcgttccactccagatattcnggcactttnccatcatccttcatagnctccacataatngggcagtcaataatgn

SEQ ID NO: 3777 - DNA, 152 bp, Homo sapiens
  misc_feature (10)..(10): n equals a,t,g, or c
  misc_feature (20)..(20): n equals a,t,g, or c
  misc_feature (30)..(30): n equals a,t,g, or c
  misc_feature (44)..(44): n equals a,t,g, or c
  misc_feature (106)..(106): n equals a,t,g, or c
  misc_feature (112)..(112): n equals a,t,g, or c
  misc_feature (116)..(116): n equals a,t,g, or c
  misc_feature (136)..(137): n equals a,t,g, or c
gggtaaaatnccccgggtgnacttattagngtggaaaaaaggcnttggggtacccccttggcaggggtaaccccggggtccccgggaattttccccgggggttcgnaccccnacgncggtccggcatttatttcannaatgattggaaaagg

SEQ ID NO: 3778 - DNA, 134 bp, Homo sapiens
  misc_feature (5)..(5): n equals a,t,g, or c
  misc_feature (15)..(16): n equals a,t,g, or c
  misc_feature (72)..(72): n equals a,t,g, or c
  misc_feature (98)..(98): n equals a,t,g, or c
  misc_feature (114)..(114): n equals a,t,g, or c
  misc_feature (119)..(119): n equals a,t,g, or c
  misc_feature (123)..(123): n equals a,t,g, or c
aaacnggccaccgcnnggcgcagcctgaatggcgaatggctgctttgcctggtttccggcatttttaaaccnggggcggaaaggggggctggaggggnagatttttaaaaacgncgatncccnggggcccaaaa

SEQ ID NO: 3779 - DNA, 159 bp, Homo sapiens
  misc_feature (3)..(3): n equals a,t,g, or c
  misc_feature (9)..(9): n equals a,t,g, or c
  misc_feature (17)..(17): n equals a,t,g, or c
  misc_feature (38)..(38): n equals a,t,g, or c
  misc_feature (41)..(41): n equals a,t,g, or c
  misc_feature (109)..(109): n equals a,t,g, or c
  misc_feature (122)..(122): n equals a,t,g, or c
  misc_feature (133)..(133): n equals a,t,g, or c
  misc_feature (139)..(139): n equals a,t,g, or c
  misc_feature (148)..(148): n equals a,t,g, or c
ccncctccngtaaaggncccgggcccgggcccaaaggnccncccgggcccggggggcccaaagggggggcccccaaggggggttttctaaggggaaaggcccaaagggncctctccaaaccnccaaattgggngggggnaaattgggngcgcggaaagg

SEQ ID NO: 3780 - DNA, 553 bp, Homo sapiens
  misc_feature (487)..(487): n equals a,t,g, or c
  misc_feature (523)..(523): n equals a,t,g, or c
  misc_feature (532)..(532): n equals a,t,g, or c
  misc_feature (549)..(549): n equals a,t,g, or c
  misc_feature (552)..(552): n equals a,t,g, or c
gtattttagcactaatttaaactgtttggtaatccctctagacatctaatctgtggccccagtgagtgcatgtgcaatgttttgtagcggtcatttttttttaagtattaacacaatcatacttcctctttaaaaggagtaaaatgtgttagaatggctactgctgctgttagaatctgtgaaaaagggaaagtcacctttcacctagggggtcctgtgtgtttcttggaagagaggggcctagagtaagtacatgccccttctccagggtgctttcacatgtgtttgaatccatcccttgtcacttgtgatccaggctcaggtaatacaaggtttcgtggtatgccatcccatgaccaaaacttgtattgctagaggccacgaccagtactgaaacactcaagaatatacccagttcaatgctcagattaacttttgatactggcatgggcataagcatctggtcctacctctcctgcgtcacctntcagctgtatcatagccactgccaagaagtgctccngtaaccacncttagcttaaggagccnacnt

SEQ ID NO: 3781 - DNA, 76 bp, Homo sapiens
  misc_feature (9)..(10): n equals a,t,g, or c
  misc_feature (53)..(53): n equals a,t,g, or c
  misc_feature (56)..(56): n equals a,t,g, or c
  misc_feature (69)..(69): n equals a,t,g, or c
gcccagtcnngctaattccagaaacttgtggttttttcatagggctgtgctgncantgactagcatggngcaatga

SEQ ID NO: 3782 - DNA, 60 bp, Homo sapiens
  misc_feature (8)..(8): n equals a,t,g, or c
  misc_feature (52)..(52): n equals a,t,g, or c
gctcacanattattaagtatacctgaatcttggtttctttttataactgagnaataatgg

SEQ ID NO: 3783 - DNA, 480 bp, Homo sapiens
  misc_feature (386)..(386): n equals a,t,g, or c
  misc_feature (460)..(460): n equals a,t,g, or c
gccgcctgggccgccgcctcttgtcagccgccgccacccaggccgtgcctcagaagaactcataagaatcatgcaagcttcctccctcagccattgatggaaagttcagcaagatcagcaacaaaaccaagaaaaatgatccttgcgtgctgaatatctgaaaagagaaatttttcctacaaaatctcttgggtcaagaaagttctagaatttgaattgataaacatggtgggttggctgagggtaagagtatatgaggaaccttttaaacgacaacaatactgctagctttcaggatgatttttaaaaaatagattcaaatgtgttatcctctctctgaaacgcttcctataactcgagtttataggggaagaaaaagctattgnttacaattatatcaccattaaggcaactgctacaccctgctttgtattctgggctaagattcattaaaaactanctgctcttaacttgaaaaaa

SEQ ID NO: 3784 - DNA, 100 bp, Homo sapiens
  misc_feature (8)..(8): n equals a,t,g, or c
  misc_feature (17)..(17): n equals a,t,g, or c
  misc_feature (33)..(33): n equals a,t,g, or c
  misc_feature (49)..(49): n equals a,t,g, or c
  misc_feature (89)..(89): n equals a,t,g, or c
gaaccccngaggagggngaggagcaatatatgnacaatacataatggcngggcgaagaatataaatgagatactatacattagaaattnacaagcattgg

SEQ ID NO: 3785 - DNA, 129 bp, Homo sapiens
  misc_feature (5)..(5): n equals a,t,g, or c
  misc_feature (52)..(52): n equals a,t,g, or c
  misc_feature (57)..(57): n equals a,t,g, or c
  misc_feature (62)..(62): n equals a,t,g, or c
  misc_feature (92)..(92): n equals a,t,g, or c
  misc_feature (119)..(119): n equals a,t,g, or c
atggntaatgggacagacggataattacccgaattaacaaccacactgcttngaatnctacncacagatgcacccagtacactaagtgatgngggtaatgctaactacatttaattggngataaaatcc

SEQ ID NO: 3786 - DNA, 124 bp, Homo sapiens
  misc_feature (2)..(2): n equals a,t,g, or c
  misc_feature (19)..(19): n equals a,t,g, or c
  misc_feature (48)..(49): n equals a,t,g, or c
  misc_feature (87)..(87): n equals a,t,g, or c
  misc_feature (104)..(104): n equals a,t,g, or c
  misc_feature (111)..(111): n equals a,t,g, or c
cncccagcgccggtcagtnctagatgaccacctatggagagtactccnntaacagccatgaccctcactacgggaggcagactcacngattgtgggaaacactnatgggcngatgtaagaaata

SEQ ID NO: 3787 - DNA, 77 bp, Homo sapiens
  misc_feature (16)..(16): n equals a,t,g, or c
  misc_feature (54)..(54): n equals a,t,g, or c
  misc_feature (69)..(69): n equals a,t,g, or c
  misc_feature (73)..(73): n equals a,t,g, or c
  misc_feature (76)..(76): n equals a,t,g, or c
ggtcttggcagtgcanatgccaaaactgagtggttggatgccaaacaccacatncttgctcattctacntttnatna

SEQ ID NO: 3788 - DNA, 383 bp, Homo sapiens
  misc_feature (314)..(314): n equals a,t,g, or c
  misc_feature (324)..(324): n equals a,t,g, or c
  misc_feature (333)..(333): n equals a,t,g, or c
  misc_feature (338)..(338): n equals a,t,g, or c
  misc_feature (378)..(378): n equals a,t,g, or c
gcccacgcgtccggtgcgctcgcggttctctcgcggaggtcggcggtggcgggagcgggctccggagagcctgagagcacggtggggcggggcgggagaaagtggccgcccggaggacgttggcgtttacgtgtggaagagcggaagagttttgcttttcgtgcgcgccttcgaaaactgcctgccgctgtctgaggagtccacccgaaacctcccctcctccgccggcagccccgcgctgagctcgccgacccaagccagcgtgggcgaggtgggaagtgcgcccgacccgcgcctggagctgctcccccgantgcccatggntacaaaggntgctnagcatgagccgcccgcctgggaccccgttgccccaattcngccgg

SEQ ID NO: 3789 - DNA, 67 bp, Homo sapiens
  misc_feature (50)..(50): n equals a,t,g, or c
  misc_feature (52)..(52): n equals a,t,g, or c
  misc_feature (58)..(58): n equals a,t,g, or c
  misc_feature (63)..(64): n equals a,t,g, or c
gaagaaattgataaagtaaaagcttcgttatacatttctttttgggaggngncatcgnctaanntgc

SEQ ID NO: 3790 - DNA, 191 bp, Homo sapiens
  misc_feature (11)..(11): n equals a,t,g, or c
  misc_feature (17)..(17): n equals a,t,g, or c
  misc_feature (30)..(30): n equals a,t,g, or c
  misc_feature (84)..(84): n equals a,t,g, or c
  misc_feature (106)..(106): n equals a,t,g, or c
  misc_feature (131)..(131): n equals a,t,g, or c
  misc_feature (170)..(170): n equals a,t,g, or c
  misc_feature (183)..(183): n equals a,t,g, or c
  misc_feature (185)..(185): n equals a,t,g, or c
taacccggcancccttngcaaacctttaanttaaggggggggggtaaaaaaaagggccctttgggggtttaaaccgggcccccnttgggcccaaagggggtttaancctccgggggtttccccccgggggnaaaaattttttccccccgggggggggtttcccggaaacnccccaaaccgtcngntttttc

SEQ ID NO: 3791 - DNA, 53 bp, Homo sapiens
  misc_feature (7)..(7): n equals a,t,g, or c
  misc_feature (17)..(18): n equals a,t,g, or c
  misc_feature (28)..(28): n equals a,t,g, or c
  misc_feature (47)..(47): n equals a,t,g, or c
ggactanttctagatcnngagcggccgncctttttgggtgtccgttncacgta

SEQ ID NO: 3792 - DNA, 375 bp, Homo sapiens
  misc_feature (7)..(7): n equals a,t,g, or c
  misc_feature (284)..(284): n equals a,t,g, or c
  misc_feature (287)..(287): n equals a,t,g, or c
  misc_feature (342)..(342): n equals a,t,g, or c
  misc_feature (356)..(357): n equals a,t,g, or c
ggaacancctgaaggactgcggcctcttctgaggggcagcggggcctggcgggatgggccaccgccgactttgtaccccccaacccctgaggaagatgggggcaagaagatcacgctccccgcctgttcccccgccgcttttctcctctttcctctctttgttctcagctccccctgtcccctcagctccagacgtaggggaggggttgccacaggcctccctgtttgaagcctgcccttgtctgaaatgctggtaatggccatggtacccccttctgggcatntgntctggtttttaaccattgcttgttctgtgatgaggggaggggggcacatgctgantctcccaaggctgnntctggaggggcccctgtt

SEQ ID NO: 3793 - DNA, 265 bp, Homo sapiens
  misc_feature (8)..(8): n equals a,t,g, or c
  misc_feature (17)..(17): n equals a,t,g, or c
  misc_feature (90)..(90): n equals a,t,g, or c
  misc_feature (121)..(121): n equals a,t,g, or c
  misc_feature (124)..(124): n equals a,t,g, or c
  misc_feature (160)..(160): n equals a,t,g, or c
  misc_feature (188)..(188): n equals a,t,g, or c
  misc_feature (230)..(230): n equals a,t,g, or c
  misc_feature (238)..(238): n equals a,t,g, or c
  misc_feature (257)..(257): n equals a,t,g, or c
  misc_feature (262)..(262): n equals a,t,g, or c
gcggactngtgggggcngtttgatcactgatcgagtaaggaatgacctttaattgggcgaattttggttttggttttttaaaattttttnaacccagaatgatttctcctgcttccttctnctnaccatcttcccagacggagttcaaaggccacttctnaagcagcttttggcacctttagcctcanaagtggaatcttttaaagacaggacccctatgttcaggaaangggaaaanggacttttgcaatgatagngaccncag

SEQ ID NO: 3794 - DNA, 505 bp, Homo sapiens
  misc_feature (411)..(411): n equals a,t,g, or c
  misc_feature (421)..(421): n equals a,t,g, or c
  misc_feature (470)..(470): n equals a,t,g, or c
  misc_feature (485)..(485): n equals a,t,g, or c
  misc_feature (491)..(491): n equals a,t,g, or c
gtgatattatactctatcctgggccagagaagataatgttctttaatgttgtccaggaaaccctggcttgcttgccgagcctaatgaaagggaaagtcagctttcagagccagtgaaggagccacgtgaatggccctagaactgtgcctagttcctgtggccaggaggttggtgactgaaacattcacacagggctctttgatggacccacgaacgctcttagctttctcagggggtcagcagagttattgaatcttaattttttttaatgtcaagttttgtataaataataaagaactccttattttgtattacatctaatgcttcaagtgttgctcttggaaagctgatgatgtctcttgtagaagatggactctgaaaaacattccaggaaaccatggcagcatgganagcctcttantgattgtgtctgcattggtattgtggaagatttaccttttctggtgtcntaaagcttaaattgnttttgntgggactttttacc

SEQ ID NO: 3795 - DNA, 226 bp, Homo sapiens
  misc_feature (189)..(189): n equals a,t,g, or c
  misc_feature (198)..(198): n equals a,t,g, or c
  misc_feature (204)..(204): n equals a,t,g, or c
  misc_feature (215)..(215): n equals a,t,g, or c
  misc_feature (224)..(224): n equals a,t,g, or c
gcgtggtttagacctgctgtgtggcagacaatgggaagcctgtgtgtcgtcctgggtgccggatttagacaatatttagctttcccttggtggaaaagcctttcccctcctgctttgggcaggaactggttcctgttgggcggggcctggctgctgccccacccccacccggcgggcaccttgaccggnagctctccngactgntccctgcctgngcccctganca

SEQ ID NO: 3796 - DNA, 177 bp, Homo sapiens
  misc_feature (169)..(169): n equals a,t,g, or c
  misc_feature (171)..(171): n equals a,t,g, or c
  misc_feature (175)..(177): n equals a,t,g, or c
agaaattcatgcatctatttataataccttttgatacatgtgaaaattaagaagtttgtttcagtactttagaaatacaatgagggaatatccgatctagcctggtccaggaaaagggaagaagactgaggcagcaggaaaggctatcaggaagtaaaccctccggggncntggnnn

SEQ ID NO: 3797 - DNA, 50 bp, Homo sapiens
  misc_feature (19)..(19): n equals a,t,g, or c
  misc_feature (39)..(39): n equals a,t,g, or c
  misc_feature (41)..(41): n equals a,t,g, or c
  misc_feature (48)..(48): n equals a,t,g, or c
gactaagttttagatcgtnagcggccgcccttttttttngnttttatnga

SEQ ID NO: 3798 - DNA, 177 bp, Homo sapiens
  misc_feature (7)..(7): n equals a,t,g, or c
  misc_feature (38)..(38): n equals a,t,g, or c
  misc_feature (56)..(56): n equals a,t,g, or c
  misc_feature (61)..(61): n equals a,t,g, or c
  misc_feature (106)..(106): n equals a,t,g, or c
  misc_feature (121)..(121): n equals a,t,g, or c
  misc_feature (168)..(168): n equals a,t,g, or c
  misc_feature (173)..(174): n equals a,t,g, or c
ggaagtnttatgttttatgattgagcattagtgtcatnctacaatcagccactccncaaangttgcatcactgaaactccaggtttcacagagaatttcctaaggnattaggtttgagttncttccttcgtgggatgctatggattctttaaccaaaccagcctaatntttcnnctg

SEQ ID NO: 3799 - DNA, 196 bp, Homo sapiens
  misc_feature (7)..(8): n equals a,t,g, or c
  misc_feature (39)..(39): n equals a,t,g, or c
  misc_feature (70)..(70): n equals a,t,g, or c
  misc_feature (76)..(76): n equals a,t,g, or c
  misc_feature (78)..(78): n equals a,t,g, or c
  misc_feature (128)..(128): n equals a,t,g, or c
  misc_feature (143)..(143): n equals a,t,g, or c
  misc_feature (146)..(146): n equals a,t,g, or c
  misc_feature (180)..(180): n equals a,t,g, or c
  misc_feature (196)..(196): n equals a,t,g, or c
gcagggnntttccccagtttctgacttgaagtagactgngaagaatccacgaggtgctatccggccaganttaagnanattctatttccttggttctccctctccctgaggacctcttattttattgncccctcttctaggtnaantctcctttgatttgactttgttgagaaggaggtnggacagtagattagcn

SEQ ID NO: 3800 - DNA, 197 bp, Homo sapiens
  misc_feature (10)..(10): n equals a,t,g, or c
  misc_feature (26)..(26): n equals a,t,g, or c
  misc_feature (38)..(38): n equals a,t,g, or c
  misc_feature (70)..(70): n equals a,t,g, or c
  misc_feature (76)..(76): n equals a,t,g, or c
  misc_feature (90)..(90): n equals a,t,g, or c
  misc_feature (115)..(115): n equals a,t,g, or c
  misc_feature (151)..(151): n equals a,t,g, or c
  misc_feature (168)..(170): n equals a,t,g, or c
gaaaggtttnaagtggtatgcagtgnttttatgtcctncataactgatttaaattagtaggactattttnatcttncaacttttaatttncttataaaagtcaagtaaatacaangattgttattagctgaatagcagatgagatctcagnatttaaaagaacagatnnnttcttataaactcgcttttgattttaa

SEQ ID NO: 3801 - DNA, 161 bp, Homo sapiens
  misc_feature (117)..(117): n equals a,t,g, or c
  misc_feature (126)..(126): n equals a,t,g, or c
  misc_feature (140)..(140): n equals a,t,g, or c
  misc_feature (144)..(144): n equals a,t,g, or c
  misc_feature (150)..(150): n equals a,t,g, or c
ggagattttggatggcaacgatgagaagtacaaggctgtgctattactttttgagctttgcaagttgtgtacataataattctaaagaagttactttgtttgcaatgcatcaaattnaaatgatgngattttttttgtantatntgatcntagtgacagtg

SEQ ID NO: 3802 - DNA, 51 bp, Homo sapiens
  misc_feature (9)..(9): n equals a,t,g, or c
  misc_feature (31)..(31): n equals a,t,g, or c
  misc_feature (40)..(40): n equals a,t,g, or c
  misc_feature (50)..(51): n equals a,t,g, or c
gctgtgttncagaccgtgtctgacttagtgnaacctaggngattttatann

SEQ ID NO: 3803 - DNA, 110 bp, Homo sapiens
  misc_feature (4)..(4): n equals a,t,g, or c
  misc_feature (89)..(89): n equals a,t,g, or c
  misc_feature (91)..(91): n equals a,t,g, or c
  misc_feature (98)..(98): n equals a,t,g, or c
  misc_feature (105)..(106): n equals a,t,g, or c
gggnctttgtgataccacaaatcccaagccttcccttgcctgaccaatacccatcaaggtctgtgatttgacttggtgcatattggtangnccagggnaggcttnngatg

SEQ ID NO: 3804 - DNA, 88 bp, Homo sapiens
  misc_feature (5)..(5): n equals a,t,g, or c
  misc_feature (54)..(55): n equals a,t,g, or c
  misc_feature (61)..(61): n equals a,t,g, or c
  misc_feature (64)..(64): n equals a,t,g, or c
ggggntttgttgctgtcctggctgtcctaaccagggggtgggcattcggaactnngggccntantgggaaggggaacgaagaaaaacc

SEQ ID NO: 3805 - DNA, 82 bp, Homo sapiens
  misc_feature (43)..(43): n equals a,t,g, or c
  misc_feature (45)..(45): n equals a,t,g, or c
  misc_feature (63)..(63): n equals a,t,g, or c
  misc_feature (67)..(67): n equals a,t,g, or c
  misc_feature (72)..(72): n equals a,t,g, or c
gcaacttcattctcaaagagtagcaagttgtcatgaggggccntnaatgacaacttcatactnaaanagaancaagcgtgga

SEQ ID NO: 3806 - DNA, 179 bp, Homo sapiens
  misc_feature (2)..(2): n equals a,t,g, or c
  misc_feature (16)..(16): n equals a,t,g, or c
  misc_feature (20)..(20): n equals a,t,g, or c
  misc_feature (30)..(30): n equals a,t,g, or c
  misc_feature (86)..(86): n equals a,t,g, or c
  misc_feature (133)..(133): n equals a,t,g, or c
  misc_feature (148)..(148): n equals a,t,g, or c
  misc_feature (153)..(153): n equals a,t,g, or c
  misc_feature (179)..(179): n equals a,t,g, or c
gntggtatgtgctatnaaanatatcaatantgcgtcatgccaagatcacacagcatggagacacatgttcacgcagataacacagncaccgcgtccctaccctggcgcatatgccatggtcgatcttggcaanaggggaacattctgngcgantttccctttggccgtcaattggtctn

SEQ ID NO: 3807 - DNA, 95 bp, Homo sapiens
  misc_feature (9)..(9): n equals a,t,g, or c
  misc_feature (33)..(33): n equals a,t,g, or c
  misc_feature (38)..(38): n equals a,t,g, or c
  misc_feature (43)..(43): n equals a,t,g, or c
  misc_feature (67)..(67): n equals a,t,g, or c
ttttttttnggggggggggtttaaaaaaaaaanaaggnttaancccccccgggggaaaacccttttnaaaaaaaccagttggaaaggtttatttt

SEQ ID NO: 3808 - DNA, 240 bp, Homo sapiens
  misc_feature (2)..(2): n equals a,t,g, or c
  misc_feature (18)..(20): n equals a,t,g, or c
  misc_feature (80)..(80): n equals a,t,g, or c
  misc_feature (161)..(161): n equals a,t,g, or c
  misc_feature (171)..(171): n equals a,t,g, or c
  misc_feature (193)..(193): n equals a,t,g, or c
  misc_feature (202)..(202): n equals a,t,g, or c
  misc_feature (240)..(240): n equals a,t,g, or c
gncctctggacccactcnnnccttcctgccctgtttgcgcagggacatcacccacatgccccagctctcggaccctgcanctctgtgtcccaggccacagcaaaggtctgttgaacccctccctccattcccagttatctgggtcctctggattcttctgnttcttgaatnaggctctgctttacccctagcnactacaggnaagcctctgacagtggccgctttacttgcattctgcan

SEQ ID NO: 3809 - DNA, 89 bp, Homo sapiens
  misc_feature (1)..(1): n equals a,t,g, or c
  misc_feature (4)..(4): n equals a,t,g, or c
  misc_feature (8)..(8): n equals a,t,g, or c
  misc_feature (10)..(10): n equals a,t,g, or c
  misc_feature (28)..(28): n equals a,t,g, or c
ntcntttntncgtccggtacatactggnctctgggagtacattgaacaagccattaaaattaaacaagccttaaaaaaaaaaaaaaaaa

SEQ ID NO: 3810 - DNA, 250 bp, Homo sapiens
  misc_feature (32)..(32): n equals a,t,g, or c
  misc_feature (56)..(56): n equals a,t,g, or c
  misc_feature (65)..(65): n equals a,t,g, or c
  misc_feature (92)..(92): n equals a,t,g, or c
  misc_feature (109)..(109): n equals a,t,g, or c
  misc_feature (112)..(112): n equals a,t,g, or c
  misc_feature (132)..(132): n equals a,t,g, or c
  misc_feature (139)..(139): n equals a,t,g, or c
  misc_feature (177)..(177): n equals a,t,g, or c
  misc_feature (215)..(215): n equals a,t,g, or c
  misc_feature (237)..(238): n equals a,t,g, or c
  misc_feature (248)..(248): n equals a,t,g, or c
gagctgaggaacgaaagaaacttcgacaaganaatggaaatgtacatgctatagcntaactgaanataaaattacaggatatcacattggantcactgccaagtcatanccntaaatgatgagtcggtcctntttccantggatcataagacaatggaccctttttgttatgatggntttaaactttcaattgtcactttttatgctatttctgnatataaaggtgcacgaacgtcnnaagtattttntc

SEQ ID NO: 3811 - DNA, 54 bp, Homo sapiens
  misc_feature (12)..(12): n equals a,t,g, or c
  misc_feature (24)..(24): n equals a,t,g, or c
  misc_feature (32)..(32): n equals a,t,g, or c
  misc_feature (39)..(39): n equals a,t,g, or c
  misc_feature (41)..(41): n equals a,t,g, or c
ggagccacaatntgcactggggtntcaaagangactacntntggaaatttttta

SEQ ID NO: 3812 - DNA, 300 bp, Homo sapiens
  misc_feature (21)..(21): n equals a,t,g, or c
  misc_feature (28)..(29): n equals a,t,g, or c
  misc_feature (32)..(32): n equals a,t,g, or c
ggacgcgtgggcggaggcacnggagagnncangacgaccccagcagctgccaggaaaggccacagtcctggctgggggctgtggggctgggccaaggccactgaaatctggtagacaaggaaaggagagctggggacgggggagcccagaacacaaggctgacagcacaaagagaaagccctctgtccccaacaaacctagaaatcaacatccccaagctcgcatggcccaaacacactaagaaatacgactcagaaaatcaacagggccagtggacccatggatccatctcagggagac

SEQ ID NO: 3813 - DNA, 116 bp, Homo sapiens
  misc_feature (10)..(10): n equals a,t,g, or c
  misc_feature (25)..(25): n equals a,t,g, or c
  misc_feature (56)..(56): n equals a,t,g, or c
  misc_feature (61)..(61): n equals a,t,g, or c
  misc_feature (110)..(110): n equals a,t,g, or c
  misc_feature (112)..(112): n equals a,t,g, or c
gccgacgcgngggaaaaaaaggggngaaataaaaaacaccagaggagaaaaaagangaaanagaaaaaataaaagcatatccctatatggaaggcgaacctgaggatgangnctat

SEQ ID NO: 3814 - DNA, 125 bp, Homo sapiens
  misc_feature (3)..(3): n equals a,t,g, or c
  misc_feature (23)..(23): n equals a,t,g, or c
  misc_feature (66)..(66): n equals a,t,g, or c
  misc_feature (74)..(75): n equals a,t,g, or c
  misc_feature (124)..(125): n equals a,t,g, or c
ccnaatcaaaagattggacttcnagcacaatgagacacggccaacgggttcatggaaaagggctanggagcccnnaggtgcgcatgatgctgagactgaaagggccttttggtactgaaaggcnn

SEQ ID NO: 3815 - DNA, 152 bp, Homo sapiens
  misc_feature (22)..(22): n equals a,t,g, or c
  misc_feature (29)..(29): n equals a,t,g, or c
  misc_feature (35)..(35): n equals a,t,g, or c
  misc_feature (75)..(75): n equals a,t,g, or c
  misc_feature (90)..(90): n equals a,t,g, or c
  misc_feature (101)..(102): n equals a,t,g, or c
  misc_feature (115)..(115): n equals a,t,g, or c
aggctgtaactactttataacnaacatgncctgcnaaaatctgacagctgcaaggtactctggagagtcaccacnttaagggcatttacnccgaaacagannatggaggcatagnactggggagggaagttttgaaatgggctcaacagaaa

SEQ ID NO: 3816 - DNA, 414 bp, Homo sapiens
  misc_feature (248)..(248): n equals a,t,g, or c
  misc_feature (297)..(297): n equals a,t,g, or c
  misc_feature (356)..(356): n equals a,t,g, or c
  misc_feature (359)..(359): n equals a,t,g, or c
  misc_feature (379)..(379): n equals a,t,g, or c
  misc_feature (387)..(387): n equals a,t,g, or c
  misc_feature (400)..(400): n equals a,t,g, or c
gaaggcctgtatggcccttcctccctctccaaacccactatgagacaccacacttcagccaccaccagcttctccactcctataacccatgtgccctttcaagcctcggggcctttgcagttgctatagtctctatctggaatgcccttcccccagttcttcccatggctgactcctttgaatctttctggtgttggctaaactgtcacctcttcctggaacccttctctgaccatccttccatgtanattagctcagttattctcaccttgtgtgtctttttccttgcagtttagnactcattaccatctggacatattttacgccttgctctcccactgtgaggacagggaccntgnctttcttgctcgagactgtntttcccancatctattgcagngcctggtatgcagt

SEQ ID NO: 3817 - DNA, 407 bp, Homo sapiens
  misc_feature (7)..(7): n equals a,t,g, or c
  misc_feature (145)..(145): n equals a,t,g, or c
  misc_feature (155)..(155): n equals a,t,g, or c
  misc_feature (320)..(320): n equals a,t,g, or c
  misc_feature (332)..(332): n equals a,t,g, or c
  misc_feature (367)..(367): n equals a,t,g, or c
  misc_feature (385)..(385): n equals a,t,g, or c
  misc_feature (393)..(393): n equals a,t,g, or c
gggttanttgtaaaaaccacgttaatgtttctgagcttttataaaacatatcaaccaatgtgtagacctgcaaaagttgaaataggtgtataatagactttttattagtttggtattgtaatagatcactcatttgtatgtattntgcattctantcatatgattataagtaattttgtttataagtttataagtaattttgtacaagtaaatttaaactttaacaccatgttaaaatttcagaagccagaaaagagggagatgcagtcttatatttaacaacttaaaacagtttaaatcccatgtagttatagactganataaaacaaagnatttctcttggcagtagaatccctgtgttctgtgngtgtggaacatatgttcnagagggcngggactatgtcttg

SEQ ID NO: 3818 - DNA, 73 bp, Homo sapiens
  misc_feature (24)..(24): n equals a,t,g, or c
  misc_feature (31)..(32): n equals a,t,g, or c
  misc_feature (48)..(48): n equals a,t,g, or c
  misc_feature (72)..(72): n equals a,t,g, or c
gctagaatattactgtggatcccntaaaganngactaattggctctgnattaatggagacttcccactggcng

SEQ ID NO: 3819 - DNA, 406 bp, Homo sapiens
  misc_feature (3)..(4): n equals a,t,g, or c
  misc_feature (27)..(27): n equals a,t,g, or c
  misc_feature (38)..(39): n equals a,t,g, or c
  misc_feature (198)..(198): n equals a,t,g, or c
  misc_feature (322)..(322): n equals a,t,g, or c
  misc_feature (339)..(339): n equals a,t,g, or c
  misc_feature (387)..(387): n equals a,t,g, or c
  misc_feature (403)..(403): n equals a,t,g, or c
  misc_feature (405)..(405): n equals a,t,g, or c
ttnntagagagctcctttggaagactnctatagggaannctggtacgcctgcaggtaccggtccggaattcccgggtcgacccacgcgtccggttctttataaagtaaaagtatacgaaactgacaataatattgtggtttataaaggagaatagctattggggttagcattgcacaaagcccagtttctttctgtgnttgaaaaagattttgatccccttggaatattaagaggtcaacacgtgattgttgtacgtacacattgtgctctggagtgcctatttattgaaatcattgtaagacctgttataaattttaagtntatttaaaactaaactngtaatatacatcctgaaaatcattttatagagtcttttatttagtaangtaaaaaaatcaattnant

SEQ ID NO: 3820 - DNA, 220 bp, Homo sapiens
  misc_feature (192)..(192): n equals a,t,g, or c
  misc_feature (206)..(206): n equals a,t,g, or c
  misc_feature (212)..(214): n equals a,t,g, or c
ggttggaatatggcataagccggactatctgggaatgtgggggaggggaggctgtgctggctcctcttgcagctgtcatccaccaggcaccccccttgctccccgaacagctgctaagggttaggggaactgattggagaaggagcaggaatgttgtatgtgtggagggggtggggtggggggtgacagatnaactgggtggaaanctgccnnncttgca

SEQ ID NO: 3821 - DNA, 127 bp, Homo sapiens
  misc_feature (1)..(1): n equals a,t,g, or c
  misc_feature (23)..(23): n equals a,t,g, or c
  misc_feature (27)..(27): n equals a,t,g, or c
  misc_feature (30)..(30): n equals a,t,g, or c
  misc_feature (74)..(75): n equals a,t,g, or c
  misc_feature (116)..(116): n equals a,t,g, or c
  misc_feature (127)..(127): n equals a,t,g, or c
nttgtagagaccccatttggaanaccnctnactatagggaaagctggtacgcctgcaggtaccggaccggaatnnccgggtcgacccacgcgttcgaacaagggcaaggagacctncctttgagctn

SEQ ID NO: 3822 - DNA, 299 bp, Homo sapiens
  misc_feature (9)..(9): n equals a,t,g, or c
  misc_feature (18)..(18): n equals a,t,g, or c
  misc_feature (146)..(146): n equals a,t,g, or c
  misc_feature (184)..(184): n equals a,t,g, or c
  misc_feature (250)..(250): n equals a,t,g, or c
  misc_feature (253)..(253): n equals a,t,g, or c
  misc_feature (264)..(264): n equals a,t,g, or c
  misc_feature (267)..(267): n equals a,t,g, or c
  misc_feature (277)..(277): n equals a,t,g, or c
aaacccctnactataggntaagctggtacgcctgcaggtaccggtccggaattcccgggtcgaccccaaaaaacttgattagggtgatggttcacgtagtgggccatcgccctgatagacggtttttcgccctttgacgttggagnccacgttcttaatagtggactcttgttccaaactggancaacactcaaccctatctcggtctattcttttgatttataagggattttgccgattttggcctatnggntaaaaaatganctnatttaacaanaatttaaacgcgaattttaaca

SEQ ID NO: 3823 - DNA, 285 bp, Homo sapiens
  misc_feature (3)..(3): n equals a,t,g, or c
  misc_feature (10)..(10): n equals a,t,g, or c
  misc_feature (19)..(19): n equals a,t,g, or c
  misc_feature (136)..(136): n equals a,t,g, or c
  misc_feature (241)..(241): n equals a,t,g, or c
  misc_feature (276)..(276): n equals a,t,g, or c
  misc_feature (281)..(281): n equals a,t,g, or c
  misc_feature (283)..(284): n equals a,t,g, or c
ganacccctnctatagggnaagctggtacgcctgcaggtaccggtccggaattcccgggtcgacccacgcgtccgatttcatattaaatgttatataacacaagagagagaaagtataagtagaaagagtgcctancaccctaagaaatttaaattaaaatgctaattatccattggtgagtgcagtctcgaggataggtgagtaaactgctctgtgttgaagtcacactgctgacctggntattgtaataaatcacctctttggttaatttaaanaattntnnt

SEQ ID NO: 3824 - DNA, 107 bp, Homo sapiens
  misc_feature (19)..(19): n equals a,t,g, or c
  misc_feature (51)..(51): n equals a,t,g, or c
  misc_feature (64)..(64): n equals a,t,g, or c
  misc_feature (68)..(68): n equals a,t,g, or c
  misc_feature (91)..(91): n equals a,t,g, or c
tacagaggatcagtggtgnaggacgcacacctggactgggcagcagcgagngagaaggatcgangatnggagcagtgtgaaaaggatgaangaaagatttggggata

SEQ ID NO: 3825 - DNA, 123 bp, Homo sapiens
  misc_feature (4)..(4): n equals a,t,g, or c
  misc_feature (11)..(11): n equals a,t,g, or c
  misc_feature (77)..(77): n equals a,t,g, or c
  misc_feature (101)..(101): n equals a,t,g, or c
  misc_feature (105)..(105): n equals a,t,g, or c
  misc_feature (109)..(109): n equals a,t,g, or c
  misc_feature (117)..(117): n equals a,t,g, or c
tatntgacccntttggaatgccggtacgcctgctgtaccggtccggaattcccgggtcgacccacgcgtccgctgangcatattgtgcacaaaattgggcncatnacgntgactgtnaccatg

SEQ ID NO: 3826 - DNA, 506 bp, Homo sapiens
  misc_feature (2)..(2): n equals a,t,g, or c
  misc_feature (14)..(14): n equals a,t,g, or c
  misc_feature (17)..(17): n equals a,t,g, or c
  misc_feature (37)..(37): n equals a,t,g, or c
  misc_feature (113)..(113): n equals a,t,g, or c
  misc_feature (124)..(124): n equals a,t,g, or c
  misc_feature (148)..(148): n equals a,t,g, or c
  misc_feature (161)..(161): n equals a,t,g, or c
  misc_feature (219)..(219): n equals a,t,g, or c
  misc_feature (225)..(225): n equals a,t,g, or c
  misc_feature (285)..(285): n equals a,t,g, or c
  misc_feature (292)..(292): n equals a,t,g, or c
  misc_feature (309)..(309): n equals a,t,g, or c
  misc_feature (311)..(311): n equals a,t,g, or c
  misc_feature (316)..(316): n equals a,t,g, or c
  misc_feature (327)..(327): n equals a,t,g, or c
  misc_feature (361)..(361): n equals a,t,g, or c
  misc_feature (410)..(410): n equals a,t,g, or c
  misc_feature (415)..(415): n equals a,t,g, or c
  misc_feature (438)..(438): n equals a,t,g, or c
  misc_feature (461)..(461): n equals a,t,g, or c
  misc_feature (477)..(477): n equals a,t,g, or c
gnctgaatgatggnagnttaagtctgagttttactgngagttaaaaccctctgaatttccagatgataattccatttttaatccatttggaatgctgaaagctacaaaaatgnatttcctgtcngtaaacatttgttgctttattttngtgtttaattaanagtttatttttcccctttaaatctttgaaggaaagaaggattttttgcttttttgttngttttngtcagaatagttcatggtaaactttgcaattacagatgatagttgaaaaaaaaccccagngacgcantcgtagccgcaggcgtngnttcangggtcaggcanaagatagacagccaggtaacttgagtggacctgnggacaccatcagggtcacaagcatgaaaaaaatgctatgctgctttctnaatanattatacttacatgtacacatgngccatatcattcaaaaattgcantgcataaaatggttantcacctaataagactctctattaataaaa

SEQ ID NO: 3827 - DNA, 152 bp, Homo sapiens
  misc_feature (16)..(16): n equals a,t,g, or c
  misc_feature (20)..(20): n equals a,t,g, or c
  misc_feature (28)..(28): n equals a,t,g, or c
  misc_feature (60)..(60): n equals a,t,g, or c
  misc_feature (80)..(80): n equals a,t,g, or c
  misc_feature (119)..(119): n equals a,t,g, or c
  misc_feature (133)..(133): n equals a,t,g, or c
  misc_feature (140)..(140): n equals a,t,g, or c
  misc_feature (152)..(152): n equals a,t,g, or c
gtgggaaacgctattntctnagggacgntttcccgtttatatgacaagagcacaggggcntggccggaaaaaccaattantaggaccacctttcttcccttggattggacttccgacangggtccttcaattnggataanggccaaggttcn

SEQ ID NO: 3828 - DNA, 252 bp, Homo sapiens
  misc_feature (5)..(5): n equals a,t,g, or c
  misc_feature (20)..(20): n equals a,t,g, or c
  misc_feature (30)..(30): n equals a,t,g, or c
  misc_feature (61)..(61): n equals a,t,g, or c
  misc_feature (97)..(97): n equals a,t,g, or c
  misc_feature (102)..(103): n equals a,t,g, or c
  misc_feature (116)..(116): n equals a,t,g, or c
  misc_feature (141)..(141): n equals a,t,g, or c
  misc_feature (144)..(144): n equals a,t,g, or c
  misc_feature (219)..(219): n equals a,t,g, or c
  misc_feature (230)..(230): n equals a,t,g, or c
  misc_feature (234)..(234): n equals a,t,g, or c
ccggngcgacccacgcgcgnggacctatanaggaattgtgagtaagagaataaaaggtgtntcaggggaactctaactttcgggacccacatgcacngcagnncatacctcccatngtggccagatatgtcgcggattgtnccncagacatggcaccaaaggatagccttgaaggaggagctcattggatgccagattcacaaggtaatgattcattgngagtggtgcancganaagtcagagcaccagttc

SEQ ID NO: 3829 - DNA, 135 bp, Homo sapiens
  misc_feature (3)..(3): n equals a,t,g, or c
  misc_feature (28)..(28): n equals a,t,g, or c
  misc_feature (125)..(125): n equals a,t,g, or c
  misc_feature (131)..(133): n equals a,t,g, or c
  misc_feature (135)..(135): n equals a,t,g, or c
ctntggaacgcctactatagggaaagcnggaacgcctgcaggtaccggtccggaattcccgggtcgacccacgcgtccgcccacgcgtccgaattcacataatgccaaatacacaatgtgaattnggcgannnan

SEQ ID NO: 3830 - DNA, 414 bp, Homo sapiens
  misc_feature (15)..(15): n equals a,t,g, or c
  misc_feature (244)..(244): n equals a,t,g, or c
  misc_feature (314)..(314): n equals a,t,g, or c
  misc_feature (345)..(345): n equals a,t,g, or c
  misc_feature (356)..(356): n equals a,t,g, or c
  misc_feature (367)..(367): n equals a,t,g, or c
  misc_feature (380)..(380): n equals a,t,g, or c
  misc_feature (384)..(384): n equals a,t,g, or c
gatttctctggatanatctttatatgctagtcattggtgattttgatgagtcaatttacagactgtaatcttctaaaaattctgaaagactaattgttttctgtgccatataaatgcataccactgagcaaatgaaccttattctcagcaggaacaactagcatacatgttctgaattctaacagtgctaaattacattcaagtccaggaagatcacctggaattaatggcatttcagttggcnggcatcattcccacccctcggtcttaggaaaaggaggtagaagcccccagaaccacacggcagagatcancaagttttgtctcaagtcagacaaggtctangtggccttggncttatgcaaantgggtgacatatnggantatatttccctttacctccatagagttcag

SEQ ID NO: 3831 - DNA, 147 bp, Homo sapiens
  misc_feature (79)..(79): n equals a,t,g, or c
  misc_feature (132)..(132): n equals a,t,g, or c
  misc_feature (135)..(135): n equals a,t,g, or c
  misc_feature (143)..(143): n equals a,t,g, or c
  misc_feature (147)..(147): n equals a,t,g, or c
gtataagcctttattccaagaggtatttatgctaatatgtgccataaaaaagtagagttttaatatttgacaaaatgtntgtgcaaagaaacaaatgcataaacacattactgctacattaaggcattttgnaanctggacanctan

SEQ ID NO: 3832 - DNA, 76 bp, Homo sapiens
  misc_feature (38)..(38): n equals a,t,g, or c
  misc_feature (42)..(42): n equals a,t,g, or c
  misc_feature (45)..(46): n equals a,t,g, or c
  misc_feature (62)..(62): n equals a,t,g, or c
gggattgagagacacacacagctggtcaagtagacgtntacnggnnaccatttgaatatttnatccatgaatcatg

SEQ ID NO: 3833 - DNA, 437 bp, Homo sapiens
  misc_feature (22)..(22): n equals a,t,g, or c
  misc_feature (370)..(370): n equals a,t,g, or c
  misc_feature (382)..(382): n equals a,t,g, or c
  misc_feature (404)..(404): n equals a,t,g, or c
  misc_feature (420)..(420): n equals a,t,g, or c
  misc_feature (423)..(423): n equals a,t,g, or c
gacctcatctgcctggggcctnacctgctggagtcctttgtggccaaccctctctcttacctgggacctcacacgctgggcttcacggctgccaggagcctctcccctccagaagacttgcctgctagggacctcgcctgctggggacctcgcctgttggggacctcacctgctggggacctcacctgctggggaccttggctgctggaggctgcacctactgaggatgtcggcggtcggggactttacctgctgggacctgctcccagagaccttgccacactgaatctcacctgctggggacctcaccctggagggcctgggcctggggaactggcttactttggggccccaacccgggagtgatggntctggcttgaantggtttgtgaagttggtagccnctgttaaagggtgcanaanagatcattacggta

SEQ ID NO: 3834 - DNA, 345 bp, Homo sapiens
  misc_feature (2)..(2): n equals a,t,g, or c
  misc_feature (12)..(12): n equals a,t,g, or c
  misc_feature (39)..(39): n equals a,t,g, or c
  misc_feature (42)..(42): n equals a,t,g, or c
  misc_feature (48)..(48): n equals a,t,g, or c
  misc_feature (112)..(112): n equals a,t,g, or c
  misc_feature (325)..(325): n equals a,t,g, or c
  misc_feature (333)..(333): n equals a,t,g, or c
  misc_feature (335)..(335): n equals a,t,g, or c
  misc_feature (343)..(344): n equals a,t,g, or c
cncgggattaangggggaatctaatggaagccttctggnacncttgcnggtaccggtccggaattcccgggtcgacccacgcgtccgcaacagaaagatggggctgtcccanccgtaagtcaggctcgagggagactgatcccctgaccaattcacctgataaactctagggacactggcagctgtggaaatgaatgaggcacagccgtagagctgtggctaagggcaagccccttcctgccccaccccattccttatattcagcaagcaacaaggcaatagaaaagccagggttgtctttatattctttatccccaaataatanggggtggngngaggggcnng

SEQ ID NO: 3835 - DNA, 439 bp, Homo sapiens
  misc_feature (10)..(10): n equals a,t,g, or c
  misc_feature (18)..(18): n equals a,t,g, or c
  misc_feature (35)..(35): n equals a,t,g, or c
  misc_feature (41)..(41): n equals a,t,g, or c
  misc_feature (95)..(95): n equals a,t,g, or c
  misc_feature (409)..(409): n equals a,t,g, or c
  misc_feature (411)..(411): n equals a,t,g, or c
  misc_feature (416)..(416): n equals a,t,g, or c
  misc_feature (419)..(419): n equals a,t,g, or c
  misc_feature (439)..(439): n equals a,t,g, or c
ttaacggggnaaatttcntaggccattctggtacncttgcnggtaccggtccggaattcccgggtcgacccacgcgtccgcggacgcgtgggcgnacgcgtgggctgaggccagcatgagctctccacaggggacttgtttggggcagacatctgtagtggctcttgagccactgggggccctgggattggggcatgggcagtagctgattccccttcaccccatcctctctggcattggcaggtcagtgcacaatgaactggagaagcgcaggtgagtcccagtcctgccctgacagcgccagcccccaggggccactgccctctggccttccctcccctgccattcctgtggccggcaaggtggggctggcactgcctccagacctcttcccacaggaaggcccaantnaaacnggngctggaagcggttgaagcan

SEQ ID NO: 3836 - DNA, 127 bp, Homo sapiens
  misc_feature (9)..(9): n equals a,t,g, or c
  misc_feature (12)..(12): n equals a,t,g, or c
  misc_feature (20)..(20): n equals a,t,g, or c
  misc_feature (49)..(49): n equals a,t,g, or c
  misc_feature (54)..(54): n equals a,t,g, or c
  misc_feature (108)..(108): n equals a,t,g, or c
  misc_feature (111)..(111): n equals a,t,g, or c
  misc_feature (116)..(116): n equals a,t,g, or c
cgggacttnaangggggtanactaatgggaaagctcattatagggaatnctggnacgcctgcaggtaccggtccggaattcccgggtcgacccacgcgtccgactagnagnagatngcgagcggtcg

SEQ ID NO: 3837 - DNA, 362 bp, Homo sapiens
  misc_feature (2)..(2): n equals a,t,g, or c
  misc_feature (15)..(15): n equals a,t,g, or c
  misc_feature (38)..(38): n equals a,t,g, or c
  misc_feature (41)..(41): n equals a,t,g, or c
  misc_feature (56)..(56): n equals a,t,g, or c
  misc_feature (218)..(218): n equals a,t,g, or c
  misc_feature (282)..(282): n equals a,t,g, or c
  misc_feature (332)..(332): n equals a,t,g, or c
  misc_feature (337)..(337): n equals a,t,g, or c
  misc_feature (353)..(353): n equals a,t,g, or c
  misc_feature (361)..(361): n equals a,t,g, or c
tntaacggggggaangctattgggaaggccattctggnacncttgccggtaccggnccggaattcccgggtcgacccacgcgtccgagaaaaaggaagagggttgggcaccgtcgtgaaatggtacacttcctcaccgcggtgcttatctacataattgtgtttttataacatttcctttacttttctgtaagctgatgctgccctaattatagattnttaagagaacacttcattgtaccccaaattatacagtgctttaaaaaggtactttcttaccggnttaccaaataccttataaattcgaattacataaaacaattcgagatacanaatanaaacagcctgtactgntaacaggng

SEQ ID NO: 3838 - DNA, 239 bp, Homo sapiens
  misc_feature (126)..(127): n equals a,t,g, or c
  misc_feature (131)..(131): n equals a,t,g, or c
  misc_feature (134)..(134): n equals a,t,g, or c
  misc_feature (157)..(157): n equals a,t,g, or c
  misc_feature (200)..(200): n equals a,t,g, or c
  misc_feature (206)..(206): n equals a,t,g, or c
  misc_feature (228)..(229): n equals a,t,g, or c
gaaaaaatttatttgcatttatgcctttaggataattttgtatctttctaatctgttttatcattgctacaggtttttaaaaaagaacctttcactagctagcacatgccagaggttcacatctgnnttgnttntcaaacaggtcgtagctgtattnattggccatgcaagtagaggaaatgcacagtacaaatgttttnctttancacgtaagggacctatccttgnnttgaaaagtg

SEQ ID NO: 3839 - DNA, 56 bp, Homo sapiens
  misc_feature (6)..(6): n equals a,t,g, or c
  misc_feature (13)..(13): n equals a,t,g, or c
  misc_feature (19)..(19): n equals a,t,g, or c
  misc_feature (25)..(25): n equals a,t,g, or c
  misc_feature (50)..(50): n equals a,t,g, or c
gcttgnataaagnattggnttgganttggaaaattaaaaaaaggtttcantttaac

SEQ ID NO: 3840 - DNA, 564 bp, Homo sapiens
  misc_feature (28)..(28): n equals a,t,g, or c
  misc_feature (39)..(39): n equals a,t,g, or c
  misc_feature (43)..(43): n equals a,t,g, or c
  misc_feature (47)..(47): n equals a,t,g, or c
  misc_feature (70)..(70): n equals a,t,g, or c
  misc_feature (237)..(237): n equals a,t,g, or c
  misc_feature (351)..(351): n equals a,t,g, or c
  misc_feature (517)..(517): n equals a,t,g, or c
  misc_feature (547)..(547): n equals a,t,g, or c
  misc_feature (555)..(555): n equals a,t,g, or c
  misc_feature (558)..(558): n equals a,t,g, or c
  misc_feature (560)..(560): n equals a,t,g, or c
cattttggaggcagtgggtcaaacaggnaaagccaatgnatgngtgncattttaaagtgtcggaattaancctctgaataccttctccattgggggaaagatattcttggaaccactcatgacatatcttagaaggtcattgacaatgtataaactaattgttggtttgatatttatgtaaatatcagtttaccatgctttaattttgcacattcgtactatagggagcctattggntctctattagtcttgtgggttttctgtttgaaaaggagtcatggcatctgtttacatttaccttatcaaacctagaatgtgtatatttataaatgtatgtcttcattgctaggnactaatttgcagatgtctttacatatttcaatacagaaactataacattcaatagtgtgctgtcaaagtgtgcttaactcacctggatatacctacattggtaaatgctaaacagtaatcattaaaacatttttgattaaaaaaaaaaaaaaaaagggcgggccgntttaaaaggatccaagctttacgtaccccntgcatgcnacngncata

SEQ ID NO: 3841 - DNA, 637 bp, Homo sapiens
  misc_feature (461)..(461): n equals a,t,g, or c
  misc_feature (558)..(558): n equals a,t,g, or c
  misc_feature (569)..(569): n equals a,t,g, or c
  misc_feature (597)..(597): n equals a,t,g, or c
  misc_feature (614)..(614): n equals a,t,g, or c
  misc_feature (628)..(628): n equals a,t,g, or c
ggggaccaaagaggccatagtgcccatggaggtttggacttaagagatattcattggcagctcaaagacttccaccctggagaccacactgcacacagtgacttcctggggatgtcatagccaaagccaggcctgacgcattctcgtatccaacccaaggaccttttggaatgactggggagggctgcagtcacattgatgtaaggactgtaaacatcagcaagactttataattccttctgcctaacttgtaaaaagggggctgcattcttgttggtagcatgtactctgttgagtaaaacacatattcaaattccgtataccaaaatccatttcctttgtaacaagaatttaccagtaactgtgatctaggttgccaaaagttgtctgaatctccttattcttctctgatcttcatttatgcagccaatgtctagctggacctgccctcatcttgcagntcatacaggcactgtttgagagattggttattattagatgttgtaatgctgcttcaagattcttcatggttacatgggatgcccctgctcatctggncctgaaagtantaacattcaccccaatgagggatatagncattaattcctttttcnagttacttgtaccnaaacaccgg

SEQ ID NO: 3842 - DNA, 488 bp, Homo sapiens
  misc_feature (99)..(99): n equals a,t,g, or c
  misc_feature (234)..(234): n equals a,t,g, or c
  misc_feature (263)..(264): n equals a,t,g, or c
  misc_feature (269)..(269): n equals a,t,g, or c
  misc_feature (317)..(317): n equals a,t,g, or c
  misc_feature (359)..(359): n equals a,t,g, or c
  misc_feature (375)..(375): n equals a,t,g, or c
  misc_feature (415)..(415): n equals a,t,g, or c
  misc_feature (432)..(432): n equals a,t,g, or c
  misc_feature (435)..(435): n equals a,t,g, or c
  misc_feature (470)..(470): n equals a,t,g, or c
  misc_feature (481)..(481): n equals a,t,g, or c
ggcccctgcccgtaccggtccggaattcccgggtcgacccacgcgtccggaataatttataatggttatttattggaggtggtaattagggaagatgtncttttaaacagtagaattgtgttacaaaggggtgaaagagagggaatagttgctccttgttgaagggcatgtgaaggtaggtttcaggtttggttttacaaacctgttaactacctcctgtccagcttgacaganactaatttttcatctttttgctgtcaatnngttcncagaaaagagacttttccctctcttgataggatctgtcttagggacanagggaccatcgtctttaagtgaattaattattgatggttcanaatggttttcatcatnttgggatcagctatatggcaaataggtatcatcaatgagntaaccatctaaaaatanaanaagtggaagccctaaaatgctaggaataataatanaaaggccaaanataaccc

SEQ ID NO: 3843 - DNA, 436 bp, Homo sapiens
  misc_feature (1)..(2): n equals a,t,g, or c
  misc_feature (19)..(19): n equals a,t,g, or c
  misc_feature (37)..(37): n equals a,t,g, or c
  misc_feature (98)..(98): n equals a,t,g, or c
  misc_feature (142)..(142): n equals a,t,g, or c
  misc_feature (195)..(195): n equals a,t,g, or c
  misc_feature (297)..(297): n equals a,t,g, or c
  misc_feature (302)..(302): n equals a,t,g, or c
  misc_feature (305)..(305): n equals a,t,g, or c
  misc_feature (311)..(311): n equals a,t,g, or c
  misc_feature (313)..(314): n equals a,t,g, or c
  misc_feature (332)..(332): n equals a,t,g, or c
  misc_feature (356)..(356): n equals a,t,g, or c
  misc_feature (361)..(361): n equals a,t,g, or c
  misc_feature (401)..(401): n equals a,t,g, or c
  misc_feature (403)..(403): n equals a,t,g, or c
  misc_feature (432)..(432): n equals a,t,g, or c
nnaattcacactgaaacgncctactatagggattagngggaacgcccgcaggtaccggtccggaattcccgggtcgacccacgcgtccgattacattntctcccctgataatctcttctaaattaccttctgtagttggttntcttcccttccttaatgttagccattcttcaggtgaaggttaatcctcaatgnactcttcatgtttaaggggagggtctaaaaccttgggggtaggacttaccaacggagtttcattgcatgatgatcttattgagcttattggtagcccttatntcagnatntaaagntnntcttgggctggtcagatnttcaagagaagacttttcatttcntttgnggagggaaaaggccttttaccagcactcttcaagctcagnangggaaagacttcaagcactcaggaagcangcat

SEQ ID NO: 3844 - DNA, 115 bp, Homo sapiens
  misc_feature (8)..(8): n equals a,t,g, or c
  misc_feature (30)..(30): n equals a,t,g, or c
  misc_feature (43)..(43): n equals a,t,g, or c
  misc_feature (79)..(79): n equals a,t,g, or c
  misc_feature (81)..(81): n equals a,t,g, or c
  misc_feature (109)..(109): n equals a,t,g, or c
gcctagtnatagggcagtgaggaatcaggnctactatggaaanagtcacataacggtctcttcaaactcttacatgccntnacctaagatgatcaccactcactgcgantgtctc

SEQ ID NO: 3845 - DNA, 69 bp, Homo sapiens
  misc_feature (35)..(35): n equals a,t,g, or c
tttaaggggtgggaaccccggcccccgggacaggngacacgcggggccgcggaaatattctccgggggg

SEQ ID NO: 3846 - DNA, 66 bp, Homo sapiens
  misc_feature (55)..(55): n equals a,t,g, or c
  misc_feature (58)..(59): n equals a,t,g, or c
  misc_feature (61)..(62): n equals a,t,g, or c
gcctttaaaaacagaaccttttatacaggtggattttcattcctctggggacagnggnngnnaaga

SEQ ID NO: 3847 - DNA, 52 bp, Homo sapiens
  misc_feature (5)..(5): n equals a,t,g, or c
  misc_feature (38)..(38): n equals a,t,g, or c
  misc_feature (47)..(47): n equals a,t,g, or c
  misc_feature (49)..(49): n equals a,t,g, or c
  misc_feature (51)..(51): n equals a,t,g, or c
gagcncaatgaagatcaagatcattgctgggtgcgtgntgcattggngncnt

SEQ ID NO: 3848 - DNA, 314 bp, Homo sapiens
  misc_feature (305)..(305): n equals a,t,g, or c
  misc_feature (307)..(307): n equals a,t,g, or c
  misc_feature (309)..(310): n equals a,t,g, or c
  misc_feature (314)..(314): n equals a,t,g, or c
ggttttttcttattgctgtggaacctcttttggaggacgttaaaggcgtgttttacttgtttttttaagagtgtgtgatgtgtgttttgtagatttcttgacagtgctgtaatacagacggcaatgcaatagcctatttaaagacactacgtgatctgattgagatgtacatagtttttttttttaccataactgaattattttatctcttatgttaacatgagaaatgtatgccaaatgattagttgatgtatgttttttaatttaatatttaaataaaatatttggaaggaaaaaaaaaaaananannaaan

SEQ ID NO: 3849 - DNA, 181 bp, Homo sapiens
  misc_feature (7)..(7): n equals a,t,g, or c
  misc_feature (32)..(32): n equals a,t,g, or c
  misc_feature (46)..(46): n equals a,t,g, or c
  misc_feature (49)..(49): n equals a,t,g, or c
  misc_feature (60)..(60): n equals a,t,g, or c
  misc_feature (102)..(102): n equals a,t,g, or c
  misc_feature (112)..(112): n equals a,t,g, or c
  misc_feature (125)..(125): n equals a,t,g, or c
  misc_feature (148)..(148): n equals a,t,g, or c
  misc_feature (180)..(180): n equals a,t,g, or c
tcaactnctactaggggggggaaaaaaggctntgggtttaccggcnctntggccaagggnttacccggggtttccccggggaaaatttttcccccggggggnttccggaacncccaacgggccgnttccccggggttggttggaaacnttaaaggttttatttttggctttggccattana

SEQ ID NO: 3850 - DNA, 458 bp, Homo sapiens
  misc_feature (373)..(373): n equals a,t,g, or c
  misc_feature (394)..(394): n equals a,t,g, or c
  misc_feature (420)..(420): n equals a,t,g, or c
  misc_feature (423)..(423): n equals a,t,g, or c
  misc_feature (450)..(450): n equals a,t,g, or c
gcggactaagacaacaaggatgaagtgaagcatcctggatatcctctgcctgtaatccggtctgatgtgcggcacttcatgtccgagcttatccatttggttttggtctttggaaaagacaacgttagtcacttactagtggcagttgcatggagaagagggctcactaatgggggacagggtgatcatttggagtttgcaagctgtgaagacagatgttggctcttcacaattttggaagggttcactagttaagtgtaggaccttatgggggatggaaataaggcagaggcatagttctggccactgagttccttaaggtctgctgaaggctgccgatgcgtctctcactccctcgtatgctctggagcanaccaggggctggaggaatganggaagatcctttcattaaccaccatntgntgacatttttctttgtgaaaacatttntattatat

SEQ ID NO: 3851 - DNA, 498 bp, Homo sapiens
  misc_feature (459)..(459): n equals a,t,g, or c
  misc_feature (465)..(465): n equals a,t,g, or c
  misc_feature (480)..(480): n equals a,t,g, or c
  misc_feature (493)..(493): n equals a,t,g, or c
  misc_feature (498)..(498): n equals a,t,g, or c
gcagtggtgcagttctcggcctctcggcctggcttcctgaccttctgggaccagtgcacagagagactcagctgcttcctctgcccggtggagcgggtgcttctcaccttctgcaaccagtatggtgcccgcctctccctgcgccagccaggcttggctgaggctggtgagtgggctgcttcctccttccacccttgctcagattcccagtgacaggaagctcggggaagccaggtcagcccacacagataaacgaactgggcaccgaggagaccagcaaagacttgggccttagagcagaaggacccagatgggtggggtttgaacagggggcccctggacctgagcctgggataggagcatctctcccctctaaaagctgtgttcacccaaactctgaggcccatgctactgcctcctgcagtgtgtgtgaagttcctggaggatgccctggggcanaactgnccagaaggccccaancaagggcctgganagcan

SEQ ID NO: 3852 - DNA, 98 bp, Homo sapiens
  misc_feature (46)..(46): n equals a,t,g, or c
  misc_feature (63)..(63): n equals a,t,g, or c
  misc_feature (78)..(78): n equals a,t,g, or c
  misc_feature (92)..(92): n equals a,t,g, or c
  misc_feature (96)..(96): n equals a,t,g, or c
gaacactgcaatgctatacatctatgctgtgttgcttgttaaatcnaggcactgcagtattangcatgcacatgattntttctgagaatgangaanct

SEQ ID NO: 3853 - DNA, 63 bp, Homo sapiens
  misc_feature (41)..(41): n equals a,t,g, or c
  misc_feature (47)..(47): n equals a,t,g, or c
  misc_feature (49)..(49): n equals a,t,g, or c
  misc_feature (57)..(58): n equals a,t,g, or c
gcggacgcgtgggtggcactgaggagctatggggccacaancagtantnactggctnntttcc

SEQ ID NO: 3854 - DNA, 65 bp, Homo sapiens
  misc_feature (8)..(8): n equals a,t,g, or c
  misc_feature (19)..(19): n equals a,t,g, or c
  misc_feature (36)..(36): n equals a,t,g, or c
  misc_feature (41)..(41): n equals a,t,g, or c
  misc_feature (60)..(60): n equals a,t,g, or c
gacggacncataggacctntaatctttcatcacagntcganaggcccacctgtaccgtgntattt

SEQ ID NO: 3855 - DNA, 76 bp, Homo sapiens
  misc_feature (12)..(12): n equals a,t,g, or c
  misc_feature (14)..(15): n equals a,t,g, or c
  misc_feature (70)..(70): n equals a,t,g, or c
  misc_feature (74)..(74): n equals a,t,g, or c
gaaaaaaaacantnnacaatgaaaatattgagaagatattgagaaagaaatatatttggggcggacatcnatgnga

SEQ ID NO: 3856 - DNA, 187 bp, Homo sapiens
  misc_feature (7)..(7): n equals a,t,g, or c
  misc_feature (11)..(11): n equals a,t,g, or c
  misc_feature (37)..(37): n equals a,t,g, or c
  misc_feature (45)..(45): n equals a,t,g, or c
  misc_feature (71)..(71): n equals a,t,g, or c
  misc_feature (122)..(122): n equals a,t,g, or c
  misc_feature (136)..(136): n equals a,t,g, or c
  misc_feature (156)..(156): n equals a,t,g, or c
  misc_feature (170)..(170): n equals a,t,g, or c
  misc_feature (176)..(176): n equals a,t,g, or c
ttaattnccangaacttatttagggcattccctttcnaccatggncaaccccattgcccttacggactttncaaagggattagaatttcttttccttttcttaattcaggggggacaattcnggcttttccaacanctccttgcttgcccgcttgncagcagccaggcangtttcngatgaatcaag

SEQ ID NO: 3857 - DNA, 68 bp, Homo sapiens
  misc_feature (15)..(15): n equals a,t,g, or c
  misc_feature (22)..(22): n equals a,t,g, or c
  misc_feature (24)..(24): n equals a,t,g, or c
  misc_feature (27)..(27): n equals a,t,g, or c
  misc_feature (37)..(37): n equals a,t,g, or c
gctgggaacaagccngagctgnangangaagagaagntgtacaagaacgcccgggaaagggagaagta

SEQ ID NO: 3858 - DNA, 235 bp, Homo sapiens
  misc_feature (11)..(12): n equals a,t,g, or c
  misc_feature (161)..(161): n equals a,t,g, or c
  misc_feature (166)..(166): n equals a,t,g, or c
  misc_feature (187)..(187): n equals a,t,g, or c
  misc_feature (190)..(190): n equals a,t,g, or c
  misc_feature (218)..(218): n equals a,t,g, or c
gcgcccgccgnnagggccgcacgaggcccggcgtgcgcccccgcctctcccgaagcgccgggccccacgccgcccctcctttccctttccgctctctccgcctccggaagcgcgggcgcgcggcgccgggagcccgttcagggccgcgggagtgcgccagngccgngcgtggggctgaggtggccgnggntctcagatatatttttgccatcatggancagtttggagatatatt

SEQ ID NO: 3859 - DNA, 71 bp, Homo sapiens
  misc_feature (13)..(13): n equals a,t,g, or c
  misc_feature (61)..(63): n equals a,t,g, or c
  misc_feature (68)..(68): n equals a,t,g, or c
gctttgctgctangtaggcatggattattatgctgatacatagagctcttttgatgataannngattntaa

SEQ ID NO: 3860 - DNA, 76 bp, Homo sapiens
  misc_feature (43)..(43): n equals a,t,g, or c
  misc_feature (47)..(48): n equals a,t,g, or c
  misc_feature (67)..(67): n equals a,t,g, or c
  misc_feature (71)..(71): n equals a,t,g, or c
ggggagaagtgccccctgttgaagctctttgtgacgggcgagntcanngtttttgatgggtgactgnccanacttc

SEQ ID NO: 3861 - DNA, 63 bp, Homo sapiens
  misc_feature (19)..(19): n equals a,t,g, or c
  misc_feature (25)..(25): n equals a,t,g, or c
  misc_feature (30)..(30): n equals a,t,g, or c
  misc_feature (35)..(35): n equals a,t,g, or c
  misc_feature (52)..(52): n equals a,t,g, or c
gcaatgtccgccagaaggncaggcnagccnagccntgccctcaggcggagantggtctgtgac

SEQ ID NO: 3862 - DNA, 349 bp, Homo sapiens
  misc_feature (188)..(188): n equals a,t,g, or c
  misc_feature (225)..(225): n equals a,t,g, or c
  misc_feature (280)..(280): n equals a,t,g, or c
  misc_feature (303)..(303): n equals a,t,g, or c
  misc_feature (318)..(318): n equals a,t,g, or c
  misc_feature (348)..(349): n equals a,t,g, or c
gtcatcatctatcccctttataaatgaactacactgttgtttttctgacttcgatgtgctttgaagtacagtgtagcatatcattctaccttgaatcctatgataatacagttgacatcttgctgtagtggacttgtgcatatagcacacatgatatagtatattgtattacagtaaactttagacantgctacttaatcattttacttcatgaagataaactancattctaaatatgaataatattaatggtctacaaaaaattttgagcacattttanaatcatatttataataaactggncaaattgggcttatntaatgtataatttagaacccactgtgtagnn

SEQ ID NO: 3863 - DNA, 129 bp, Homo sapiens
  misc_feature (1)..(1): n equals a,t,g, or c
  misc_feature (9)..(10): n equals a,t,g, or c
  misc_feature (52)..(52): n equals a,t,g, or c
  misc_feature (82)..(82): n equals a,t,g, or c
  misc_feature (114)..(115): n equals a,t,g, or c
  misc_feature (128)..(128): n equals a,t,g, or c
nttgaccanntgtcacacatgatatagtatattgcattacagtaaactttanacaaatgctacttaatcattatacttcatnaagataaactaggcctgtcaaatatgaatatnnttaatggctacana

SEQ ID NO: 3864 - DNA, 200 bp, Homo sapiens
  misc_feature (30)..(30): n equals a,t,g, or c
  misc_feature (63)..(63): n equals a,t,g, or c
  misc_feature (92)..(92): n equals a,t,g, or c
  misc_feature (136)..(136): n equals a,t,g, or c
  misc_feature (143)..(143): n equals a,t,g, or c
  misc_feature (173)..(173): n equals a,t,g, or c
  misc_feature (198)..(198): n equals a,t,g, or c
  misc_feature (200)..(200): n equals a,t,g, or c
ggaaatatttaaaggttgaaaattataatnacctataaagctgtgaaaaatagaagtataatntgaaaaaacatttcacttatcagagattnttatatttatacaaaagattactaaatgaaggattgctaaatgnttttggntcaattacataaaaattaatattctgggtntgatctgggagagaataaatatganan

SEQ ID NO: 3865 - DNA, 456 bp, Homo sapiens
  misc_feature (89)..(89): n equals a,t,g, or c
  misc_feature (176)..(176): n equals a,t,g, or c
  misc_feature (213)..(213): n equals a,t,g, or c
  misc_feature (216)..(216): n equals a,t,g, or c
  misc_feature (234)..(234): n equals a,t,g, or c
  misc_feature (242)..(242): n equals a,t,g, or c
  misc_feature (276)..(276): n equals a,t,g, or c
  misc_feature (279)..(279): n equals a,t,g, or c
  misc_feature (287)..(287): n equals a,t,g, or c
  misc_feature (308)..(308): n equals a,t,g, or c
  misc_feature (312)..(312): n equals a,t,g, or c
  misc_feature (321)..(321): n equals a,t,g, or c
  misc_feature (336)..(336): n equals a,t,g, or c
  misc_feature (338)..(338): n equals a,t,g, or c
  misc_feature (343)..(343): n equals a,t,g, or c
  misc_feature (383)..(383): n equals a,t,g, or c
  misc_feature (407)..(407): n equals a,t,g, or c
  misc_feature (424)..(424): n equals a,t,g, or c
  misc_feature (427)..(427): n equals a,t,g, or c
  misc_feature (438)..(438): n equals a,t,g, or c
gaatagatactaagtcttggagaggtgaaacagtcgcaaatggaatttcaagaaacattctatatacactgcctctaggactgggacanatagccactgagtacctgcttcaaatcaccctgcacgttttctctttggaaagataagcactggagaaccatcttcgttaccttcancagaaatggaaacaattcaagacattaagaatgccgnaantggacagcagctatgcanggttcagnatatgaagttttcaagatggtgtgcctcactaanccngaaatcangaaaagatcgaagctagcctntttnatctcagcntgctccttaaatcangncaacnccctccaaaattaattgtgaatctgaaacctttgccattngctttttcaaactttaaattgganataaccttaacttattntgntgaaacccacnttgccaccataaaattat

SEQ ID NO: 3866 - DNA, 91 bp, Homo sapiens
  misc_feature (17)..(17): n equals a,t,g, or c
  misc_feature (24)..(24): n equals a,t,g, or c
  misc_feature (31)..(31): n equals a,t,g, or c
  misc_feature (37)..(37): n equals a,t,g, or c
  misc_feature (86)..(86): n equals a,t,g, or c
ggtttttgacctccacnaagatancaattanaaattngattttctgaggtcccctttgtctccaaaattcaattattaaagttttnggggg

SEQ ID NO: 3867 - DNA, 510 bp, Homo sapiens
  misc_feature (356)..(356): n equals a,t,g, or c
  misc_feature (386)..(386): n equals a,t,g, or c
  misc_feature (416)..(416): n equals a,t,g, or c
  misc_feature (426)..(426): n equals a,t,g, or c
  misc_feature (432)..(432): n equals a,t,g, or c
  misc_feature (466)..(466): n equals a,t,g, or c
  misc_feature (505)..(505): n equals a,t,g, or c
gaatttttaaatagtaatttgtctactttgaggagattgtcatagtatcaataggctgatgatattaaaaactttttttatgtagatgttacagttaggggattaccatatttgtttttgaagaatgtataggctaagaaatgcctctcacgtatacatagccaaaagcttttcttggcttcagattaatgatttctgatgtaacattttttaatgtaaacacaaaaaatgacttgatattttcttgttactccatttatttcttaatgattgcatttcatgtttctaattttctaagtaaattataattacaaattagccttgtattaaaatatagggctcaaaatattttctgnggttctctttggtcttcatgccaagtttgncaatttatattctctcagtgattatttggntatttttagnggtagntggtatttatcaagtggtaaactatgaatacctncatttgctatttgagaaaatgacactcatttaatctaantaaaa

SEQ ID NO: 3868 - DNA, 552 bp, Homo sapiens
  misc_feature (439)..(439): n equals a,t,g, or c
  misc_feature (510)..(510): n equals a,t,g, or c
  misc_feature (512)..(512): n equals a,t,g, or c
  misc_feature (525)..(525): n equals a,t,g, or c
  misc_feature (549)..(549): n equals a,t,g, or c
  misc_feature (552)..(552): n equals a,t,g, or c
gcccacgcgtccgcccacgcgtccgcccacgcgtccggcctgggctgaacagctgtgaccaaaactcccttctgccccaccctgccccctccacttcctgccctctgttccatcttcccccttcccaaaggccacagcctttattccaggcccagggatgtaggagggggaaggaggaaacaggaagcccagagagggcaaagggcctacctcggggcgcgaaccatgccccagactattatctcagggctttctgggcactgacttcagcgtggccacctgcccatgccctgaggccagttggcgaggggtggtcctgagggtttttataccctttgtttgctaatgtttaattttgcatcataatttctacattgtccctgagtgtcagaactataatttattccatttctctctgtgtctgtgccaagaaacgcangctctgggcctgcccttgcccaggaagccttgcagctgtgtgcttgtgggaacacttgacctgacttacangnaccaataaagagntttattttaaaaaaaaaaaaaaanggn

SEQ ID NO: 3869 - DNA, 60 bp, Homo sapiens
  misc_feature (11)..(11): n equals a,t,g, or c
  misc_feature (38)..(38): n equals a,t,g, or c
  misc_feature (46)..(46): n equals a,t,g, or c
  misc_feature (49)..(49): n equals a,t,g, or c
  misc_feature (53)..(53): n equals a,t,g, or c
ggtcagcctgnatatgcccatgacacagtattggaaantaaccagnaanaatnggttaag

SEQ ID NO: 3870 - DNA, 602 bp, Homo sapiens
  misc_feature (397)..(397): n equals a,t,g, or c
  misc_feature (402)..(402): n equals a,t,g, or c
  misc_feature (432)..(432): n equals a,t,g, or c
  misc_feature (475)..(475): n equals a,t,g, or c
  misc_feature (501)..(501): n equals a,t,g, or c
  misc_feature (541)..(541): n equals a,t,g, or c
  misc_feature (580)..(581): n equals a,t,g, or c
  misc_feature (598)..(599): n equals a,t,g, or c
ggtcctgtaaatgaatgctctgggctagatacagcttggagaacctgctggccttgttagacagcacttgggcctttgccagcagcaagaggtgaagcgaagccactcttacctctcccttcccctcccacctgccccctgcgtaggcacccagacttggagagacccgtctgctgttaatacttccatcctcttccttcccaaagagcagatcccaaggcatttactccttggtctgtctcgctttatctgtcgcccctcccagcgctgagagcctcccctggctgtcagcagcactgtgtccaggctcttgtctgaacaccgcagcccctccttcgctccttccagagctcagcatgtcacggcaaggactgccgcattggtgatggagggccanctgangggaagttgctggtgaagtttccttttctncatttctagcatatggacacctggcctctgcttgaacacttangtgacaggaacttcgcaccttctgangccctggatgattctaattggtagaaattctaattggtanaaatcttccttataatgaatgaatctgctttctataatnntacctattgggccttgnntgg

SEQ ID NO: 3871 - DNA, 458 bp, Homo sapiens
  misc_feature (4)..(4): n equals a,t,g, or c
  misc_feature (7)..(7): n equals a,t,g, or c
  misc_feature (11)..(15): n equals a,t,g, or c
  misc_feature (18)..(18): n equals a,t,g, or c
  misc_feature (24)..(26): n equals a,t,g, or c
  misc_feature (44)..(44): n equals a,t,g, or c
  misc_feature (58)..(58): n equals a,t,g, or c
  misc_feature (61)..(61): n equals a,t,g, or c
  misc_feature (312)..(312): n equals a,t,g, or c
  misc_feature (331)..(331): n equals a,t,g, or c
  misc_feature (342)..(342): n equals a,t,g, or c
  misc_feature (365)..(365): n equals a,t,g, or c
  misc_feature (393)..(393): n equals a,t,g, or c
  misc_feature (430)..(430): n equals a,t,g, or c
  misc_feature (432)..(432): n equals a,t,g, or c
  misc_feature (436)..(437): n equals a,t,g, or c
aatnganaaannnnnaanaatcannnaaagataatctataaaanttcctcgtttccanctnagaaaactgagcctaaaggttggcaggacaggaccttgtctaggttccttcaccatttgcataaatttttagttgatggcattcttttatttgagggctgctttgaaagtgggttccatgtcttagtcatctttgggtttcttggggccttacacagtgctggcataaagcagccctggaaataatgtttgttcaaaatgtaagtggagtatagattttcccttttggtagatagctaagaaatccttcangggaacctggaatgcctcnttggtatgcangtcttgcagagcttttgattgtnatttgaaataaactgccctcgtggggcnctgttctttttgcaaattggcttgaaaattgttgttncncttnnaatttagctccattttcccaa

SEQ ID NO: 3872 - DNA, 411 bp, Homo sapiens
  misc_feature (24)..(24): n equals a,t,g, or c
  misc_feature (43)..(43): n equals a,t,g, or c
  misc_feature (72)..(72): n equals a,t,g, or c
  misc_feature (77)..(77): n equals a,t,g, or c
  misc_feature (90)..(90): n equals a,t,g, or c
  misc_feature (109)..(109): n equals a,t,g, or c
  misc_feature (112)..(112): n equals a,t,g, or c
  misc_feature (174)..(174): n equals a,t,g, or c
  misc_feature (251)..(258): n equals a,t,g, or c
  misc_feature (263)..(264): n equals a,t,g, or c
  misc_feature (279)..(279): n equals a,t,g, or c
  misc_feature (346)..(346): n equals a,t,g, or c
  misc_feature (366)..(366): n equals a,t,g, or c
  misc_feature (369)..(369): n equals a,t,g, or c
  misc_feature (377)..(377): n equals a,t,g, or c
  misc_feature (383)..(383): n equals a,t,g, or c
ggggtatggaagtcatctgtcccntcactgtttagagcatganactctccccctcaacagcctcctgagaangaaangatctgccctgancactcccctggcactgttnctngcctctgcgcctcaagggtccccttctgcaccgctggcttccactccaataaagtggaccanggtctgcaagttcaacggtcatagctttccccccatgtcccaacttgcctcatcactcccggccctaatctctccannnnnnnnccccnngcctcttgggctcanaccccaactattcaagggatctcctgctcttaatcgataattgggggtccctgctctccccaagaanatctcttcaagaaaataaanttnaccttttncttccnaaaaaaaaaaaaaaggggggggcccccc

SEQ ID NO: 3873 - DNA, 566 bp, Homo sapiens
  misc_feature (357)..(357): n equals a,t,g, or c
  misc_feature (370)..(370): n equals a,t,g, or c
  misc_feature (379)..(379): n equals a,t,g, or c
  misc_feature (420)..(420): n equals a,t,g, or c
  misc_feature (428)..(428): n equals a,t,g, or c
  misc_feature (440)..(440): n equals a,t,g, or c
  misc_feature (469)..(469): n equals a,t,g, or c
  misc_feature (477)..(477): n equals a,t,g, or c
  misc_feature (520)..(520): n equals a,t,g, or c
tgaaaaccatgtgtatttgttccctccgtatgttaaagatttccttttagtggtacattctgcactcattttgtatagtctaccaaggcgggtatccctaggaacaatattatataggaagcaggtatactctgatcacattcaggataagtgtacagaagaaaatacggtgtttactctttagggaactggaaacactccctgcattgatgttacattttaagaatggcacttttgatacatgttatcataaaggtgcttaatagacttgaattaaagtttttccaaatctgtaaacaaagcaaaaaattaaattgtaatcatttgattattttttaaattggtgctttatatttngtttctcctccanaattaaaanctgcaatttattgttcccccagcttttgaagttttttcctntactcaantaatgccaatanctcccattggtttgaaattcccccttttngggaaatnaattttaaaaattccctaaccgggccacttgaaaaacctgccnccgcctaaggttttttggctttgggttgggaaaaaaacattaatcc

SEQ ID NO: 3874 - DNA, 259 bp, Homo sapiens
  misc_feature (16)..(16): n equals a,t,g, or c
  misc_feature (22)..(23): n equals a,t,g, or c
  misc_feature (41)..(41): n equals a,t,g, or c
  misc_feature (44)..(44): n equals a,t,g, or c
  misc_feature (65)..(65): n equals a,t,g, or c
  misc_feature (67)..(67): n equals a,t,g, or c
  misc_feature (70)..(70): n equals a,t,g, or c
  misc_feature (74)..(74): n equals a,t,g, or c
  misc_feature (79)..(79): n equals a,t,g, or c
  misc_feature (87)..(87): n equals a,t,g, or c
  misc_feature (95)..(95): n equals a,t,g, or c
  misc_feature (97)..(97): n equals a,t,g, or c
  misc_feature (111)..(112): n equals a,t,g, or c
  misc_feature (132)..(132): n equals a,t,g, or c
  misc_feature (148)..(148): n equals a,t,g, or c
  misc_feature (154)..(154): n equals a,t,g, or c
  misc_feature (189)..(189): n equals a,t,g, or c
  misc_feature (203)..(203): n equals a,t,g, or c
  misc_feature (213)..(213): n equals a,t,g, or c
  misc_feature (233)..(233): n equals a,t,g, or c
  misc_feature (255)..(255): n equals a,t,g, or c
gccaccgattcccgcngaggcnnaggcttgggtgcgttcantantcatcttcacccgtgacccancnccntggntgagnaatgcctngctgctgnangtgtattggacctnnatattgcattactagaggtnctgaagactgccctcntccacnatggcctatcacgtggaattccccaagctgccaangacttatacaaatncgtgtatcantctcaatactgtgggttctngcaacacggaaccaaactgccnccca

SEQ ID NO: 3875 - DNA, 232 bp, Homo sapiens
  misc_feature (5)..(5): n equals a,t,g, or c
  misc_feature (10)..(11): n equals a,t,g, or c
  misc_feature (13)..(15): n equals a,t,g, or c
  misc_feature (20)..(21): n equals a,t,g, or c
  misc_feature (27)..(27): n equals a,t,g, or c
  misc_feature (35)..(35): n equals a,t,g, or c
  misc_feature (38)..(38): n equals a,t,g, or c
  misc_feature (44)..(44): n equals a,t,g, or c
  misc_feature (122)..(123): n equals a,t,g, or c
  misc_feature (129)..(129): n equals a,t,g, or c
  misc_feature (139)..(139): n equals a,t,g, or c
  misc_feature (186)..(186): n equals a,t,g, or c
  misc_feature (218)..(218): n equals a,t,g, or c
  misc_feature (220)..(220): n equals a,t,g, or c
  misc_feature (227)..(227): n equals a,t,g, or c
agcanaaatnntnnnatgannattagnatcttccncantgaaanaataatttactgagacagtatcatagttgtacattggtcacaaatcctgtcagtgtctgggttaatataatacagctnnggaccntgcgtctgcntccgatgtagtctatggaaatgtgttgtttcaattgaactgtaacangaaaatctggcctcacccattttatagttgananacggaanaggat

SEQ ID NO: 3876 - DNA, 126 bp, Homo sapiens
  misc_feature (2)..(2): n equals a,t,g, or c
  misc_feature (10)..(10): n equals a,t,g, or c
  misc_feature (23)..(23): n equals a,t,g, or c
  misc_feature (72)..(72): n equals a,t,g, or c
  misc_feature (80)..(80): n equals a,t,g, or c
  misc_feature (108)..(108): n equals a,t,g, or c
  misc_feature (124)..(125): n equals a,t,g, or c
anaaaaaggncatctgcctaaanataaactgctagctctccgaaagccctgagggcctggcttgtgtgaacntataaaanaatggtggccgcgctgtgcctgctcatnttgcctacatgtcccnng

SEQ ID NO: 3877 - DNA, 315 bp, Homo sapiens
  misc_feature (90)..(90): n equals a,t,g, or c
  misc_feature (160)..(160): n equals a,t,g, or c
  misc_feature (298)..(298): n equals a,t,g, or c
  misc_feature (301)..(301): n equals a,t,g, or c
  misc_feature (304)..(304): n equals a,t,g, or c
  misc_feature (312)..(312): n equals a,t,g, or c
  misc_feature (314)..(314): n equals a,t,g, or c
cttgtatgtcttcaagtcttcacaacccagtgccttaaaaatgaaaggccctaaatgtaagggagatggagagaaagatttattttgtanagtctttgggtggaattgtgggtatactgttcccttcacaattgactgagtatggataaccgtacataancatttgctacaccccaccagccccctccccctcagaaacaccagttccttcccaagggcagctgtgccagactcccctcccgggactgccttcttgtcatcataagcaaaaaaaaaaaagggggggcccccccaaaanaanaanaatttttntna

SEQ ID NO: 3878 - DNA, 309 bp, Homo sapiens
  misc_feature (28)..(28): n equals a,t,g, or c
  misc_feature (98)..(98): n equals a,t,g, or c
  misc_feature (128)..(128): n equals a,t,g, or c
  misc_feature (139)..(139): n equals a,t,g, or c
  misc_feature (153)..(153): n equals a,t,g, or c
  misc_feature (159)..(160): n equals a,t,g, or c
  misc_feature (207)..(207): n equals a,t,g, or c
  misc_feature (219)..(219): n equals a,t,g, or c
  misc_feature (240)..(240): n equals a,t,g, or c
  misc_feature (250)..(250): n equals a,t,g, or c
  misc_feature (263)..(263): n equals a,t,g, or c
  misc_feature (265)..(265): n equals a,t,g, or c
gccccaaaaaggccttcctttaaaattncccccggaaacttttctaaccttaaataaaaaggggggggaaaaaaaaggcctttggggggtggaacccncccccctttgggcccaaagggggtttaaanccccggggggnttccccccgggggnaaaaanntttccccccccccgggggggggttttccccgaaaaaccccccccaanacgggcccgggntttttcccccgggtttggggncccccccccnttttttgggggtntntcccccccccccccaaaaaaaaaaaaaaaaaaattttttgggtt

SEQ ID NO: 3879 - DNA, 356 bp, Homo sapiens
  misc_feature (3)..(3): n equals a,t,g, or c
  misc_feature (10)..(10): n equals a,t,g, or c
  misc_feature (14)..(14): n equals a,t,g, or c
  misc_feature (29)..(31): n equals a,t,g, or c
  misc_feature (33)..(33): n equals a,t,g, or c
  misc_feature (36)..(37): n equals a,t,g, or c
  misc_feature (40)..(40): n equals a,t,g, or c
  misc_feature (42)..(42): n equals a,t,g, or c
  misc_feature (49)..(50): n equals a,t,g, or c
  misc_feature (59)..(59): n equals a,t,g, or c
  misc_feature (120)..(120): n equals a,t,g, or c
  misc_feature (131)..(131): n equals a,t,g, or c
  misc_feature (133)..(133): n equals a,t,g, or c
  misc_feature (167)..(167): n equals a,t,g, or c
  misc_feature (179)..(179): n equals a,t,g, or c
  misc_feature (185)..(185): n equals a,t,g, or c
  misc_feature (187)..(187): n equals a,t,g, or c
  misc_feature (200)..(200): n equals a,t,g, or c
  misc_feature (212)..(212): n equals a,t,g, or c
  misc_feature (218)..(219): n equals a,t,g, or c
  misc_feature (222)..(222): n equals a,t,g, or c
  misc_feature (250)..(250): n equals a,t,g, or c
  misc_feature (277)..(277): n equals a,t,g, or c
  misc_feature (284)..(284): n equals a,t,g, or c
  misc_feature (286)..(286): n equals a,t,g, or c
  misc_feature (307)..(307): n equals a,t,g, or c
  misc_feature (338)..(338): n equals a,t,g, or c
ganccatganccgnctcaactgctgtggnnncnctnnatntncggatcnngacgactcnccctatttcacatacaacagatcttttacccccattctgttagtaataacaatctcgcccncccatcctatnanacctgtaccactcaggaaggatcacgaccaaatnagtatagggttncttctntnaactttctgtatnacatccgaactnatgatnncancgggggtggtgttggcagttggaattgngggcctcgagctggctgccatgattgngtccatntntctattactgcaatctacaangaatccgcttactgcctctgccactaatggntgcccccctgggaactct

SEQ ID NO: 3880 - DNA, 550 bp, Homo sapiens
  misc_feature (3)..(3): n equals a,t,g, or c
  misc_feature (54)..(54): n equals a,t,g, or c
  misc_feature (66)..(66): n equals a,t,g, or c
  misc_feature (92)..(92): n equals a,t,g, or c
  misc_feature (103)..(103): n equals a,t,g, or c
  misc_feature (117)..(117): n equals a,t,g, or c
  misc_feature (148)..(148): n equals a,t,g, or c
  misc_feature (181)..(181): n equals a,t,g, or c
  misc_feature (196)..(196): n equals a,t,g, or c
  misc_feature (220)..(220): n equals a,t,g, or c
  misc_feature (243)..(243): n equals a,t,g, or c
  misc_feature (287)..(287): n equals a,t,g, or c
  misc_feature (299)..(299): n equals a,t,g, or c
  misc_feature (302)..(302): n equals a,t,g, or c
  misc_feature (362)..(362): n equals a,t,g, or c
  misc_feature (397)..(397): n equals a,t,g, or c
  misc_feature (418)..(418): n equals a,t,g, or c
  misc_feature (446)..(446): n equals a,t,g, or c
  misc_feature (461)..(461): n equals a,t,g, or c
  misc_feature (497)..(497): n equals a,t,g, or c
  misc_feature (502)..(502): n equals a,t,g, or c
  misc_feature (525)..(525): n equals a,t,g, or c
  misc_feature (545)..(545): n equals a,t,g, or c
  misc_feature (550)..(550): n equals a,t,g, or c
tanatcgggccccaaaaggccttcctttaaaattcccccggaaactttctaacnttaaataaaagngggggaaaaaaaaggccttgggggtnggacccccccnccttgggccaaagngggttaaaccccggggggttcccccgggggnaaaaattttccccccccggggggggtttccggnaaacccccccaaccnggcccgggttcccccgggaaaccnccaaaaaaaatttttaaaaaggnaatttgggggtttaaaaaggaaacccccttcccttgggaaaggnaacccccaaaanaanaatttttttttgggtttcccccccaaattcccttccctttaacccccccccccctttccnaaccaaaaacccttgggccctttttaacccaaggnaaaaattggggggaaattccnaattgggtttcccccccccccctttttnaatttggtttttggnaaagggggttgggaaaccccaaaccttttttaaaanttttnggccctttttttccccctttggncccctttccccctttttggnaaaan

SEQ ID NO: 3881 - DNA, 277 bp, Homo sapiens
  misc_feature (227)..(227): n equals a,t,g, or c
  misc_feature (241)..(241): n equals a,t,g, or c
  misc_feature (251)..(251): n equals a,t,g, or c
  misc_feature (270)..(270): n equals a,t,g, or c
  misc_feature (275)..(275): n equals a,t,g, or c
cagaggagggcagcagaagggggtggtgtctccaaccccccagcactgaggaagaacggggctcttctcatttcacccctccctttctcccctgcccccaggactgggccacttctgggtggggcagtgggtcccagattggctcacactgagaatgtaagaactacaaacaaaatttctattaaattaaattttgtgtctaaaaaaaaaaaaaaagggcggccccnctaaaaaatccaancttactttcnctttcatgcaacttcatanctctnct

SEQ ID NO: 3882 - DNA, 550 bp, Homo sapiens
  misc_feature (2)..(2): n equals a,t,g, or c
  misc_feature (40)..(40): n equals a,t,g, or c
  misc_feature (51)..(51): n equals a,t,g, or c
  misc_feature (90)..(90): n equals a,t,g, or c
  misc_feature (103)..(103): n equals a,t,g, or c
  misc_feature (147)..(147): n equals a,t,g, or c
  misc_feature (172)..(172): n equals a,t,g, or c
  misc_feature (201)..(201): n equals a,t,g, or c
  misc_feature (230)..(230): n equals a,t,g, or c
  misc_feature (254)..(254): n equals a,t,g, or c
  misc_feature (257)..(257): n equals a,t,g, or c
  misc_feature (265)..(265): n equals a,t,g, or c
  misc_feature (280)..(280): n equals a,t,g, or c
  misc_feature (288)..(288): n equals a,t,g, or c
  misc_feature (311)..(311): n equals a,t,g, or c
  misc_feature (316)..(316): n equals a,t,g, or c
  misc_feature (322)..(322): n equals a,t,g, or c
  misc_feature (332)..(333): n equals a,t,g, or c
  misc_feature (338)..(338): n equals a,t,g, or c
  misc_feature (344)..(344): n equals a,t,g, or c
  misc_feature (365)..(365): n equals a,t,g, or c
  misc_feature (421)..(421): n equals a,t,g, or c
  misc_feature (423)..(423): n equals a,t,g, or c
  misc_feature (444)..(444): n equals a,t,g, or c
  misc_feature (449)..(449): n equals a,t,g, or c
  misc_feature (453)..(453): n equals a,t,g, or c
  misc_feature (480)..(480): n equals a,t,g, or c
  misc_feature (497)..(497): n equals a,t,g, or c
  misc_feature (502)..(502): n equals a,t,g, or c
  misc_feature (519)..(519): n equals a,t,g, or c
cngcccccaaaaagggccttccctttaaaaattccccccnggaaacttttnttaacctttaaattaaaagggggggggaaaaaaaaaggncctttggggggtngaaacccgcccccctttggggccaaaggggggtttaaacccccnggggggtttcccccgggggggaaanaatttttcccccccccgggggggggtttnccgggaaaaccccccccaaaccgggcccnggttttcccccgggccctttgggnggntttaaagntttggggggcccccnaacccaanaaaggcccccctttggggggccnaaggncccttnggttttaagnnaaagncccccnggccctttaaaaacccccttncccccccgggaaaccaaccccctttcccccccttcccaacccccaaccaaaccaangnggaaacccccctttggaaagnttggnaagnggaaaggggaaggggggggcttggggnaaaaaccccttgggggnattgnggggttttgggcccaanaaggggaggaaacctccaagggctccttggc

SEQ ID NO: 3883 - DNA, 450 bp, Homo sapiens
  misc_feature (7)..(7): n equals a,t,g, or c
  misc_feature (24)..(24): n equals a,t,g, or c
  misc_feature (29)..(29): n equals a,t,g, or c
  misc_feature (56)..(56): n equals a,t,g, or c
  misc_feature (85)..(85): n equals a,t,g, or c
  misc_feature (178)..(178): n equals a,t,g, or c
  misc_feature (184)..(184): n equals a,t,g, or c
  misc_feature (194)..(194): n equals a,t,g, or c
  misc_feature (199)..(199): n equals a,t,g, or c
  misc_feature (206)..(206): n equals a,t,g, or c
  misc_feature (262)..(262): n equals a,t,g, or c
  misc_feature (275)..(275): n equals a,t,g, or c
  misc_feature (305)..(305): n equals a,t,g, or c
  misc_feature (350)..(350): n equals a,t,g, or c
  misc_feature (365)..(365): n equals a,t,g, or c
  misc_feature (372)..(372): n equals a,t,g, or c
  misc_feature (380)..(380): n equals a,t,g, or c
  misc_feature (387)..(387): n equals a,t,g, or c
  misc_feature (406)..(406): n equals a,t,g, or c
  misc_feature (411)..(411): n equals a,t,g, or c
  misc_feature (423)..(423): n equals a,t,g, or c
  misc_feature (430)..(430): n equals a,t,g, or c
  misc_feature (448)..(448): n equals a,t,g, or c
gaacccncccccttgggccaaggnggttnaaccccgggggtttccccggggggaanaattttcccccccggggggggtttccggnaacccccccaaaccgggccgggttcccccgggaaagggggccaaattttccccccccccctttttcccaaccaaaaaaccaaaggtttaaagnaaaggnaacccccttnaaccnaaccaanggtttgggaaaaaccttttttttgggggggggggaaactttttcccttgggaaagnaaattcccaaggnccgggttccccctttaacccccaaaaaggnaaacccccccccaaaggccccccccaaaaacctttccaaaaaggncctttaacccaaggnccaaagncccaaggnccaaccnttttccccccccaaaaggnccccnttggcccttggnaaccccnaaccaaggtttccaaccnaa

SEQ ID NO: 3884 - DNA, 557 bp, Homo sapiens
  misc_feature (161)..(161): n equals a,t,g, or c
  misc_feature (211)..(211): n equals a,t,g, or c
  misc_feature (247)..(247): n equals a,t,g, or c
  misc_feature (250)..(250): n equals a,t,g, or c
  misc_feature (316)..(316): n equals a,t,g, or c
  misc_feature (318)..(318): n equals a,t,g, or c
  misc_feature (345)..(345): n equals a,t,g, or c
  misc_feature (354)..(354): n equals a,t,g, or c
  misc_feature (362)..(362): n equals a,t,g, or c
  misc_feature (424)..(424): n equals a,t,g, or c
  misc_feature (441)..(441): n equals a,t,g, or c
  misc_feature (453)..(453): n equals a,t,g, or c
  misc_feature (456)..(456): n equals a,t,g, or c
  misc_feature (462)..(462): n equals a,t,g, or c
  misc_feature (465)..(465): n equals a,t,g, or c
  misc_feature (485)..(485): n equals a,t,g, or c
  misc_feature (515)..(515): n equals a,t,g, or c
  misc_feature (518)..(518): n equals a,t,g, or c
  misc_feature (528)..(528): n equals a,t,g, or c
  misc_feature (536)..(537): n equals a,t,g, or c
  misc_feature (554)..(554): n equals a,t,g, or c
gttgtgtgcagagattgagtgtggaaaccagtgggaaagccaatagcatagcctcatgtgagctgggaggggactgaactctggaggtggctctggagctggatgtgacaccaagcatcaccagattggtggtggaatgtgggggaagaacaggagcctangagaacagtcccaccccaggcaggctggagcacctgaatggatagaggangtcgttcctgaactgggcagcctgggcaggacacanatnttggaaatgaaaccaggggtcctctgatacaggttacatttgaaatgtttgcaaaaatccagttananatgtcaaaaaagcagttagatcttgtnattctgaanctcatttnaaaatccaaaatagcccaattttagtttggttttctccaaccttaacttattagggaatggntttgaattccctgccanaaagaatgtttnacngaattnaanaaaggatcccctagaacaanttatgcttaatccccttttttgatggtccnatnaagaagaaanaccccttnnggaaaaaggaaaaaccnggg

SEQ ID NO: 3885 - DNA, 550 bp, Homo sapiens
  misc_feature (4)..(4): n equals a,t,g, or c
  misc_feature (31)..(31): n equals a,t,g, or c
  misc_feature (42)..(42): n equals a,t,g, or c
  misc_feature (109)..(109): n equals a,t,g, or c
  misc_feature (121)..(121): n equals a,t,g, or c
  misc_feature (139)..(139): n equals a,t,g, or c
  misc_feature (142)..(142): n equals a,t,g, or c
  misc_feature (206)..(206): n equals a,t,g, or c
  misc_feature (226)..(226): n equals a,t,g, or c
  misc_feature (229)..(229): n equals a,t,g, or c
  misc_feature (233)..(234): n equals a,t,g, or c
  misc_feature (238)..(239): n equals a,t,g, or c
  misc_feature (245)..(245): n equals a,t,g, or c
  misc_feature (250)..(250): n equals a,t,g, or c
  misc_feature (260)..(260): n equals a,t,g, or c
  misc_feature (284)..(284): n equals a,t,g, or c
  misc_feature (311)..(311): n equals a,t,g, or c
  misc_feature (324)..(324): n equals a,t,g, or c
  misc_feature (329)..(329): n equals a,t,g, or c
  misc_feature (335)..(335): n equals a,t,g, or c
  misc_feature (340)..(340): n equals a,t,g, or c
  misc_feature (358)..(358): n equals a,t,g, or c
  misc_feature (361)..(361): n equals a,t,g, or c
  misc_feature (364)..(364): n equals a,t,g, or c
  misc_feature (399)..(399): n equals a,t,g, or c
  misc_feature (423)..(423): n equals a,t,g, or c
  misc_feature (426)..(426): n equals a,t,g, or c
  misc_feature (474)..(474): n equals a,t,g, or c
  misc_feature (481)..(481): n equals a,t,g, or c
  misc_feature (511)..(511): n equals a,t,g, or c
  misc_feature (513)..(513): n equals a,t,g, or c
tacnatgccaaaaggcttcctttaaatgccnccgcaactttntaactttaaataaaagggggggaaaaaaaggccttgggggtgggaccccccccctttggcccaaggnggtttaaccccngggggttcccccgggggnaanatttttcccccccggggggggtttcccggaaacccccccaaaccgggccgggtttcccccggcnaaaaggccctttaatttccnttnaagnnaaannaaaggnccccnaaccaaattncccccttgggtttttaggaaaacnttgggaaaaaaaagggttggggggccnaatttggcccaanaaggnaaattnaaaanaattttttttaaattttnttnggncctttgggtttttccccctttttgggtttcccttnaacccttgggcccttttttttttnttnttttccccccccccctttttgggtttgggtttggcccttgggtttccnaaaaagnttttttttttggggggtttaatttcccaangnaaaaaaaatttaaaaaaacccaatttttgggaaaaaa

SEQ ID NO: 3886 - DNA, 101 bp, Homo sapiens
  misc_feature (22)..(22): n equals a,t,g, or c
  misc_feature (28)..(28): n equals a,t,g, or c
  misc_feature (75)..(75): n equals a,t,g, or c
  misc_feature (82)..(82): n equals a,t,g, or c
  misc_feature (97)..(97): n equals a,t,g, or c
catcgcccaaaaggcttccttnaaatcnccggaactttcaacttaaataaaggggggaaaaaaggctttggggtnggacccnccccttgggccaagnggtt

SEQ ID NO: 3887 - DNA, 556 bp, Homo sapiens
  misc_feature (258)..(258): n equals a,t,g, or c
  misc_feature (316)..(316): n equals a,t,g, or c
  misc_feature (398)..(398): n equals a,t,g, or c
  misc_feature (442)..(442): n equals a,t,g, or c
  misc_feature (446)..(446): n equals a,t,g, or c
  misc_feature (456)..(456): n equals a,t,g, or c
  misc_feature (467)..(467): n equals a,t,g, or c
  misc_feature (517)..(517): n equals a,t,g, or c
aatttcttgtacaaaattgtttatttgccttttctttgtttgtaacttatctgtaaaaggtttctccctactgtcaaaaaaatatgcatgtatagtaattaggacttcattcctccatgttttcttcccttatcttactgtcattgtcctaaaaccttattttagaaaattgatcaagtaacatgttgcatgtggcttactctggatatatctaagcccttctgcacatctaaacttagatggagttggtcaaatganggaacatctgggttatgccttttttaaagtaattttctttaagaactgtcacatgttntttgttgaattgtggaatttgttactctgccttggactatggacagtcaacaatattttcttaaaaatttgcactattgcanaacgggtgttattatccaaggtactccttaccctaatttttttngttnctgcctggtncccgttacaanaaacattttcccttttaaattggttaccttgccttttttaaaacttttgnttttaacccccctttaaaaaatcctgcctttattgggca

SEQ ID NO: 3888 - DNA, 99 bp, Homo sapiens
  misc_feature (5)..(5): n equals a,t,g, or c
  misc_feature (12)..(12): n equals a,t,g, or c
  misc_feature (50)..(50): n equals a,t,g, or c
  misc_feature (53)..(53): n equals a,t,g, or c
  misc_feature (73)..(73): n equals a,t,g, or c
  misc_feature (85)..(85): n equals a,t,g, or c
  misc_feature (87)..(88): n equals a,t,g, or c
  misc_feature (97)..(97): n equals a,t,g, or c
aatantttttangatttcgtagtctttttaattaaaaataagggttttgnacncccttttttttaaaaaatgntccttttttttntnntgattagtntt

SEQ ID NO: 3889 - DNA, 289 bp, Homo sapiens
  misc_feature (23)..(23): n equals a,t,g, or c
  misc_feature (46)..(46): n equals a,t,g, or c
  misc_feature (53)..(53): n equals a,t,g, or c
  misc_feature (71)..(71): n equals a,t,g, or c
  misc_feature (95)..(95): n equals a,t,g, or c
  misc_feature (107)..(107): n equals a,t,g, or c
  misc_feature (151)..(151): n equals a,t,g, or c
  misc_feature (180)..(180): n equals a,t,g, or c
  misc_feature (238)..(238): n equals a,t,g, or c
  misc_feature (267)..(267): n equals a,t,g, or c
  misc_feature (277)..(277): n equals a,t,g, or c
  misc_feature (282)..(282): n equals a,t,g, or c
  misc_feature (287)..(287): n equals a,t,g, or c
ggataatatttccataatttttnatttgaaattttgctgattcttnaaatgtnttgtttcccagatttcangaaactttttttcttttaagctanccacagcttacngcaatttgataaaatatacttttgtgaataaaaattgagacatntacattttctccctatgtggtcgctccanacttgggaaactattcatgaagtatatatattgtatggtaatatagttatagcacaanttcaataaaaatctgctctttgtattgcnctgattgtgngctangcacnga

SEQ ID NO: 3890 - DNA, 67 bp, Homo sapiens
  misc_feature (39)..(39): n equals a,t,g, or c
  misc_feature (41)..(41): n equals a,t,g, or c
  misc_feature (49)..(49): n equals a,t,g, or c
  misc_feature (54)..(54): n equals a,t,g, or c
  misc_feature (66)..(66): n equals a,t,g, or c
aggaaacttgtgcattacatttttcctgatcaagcaggnanggagcaanatgtncatatatatttnt

SEQ ID NO: 3891 - DNA, 144 bp, Homo sapiens
  misc_feature (22)..(23): n equals a,t,g, or c
  misc_feature (29)..(29): n equals a,t,g, or c
  misc_feature (83)..(83): n equals a,t,g, or c
  misc_feature (89)..(89): n equals a,t,g, or c
  misc_feature (110)..(110): n equals a,t,g, or c
  misc_feature (121)..(121): n equals a,t,g, or c
  misc_feature (144)..(144): n equals a,t,g, or c
ccgcactttccagcagggatcnngaagancacccgagtcccaagaatggggttttgctttttaaaaaagaaaaaagaagggtnattgcngggattgaagttcgcctggcngtctatccgcncaaggatcctctgtccttcatan

SEQ ID NO: 3892 - DNA, 99 bp, Homo sapiens
  misc_feature (6)..(6): n equals a,t,g, or c
  misc_feature (12)..(12): n equals a,t,g, or c
  misc_feature (33)..(33): n equals a,t,g, or c
  misc_feature (52)..(52): n equals a,t,g, or c
  misc_feature (93)..(93): n equals a,t,g, or c
  misc_feature (99)..(99): n equals a,t,g, or c
atgccnaagttnatactctattgagaaaagctnggtacgggttgcaggtacnagtccgtaattcccgggtcgacccacgcgtccgctcccgcngggccn

SEQ ID NO: 3893 - DNA, 99 bp, Homo sapiens
  misc_feature (14)..(15): n equals a,t,g, or c
  misc_feature (37)..(37): n equals a,t,g, or c
  misc_feature (39)..(39): n equals a,t,g, or c
  misc_feature (41)..(41): n equals a,t,g, or c
  misc_feature (94)..(94): n equals a,t,g, or c
tttttttggacatnntcccccctttttttttttatcntnancccccccttttttttttaaaaaaaaaaaggggggggccccccccccctttttnggggg

SEQ ID NO: 3894 - DNA, 99 bp, Homo sapiens
  misc_feature (2)..(2): n equals a,t,g, or c
  misc_feature (12)..(13): n equals a,t,g, or c
  misc_feature (35)..(36): n equals a,t,g, or c
  misc_feature (38)..(38): n equals a,t,g, or c
  misc_feature (45)..(45): n equals a,t,g, or c
  misc_feature (92)..(92): n equals a,t,g, or c
cnctttggacanntcccccctttttttttgatctnnanccccccnttttttttaaaaaaaaaagggggggcccccccccttttttggggggncccaaaa

SEQ ID NO: 3895 - DNA, 104 bp, Homo sapiens
  misc_feature (2)..(3): n equals a,t,g, or c
  misc_feature (33)..(33): n equals a,t,g, or c
  misc_feature (45)..(45): n equals a,t,g, or c
  misc_feature (81)..(81): n equals a,t,g, or c
  misc_feature (103)..(104): n equals a,t,g, or c
gnncccccctttttttttaaaaaaaaaaaaaanattttttttttnttttttttttggggggcccccccccccccttttttntttaaaaaaaaaaaaaaaaaann

SEQ ID NO: 3896 - DNA, 188 bp, Homo sapiens
  misc_feature (1)..(1): n equals a,t,g, or c
  misc_feature (12)..(12): n equals a,t,g, or c
  misc_feature (19)..(19): n equals a,t,g, or c
  misc_feature (32)..(32): n equals a,t,g, or c
  misc_feature (84)..(84): n equals a,t,g, or c
  misc_feature (115)..(115): n equals a,t,g, or c
  misc_feature (118)..(118): n equals a,t,g, or c
  misc_feature (154)..(154): n equals a,t,g, or c
  misc_feature (172)..(172): n equals a,t,g, or c
  misc_feature (186)..(186): n equals a,t,g, or c
ncaaaggaaagntggtacngcccaggtaccgntccggaattcccgggtcgacccacgcgtccggcaggggcttggggcagcccnccctctcctccacccagaccaagtgcctganganctgcctgccttcttccatctgaaaaagcaccctccntccccctttgacttgcangagccaccaggganca

SEQ ID NO: 3897 - DNA, 542 bp, Homo sapiens
ggcatcttctgaggtcaattaaaaggagaaaaaatacaatttctcactttgcatttagtcaaaagaaaaaatgctttatagcaaaatgaaagagaacatgaaatgcttctttctcagtttattggttgaatgtgtatctatttgagtctggaaataactgatgtgtttgataattagtttagtttgtggcttcatggaaactccctgtaaactaaaagcttcagggttatgtctatgttcattctatagaagaaatgcaaactatcactgtattttaatatttgttattctctcatgaatagaaatttatgtagacgcaaacaaaatacttttacccacttaaaaagagaatataacattttatgtcactataatcttttgttttttaagttagtgtatattttgttgtgattatctttttgtggtgtgaataaatcttttatcttgaatgtaataagaatttggtggtgtcaattgcttatttgttttcccacggttgtccagcaattaataaaacataaccttttttactgcctaaaaaa

SEQ ID NO: 3898 - DNA, 561 bp, Homo sapiens
  misc_feature (251)..(251): n equals a,t,g, or c
  misc_feature (458)..(458): n equals a,t,g, or c
  misc_feature (473)..(473): n equals a,t,g, or c
  misc_feature (524)..(524): n equals a,t,g, or c
  misc_feature (549)..(549): n equals a,t,g, or c
  misc_feature (551)..(552): n equals a,t,g, or c
gggtagatccacccttatgcttctcagtttagcataacctcttatggattttcatcaaattcagcgtgttggtcactggaaagagccttttccttctccttttcttactctcccctcatggtgttcccctcttaaaggagaggagcttttaatttacacttaccacctcatttgcttttctggaggccatgcaatataggcgggactacagagttaatctcctttttacaaatgaggccaagagaagcctnattggttcacagtcatgcagctcatactgtccacccttgtattctcagatgcaggacaattgcattttagttttattttgtggaggtgcagaatatttactctttctgtccaacccttgattctgccgaggaagacactgatggtttgatgagtgattcagctgttttggctaaggggcttttggagctgatggcaggggtttgatnaattcaaatgagctntagacattatcacagactgaatagatctttaactggctcctacatgtgtgntttcaaatgtgtatagaatgctatngnnattaaataa

SEQ ID NO: 3899 - DNA, 103 bp, Homo sapiens
  misc_feature (1)..(1): n equals a,t,g, or c
  misc_feature (19)..(19): n equals a,t,g, or c
  misc_feature (34)..(34): n equals a,t,g, or c
  misc_feature (63)..(64): n equals a,t,g, or c
  misc_feature (102)..(102): n equals a,t,g, or c
naagtatggtacccctgcnggtaccggtccgganttcccgggtcgacccacgcgtccggccgnntaagagaagttgtaaagtatgtattattcggccctggnt

SEQ ID NO: 3900 - DNA, 73 bp, Homo sapiens
  misc_feature (5)..(5): n equals a,t,g, or c
  misc_feature (9)..(9): n equals a,t,g, or c
  misc_feature (62)..(63): n equals a,t,g, or c
  misc_feature (73)..(73): n equals a,t,g, or c
ttacnaaanagaggatttacaaaaaccagctagaggatatgatggaaagaagcaaatgaaanncgggcaggcn

SEQ ID NO: 3901 - DNA, 338 bp, Homo sapiens
  misc_feature (23)..(23): n equals a,t,g, or c
  misc_feature (79)..(79): n equals a,t,g, or c
  misc_feature (82)..(82): n equals a,t,g, or c
  misc_feature (85)..(85): n equals a,t,g, or c
  misc_feature (89)..(89): n equals a,t,g, or c
  misc_feature (115)..(115): n equals a,t,g, or c
  misc_feature (156)..(156): n equals a,t,g, or c
  misc_feature (158)..(158): n equals a,t,g, or c
  misc_feature (165)..(165): n equals a,t,g, or c
  misc_feature (261)..(261): n equals a,t,g, or c
  misc_feature (275)..(275): n equals a,t,g, or c
  misc_feature (277)..(277): n equals a,t,g, or c
  misc_feature (313)..(313): n equals a,t,g, or c
  misc_feature (327)..(327): n equals a,t,g, or c
atgcacacaatgccacgtgcctngtgaaagcatgaagcaaaagaaaggatgagatcaaagcctgacccaacttgacttnctnctntagntgagccaccgcaccttgctgcccctntcctccccttttgcctctgtcaaatgacctactctgccctntntcccagntgctgctagacccagagcacttggagcaaccagctggagggtttggtaggctcacccttgttgtgctgatttcttggctccacagttctcaatggnttgagccagctcangntctttctcacagggaactggagcaaaaatcctgtangagcaattcttggngttggacaccc

SEQ ID NO: 3902 - DNA, 70 bp, Homo sapiens
  misc_feature (49)..(49): n equals a,t,g, or c
  misc_feature (53)..(53): n equals a,t,g, or c
  misc_feature (56)..(56): n equals a,t,g, or c
  misc_feature (61)..(61): n equals a,t,g, or c
  misc_feature (69)..(69): n equals a,t,g, or c
gctgtttttaaaaagtaaagttcttagaggataaaaacagccacccaantggngcnttttnaaggatcna

SEQ ID NO: 3903 - DNA, 132 bp, Homo sapiens
  misc_feature (10)..(10): n equals a,t,g, or c
  misc_feature (12)..(12): n equals a,t,g, or c
  misc_feature (19)..(19): n equals a,t,g, or c
  misc_feature (23)..(23): n equals a,t,g, or c
  misc_feature (95)..(95): n equals a,t,g, or c
  misc_feature (107)..(108): n equals a,t,g, or c
  misc_feature (115)..(115): n equals a,t,g, or c
  misc_feature (130)..(130): n equals a,t,g, or c
gagcgcgttngnagacaangatncaaagacaagaagaaaataattctgcgcacttaagcactggagagaaaggattaggatagaatgggagaccngctttgcacaannattccanggtataggcgccaangg

SEQ ID NO: 3904 - DNA, 310 bp, Homo sapiens
  misc_feature (10)..(10): n equals a,t,g, or c
  misc_feature (12)..(12): n equals a,t,g, or c
  misc_feature (16)..(16): n equals a,t,g, or c
  misc_feature (20)..(20): n equals a,t,g, or c
  misc_feature (76)..(76): n equals a,t,g, or c
  misc_feature (192)..(192): n equals a,t,g, or c
  misc_feature (198)..(198): n equals a,t,g, or c
  misc_feature (210)..(210): n equals a,t,g, or c
  misc_feature (259)..(260): n equals a,t,g, or c
  misc_feature (280)..(280): n equals a,t,g, or c
  misc_feature (291)..(291): n equals a,t,g, or c
  misc_feature (294)..(294): n equals a,t,g, or c
cttacgatantnttgngcangtacccctgcaggtaccggtccggaattcccgggtcgacccacgcgttcgtgtttnctgtagactgaactgctagaaagatgagatgttaaaattcaatataaacttgaagaattttgtataattataattatacaaaatataggtagggtgcacaatgttatcaaatgttnatcagnatcaaatgaaancacctttgataagctgcttttgaaaatgctgcctttttaaagaaatcgnnaattattgacatctgacagnactaacattgnggnagctgctctacagatg

SEQ ID NO: 3905 - DNA, 349 bp, Homo sapiens
  misc_feature (7)..(7): n equals a,t,g, or c
  misc_feature (18)..(18): n equals a,t,g, or c
  misc_feature (20)..(20): n equals a,t,g, or c
  misc_feature (28)..(28): n equals a,t,g, or c
  misc_feature (77)..(77): n equals a,t,g, or c
  misc_feature (164)..(164): n equals a,t,g, or c
  misc_feature (166)..(167): n equals a,t,g, or c
  misc_feature (177)..(177): n equals a,t,g, or c
  misc_feature (180)..(180): n equals a,t,g, or c
  misc_feature (297)..(297): n equals a,t,g, or c
  misc_feature (314)..(315): n equals a,t,g, or c
  misc_feature (328)..(328): n equals a,t,g, or c
  misc_feature (343)..(343): n equals a,t,g, or c
tggaaanttcttctatantnttaggcangtacccctgcaggtacacggtccggaattcccgggtcgacccacgcgtncgtgtggttccacccaatatctctcaggcatctacaaaggctctctcttcctccgtcagagtctggactgggttcactggtccttgntnnattgactgancanatgtgattgacaacagctgtgcctaggggttaacctagtgccccctgctagatcaagtacctgactcccagcccagaattgcccatctcagcaaaggagggtggcattgagacttangtggatcataggcactnncatcttcatgagncccatcgcacattanaataaa

SEQ ID NO: 3906 - DNA, 69 bp, Homo sapiens
  misc_feature (7)..(7): n equals a,t,g, or c
  misc_feature (13)..(13): n equals a,t,g, or c
  misc_feature (53)..(53): n equals a,t,g, or c
  misc_feature (59)..(59): n equals a,t,g, or c
gccgggngatccntgctgtgaggccaagggcggcatgacccgaggtggcaagnagagcncgagaacgac

SEQ ID NO: 3907 - DNA, 221 bp, Homo sapiens
  misc_feature (13)..(13): n equals a,t,g, or c
  misc_feature (43)..(43): n equals a,t,g, or c
  misc_feature (59)..(59): n equals a,t,g, or c
  misc_feature (74)..(74): n equals a,t,g, or c
  misc_feature (80)..(80): n equals a,t,g, or c
  misc_feature (94)..(94): n equals a,t,g, or c
  misc_feature (155)..(155): n equals a,t,g, or c
  misc_feature (179)..(179): n equals a,t,g, or c
  misc_feature (190)..(190): n equals a,t,g, or c
  misc_feature (202)..(202): n equals a,t,g, or c
  misc_feature (216)..(216): n equals a,t,g, or c
ggtggatgcggangcttgggtgcgttcaagaattcaaactttnaacccgtaaacccaancggccattgggcccnaaaggnaaagggcattttgncttggctttgggaaaggtttgttaaaaatggggaacccggttttaaaattaaaccttgggntttttttaaacccaaaggaaaaanggggtttttcnttttgaaaaaanaaaaacttttgggnccccc

SEQ ID NO: 3908 - DNA, 237 bp, Homo sapiens
ggcctcctccagcagagaccctcggacccctgcagggcctggacttggggtgaacagggcttcagtcagcgcaagtattccatttgcatttggtaatttttcatgccacctatttatgaatatataaatctttataccaaatctattttttaaaacatggaaaagttgcctttatggaaacttggcagagccagagtgtacacattcctaaaccattaaacagatttctataacaaa

SEQ ID NO: 3909 - DNA, 53 bp, Homo sapiens
  misc_feature (3)..(3): n equals a,t,g, or c
  misc_feature (40)..(40): n equals a,t,g, or c
  misc_feature (42)..(42): n equals a,t,g, or c
  misc_feature (46)..(46): n equals a,t,g, or c
  misc_feature (51)..(51): n equals a,t,g, or c
ganacaatttggcaccactttgggggcttttggaaaatcntncccnagaangg

SEQ ID NO: 3910 - DNA, 479 bp, Homo sapiens
  misc_feature (290)..(290): n equals a,t,g, or c
  misc_feature (371)..(371): n equals a,t,g, or c
  misc_feature (443)..(443): n equals a,t,g, or c
  misc_feature (453)..(454): n equals a,t,g, or c
  misc_feature (456)..(456): n equals a,t,g, or c
  misc_feature (471)..(471): n equals a,t,g, or c
cctgcaggtaccggtccggaattcccgggtcgacccacgcgtccgctgagttagaaaaatcatcttttccaaacaccactgaaatcatggactaggacaaggttagcccatgagtgtttagaccagtgaggtgagcagctgctggggacaggacccttgtctggtatcgatggcagggaaggctgtgagcctcccctcgtgtgggcatcagcctcagcctcccagtgggggtcacccagggagcatatctcctggtgagaagtacaggagcttcacattccctggatacngtcccagccgaaatgttcaccgtgaatccggcaacctgtggagctgatttccatttctaaggaacgaggggggatggggangaaccccccaggacagcaccaacagtcctgcggggaccttttcccggacacccggtcttcttcggtggtgangcatgtggcnngntcccgaaaggccccnggggggga

SEQ ID NO: 3911 - DNA, 421 bp, Homo sapiens
  misc_feature (150)..(150): n equals a,t,g, or c
  misc_feature (197)..(197): n equals a,t,g, or c
  misc_feature (217)..(217): n equals a,t,g, or c
  misc_feature (237)..(237): n equals a,t,g, or c
  misc_feature (260)..(260): n equals a,t,g, or c
  misc_feature (286)..(286): n equals a,t,g, or c
  misc_feature (331)..(331): n equals a,t,g, or c
  misc_feature (397)..(397): n equals a,t,g, or c
  misc_feature (412)..(412): n equals a,t,g, or c
  misc_feature (418)..(418): n equals a,t,g, or c
  misc_feature (421)..(421): n equals a,t,g, or c
ggcaggcacctcaagaagatggaccttggaccaaggctgtaactccacctgtgaaagatgataatgaagatgttttctctgccagaattcagaagatgctgggaagctgtgtatctcatgcaacttttgatgatgatcttcctggtgtangcaatcttagtgaatttaaaaagcttcctgagatgataagaccacanagtgccatatcaagctttanagtgagatcccctggtcccnaaccacaagggctactggcacanttatgtaaaaggcatactgactcttntagctctgatatgcaagcctgttctcaagacaaagccaaaatatntcttggttccagcatagattcagtcagtgaaatggcctcttcttagtgaagggagtctctctgaanaagagggataccctngatggncan

SEQ ID NO: 3912 - DNA, 421 bp, Homo sapiens
  misc_feature (383)..(383): n equals a,t,g, or c
  misc_feature (410)..(410): n equals a,t,g, or c
  misc_feature (420)..(420): n equals a,t,g, or c
gcaattctgaggtggtttattgggagtccttctacatttctcttagataactctgcactctgggtggctattgtgtagccttactgccccagagtgcctgttagccaaatatttcccctctgataggaatattttctaagaatcagctgataacttgcgtgctggaccttgttatctgtgcccctgggagacacacgttttcttggttttgaaaacctgaaacacaggcaactttacattttggggaattagctgatgcctcctgaagcctgaggaggtggcggggaatatgagcggtgctgtctctctcaaaagtgccctttagatgattccccctcctagggctgcctgcaggggctgtatgcttgggaaagattgtgtangtgacagtgaatcagaatgaagtggtnagattttgtnt

SEQ ID NO: 3913 - DNA, 51 bp, Homo sapiens
  misc_feature (19)..(20): n equals a,t,g, or c
  misc_feature (22)..(22): n equals a,t,g, or c
  misc_feature (41)..(41): n equals a,t,g, or c
  misc_feature (47)..(47): n equals a,t,g, or c
gagacttatttaattatgnncnccatggaaatcactctccngttggnctat

SEQ ID NO: 3914 - DNA, 139 bp, Homo sapiens
  misc_feature (6)..(6): n equals a,t,g, or c
  misc_feature (9)..(9): n equals a,t,g, or c
  misc_feature (19)..(19): n equals a,t,g, or c
  misc_feature (23)..(23): n equals a,t,g, or c
  misc_feature (48)..(48): n equals a,t,g, or c
  misc_feature (109)..(109): n equals a,t,g, or c
  misc_feature (124)..(124): n equals a,t,g, or c
  misc_feature (129)..(130): n equals a,t,g, or c
tggaantcnctagctttgntgcncaagtgtatgccgtggatggactanatgagttactcttcctatggtgaatacgacgcatgggcgcatatataaagactggggtggnatagatcccagaaanggtcnntacgaggtt

SEQ ID NO: 3915 - DNA, 475 bp, Homo sapiens
  misc_feature (384)..(384): n equals a,t,g, or c
  misc_feature (432)..(432): n equals a,t,g, or c
  misc_feature (441)..(441): n equals a,t,g, or c
  misc_feature (467)..(467): n equals a,t,g, or c
  misc_feature (473)..(473): n equals a,t,g, or c
ggctgacttgcttattgaggtcggcagctcccgagaagcaggagaagcagagtttttgcagacagacccacgaagtcaagcatgcggagtgcagccaagccctggaacccagccatcagagcagggggccacggcccagaccgggtgcggcctctgcctgcagcctcttccggcatgaagagttctaagtcttcaacttccttggcttttgagtcccgactcagcaggctcaagagggccagcagtgaggacacgctcaacaagccaggaagtaccgctgcatcgggggtggttcgcctgaagaagaccgccactgccggagccatctcggagctcacggagagccgcctgaggagcggcacaggggcctttacaacaactaancggacaggcattccagccccacgggaattttcagtaactgctcaaganagaggtctngtgccacgtggtccctccaacctcangaaatnag

SEQ ID NO: 3916 - DNA, 69 bp, Homo sapiens
  misc_feature (46)..(46): n equals a,t,g, or c
  misc_feature (48)..(48): n equals a,t,g, or c
  misc_feature (58)..(60): n equals a,t,g, or c
gctcaaggtctcctccttccctccccccccccccccgtcacttggntnatcaaccttnnnggcatttgc

SEQ ID NO: 3917 - DNA, 77 bp, Homo sapiens
  misc_feature (1)..(1): n equals a,t,g, or c
  misc_feature (23)..(23): n equals a,t,g, or c
  misc_feature (30)..(30): n equals a,t,g, or c
  misc_feature (39)..(39): n equals a,t,g, or c
  misc_feature (65)..(65): n equals a,t,g, or c
nttgttactctggttactggggncgtgccncgctggcanagagccgccgccgcgagggatgctgntgaggaagccgt

SEQ ID NO: 3918 - DNA, 436 bp, Homo sapiens
  misc_feature (1)..(1): n equals a,t,g, or c
  misc_feature (345)..(345): n equals a,t,g, or c
  misc_feature (381)..(381): n equals a,t,g, or c
  misc_feature (408)..(408): n equals a,t,g, or c
  misc_feature (417)..(417): n equals a,t,g, or c
  misc_feature (420)..(420): n equals a,t,g, or c
naaactgtcctatcttgttctgtaaaatattagaacgctttgttttacaaaaaatgatgagagaattcttccacatgtacttctgtgcttagaacatttttacggacctaagcgctggagacgttgctgcatgtcggctgggttttttttttcatacacccgagcacggaaaaactaacgcaaaattgtattttcttacctagtggaaatctgaaatgactgcaaattcctagtgaatgtacaggtttgctttcgtgtccctctttggttgctttaaaaagtgacgtgtaatttctgacccatgtttaatctgtataaaaaaacttctgccccagttttctctgncccctataagagccaacttgagtttatgccggttgncattataattcaataatcttttttcanttaaaaaanaanattaaaaaagggcggc

SEQ ID NO: 3919 - DNA, 104 bp, Homo sapiens
  misc_feature (2)..(2): n equals a,t,g, or c
  misc_feature (77)..(77): n equals a,t,g, or c
  misc_feature (88)..(89): n equals a,t,g, or c
  misc_feature (99)..(99): n equals a,t,g, or c
  misc_feature (102)..(102): n equals a,t,g, or c
tnaatacccttggactatccgactacttagggaaagctggtacgcctgcaggtaccggtccggaattcccgggtcgntccacgcgttnngttatatatncanac

SEQ ID NO: 3920 - DNA, 87 bp, Homo sapiens
  misc_feature (10)..(10): n equals a,t,g, or c
  misc_feature (40)..(40): n equals a,t,g, or c
  misc_feature (46)..(46): n equals a,t,g, or c
  misc_feature (65)..(65): n equals a,t,g, or c
  misc_feature (78)..(78): n equals a,t,g, or c
aattcccacngactattcggaaagctgcccgcctgcaggnaccggnccggaattcccgggtcgtnccacgcgtttttnacagacgct

SEQ ID NO: 3921 - DNA, 423 bp, Homo sapiens
  misc_feature (8)..(8): n equals a,t,g, or c
  misc_feature (29)..(29): n equals a,t,g, or c
  misc_feature (53)..(55): n equals a,t,g, or c
  misc_feature (103)..(103): n equals a,t,g, or c
  misc_feature (139)..(139): n equals a,t,g, or c
  misc_feature (179)..(179): n equals a,t,g, or c
  misc_feature (355)..(355): n equals a,t,g, or c
  misc_feature (357)..(357): n equals a,t,g, or c
  misc_feature (383)..(383): n equals a,t,g, or c
  misc_feature (385)..(385): n equals a,t,g, or c
  misc_feature (412)..(412): n equals a,t,g, or c
gtttcttntagttcaatagatgtgcatanggtagctttagcaattaaattctnnngaagttgatatagtctcatttttaattgtcctgtaatggaacagtagnaaattcactaaacttttgtgttcagagttaaattgntctcagtactttcaatgtaggggaatgtaataaacatagngtgtatgtttgggttttaattacacattttatatatgagccatttagatatgcagtgttaattctatactgcatttgaagtgtatgtaacttagcttatgttaatgcagtcatgaagttggtttgctccagcatcacggtagtctttaaacattcttttagtgaaattgtcattgntntatcagtgctaatgtgtgcaagcagngnttttacctgcttttctcctggcatcanaaagtggcggc

SEQ ID NO: 3922 - DNA, 72 bp, Homo sapiens
  misc_feature (1)..(1): n equals a,t,g, or c
  misc_feature (16)..(16): n equals a,t,g, or c
  misc_feature (34)..(34): n equals a,t,g, or c
  misc_feature (36)..(36): n equals a,t,g, or c
  misc_feature (41)..(41): n equals a,t,g, or c
nttaataagctagaantattacaacccctgtgtntntggtncttatcaaatacttagtatcatgggggttgg

SEQ ID NO: 3923 - DNA, 106 bp, Homo sapiens
  misc_feature (1)..(1): n equals a,t,g, or c
  misc_feature (81)..(81): n equals a,t,g, or c
  misc_feature (89)..(89): n equals a,t,g, or c
  misc_feature (95)..(95): n equals a,t,g, or c
  misc_feature (101)..(101): n equals a,t,g, or c
  misc_feature (104)..(104): n equals a,t,g, or c
nccaggattaaaagccatgagtttcttgtcaaaaattttgctgctctcctgctggggggggggggggggcagtataccacngaaatganctatancaaagnctnta

SEQ ID NO: 3924 - DNA, 701 bp, Homo sapiens
  misc_feature (537)..(537): n equals a,t,g, or c
  misc_feature (540)..(540): n equals a,t,g, or c
  misc_feature (543)..(543): n equals a,t,g, or c
  misc_feature (561)..(561): n equals a,t,g, or c
  misc_feature (636)..(636): n equals a,t,g, or c
  misc_feature (644)..(644): n equals a,t,g, or c
  misc_feature (674)..(674): n equals a,t,g, or c
  misc_feature (684)..(684): n equals a,t,g, or c
  misc_feature (686)..(686): n equals a,t,g, or c
gcgtgcaacgtggctccgtgcgctgctcctgtggcggcctggcctctccgtgcccctcctggcccttgggctccttgccctcagaagaggggccccgtcaccctcagaagaggggccccgtcaccctcaggtctgggctagcccggactagggaggtttcccctcccttctagacacttccatggccccagctgtcctgagacgcggctccagaatccaaccaggcctgaatggcacctgccctctcagcgtggagcgtttgccaagagcacgccgactgcagggcgccaggctagagcctggaaatctaagcggggcccggcctgcccagctccatggagtctagggttcacaacgaggcaccgccaaaacccagggggtgacacaggagggaaggggcccaatggagccagggcagggtgctgtgtgcacccacttgcactggcctggccttggctccctgccagccccctggcaggtgacactgtgtgtaggcagagcccgagcctgggctgcaaggcattccacacacgcagnatncanagagaggatccaggtcanggcccgggaaagccttgcatgcttgggacacaagtcgttcttggaaaaggacaagcttggaaggggggacaagtncccaaaancaacgttaccggcttgggaattttcctttnggcccttgancnaaaaagccttaaaaa

SEQ ID NO: 3925 - DNA, 70 bp, Homo sapiens
  misc_feature (9)..(9): n equals a,t,g, or c
  misc_feature (24)..(24): n equals a,t,g, or c
  misc_feature (58)..(58): n equals a,t,g, or c
  misc_feature (69)..(69): n equals a,t,g, or c
gagccccgnttatggaagatgaanaggaggatatgggggtggaatgacctaatggagnaaaacacattnt

SEQ ID NO: 3926 - DNA, 88 bp, Homo sapiens
  misc_feature (29)..(29): n equals a,t,g, or c
  misc_feature (40)..(40): n equals a,t,g, or c
  misc_feature (67)..(67): n equals a,t,g, or c
  misc_feature (72)..(72): n equals a,t,g, or c
  misc_feature (76)..(76): n equals a,t,g, or c
gctcaaggtctcctccttccctccccccncccacctagantgggcctcattgggcagaagttgcagnctttnttanattgcctgcaaa

SEQ ID NO: 3927 - DNA, 394 bp, Homo sapiens
  misc_feature (11)..(12): n equals a,t,g, or c
  misc_feature (231)..(231): n equals a,t,g, or c
  misc_feature (246)..(246): n equals a,t,g, or c
  misc_feature (320)..(320): n equals a,t,g, or c
  misc_feature (346)..(346): n equals a,t,g, or c
  misc_feature (375)..(375): n equals a,t,g, or c
  misc_feature (392)..(393): n equals a,t,g, or c
gattaaggganngtcgttctcagtgaaaatccaaaaaccagaaaaaaatgtttatacaaccctaagtcaataacctgaccttagaaaattgtgagagccaagttgacttcaggaactgaaacatcagcacaaagaagcaatcatcaaataattctgaacacaaatttaatatttttttttctgaatgagaaacatgagggaaattgtggagttagcctcctgtggagttancctcctgtggtaaanggaattgaagaaaatataaacacccttacacccttttttaatctttgccatttaaaagttctggcttaactttngaattccatttagagaaaaaaattcnttggtacccaggaattcatttcaatttcnaatttgaaataggttgnng

SEQ ID NO: 3928 - DNA, 382 bp, Homo sapiens
  misc_feature (271)..(271): n equals a,t,g, or c
  misc_feature (280)..(280): n equals a,t,g, or c
  misc_feature (320)..(320): n equals a,t,g, or c
  misc_feature (335)..(335): n equals a,t,g, or c
  misc_feature (351)..(351): n equals a,t,g, or c
  misc_feature (367)..(367): n equals a,t,g, or c
  misc_feature (379)..(379): n equals a,t,g, or c
gtccatatttctctgcatcttctcttggagtgagggaggctacctggaggggatcagcccactgacagaccttaatcttaattactgctgtggctagagagtttgaggattgctttttaaaaaagacagcaaacttttttttttatttaaaaaaagatatattaacagttttagaagtcagtagaataaaatcttaaagcactcataatatggcatccttcaatttctgtataaaagcagatctttttaaaaagatacttctgtaacttangaaacctgncatttaaatcatattttgctttagggaaaagctttggttngtgttcgtgttttgnttggttcacttgtttnccttccagccccaaancttttggtcttntcc

SEQ ID NO: 3929 - DNA, 382 bp, Homo sapiens
  misc_feature (16)..(16): n equals a,t,g, or c
  misc_feature (353)..(353): n equals a,t,g, or c
  misc_feature (373)..(373): n equals a,t,g, or c
  misc_feature (376)..(376): n equals a,t,g, or c
  misc_feature (381)..(382): n equals a,t,g, or c
atgcctcatttgatgnccctggtccgcttgcaggtccggccggaattcccgggtcgcccacgcgtccgtaatgatctgcatcagttgtaaaggggaattggtatattcacagactgtagactttcagcagcaatctcagaagcttacaaatagatttccatgaagatatttgtcttcagaattaaaactgcccttaattttaatatacctttcaatcggccactggccatttttttctaagtattcaattaagtgggaattttctggaagatgggtcagctatgaagtaataggagtttgcttaatcatttgtaattcaaacatgctatattttttaaaatcaatggggaaancttagactaattttaaaatngtnccatnn

SEQ ID NO: 3930 - DNA, 241 bp, Homo sapiens
  misc_feature (17)..(17): n equals a,t,g, or c
  misc_feature (33)..(33): n equals a,t,g, or c
  misc_feature (44)..(44): n equals a,t,g, or c
  misc_feature (56)..(56): n equals a,t,g, or c
  misc_feature (72)..(72): n equals a,t,g, or c
  misc_feature (144)..(144): n equals a,t,g, or c
  misc_feature (175)..(175): n equals a,t,g, or c
  misc_feature (216)..(216): n equals a,t,g, or c
  misc_feature (233)..(233): n equals a,t,g, or c
  misc_feature (238)..(238): n equals a,t,g, or c
tggactgcatttaaatncgatttccatcttaantgtgtactcanatataatgagangtctcattcgacttantcttgacttctgtgtcattctttaaaccttttatggctagagtttccactatcccaatcaaagaattcagtncacatcccagaatccataaatgtgttctggnccactctgtaataaggcaccaagaattaccactaattcatncagattttacctatcanaatancac

SEQ ID NO: 3931 - DNA, 110 bp, Homo sapiens
  misc_feature (7)..(7): n equals a,t,g, or c
  misc_feature (50)..(50): n equals a,t,g, or c
  misc_feature (61)..(61): n equals a,t,g, or c
  misc_feature (71)..(71): n equals a,t,g, or c
  misc_feature (94)..(94): n equals a,t,g, or c
  misc_feature (104)..(104): n equals a,t,g, or c
gcggaanatggcccgcctgcaggtaccggtccggaatttccgggtcgatntacgcgaccgntttaagaccnggtgataactgagcctcaatggngcagaaactnggggct

SEQ ID NO: 3932 - DNA, 138 bp, Homo sapiens
  misc_feature (9)..(9): n equals a,t,g, or c
  misc_feature (13)..(13): n equals a,t,g, or c
  misc_feature (16)..(16): n equals a,t,g, or c
  misc_feature (26)..(26): n equals a,t,g, or c
  misc_feature (70)..(70): n equals a,t,g, or c
  misc_feature (102)..(102): n equals a,t,g, or c
  misc_feature (120)..(120): n equals a,t,g, or c
  misc_feature (122)..(122): n equals a,t,g, or c
  misc_feature (133)..(133): n equals a,t,g, or c
gaagaacgngaanganggagaccgcngggagcagagcaaaaccagggaacccaacaaacaaaagaacggngccgaagaacgggaccgaaccccacccgaagngccaagaaacccgaggananccggacccgcnacgcc

SEQ ID NO: 3933 - DNA, 263 bp, Homo sapiens
  misc_feature (4)..(4): n equals a,t,g, or c
  misc_feature (30)..(30): n equals a,t,g, or c
  misc_feature (39)..(39): n equals a,t,g, or c
  misc_feature (48)..(48): n equals a,t,g, or c
  misc_feature (84)..(84): n equals a,t,g, or c
  misc_feature (110)..(110): n equals a,t,g, or c
  misc_feature (126)..(126): n equals a,t,g, or c
  misc_feature (129)..(129): n equals a,t,g, or c
  misc_feature (136)..(136): n equals a,t,g, or c
  misc_feature (154)..(154): n equals a,t,g, or c
  misc_feature (180)..(180): n equals a,t,g, or c
  misc_feature (185)..(185): n equals a,t,g, or c
  misc_feature (192)..(192): n equals a,t,g, or c
  misc_feature (221)..(221): n equals a,t,g, or c
  misc_feature (263)..(263): n equals a,t,g, or c
gggntttaaaagccaggcctgccaggaccnccaggcggnacaggtgcnaaaggcctccgaggaatcccaggcaacgcaggagcngatggaggaccagggcccaggggctngccaggagacgcaggncgngaagggnacccaggacccccagggnacataggaccccgaggatccaaaggngcagngggccancctggcccagatggatccccaggacccancggcctgccagggccagatgggccccctggggaaaggggccn

SEQ ID NO: 3934 - DNA, 296 bp, Homo sapiens
  misc_feature (13)..(13): n equals a,t,g, or c
  misc_feature (34)..(34): n equals a,t,g, or c
  misc_feature (53)..(53): n equals a,t,g, or c
  misc_feature (73)..(73): n equals a,t,g, or c
  misc_feature (83)..(83): n equals a,t,g, or c
  misc_feature (106)..(106): n equals a,t,g, or c
  misc_feature (115)..(115): n equals a,t,g, or c
  misc_feature (132)..(132): n equals a,t,g, or c
  misc_feature (165)..(165): n equals a,t,g, or c
  misc_feature (191)..(191): n equals a,t,g, or c
  misc_feature (196)..(196): n equals a,t,g, or c
  misc_feature (261)..(261): n equals a,t,g, or c
  misc_feature (263)..(263): n equals a,t,g, or c
  misc_feature (273)..(273): n equals a,t,g, or c
  misc_feature (279)..(279): n equals a,t,g, or c
  misc_feature (284)..(284): n equals a,t,g, or c
aattgggccaccngggttaacccccggggggttncccccgggggtaaaaaatnttccccccgggggggggttnccgggaaacntctccaaaccgggcccgggtttnaaaccgggnttttttttgggaaaganaaattggtaaaattgggggggcaattaaaaggncccttttttttaaaccaaaggggccnaaccnaaatgggggcccaaatggggtttttaaaggggggcccaaaaagggttaaatttccaaaaaagggntnttaaaaattntttttnccccnccttggggtgtt

SEQ ID NO: 3935 - DNA, 152 bp, Homo sapiens
  misc_feature (15)..(15): n equals a,t,g, or c
  misc_feature (35)..(35): n equals a,t,g, or c
  misc_feature (58)..(58): n equals a,t,g, or c
  misc_feature (100)..(100): n equals a,t,g, or c
  misc_feature (135)..(136): n equals a,t,g, or c
  misc_feature (142)..(142): n equals a,t,g, or c
gacctctgctaccgnggtagctgacaacatatagnatgaggtttggatctaagtctgnttcctctcacatgattacttgacagctaagcatctgattggnttactgctgtaccactgagctgaaatgccgtgtgnnccattnatgtaaaatc

SEQ ID NO: 3936 - DNA, 104 bp, Homo sapiens
  misc_feature (14)..(14): n equals a,t,g, or c
  misc_feature (44)..(44): n equals a,t,g, or c
  misc_feature (46)..(46): n equals a,t,g, or c
  misc_feature (70)..(70): n equals a,t,g, or c
  misc_feature (77)..(77): n equals a,t,g, or c
ggtcccgaattccngggtcgacctacgcgcccgggatttcagancnatttggccttaatacatttccagngtgaccngcagcaggcttttttcccccaagaaga

SEQ ID NO: 3937 - DNA, 99 bp, Homo sapiens
  misc_feature (6)..(6): n equals a,t,g, or c
  misc_feature (19)..(19): n equals a,t,g, or c
  misc_feature (37)..(38): n equals a,t,g, or c
  misc_feature (56)..(56): n equals a,t,g, or c
  misc_feature (66)..(66): n equals a,t,g, or c
  misc_feature (79)..(79): n equals a,t,g, or c
  misc_feature (83)..(83): n equals a,t,g, or c
  misc_feature (97)..(97): n equals a,t,g, or c
aacgangaacccttagcangaactcccgggaaatccnngcaaacttttccggaaanctgccccgcntgcaggtaccggnccgntaattcccgggttnac

SEQ ID NO: 3938 - DNA, 99 bp, Homo sapiens
  misc_feature (6)..(6): n equals a,t,g, or c
  misc_feature (19)..(20): n equals a,t,g, or c
  misc_feature (41)..(41): n equals a,t,g, or c
  misc_feature (44)..(44): n equals a,t,g, or c
  misc_feature (73)..(73): n equals a,t,g, or c
  misc_feature (87)..(88): n equals a,t,g, or c
  misc_feature (97)..(97): n equals a,t,g, or c
gttggngaacccttaaganngactcccggggaatccccgcnaanttttccggaaaacagccccgccggcaggnacacggtccggaanncccgggttnac

SEQ ID NO: 3939 - DNA, 314 bp, Homo sapiens
  misc_feature (314)..(314): n equals a,t,g, or c
gcacacaaataatttatttagcatattgttttctccaaatgttgttgatttatattttggaatactgtagtgctaagcccaaaacatttaagtcggatgatcgaggataatcctttagaattatggaaacttggaattggaacacagttttagtagcctttagaacaatcagcacacgtcaacaggacactcccaccagagcagtctgtttgaggcatttcttgaagcctaaatccaacaagaaggcccagctcaaaaatatggcagcctcactcacgtttccccattatgttgccttcgaattcctgaactcn

SEQ ID NO: 3940 - DNA, 298 bp, Homo sapiens
  misc_feature (3)..(3): n equals a,t,g, or c
  misc_feature (293)..(294): n equals a,t,g, or c
  misc_feature (296)..(298): n equals a,t,g, or c
tangggcagcctccgtcatccatgccctcccaggaccctccactcactgctgtgagtgcgcctcaccagaaccagttaagagacaactatcaattcttgagacccaaattataagggccctgccctgtactgaagaaaaggggagcacaaggccttaatggacattgacttgtgaaaacgcaaacatgaatatggttggagagccctggattaggagggtgacatggggaaggcagaggctggcaccatggtgactgccacataataaagtggtgatttggaaaaaaaaaaanngnnn

SEQ ID NO: 3941 - DNA, 114 bp, Homo sapiens
  misc_feature (2)..(2): n equals a,t,g, or c
  misc_feature (18)..(18): n equals a,t,g, or c
  misc_feature (26)..(26): n equals a,t,g, or c
  misc_feature (56)..(56): n equals a,t,g, or c
  misc_feature (79)..(79): n equals a,t,g, or c
  misc_feature (113)..(113): n equals a,t,g, or c
tntaacattgggactttncaagactntatagctatatagtgcctattatactgcangtacttacaaactcatttataantatacgtacaaaatggaaaaatagaaaagtaggng

SEQ ID NO: 3942 - DNA, 99 bp, Homo sapiens
  misc_feature (2)..(2): n equals a,t,g, or c
  misc_feature (33)..(33): n equals a,t,g, or c
  misc_feature (36)..(36): n equals a,t,g, or c
  misc_feature (70)..(70): n equals a,t,g, or c
  misc_feature (74)..(74): n equals a,t,g, or c
  misc_feature (82)..(82): n equals a,t,g, or c
  misc_feature (85)..(85): n equals a,t,g, or c
  misc_feature (87)..(87): n equals a,t,g, or c
  misc_feature (96)..(96): n equals a,t,g, or c
anccgcaggcaccttctcactctcaaggaaggnacnctccccctgcaggtaccggtccggaattcccggntcgncccacgcntcntnaaaaacaanaaa

SEQ ID NO: 3943 - DNA, 99 bp, Homo sapiens
  misc_feature (28)..(28): n equals a,t,g, or c
  misc_feature (32)..(32): n equals a,t,g, or c
  misc_feature (60)..(60): n equals a,t,g, or c
  misc_feature (82)..(82): n equals a,t,g, or c
  misc_feature (87)..(87): n equals a,t,g, or c
  misc_feature (91)..(91): n equals a,t,g, or c
ctgcagcacgctcgtcatatagtggaangacncaccccctgcacgtaccggtccggaatncccggttcgacccacgctttcntgacnatgngtgaagga

SEQ ID NO: 3944 - DNA, 99 bp, Homo sapiens
  misc_feature (7)..(7): n equals a,t,g, or c
  misc_feature (16)..(17): n equals a,t,g, or c
  misc_feature (27)..(27): n equals a,t,g, or c
  misc_feature (67)..(67): n equals a,t,g, or c
  misc_feature (74)..(74): n equals a,t,g, or c
  misc_feature (77)..(77): n equals a,t,g, or c
  misc_feature (79)..(79): n equals a,t,g, or c
cgcttcnatactttanngtcaggtacncctccaggtaccggtccggaattcccgggtcgacccacgngtccganttnantttcaaaccaaaaaaaaaaa

SEQ ID NO: 3945 - DNA, 52 bp, Homo sapiens
  misc_feature (8)..(8): n equals a,t,g, or c
  misc_feature (18)..(18): n equals a,t,g, or c
  misc_feature (27)..(27): n equals a,t,g, or c
  misc_feature (38)..(38): n equals a,t,g, or c
tctgagantgccgggccnctcagggcngggggagaagntgaaagtctaacac

SEQ ID NO: 3946 - DNA, 88 bp, Homo sapiens
  misc_feature (33)..(33): n equals a,t,g, or c
  misc_feature (38)..(38): n equals a,t,g, or c
  misc_feature (45)..(45): n equals a,t,g, or c
  misc_feature (55)..(55): n equals a,t,g, or c
  misc_feature (63)..(63): n equals a,t,g, or c
gctttcttattagaaatatgatacgaatgtgtnagcanacgacangtgcctttanaattacanttctaacttacatattttttgaaag

SEQ ID NO: 3947 - DNA, 80 bp, Homo sapiens
  misc_feature (6)..(6): n equals a,t,g, or c
  misc_feature (54)..(54): n equals a,t,g, or c
  misc_feature (63)..(63): n equals a,t,g, or c
  misc_feature (65)..(65): n equals a,t,g, or c
  misc_feature (68)..(68): n equals a,t,g, or c
ggatantagatgattggttaaaccccctaatcagatagtagatgattggttttnaataggttnanccnatgatctactat

SEQ ID NO: 3948 - DNA, 66 bp, Homo sapiens
  misc_feature (17)..(17): n equals a,t,g, or c
  misc_feature (34)..(34): n equals a,t,g, or c
ctgatcaagaatttggngtggacgtaggccctgntgagctttttataaaccaaactctatatgaaa

SEQ ID NO: 3949 - DNA, 117 bp, Homo sapiens
  misc_feature (30)..(30): n equals a,t,g, or c
  misc_feature (42)..(42): n equals a,t,g, or c
  misc_feature (54)..(54): n equals a,t,g, or c
  misc_feature (82)..(82): n equals a,t,g, or c
  misc_feature (90)..(90): n equals a,t,g, or c
aaaatgaaacatattatgagaggatataangaataaatttcnaatactcatggncttactgtattcatgaatcacatagttncaacgacntcacacctgggaaagggaatattgcta

SEQ ID NO: 3950 - DNA, 189 bp, Homo sapiens
  misc_feature (111)..(111): n equals a,t,g, or c
  misc_feature (150)..(150): n equals a,t,g, or c
  misc_feature (153)..(153): n equals a,t,g, or c
  misc_feature (167)..(167): n equals a,t,g, or c
  misc_feature (177)..(177): n equals a,t,g, or c
gaaaaaatacaaaattaaaacctgtatcatgacaacagtaatgtcttcccccaccagacacagtaagaagaaggaaaaaagcaaatgagcaaacagtactatcataagccnagaaaaaaactgcactggaaagaaatataccaaactgtnttntaaaaaaaaaaagnggctaggttngggtactagaat

SEQ ID NO: 3951 - DNA, 399 bp, Homo sapiens
  misc_feature (236)..(236): n equals a,t,g, or c
  misc_feature (268)..(268): n equals a,t,g, or c
  misc_feature (289)..(289): n equals a,t,g, or c
  misc_feature (345)..(345): n equals a,t,g, or c
  misc_feature (378)..(378): n equals a,t,g, or c
  misc_feature (390)..(390): n equals a,t,g, or c
  misc_feature (393)..(393): n equals a,t,g, or c
  misc_feature (396)..(396): n equals a,t,g, or c
gcaaaggaggacctggacaaatgtgcccacacatcctctcaggcgaggagaatggacaggagagagaggccgatccgtgttccccgtgttgctatgtaaggaggtgcgggaccgaggaacctaggtgtggacagggacaggcaaggcgggggacgaagagaaatgaaagccacatcggtggcggatgttctgaacacaactcgctcgctaccgcacgttccccgctccgcactcancggatcccgggacggcagcaggtggctcctgnacgtgcgccggctcctgcaangtgcaaagagtgcaaatgcaccttctgcaagaagagctgctgttcctgctgccccntgggctgtccaagtgtgcccatgctgcgtctgncaaggggcatcnganaantgc

SEQ ID NO: 3952 - DNA, 146 bp, Homo sapiens
  misc_feature (11)..(11): n equals a,t,g, or c
  misc_feature (71)..(71): n equals a,t,g, or c
  misc_feature (112)..(112): n equals a,t,g, or c
  misc_feature (133)..(133): n equals a,t,g, or c
  misc_feature (137)..(137): n equals a,t,g, or c
  misc_feature (140)..(140): n equals a,t,g, or c
gaaaacatacnggagtctgtctctgctatggaatgccccatggggcatctcttgtgtacttattgtttaangtttcctcaaactgtgatttttctgaacacaataaactatnttgatgaaaaaaaaaattaantaanaantaaaaa

SEQ ID NO: 3953 - DNA, 353 bp, Homo sapiens
  misc_feature (4)..(5): n equals a,t,g, or c
  misc_feature (11)..(11): n equals a,t,g, or c
  misc_feature (14)..(14): n equals a,t,g, or c
  misc_feature (22)..(22): n equals a,t,g, or c
  misc_feature (31)..(31): n equals a,t,g, or c
  misc_feature (53)..(53): n equals a,t,g, or c
  misc_feature (55)..(55): n equals a,t,g, or c
  misc_feature (75)..(75): n equals a,t,g, or c
  misc_feature (86)..(86): n equals a,t,g, or c
  misc_feature (90)..(90): n equals a,t,g, or c
  misc_feature (118)..(118): n equals a,t,g, or c
  misc_feature (145)..(145): n equals a,t,g, or c
  misc_feature (185)..(185): n equals a,t,g, or c
  misc_feature (196)..(196): n equals a,t,g, or c
  misc_feature (205)..(205): n equals a,t,g, or c
  misc_feature (217)..(217): n equals a,t,g, or c
  misc_feature (234)..(234): n equals a,t,g, or c
  misc_feature (273)..(273): n equals a,t,g, or c
  misc_feature (294)..(294): n equals a,t,g, or c
  misc_feature (307)..(307): n equals a,t,g, or c
  misc_feature (341)..(341): n equals a,t,g, or c
  misc_feature (353)..(353): n equals a,t,g, or c
gaanntgaaanctntctgacangaaatagtnctggatggtttgaagatctgcngngaaaaataagtgtgcacctnagaccttcagntagncttttatttatttagaataaaaaatagnttgataacctaccagagttagtgcttntttaaaaacactccttggaaagatggggactgtcccttangaaagccatanaagtgattnccaatactttgnaattgcttttgattttnaggtcctttggaacaaatgtgtgatgttatgtctgatgntgtgttcttagagctgtgaanagtttgaaaaatntcaaggggtttatttaaatgatgaattatctggntgaaattatggn

SEQ ID NO: 3954 - DNA, 52 bp, Homo sapiens
  misc_feature (11)..(11): n equals a,t,g, or c
  misc_feature (15)..(15): n equals a,t,g, or c
  misc_feature (20)..(20): n equals a,t,g, or c
  misc_feature (30)..(30): n equals a,t,g, or c
  misc_feature (34)..(34): n equals a,t,g, or c
ggacatacacngccnacagnctgcgggcgntganacctatactgaccctgtg

SEQ ID NO: 3955 - DNA, 456 bp, Homo sapiens
  misc_feature (3)..(3): n equals a,t,g, or c
  misc_feature (19)..(20): n equals a,t,g, or c
  misc_feature (25)..(25): n equals a,t,g, or c
  misc_feature (80)..(80): n equals a,t,g, or c
  misc_feature (214)..(214): n equals a,t,g, or c
  misc_feature (438)..(438): n equals a,t,g, or c
  misc_feature (450)..(450): n equals a,t,g, or c
  misc_feature (452)..(452): n equals a,t,g, or c
  misc_feature (454)..(455): n equals a,t,g, or c
agntgttacgcccgcaggnnccggnccggaattcccgggtcgacccacgcgtccgagctattacactagccttttagatntactgtagacatctgtgaaaaattatgaattggcctttattacaagactttgttttcaaacctttatttctgttccaatgtaaatgataatcgaactttactggagaaaagacccatgattttaaatatagttntatgtcagcttatagttttacatcagagtccatatagctgttagaaagttatgtgctactgacaaaataacagttggcaaaacataagacaaaatctacaattttattcacaggatctaactaatgtaccattattattaccaattgatctcagtgtgctataattttggtaacaatttctttgatatgcttttaaaaatatatatatatttacaaataaaggnataatttttaanananna

SEQ ID NO: 3956 - DNA, 146 bp, Homo sapiens
  misc_feature (2)..(3): n equals a,t,g, or c
  misc_feature (6)..(6): n equals a,t,g, or c
  misc_feature (17)..(17): n equals a,t,g, or c
  misc_feature (91)..(91): n equals a,t,g, or c
  misc_feature (130)..(130): n equals a,t,g, or c
  misc_feature (134)..(134): n equals a,t,g, or c
  misc_feature (140)..(141): n equals a,t,g, or c
cnnctnatggaatctcnactataggttaagctggtacgcctgcaggtaccggtccggaattcccgggtcgacccacgcgtccgtgaaattnagttatagtttaatctttgtaatctcactaatgggtttnatanatgaanncggaa

SEQ ID NO: 3957 - DNA, 68 bp, Homo sapiens
  misc_feature (15)..(15): n equals a,t,g, or c
  misc_feature (24)..(24): n equals a,t,g, or c
  misc_feature (27)..(27): n equals a,t,g, or c
  misc_feature (29)..(29): n equals a,t,g, or c
  misc_feature (62)..(62): n equals a,t,g, or c
gcaaagagggcttcnaaaactacngancngtaagggcgggactcaccatagaatgcaatgantatgtg

SEQ ID NO: 3958 - DNA, 335 bp, Homo sapiens
  misc_feature (271)..(271): n equals a,t,g, or c
  misc_feature (276)..(276): n equals a,t,g, or c
  misc_feature (314)..(314): n equals a,t,g, or c
  misc_feature (330)..(330): n equals a,t,g, or c
  misc_feature (334)..(334): n equals a,t,g, or c
gctgcctccatatcgtgagttgctagttggccaccttgatttgctgcccttcctggagcagctgtactgctgggcaccctgggtccaaacccacctccatctggacctgctaggtgccattgtccaggcctttcctccagacagctctttgttagacagtgcttcccatgctgactgctgtccccagaagcggaggctccatcacaggcccccatgcccagcttgcccttttgtgcaggcccagtggagcaggcagcaagtaaaggagganctggncacctggctgggaccattgacactggctgagctacagngctggctgggcattgntggng

SEQ ID NO: 3959 - DNA, 179 bp, Homo sapiens
  misc_feature (2)..(2): n equals a,t,g, or c
  misc_feature (6)..(6): n equals a,t,g, or c
  misc_feature (25)..(25): n equals a,t,g, or c
  misc_feature (68)..(68): n equals a,t,g, or c
  misc_feature (94)..(94): n equals a,t,g, or c
  misc_feature (145)..(145): n equals a,t,g, or c
  misc_feature (163)..(163): n equals a,t,g, or c
  misc_feature (169)..(169): n equals a,t,g, or c
  misc_feature (171)..(171): n equals a,t,g, or c
cnttcnttgggcctttaatctgccnatccattcatgatcattggaaggcctaatatatgccaagtctnacatggtatgcattgagacatacganagactgctatacctcaataagtattgaaaatccattattacccataagggncatcttaattcattttanggaatnanattcatgg

SEQ ID NO: 3960 - DNA, 104 bp, Homo sapiens
  misc_feature (1)..(1): n equals a,t,g, or c
  misc_feature (27)..(27): n equals a,t,g, or c
  misc_feature (49)..(49): n equals a,t,g, or c
  misc_feature (76)..(76): n equals a,t,g, or c
  misc_feature (93)..(93): n equals a,t,g, or c
  misc_feature (104)..(104): n equals a,t,g, or c
ntaggcctactactaaaggtggaagtnttagaggttaaaatggtgttcntaaattagctgtatacacaatcattgncatttactttatgaaanggtaggagatn

SEQ ID NO: 3961 - DNA, 314 bp, Homo sapiens
  misc_feature (7)..(7): n equals a,t,g, or c
  misc_feature (312)..(312): n equals a,t,g, or c
  misc_feature (314)..(314): n equals a,t,g, or c
gccccantggaccacctccctttccctgaggcagggagcccagagctgggtctgctggtgcctggcctgcggcagctgcttacacaacagtgcatcagcaggtgctcccagggcttctgggctcctgtgaccgctgcctccccagtgctgcatcgcccgtgggcacccaggggatggctgtctggaatagaggcagcagggtcctgcacgctgttcatgtactatccgtccgtggggcgtgcagaacgtgctgccggctcttcctggctgcagccttctccgacccagtcctccagtggagggggggatccntn

SEQ ID NO: 3962 - DNA, 157 bp, Homo sapiens
  misc_feature (147)..(148): n equals a,t,g, or c
  misc_feature (150)..(150): n equals a,t,g, or c
  misc_feature (153)..(154): n equals a,t,g, or c
ggataattatggataatctttgatcctacaccagaactctgcaaattgtttttttaaaggttaattacaatgtggaatttgaaactatatcaatgaacttgtactcttacattaaaagtcattgctttaccttcaaaaaaaaaaaannanatnnaaa

SEQ ID NO: 3963 - DNA, 130 bp, Homo sapiens
  misc_feature (4)..(4): n equals a,t,g, or c
  misc_feature (12)..(12): n equals a,t,g, or c
  misc_feature (55)..(55): n equals a,t,g, or c
  misc_feature (61)..(61): n equals a,t,g, or c
  misc_feature (83)..(83): n equals a,t,g, or c
  misc_feature (102)..(102): n equals a,t,g, or c
  misc_feature (124)..(124): n equals a,t,g, or c
caanaacctcanactttaggtaaaatcggtcatcaagcataatcccactgtgatnattcanggtccaattaaaaatttgacgnatgattccaaatgtgacgngaatgagatcataaaggtctantatctc

SEQ ID NO: 3964 - DNA, 392 bp, Homo sapiens
  misc_feature (194)..(194): n equals a,t,g, or c
  misc_feature (359)..(359): n equals a,t,g, or c
  misc_feature (375)..(375): n equals a,t,g, or c
  misc_feature (383)..(383): n equals a,t,g, or c
  misc_feature (386)..(386): n equals a,t,g, or c
  misc_feature (389)..(389): n equals a,t,g, or c
gccagcctctctgtggtacatcgtgtattgcacggagtcccttttcttccagagatcttccttgggagccttttcctcccgcgcgtcccgtctcggtgccgccttttgctcccgcgcgtcccgtctctccacgccgacttttcctcccgcgcgtcccgtctctccacgccgccttttcctcccgcgcgtcccgnctccccgccgccttttgctcccgcgcgtcccgtctccgcgccgacttttcctcccgcgcgtcccgtgtccatgtctcctccttgtaacatctggagagatttccttcactttgtgcctttttctccatcgattgatttctttgttttacgtttaacaattaaagncttaatttctaagaanaaaaaaantancanaaa

SEQ ID NO: 3965 - DNA, 138 bp, Homo sapiens
  misc_feature (5)..(5): n equals a,t,g, or c
  misc_feature (14)..(14): n equals a,t,g, or c
  misc_feature (56)..(56): n equals a,t,g, or c
  misc_feature (67)..(67): n equals a,t,g, or c
  misc_feature (74)..(74): n equals a,t,g, or c
  misc_feature (101)..(101): n equals a,t,g, or c
  misc_feature (108)..(108): n equals a,t,g, or c
gggtncaatatttngttcataagactgaactcctgatggtgacttctacaacttgnatattcagacncgaagangaccaaatattcatgaaatactggctntgtgctnatatctcctataagtccgaatatgctgtga

SEQ ID NO: 3966 - DNA, 221 bp, Homo sapiens
  misc_feature (1)..(1): n equals a,t,g, or c
  misc_feature (30)..(30): n equals a,t,g, or c
  misc_feature (74)..(74): n equals a,t,g, or c
  misc_feature (77)..(77): n equals a,t,g, or c
  misc_feature (81)..(81): n equals a,t,g, or c
  misc_feature (117)..(117): n equals a,t,g, or c
  misc_feature (153)..(153): n equals a,t,g, or c
  misc_feature (174)..(174): n equals a,t,g, or c
  misc_feature (182)..(182): n equals a,t,g, or c
  misc_feature (192)..(193): n equals a,t,g, or c
natagttgatacaagaattgtgaactcgtntcatagatatacatacgacatattggtcgagatgctctaactgngcnatanggttgcactattgcagtgatcttgactagagtttanggggaagtaattgagatttcatcggaatgcacgtanctatattgttacatggagaantctagtgntccttgaacnnttgtatcgcccccattaaaaaaaggaat

SEQ ID NO: 3967 - DNA, 116 bp, Homo sapiens
  misc_feature (5)..(5): n equals a,t,g, or c
  misc_feature (40)..(40): n equals a,t,g, or c
  misc_feature (45)..(45): n equals a,t,g, or c
  misc_feature (68)..(68): n equals a,t,g, or c
  misc_feature (86)..(86): n equals a,t,g, or c
  misc_feature (112)..(112): n equals a,t,g, or c
ttacncaagtggggggagaataaatgttgtcaggtcctgngtctntcggccattatgaacatgtcatngcgtgcctcatgtaccangagtggaaacacaatcacctgcctanttca

SEQ ID NO: 3968 - DNA, 126 bp, Homo sapiens
  misc_feature (1)..(1): n equals a,t,g, or c
  misc_feature (19)..(19): n equals a,t,g, or c
  misc_feature (43)..(43): n equals a,t,g, or c
  misc_feature (66)..(66): n equals a,t,g, or c
  misc_feature (79)..(79): n equals a,t,g, or c
  misc_feature (105)..(105): n equals a,t,g, or c
  misc_feature (116)..(116): n equals a,t,g, or c
ngaaagctaaaaatgctantgagcggcatgatacgtgtgacanttaacatgaagggttccacctgncaaactgtcatgnaattcccgagtggaccctttgccatntttgttgggcncaacttgact

SEQ ID NO: 3969 - DNA, 250 bp, Homo sapiens
  misc_feature (164)..(164): n equals a,t,g, or c
  misc_feature (210)..(210): n equals a,t,g, or c
  misc_feature (219)..(219): n equals a,t,g, or c
  misc_feature (240)..(240): n equals a,t,g, or c
  misc_feature (250)..(250): n equals a,t,g, or c
gcaaaaccatatttaatttccaggttatcttgaacaagggaaggaaagatgttaaagctttgttttcatggcctgtgtgaagctgttacaggatgtttgttgccagaaaaggctggatggttttaagaagatgggtctttctcttccctcttatgcttcaattntattttgtaccccacagcttctcttgaacagcctcttctgatgttnctaggtagnaggaaccttacaaatacattnatatatatgn

SEQ ID NO: 3970 - DNA, 134 bp, Homo sapiens
  misc_feature (4)..(4): n equals a,t,g, or c
  misc_feature (6)..(6): n equals a,t,g, or c
  misc_feature (68)..(68): n equals a,t,g, or c
  misc_feature (70)..(70): n equals a,t,g, or c
  misc_feature (93)..(93): n equals a,t,g, or c
  misc_feature (132)..(132): n equals a,t,g, or c
  misc_feature (134)..(134): n equals a,t,g, or c
gaantntgctcaatgatgggcctgtctaagattaccatagaccatgcccgcatctatggtggacccangnttacacaggaggacccgtaattnaattgtcatataaggactttaatggcttaaaaaaatttngn

SEQ ID NO: 3971 - DNA, 56 bp, Homo sapiens
  misc_feature (19)..(19): n equals a,t,g, or c
  misc_feature (26)..(26): n equals a,t,g, or c
  misc_feature (37)..(37): n equals a,t,g, or c
  misc_feature (43)..(43): n equals a,t,g, or c
  misc_feature (52)..(52): n equals a,t,g, or c
gataaaatgtacacccctnaaaaaanaaaataaaaanaaaaangtattaatnaaaa

SEQ ID NO: 3972 - DNA, 150 bp, Homo sapiens
  misc_feature (10)..(10): n equals a,t,g, or c
  misc_feature (121)..(121): n equals a,t,g, or c
  misc_feature (128)..(128): n equals a,t,g, or c
  misc_feature (132)..(132): n equals a,t,g, or c
  misc_feature (139)..(139): n equals a,t,g, or c
  misc_feature (149)..(149): n equals a,t,g, or c
gcgccgcccncactcgccgcaggaccggcccgcccggctcccggggtgcgccctcctcggtcccgcgccctccgggctcgcagggacgtctcctccctcccggctcgcggtcccgcccggnccggacnccgnccagagncccagcgcgnc

SEQ ID NO: 3973 - DNA, 216 bp, Homo sapiens
  misc_feature (24)..(25): n equals a,t,g, or c
  misc_feature (27)..(27): n equals a,t,g, or c
  misc_feature (48)..(48): n equals a,t,g, or c
  misc_feature (77)..(77): n equals a,t,g, or c
  misc_feature (108)..(108): n equals a,t,g, or c
  misc_feature (179)..(179): n equals a,t,g, or c
  misc_feature (193)..(193): n equals a,t,g, or c
  misc_feature (210)..(212): n equals a,t,g, or c
gtgcgacaattgcaagttaattanncncgggggaaaaggataggacanatccctggaccggtagagactaggccacnccattgcatagtcttgtatgaagctcgcaanacttcgttcgctaggcgagaacaagtggacgcctcgttacacatgtacagcaaaatgactgctggtcaagngatgaataagtgtntgagtaacgcttgctgnnnacga

SEQ ID NO: 3974 - DNA, 149 bp, Homo sapiens
  misc_feature (1)..(1): n equals a,t,g, or c
  misc_feature (9)..(9): n equals a,t,g, or c
  misc_feature (39)..(39): n equals a,t,g, or c
  misc_feature (44)..(44): n equals a,t,g, or c
  misc_feature (46)..(46): n equals a,t,g, or c
  misc_feature (116)..(116): n equals a,t,g, or c
  misc_feature (129)..(129): n equals a,t,g, or c
  misc_feature (134)..(134): n equals a,t,g, or c
  misc_feature (144)..(144): n equals a,t,g, or c
  misc_feature (147)..(147): n equals a,t,g, or c
ntacaaaangggatatatattatgaaatggtcatttttntgaananaatattttgcttgaaatgcataggactgaaagagatttgtatgttgttgattaatgtaacttcatactgnaacttttaaaaanatttnatctgtaaanccntg

SEQ ID NO: 3975 - DNA, 139 bp, Homo sapiens
  misc_feature (2)..(2): n equals a,t,g, or c
  misc_feature (15)..(15): n equals a,t,g, or c
  misc_feature (34)..(35): n equals a,t,g, or c
  misc_feature (88)..(88): n equals a,t,g, or c
  misc_feature (108)..(108): n equals a,t,g, or c
  misc_feature (121)..(121): n equals a,t,g, or c
  misc_feature (129)..(129): n equals a,t,g, or c
  misc_feature (137)..(137): n equals a,t,g, or c
tnaatgtttaaatanttgagggatgtgcctttcnncttatgtcttgctgtatgtagtagtatgtagtagtagcatgattatatgaagnttcaatatgcattaactaangggatactcaaangtaatatngaagaaanac

SEQ ID NO: 3976 - DNA, 117 bp, Homo sapiens
  misc_feature (1)..(1): n equals a,t,g, or c
  misc_feature (15)..(15): n equals a,t,g, or c
  misc_feature (36)..(36): n equals a,t,g, or c
  misc_feature (43)..(43): n equals a,t,g, or c
  misc_feature (60)..(60): n equals a,t,g, or c
  misc_feature (113)..(113): n equals a,t,g, or c
  misc_feature (117)..(117): n equals a,t,g, or c
ngggtgactctttgnccatgtgaggtggtatattcncaggatnctgctggcaagagatgntattcctgcccagtctatcaaatgatctctgattctttacgtaatgggggctnattn

SEQ ID NO: 3977 - DNA, 104 bp, Homo sapiens
  misc_feature (38)..(38): n equals a,t,g, or c
  misc_feature (60)..(60): n equals a,t,g, or c
  misc_feature (66)..(66): n equals a,t,g, or c
  misc_feature (72)..(72): n equals a,t,g, or c
  misc_feature (85)..(85): n equals a,t,g, or c
gacttgatgaatgagagacaagaaagatagttgcagantcatgtgctcatgaatgcatanaacacntatcanaagcaaaaatggnttgaagactttgaaatact

SEQ ID NO: 3978 - DNA, 378 bp, Homo sapiens
  misc_feature (368)..(368): n equals a,t,g, or c
  misc_feature (372)..(372): n equals a,t,g, or c
  misc_feature (374)..(376): n equals a,t,g, or c
gattttaagctatttgagattgcttttgggaagatcactagatttatggaggaattagtcacaaatgacttgtagaaaatactgtcatatagttcatttcatcattttctgttgcaggaagccactccaccacagaatgctaatatgccagtggtacccagtacctcttgtatataggttattgcaaatattgttctgaaatgcttaacttcagaattacattttttaaagtaaataattgttttaaatctattttgtaaagatataaagtacaatagaatttctggagtacagattaaactatttgcactaacacacgtgacgtgcatgatttaataaaataactttactctccctaaaaaaaaaanaaanannnaa

SEQ ID NO: 3979 - DNA, 55 bp, Homo sapiens
  misc_feature (36)..(36): n equals a,t,g, or c
  misc_feature (45)..(46): n equals a,t,g, or c
  misc_feature (49)..(49): n equals a,t,g, or c
  misc_feature (51)..(51): n equals a,t,g, or c
ggtttaaaaacatttattggctgggtgtggtatatnagatttatnnaantngatg

SEQ ID NO: 3980 - DNA, 84 bp, Homo sapiens
  misc_feature (15)..(15): n equals a,t,g, or c
  misc_feature (18)..(18): n equals a,t,g, or c
  misc_feature (34)..(34): n equals a,t,g, or c
  misc_feature (36)..(36): n equals a,t,g, or c
  misc_feature (67)..(67): n equals a,t,g, or c
gaaacaatacataanttnattgaatctataactngntttaagttgatataatgcattgtattatatnttgaaacagaataaaag

SEQ ID NO: 3981 - DNA, 92 bp, Homo sapiens
  misc_feature (6)..(6): n equals a,t,g, or c
  misc_feature (30)..(30): n equals a,t,g, or c
  misc_feature (42)..(43): n equals a,t,g, or c
  misc_feature (53)..(53): n equals a,t,g, or c
gatttncttgagtcttgtacatagaaaggnagctgtcaattnnaaatcagttnttcagattttactgtggaagcatatttaatgcacacatt

SEQ ID NO: 3982 - DNA, 238 bp, Homo sapiens
ggcttttcaatctatttaaagtacagctctttttcccttatttctgattgtttactctgccattttcctttaattgtcttctatatttgttgaatgcttagcttactaattttcactttaaaaagaaagcatataaggttacttatatgatttttcctctgagaagtgctttaatatcatggattccattatgcaatattttcattattataatttctaaataatccaaaaaaaaaaa

SEQ ID NO: 3983 - DNA, 152 bp, Homo sapiens
  misc_feature (2)..(2): n equals a,t,g, or c
  misc_feature (24)..(25): n equals a,t,g, or c
  misc_feature (30)..(30): n equals a,t,g, or c
  misc_feature (41)..(41): n equals a,t,g, or c
  misc_feature (120)..(120): n equals a,t,g, or c
  misc_feature (132)..(132): n equals a,t,g, or c
  misc_feature (142)..(143): n equals a,t,g, or c
  misc_feature (148)..(148): n equals a,t,g, or c
gnaaaccccaatgggaaataccannagatnatacgcaaagntggaccggtccggaattcccgggtcgacccacgcgtccgggggcgggggtctatacttcatacccgccctaggccttgntgatgaaagttncacacagaannagcanctac

SEQ ID NO: 3984 - DNA, 155 bp, Homo sapiens
  misc_feature (23)..(25): n equals a,t,g, or c
  misc_feature (28)..(28): n equals a,t,g, or c
  misc_feature (52)..(52): n equals a,t,g, or c
  misc_feature (121)..(121): n equals a,t,g, or c
  misc_feature (128)..(129): n equals a,t,g, or c
  misc_feature (132)..(132): n equals a,t,g, or c
  misc_feature (150)..(150): n equals a,t,g, or c
cacacatgccactatgagctttnnnacnccagctgtgaagagactctgtgangcttgcgtactgtttgcagacctctctctgacatggccttggcaggctgttggaaggcatctagtggangccgatnnctncgaccactcataccttcncatgc

SEQ ID NO: 3985 - DNA, 100 bp, Homo sapiens
  misc_feature (10)..(10): n equals a,t,g, or c
  misc_feature (40)..(40): n equals a,t,g, or c
  misc_feature (43)..(43): n equals a,t,g, or c
  misc_feature (62)..(62): n equals a,t,g, or c
  misc_feature (74)..(74): n equals a,t,g, or c
ctggaactgngctatcccctatgagggctcaatggaactngangtctaggatgcagcctgtncacttgcgaccntgtttagagggggtgtacttgaattt

SEQ ID NO: 3986 - DNA, 67 bp, Homo sapiens
  misc_feature (7)..(7): n equals a,t,g, or c
  misc_feature (25)..(25): n equals a,t,g, or c
  misc_feature (48)..(49): n equals a,t,g, or c
  misc_feature (55)..(55): n equals a,t,g, or c
gaacgangggacgtaacggaagcangttggaacccgttgccgtcgccnngaaccnggggaaccagcg

SEQ ID NO: 3987 - DNA, 386 bp, Homo sapiens
  misc_feature (6)..(6): n equals a,t,g, or c
  misc_feature (353)..(353): n equals a,t,g, or c
  misc_feature (367)..(367): n equals a,t,g, or c
  misc_feature (373)..(373): n equals a,t,g, or c
  misc_feature (381)..(381): n equals a,t,g, or c
  misc_feature (384)..(384): n equals a,t,g, or c
gcggangcgtgggcggacgcgtgggcggacgcgtgggcggacgcgtgggaaagagtttaagtgtctaacaaacttaaagctactgtagtacctaaaaagtcagtgttgtacatagcataaaaactctgcagagaagtattcccaataaggaaatagcattgaaatgttaaatacaatttctgaaagttatgttttttttctatcatctggtataccattgctttatttttataaattattttctcattgccattggaatagatatctcagattgtgtagatatgctatttaaataatttatcaggaaatactgcctgtagaagttagtatttctatttttatataatgtttgnacactgaatttaanaattgntggttttntcntt

SEQ ID NO: 3988 - DNA, 273 bp, Homo sapiens
  misc_feature (254)..(254): n equals a,t,g, or c
  misc_feature (257)..(257): n equals a,t,g, or c
  misc_feature (260)..(260): n equals a,t,g, or c
  misc_feature (271)..(271): n equals a,t,g, or c
  misc_feature (273)..(273): n equals a,t,g, or c
ggctgcctgtacacctgctgcctacatcttcttggcaacaaagttacctgccacaggctctgctgagcctagttcctggtcagtaataactgaacagtgcattttggctttggatgtgtctgtggacaagcttgctgagtttctctaccatattctgagcacacggtctcttttgttctaacttcagcttcactgacactgggttgagcactactgtatgtggagggtttggtgattgggaatggatggggganagngangaggacacacnan

SEQ ID NO: 3989 - DNA, 156 bp, Homo sapiens
  misc_feature (92)..(92): n equals a,t,g, or c
  misc_feature (107)..(107): n equals a,t,g, or c
  misc_feature (132)..(132): n equals a,t,g, or c
  misc_feature (146)..(146): n equals a,t,g, or c
  misc_feature (156)..(156): n equals a,t,g, or c
gtctgaaaggaggaattttcattttcctttaaagtgaaaaggtaaaaactgcatttactaaaccaggccggtgggggctctgtgagcccctntgcacaggaagcctnagagactctgcatggtgttcccggngcatcctggccaangtgggagaan

SEQ ID NO: 3990 - DNA, 59 bp, Homo sapiens
  misc_feature (39)..(39): n equals a,t,g, or c
  misc_feature (49)..(49): n equals a,t,g, or c
  misc_feature (54)..(55): n equals a,t,g, or c
  misc_feature (57)..(57): n equals a,t,g, or c
gctcaaggtctcctccttccctccccccccccccccgtntatctttcantgtgnntnta

SEQ ID NO: 3991 - DNA, 82 bp, Homo sapiens
  misc_feature (11)..(11): n equals a,t,g, or c
  misc_feature (45)..(45): n equals a,t,g, or c
  misc_feature (64)..(64): n equals a,t,g, or c
  misc_feature (80)..(81): n equals a,t,g, or c
ggcaggggggncgctgcaggccttaggggaagaaccacgggacanggtagaagacaaacgttgnattggggcttcccttnna

SEQ ID NO: 3992 - DNA, 296 bp, Homo sapiens
  misc_feature (296)..(296): n equals a,t,g, or c
gcagatacttagatgtttattgatatgagactatgtggttaaaaaacccaagtatgtccatgtgtttcttataaggtacacttgaaactagtgagtgtttgtcacatttcactttcatggtatataaaatgcagtttgcatatataacttgaatatctggtactagttttttcacgcctgcaatcttggagtctaggttgccttgctctcctatttttaaataagtgaaatttgggagattgtaaaatctgtaaagtttgttttgtgaaaataaaatgttcacagtagaaaaaaan

SEQ ID NO: 3993 - DNA, 133 bp, Homo sapiens
  misc_feature (4)..(4): n equals a,t,g, or c
  misc_feature (13)..(13): n equals a,t,g, or c
  misc_feature (17)..(17): n equals a,t,g, or c
  misc_feature (77)..(77): n equals a,t,g, or c
  misc_feature (90)..(90): n equals a,t,g, or c
  misc_feature (105)..(105): n equals a,t,g, or c
  misc_feature (109)..(109): n equals a,t,g, or c
  misc_feature (115)..(115): n equals a,t,g, or c
tctngaaaagccntgcnggacttccccaggtacccctccggaattcccgggtcgacccacgcgtccgccgcctcttnggggctttaggcnggcttgcccgcgctngggnttcccncgtgacagtggtgtgtgg

SEQ ID NO: 3994 - DNA, 452 bp, Homo sapiens
  misc_feature (7)..(8): n equals a,t,g, or c
  misc_feature (14)..(14): n equals a,t,g, or c
  misc_feature (27)..(27): n equals a,t,g, or c
  misc_feature (100)..(100): n equals a,t,g, or c
  misc_feature (295)..(295): n equals a,t,g, or c
  misc_feature (302)..(302): n equals a,t,g, or c
  misc_feature (326)..(326): n equals a,t,g, or c
  misc_feature (337)..(337): n equals a,t,g, or c
  misc_feature (369)..(369): n equals a,t,g, or c
  misc_feature (406)..(406): n equals a,t,g, or c
  misc_feature (422)..(422): n equals a,t,g, or c
  misc_feature (429)..(429): n equals a,t,g, or c
  misc_feature (442)..(442): n equals a,t,g, or c
gaagganncttctnttggaaagccctnactatagggtaagctggtacgcctgcaggtaccggtccggaattcccgggtcgacccacgcgtccgggtgganggataggagaaggtcctgagtcagtgctgggtggagggataggagaaggtcctgagtgtggactgggtggagggataggagaaggtcctgagtgaggactgcatggagggataggagaaggtcctgagtgagtgcttggtggagggataggagaaggtcctgagtcagtgctgggtggagggataggagaaagtnctgagtnaagtgctgggtggagggatagganaaggtcctgantgtggactgggtgaaagggataggagaaggtnctgagtgaggactggggtggagggataggagaaagtnctgagtgaggacttgngtggagngataggaaaaggntcttgaatga

SEQ ID NO: 3995 - DNA, 316 bp, Homo sapiens
  misc_feature (1)..(1): n equals a,t,g, or c
  misc_feature (44)..(44): n equals a,t,g, or c
  misc_feature (74)..(74): n equals a,t,g, or c
  misc_feature (79)..(80): n equals a,t,g, or c
  misc_feature (107)..(107): n equals a,t,g, or c
  misc_feature (109)..(109): n equals a,t,g, or c
  misc_feature (120)..(120): n equals a,t,g, or c
  misc_feature (156)..(156): n equals a,t,g, or c
  misc_feature (160)..(160): n equals a,t,g, or c
  misc_feature (165)..(165): n equals a,t,g, or c
  misc_feature (176)..(176): n equals a,t,g, or c
  misc_feature (181)..(181): n equals a,t,g, or c
  misc_feature (187)..(187): n equals a,t,g, or c
  misc_feature (203)..(203): n equals a,t,g, or c
  misc_feature (212)..(212): n equals a,t,g, or c
  misc_feature (252)..(252): n equals a,t,g, or c
  misc_feature (278)..(278): n equals a,t,g, or c
  misc_feature (307)..(308): n equals a,t,g, or c
  misc_feature (312)..(312): n equals a,t,g, or c
naccggtccggaattcccgggtcgacccacgcgtcttgcaaaantaaaggggctacagaaacactgatttttangctgnnccctcttgggcttcatgcaaagacaantntgtgtaaatgnacagaagactctgatttggaaatatgaaaatcagtncatncttgntataaaaaatnttttnacaatngtaattatattgaagntcatattgngtaaaataactcatttaataaaatagaactttgattcacngacaaaaaaaaaaaaaaagggctggncagctctaaaggatccaagcttacgtacnngtgnatgc

SEQ ID NO: 3996 - DNA, 57 bp, Homo sapiens
  misc_feature (4)..(4): n equals a,t,g, or c
  misc_feature (12)..(12): n equals a,t,g, or c
  misc_feature (40)..(40): n equals a,t,g, or c
  misc_feature (44)..(44): n equals a,t,g, or c
  misc_feature (49)..(49): n equals a,t,g, or c
gctnaaggtctnctccttccctccccccccccccccgttntatntttangacaataa

SEQ ID NO: 3997 - DNA, 100 bp, Homo sapiens
  misc_feature (6)..(6): n equals a,t,g, or c
  misc_feature (41)..(41): n equals a,t,g, or c
  misc_feature (62)..(62): n equals a,t,g, or c
  misc_feature (86)..(86): n equals a,t,g, or c
  misc_feature (94)..(94): n equals a,t,g, or c
gcaccnaccggtccggaattcccgggtcgacccacgcgtcntgaggttttaagatgccgcantaggattggatgaatgggaaattntgcttgcnagcttt

SEQ ID NO: 3998 - DNA, 108 bp, Homo sapiens
  misc_feature (2)..(2): n equals a,t,g, or c
  misc_feature (21)..(21): n equals a,t,g, or c
  misc_feature (29)..(29): n equals a,t,g, or c
  misc_feature (59)..(59): n equals a,t,g, or c
  misc_feature (64)..(64): n equals a,t,g, or c
  misc_feature (102)..(102): n equals a,t,g, or c
antatctaagacacccagacncatgcggnctgtcccaacagctgccgcacactaaatgntgaangagacggcaccctgaccaagtcagttacagaaccgctnagaatg

SEQ ID NO: 3999 - DNA, 104 bp, Homo sapiens
  misc_feature (55)..(55): n equals a,t,g, or c
  misc_feature (58)..(58): n equals a,t,g, or c
  misc_feature (65)..(65): n equals a,t,g, or c
  misc_feature (80)..(80): n equals a,t,g, or c
  misc_feature (91)..(91): n equals a,t,g, or c
tgagtctatgctaatgaagcctgtaacgccttgcaggcccattgggaaggagaanggncccagancatctgttaccccanaaacaggggcnctatatttgagcc

SEQ ID NO: 4000 - DNA, 85 bp, Homo sapiens
  misc_feature (5)..(5): n equals a,t,g, or c
  misc_feature (10)..(10): n equals a,t,g, or c
  misc_feature (46)..(46): n equals a,t,g, or c
  misc_feature (70)..(70): n equals a,t,g, or c
  misc_feature (73)..(73): n equals a,t,g, or c
gaagnccagnacaccattcttgtccttacccagtttcctcgccctncacccctccagcttcatgctcagngtngtgcttaataaa

SEQ ID NO: 4001 - DNA, 66 bp, Homo sapiens
  misc_feature (9)..(9): n equals a,t,g, or c
  misc_feature (15)..(15): n equals a,t,g, or c
  misc_feature (60)..(60): n equals a,t,g, or c
  misc_feature (63)..(63): n equals a,t,g, or c
gcgccaagntgtccnagctggaggtcgtcctgcatcagacccaacaatgacatggcccgncanctt

SEQ ID NO: 4002 - DNA, 128 bp, Homo sapiens
  misc_feature (10)..(10): n equals a,t,g, or c
  misc_feature (33)..(33): n equals a,t,g, or c
  misc_feature (61)..(61): n equals a,t,g, or c
  misc_feature (81)..(81): n equals a,t,g, or c
  misc_feature (83)..(83): n equals a,t,g, or c
  misc_feature (103)..(103): n equals a,t,g, or c
ggaacccccntatagggttgggggacgctcccnggcgccggacggccacaccgggacggcngacgcgaacggcgcgtccantnctcaccccgcgacgagggcntgtgcgggcagcacccagggaggtg

SEQ ID NO: 4003 - DNA, 144 bp, Homo sapiens
  misc_feature (3)..(3): n equals a,t,g, or c
  misc_feature (26)..(26): n equals a,t,g, or c
  misc_feature (35)..(35): n equals a,t,g, or c
  misc_feature (128)..(129): n equals a,t,g, or c
  misc_feature (136)..(136): n equals a,t,g, or c
  misc_feature (138)..(138): n equals a,t,g, or c
  misc_feature (144)..(144): n equals a,t,g, or c
tcnccccctataggtttgcgggacgncccggaatncccgggtcgacccacgcgtccgacactcttgggcttacggttgccaggaagcctttcccctccagaagacttgcctgttagggacctcgcctnntggggancntccctn

SEQ ID NO: 4004 - DNA, 384 bp, Homo sapiens
  misc_feature (14)..(14): n equals a,t,g, or c
  misc_feature (82)..(82): n equals a,t,g, or c
  misc_feature (114)..(114): n equals a,t,g, or c
  misc_feature (151)..(154): n equals a,t,g, or c
  misc_feature (157)..(157): n equals a,t,g, or c
  misc_feature (168)..(168): n equals a,t,g, or c
  misc_feature (231)..(231): n equals a,t,g, or c
  misc_feature (240)..(240): n equals a,t,g, or c
  misc_feature (269)..(269): n equals a,t,g, or c
  misc_feature (283)..(283): n equals a,t,g, or c
  misc_feature (292)..(292): n equals a,t,g, or c
  misc_feature (323)..(323): n equals a,t,g, or c
  misc_feature (337)..(337): n equals a,t,g, or c
  misc_feature (353)..(353): n equals a,t,g, or c
  misc_feature (364)..(364): n equals a,t,g, or c
gctcgtgcaatggngtgcgggctggaaagattgctgcagcagggacatcgctgcctcctggcttaatacttgaacattttgnatatatttctgtgtatataattgatgtgcagnaccaatgacaaaaatatggtgtcataatagaaccagnnnngtngatcttttagntatgggctcaaagaatctattcatctctaacatgatattggaaaataatggatgaaaataggnaaaatgatngcaatgctgactgagggtcttaaaaggtnctggaaagcagtangttcatttntctaaaaactataacattctggaggagtatnttcttccttacgtnaatacttttcctgcantatttgaaatngtgggctggggagaaacagt

SEQ ID NO: 4005 - DNA, 141 bp, Homo sapiens
  misc_feature (5)..(5): n equals a,t,g, or c
  misc_feature (8)..(8): n equals a,t,g, or c
  misc_feature (22)..(22): n equals a,t,g, or c
  misc_feature (26)..(26): n equals a,t,g, or c
  misc_feature (75)..(75): n equals a,t,g, or c
  misc_feature (133)..(134): n equals a,t,g, or c
  misc_feature (140)..(141): n equals a,t,g, or c
tgacnagnggacaagatcgggntcanagaaaacgggcacgacagcaccagaacatgggggaaatacgccagattngaggaggccaagctgaatgaaaacggagacgcaggatgaagaacacactgcagaccanngagagnn

SEQ ID NO: 4006 - DNA, 516 bp, Homo sapiens
  misc_feature (311)..(311): n equals a,t,g, or c
  misc_feature (391)..(391): n equals a,t,g, or c
  misc_feature (417)..(417): n equals a,t,g, or c
  misc_feature (459)..(459): n equals a,t,g, or c
  misc_feature (465)..(465): n equals a,t,g, or c
  misc_feature (478)..(478): n equals a,t,g, or c
  misc_feature (491)..(491): n equals a,t,g, or c
gatttctaaccccctttcctcctaatatgtttatgtcataattttggctagattagtgtatacgatttacataattattactctgtaaatgctttttatgatctctgagccatgtagtatattatggctatttttctttcttatctatttgtatttttattgttattacctaaaaaaaaattttctatgtcttatcactaattcttccctaaaatttcccacaattgtgtaaacttacctcagtatattcatagatatgagacattctatcaattttaccctcttaaagatgcagagataatgcattatgnttcatcccaccatctttaatgagaagcttccatcttagattaatattagagaatgttaaaatactctgcaatcaggtaanggacgcttgaaacttcattataatgnaaaaggttttcttttaacaccataaatattttgaaccctttntggggncttgtattcatanggagtttagaatngaccctttattacctattttttaaa

SEQ ID NO: 4007 - DNA, 68 bp, Homo sapiens
  misc_feature (4)..(4): n equals a,t,g, or c
ggantaagaaaaagaaaaagaagagaaagagtcagaaggaacgtgataaagaagtaagcgatgatgag

SEQ ID NO: 4008 - DNA, 405 bp, Homo sapiens
  misc_feature (1)..(1): n equals a,t,g, or c
  misc_feature (17)..(17): n equals a,t,g, or c
  misc_feature (24)..(24): n equals a,t,g, or c
  misc_feature (33)..(33): n equals a,t,g, or c
  misc_feature (83)..(83): n equals a,t,g, or c
  misc_feature (123)..(123): n equals a,t,g, or c
  misc_feature (146)..(146): n equals a,t,g, or c
  misc_feature (151)..(151): n equals a,t,g, or c
  misc_feature (244)..(244): n equals a,t,g, or c
  misc_feature (346)..(346): n equals a,t,g, or c
  misc_feature (383)..(384): n equals a,t,g, or c
  misc_feature (388)..(388): n equals a,t,g, or c
  misc_feature (404)..(404): n equals a,t,g, or c
ncgcctcaccttggaanccttctnctataggtnaagctggtacgcctgcaggtaccggtccggaattcccgggtcgacccacncgtccgctctggtctcccagcacctggcccaggtaacagncttctgaaagcagagccaagganctgcntctctcttctcccagttctacctccccagaagccttcctccccaggtggggctgatggagcaagggtccagactaggagccttccaccccagntgtgtctggcgcccctagatctctgcaagggaggtgttacagctggatctgagccgcttgccttgtgatggtaagacaccaacctttacattcttccctgangttgtggctgacagagcctgcttggccccactcgtannccancgagctcctatatcana

SEQ ID NO: 4009 - DNA, 138 bp, Homo sapiens
  misc_feature (1)..(1): n equals a,t,g, or c
  misc_feature (3)..(3): n equals a,t,g, or c
  misc_feature (7)..(7): n equals a,t,g, or c
  misc_feature (15)..(15): n equals a,t,g, or c
  misc_feature (47)..(47): n equals a,t,g, or c
  misc_feature (119)..(119): n equals a,t,g, or c
  misc_feature (125)..(126): n equals a,t,g, or c
  misc_feature (132)..(132): n equals a,t,g, or c
ncnctanaggaaagnttcggactataggtcaagctggtacgcctgcnggtaccggtccggaattcccgggtcgacccattcgtccggatttttccttttcggatactaggggatgaatngggaanntaaagngaaaaa

SEQ ID NO: 4010 - DNA, 83 bp, Homo sapiens
  misc_feature (7)..(7): n equals a,t,g, or c
  misc_feature (33)..(33): n equals a,t,g, or c
  misc_feature (36)..(36): n equals a,t,g, or c
  misc_feature (60)..(60): n equals a,t,g, or c
  misc_feature (77)..(77): n equals a,t,g, or c
gggaatnttcaatttaaaaatgagtaaattcanggncagattgaatgccgttcagttttntggaatgaatgacattngcaggt

SEQ ID NO: 4011 - DNA, 154 bp, Homo sapiens
  misc_feature (2)..(2): n equals a,t,g, or c
  misc_feature (43)..(43): n equals a,t,g, or c
  misc_feature (49)..(49): n equals a,t,g, or c
  misc_feature (75)..(75): n equals a,t,g, or c
  misc_feature (95)..(95): n equals a,t,g, or c
  misc_feature (122)..(122): n equals a,t,g, or c
  misc_feature (135)..(135): n equals a,t,g, or c
  misc_feature (149)..(149): n equals a,t,g, or c
gncatagttacaatgcaagtaaactggatactagttcttttgncagatntgttaaatgcatgcagaataatatcntgaagagtattgattgaagnttgtgatattcatcaataaaaatgagntgataatatgcanaaaaaaaaagccantaaaa

SEQ ID NO: 4012 - DNA, 648 bp, Homo sapiens
  misc_feature (267)..(267): n equals a,t,g, or c
  misc_feature (547)..(547): n equals a,t,g, or c
  misc_feature (589)..(589): n equals a,t,g, or c
  misc_feature (602)..(603): n equals a,t,g, or c
  misc_feature (609)..(609): n equals a,t,g, or c
  misc_feature (638)..(638): n equals a,t,g, or c
gaaattatgcggctgcaccttgccaggtacaatggtaaggaaaactaaagggagatctagaaaccagcctgacatattaaagagggcttctgcagaggtgagcttagtctgaattatggaagaactttccaggcagatacaaatgcaaaggccctgcagtgtgaggagctaaccacacacaaggatggagagcagttcatagtgactggagcccagggtgcagctaaggagctggagagggggaaaggccataccaaggagagcctnatccaaagagtttggaccattaaaggattctaggaagttcaagctggagacagcaaggaagatgtattggaagtgggtgagagagggtatggaagatggttaagacactcttggagtaatcaaatgaaaaataatgaaggtagaaactaaagcagggataaaaaggatggcactgactctagattgttgagtgaaatagatggcatttggggacaatagattacagtctagggagaaggatttgagactaggataatttcccagtctcttaaatggtgangtgattggtgttgcccctgagtaccgaaaggaagggaagttnaggaatgggatcnnatttanacagttgggatattttgaatttggatgtntaaggaaccc

SEQ ID NO: 4013 - DNA, 452 bp, Homo sapiens
  misc_feature (207)..(207): n equals a,t,g, or c
  misc_feature (216)..(216): n equals a,t,g, or c
  misc_feature (232)..(232): n equals a,t,g, or c
  misc_feature (238)..(238): n equals a,t,g, or c
  misc_feature (242)..(242): n equals a,t,g, or c
  misc_feature (252)..(252): n equals a,t,g, or c
  misc_feature (293)..(293): n equals a,t,g, or c
  misc_feature (311)..(311): n equals a,t,g, or c
  misc_feature (387)..(387): n equals a,t,g, or c
  misc_feature (403)..(403): n equals a,t,g, or c
  misc_feature (437)..(437): n equals a,t,g, or c
  misc_feature (442)..(442): n equals a,t,g, or c
  misc_feature (451)..(451): n equals a,t,g, or c
gatttaaatattggctttttccagtgagctattatgtttagtgtacagtgaaaagttttaatattataggttaaaattttcttaatcgttcttttctattcgcttgccaagggtgaatgaaagaacatggctgcttctcccagactgactgaccttggcatccgcataaagcatcattgctttcaaaaatgaagggtgcttaattgntcccttttntctatattctgtaggnctcatnacancaaactgcantctacagcttcttaaaggtcagcgtgttaacctaacatatnacacagcaagaatctggntgtctgaactattttaaattaaggagccagatgtttttagtcaggctattctgaccagacttgacctaaacttccnttttattggcataacnggccaatataattcttgggccaatttggccaacnggacnagaaaaaanc

SEQ ID NO: 4014 - DNA, 180 bp, Homo sapiens
  misc_feature (165)..(165): n equals a,t,g, or c
  misc_feature (167)..(167): n equals a,t,g, or c
  misc_feature (170)..(170): n equals a,t,g, or c
  misc_feature (178)..(179): n equals a,t,g, or c
ggttgaaagtcatggaacgaataaagtgtcagatttagggttaacatttgggtctgtttgactctaaagcccatgttctttctgctactttctgttacttcttccctagtctttaacagtaatcgttcaactgtgattaaactttgcctctctggaaaaaaaaananaanaaaaaaanna

SEQ ID NO: 4015 - DNA, 527 bp, Homo sapiens
  misc_feature (451)..(451): n equals a,t,g, or c
  misc_feature (465)..(465): n equals a,t,g, or c
  misc_feature (474)..(474): n equals a,t,g, or c
  misc_feature (480)..(480): n equals a,t,g, or c
  misc_feature (486)..(486): n equals a,t,g, or c
gaatagattgaaagcctcttagtgcaggaagcaggcatcagtatcaaactgatgtcatccaatgtaattattttaagctccaggtttgtctaagtttgggtgaagaatgttcaggaacatgtttgcaacatacagttatccagcttaccctttgacagattcacccttctcatcaaaatacacagtaagcccaacctaaaaattataagtttacaaataaaggaatagaaaaacccaaaaagctaatgtacacataaaaattatcttttgctgcaataaataggtatggaaatatttgtagaattggtttaactgattttgtaaaacaaatgtcatgctattttgccatagtgagacatgcagtagttcttaaaatcacattaatagaaggcaagaacattggaatcagacttaacagatacagattcagtgataatgaccattgactaanatacttaggaactnctgagaacngatgtntactgnctccgtccaactgatgacttatgggtatagataatggattt

SEQ ID NO: 4016 - DNA, 159 bp, Homo sapiens
  misc_feature (6)..(6): n equals a,t,g, or c
  misc_feature (11)..(11): n equals a,t,g, or c
  misc_feature (50)..(50): n equals a,t,g, or c
  misc_feature (63)..(63): n equals a,t,g, or c
  misc_feature (97)..(97): n equals a,t,g, or c
  misc_feature (113)..(113): n equals a,t,g, or c
  misc_feature (133)..(133): n equals a,t,g, or c
  misc_feature (150)..(150): n equals a,t,g, or c
gggaangcccncaggtaccggtccggaattcccgggtcgacccacgcgtncggttgtgtcctntagttgagtttctggcgcccctgcctgtgcccgnatgtgtgcctggccgnagggcggggctgggggctgncgagccaccatgcttgnctgaagctt

SEQ ID NO: 4017 - DNA, 123 bp, Homo sapiens
  misc_feature (4)..(4): n equals a,t,g, or c
  misc_feature (9)..(9): n equals a,t,g, or c
  misc_feature (12)..(12): n equals a,t,g, or c
  misc_feature (62)..(62): n equals a,t,g, or c
  misc_feature (89)..(89): n equals a,t,g, or c
  misc_feature (102)..(102): n equals a,t,g, or c
  misc_feature (106)..(106): n equals a,t,g, or c
  misc_feature (110)..(110): n equals a,t,g, or c
gtgnagggnttngggaacgcccccaggtaccggtccggaattcccgggtcgacccacgcgtncgtatttttaaatttgggcaacccttnagtgcaaggaatnaaantagnactgatttgacag

SEQ ID NO: 4018 - DNA, 142 bp, Homo sapiens
  misc_feature (8)..(9): n equals a,t,g, or c
  misc_feature (18)..(18): n equals a,t,g, or c
  misc_feature (27)..(27): n equals a,t,g, or c
  misc_feature (31)..(31): n equals a,t,g, or c
  misc_feature (107)..(107): n equals a,t,g, or c
  misc_feature (125)..(125): n equals a,t,g, or c
  misc_feature (128)..(128): n equals a,t,g, or c
  misc_feature (135)..(136): n equals a,t,g, or c
gcttctannggaacgctntggataggncttntggggaacgtttcccggtaccggcccggaattcccgggtcgacccacgcgtccgggatcaagacttggaaccgcanaaaacgaaatcccatagnagnacaaagnntggctg

SEQ ID NO: 4019 - DNA, 132 bp, Homo sapiens
  misc_feature (5)..(5): n equals a,t,g, or c
  misc_feature (19)..(19): n equals a,t,g, or c
  misc_feature (70)..(70): n equals a,t,g, or c
  misc_feature (74)..(74): n equals a,t,g, or c
  misc_feature (92)..(92): n equals a,t,g, or c
  misc_feature (110)..(110): n equals a,t,g, or c
  misc_feature (122)..(122): n equals a,t,g, or c
actantggaaaggcctatngggaaagtttccccggaaccgccccggaattcccgggtcgacccacgcgtncggnttctcctgtttctccttntgctcctgaccccacgtncttgctcttggngcccctattg

SEQ ID NO: 4020 - DNA, 528 bp, Homo sapiens
  misc_feature (10)..(10): n equals a,t,g, or c
  misc_feature (19)..(19): n equals a,t,g, or c
  misc_feature (48)..(48): n equals a,t,g, or c
  misc_feature (71)..(71): n equals a,t,g, or c
  misc_feature (73)..(73): n equals a,t,g, or c
  misc_feature (103)..(103): n equals a,t,g, or c
  misc_feature (389)..(389): n equals a,t,g, or c
  misc_feature (396)..(396): n equals a,t,g, or c
  misc_feature (422)..(422): n equals a,t,g, or c
  misc_feature (501)..(501): n equals a,t,g, or c
  misc_feature (503)..(503): n equals a,t,g, or c
  misc_feature (505)..(505): n equals a,t,g, or c
  misc_feature (517)..(517): n equals a,t,g, or c
  misc_feature (526)..(526): n equals a,t,g, or c
actactttgnttaggtggnaccgccccgcaggtaccggtccggaattnccgggtcgacccacgcgtccgcntntttattggagcaatccaaaatagcagctgnccaacaatacaggaatacagaagacagtttgaatcacactcattttttctgaaattttcaacttcatagaaaggcaattgagtttagaatagagaggtatttgtgtcatgatgaataaccatgatctcatccataaaaagaaggccatatggtctttcagacaagaaagaattgtatacctgaaattaagtacaaagcagtatacaaataaatagttgagggaagaaatcagtgagagttaaaatagtaattataaagtggtgagattgttttcagtctcattgtnatactgnttaccattaacacgggccataaatgnatataaatgttgagttttagaaagatgtataatatgtattattttacatccttttaacatatgtatatgtttcaagtgntnanccaatttatatngggtgcaanca

SEQ ID NO: 4021 - DNA, 268 bp, Homo sapiens
  misc_feature (29)..(29): n equals a,t,g, or c
  misc_feature (50)..(50): n equals a,t,g, or c
  misc_feature (53)..(54): n equals a,t,g, or c
  misc_feature (58)..(58): n equals a,t,g, or c
  misc_feature (139)..(139): n equals a,t,g, or c
  misc_feature (150)..(150): n equals a,t,g, or c
  misc_feature (159)..(160): n equals a,t,g, or c
  misc_feature (162)..(162): n equals a,t,g, or c
  misc_feature (209)..(209): n equals a,t,g, or c
  misc_feature (211)..(211): n equals a,t,g, or c
  misc_feature (240)..(240): n equals a,t,g, or c
  misc_feature (243)..(243): n equals a,t,g, or c
  misc_feature (263)..(263): n equals a,t,g, or c
gccccgtaccggtccggaattaccgggtnggacccacgcgtccggcacanttnntctnacgcccgaattcaaatcctgtaaggatggaagaaacggcctggagaatattcgggatgagacaccacttgtattttgatcnaatcagacctntttgacctnnanttacagggcaagattcttaatgaaaaaagaggttcagagatgatgananagacacgatatttggactttctgtgggcnatnacttgtgaaacgtccattcnaactg

SEQ ID NO: 4022 - DNA, 340 bp, Homo sapiens
  misc_feature (328)..(328): n equals a,t,g, or c
  misc_feature (331)..(331): n equals a,t,g, or c
  misc_feature (334)..(334): n equals a,t,g, or c
  misc_feature (336)..(336): n equals a,t,g, or c
  misc_feature (339)..(339): n equals a,t,g, or c
gggtggttttgcctttttttatttgggagtttattttttattttcttcttgacctaccccttccctcctttaagtgttgaggattttctgtttagtgattccctgacccagtttcaaacagagccatcttttacagattattttggagttttagttgttttaaacctaactcaacaaccctttatgtgattcctgagagcagtatgaggcctgcaagaaagtgatcatataattgtatcttcactttctttttatttttgtattacattgggatgcattgtcatgcatattttttgtagaataaattctcctttgctataaaaaaaanaanatnanatna

SEQ ID NO: 4023 - DNA, 385 bp, Homo sapiens
  misc_feature (279)..(279): n equals a,t,g, or c
  misc_feature (292)..(292): n equals a,t,g, or c
  misc_feature (318)..(318): n equals a,t,g, or c
  misc_feature (335)..(335): n equals a,t,g, or c
  misc_feature (375)..(375): n equals a,t,g, or c
  misc_feature (379)..(379): n equals a,t,g, or c
gggaaattttggcggtggtaactatggtggtggtgggaactataatgattttggaaattatagtggacaacagcaatcaaattatggacccatgaaagggggcagttttggtggaagaagctcgggcagtccctatggtggtggttatggatctggtggtggaagtggtggatatggtagcagaaggttctaaaaacagcagaaaagggctacagttcttagcaggagagagagcgaggagttgtcaggaaagctgcaggttactttgagacagtcgtnccaaatgcattanaggaactgtaaaaatctgccacaganggaacgatgatccatantcagaaaagtactgcagcttaaacaggaaacccttcttgntcangactgt

SEQ ID NO: 4024 - DNA, 353 bp, Homo sapiens
  misc_feature (18)..(18): n equals a,t,g, or c
  misc_feature (62)..(62): n equals a,t,g, or c
  misc_feature (73)..(73): n equals a,t,g, or c
  misc_feature (113)..(113): n equals a,t,g, or c
  misc_feature (176)..(176): n equals a,t,g, or c
  misc_feature (191)..(191): n equals a,t,g, or c
  misc_feature (225)..(226): n equals a,t,g, or c
  misc_feature (235)..(235): n equals a,t,g, or c
  misc_feature (238)..(238): n equals a,t,g, or c
  misc_feature (313)..(313): n equals a,t,g, or c
  misc_feature (317)..(317): n equals a,t,g, or c
  misc_feature (320)..(320): n equals a,t,g, or c
  misc_feature (332)..(332): n equals a,t,g, or c
  misc_feature (352)..(352): n equals a,t,g, or c
ggacagaatgtgctgcantgtttctgatccaatgattcaagtaatgtcatcaagaaccttgngaacccgcctncacaccccacccccttttcaaccacaacattggcatcatnctaaggctggctaccctcgtggtcatgggatgattgccagtagcagttggagccttgtgcatnttcatttacatgcancggaagagtcaggctggattctaggggccctgtnntaatatganaangcttttcccaggaatttactggttcatatccttaggtctcattgctctatagtaacttagacctgtcatcctganccantcnctggcaaagggnctagaataacctttaaggcng

SEQ ID NO: 4025 - DNA, 67 bp, Homo sapiens
  misc_feature (43)..(44): n equals a,t,g, or c
  misc_feature (59)..(59): n equals a,t,g, or c
  misc_feature (62)..(62): n equals a,t,g, or c
  misc_feature (67)..(67): n equals a,t,g, or c
gctcaaggtctcctccttccctccccccccccccccgtgaganncttttaaaaataaanaantgtan

SEQ ID NO: 4026 - DNA, 92 bp, Homo sapiens
  misc_feature (7)..(7): n equals a,t,g, or c
  misc_feature (40)..(40): n equals a,t,g, or c
  misc_feature (55)..(55): n equals a,t,g, or c
  misc_feature (84)..(84): n equals a,t,g, or c
  misc_feature (88)..(88): n equals a,t,g, or c
gagccantagaattgtgctttgtgatccagggctcttggncagaacagccttctngctcattaactcagtcaaccaaatgcttnctgngttt

SEQ ID NO: 4027 - DNA, 103 bp, Homo sapiens
  misc_feature (6)..(6): n equals a,t,g, or c
  misc_feature (33)..(33): n equals a,t,g, or c
  misc_feature (46)..(46): n equals a,t,g, or c
  misc_feature (70)..(70): n equals a,t,g, or c
  misc_feature (86)..(86): n equals a,t,g, or c
tacctnactgctgctgtcgcaactccctggtcnggactctgatgtncagtcggatggatggggaatatancattgaactgtgttgnttaccttcactattcgg

SEQ ID NO: 4028 - DNA, 227 bp, Homo sapiens
  misc_feature (22)..(22): n equals a,t,g, or c
  misc_feature (42)..(42): n equals a,t,g, or c
  misc_feature (56)..(56): n equals a,t,g, or c
  misc_feature (116)..(116): n equals a,t,g, or c
  misc_feature (173)..(173): n equals a,t,g, or c
  misc_feature (177)..(177): n equals a,t,g, or c
  misc_feature (180)..(180): n equals a,t,g, or c
  misc_feature (186)..(186): n equals a,t,g, or c
  misc_feature (206)..(206): n equals a,t,g, or c
tcgcttgcggtaccgtgccggnaccggtccggaattcccggntcgacccacgcgtncggcccttcctccattgttgccctggaatgtacgggacccaggggcagcagcaagtccangtgccacaggcatccctgggacatatgaagctgggagcaaggaaagggtcttagtcnctgnctnccgaanttgcttgaaagcacttgganaattgtgcacgtgtcatttat

SEQ ID NO: 4029 - DNA, 101 bp, Homo sapiens
  misc_feature (1)..(1): n equals a,t,g, or c
  misc_feature (27)..(27): n equals a,t,g, or c
  misc_feature (34)..(34): n equals a,t,g, or c
  misc_feature (45)..(45): n equals a,t,g, or c
  misc_feature (94)..(94): n equals a,t,g, or c
  misc_feature (101)..(101): n equals a,t,g, or c
ncctaactctatgtgcacctggagtangataatnaaaatcctgantgctctctttgccttggtcctgttctcaatggtgacgactgccaccacnacatgcn

SEQ ID NO: 4030 - DNA, 107 bp, Homo sapiens
  misc_feature (6)..(6): n equals a,t,g, or c
  misc_feature (52)..(52): n equals a,t,g, or c
  misc_feature (69)..(69): n equals a,t,g, or c
  misc_feature (71)..(71): n equals a,t,g, or c
  misc_feature (95)..(95): n equals a,t,g, or c
  misc_feature (103)..(103): n equals a,t,g, or c
tacaanaatatgagtaagcggagcgactcggttaagggaaagcaccgatatnactcggctttctgctgncnttcgtggcagagggactcggaatnatgcactntaag

SEQ ID NO: 4031 - DNA, 129 bp, Homo sapiens
  misc_feature (5)..(5): n equals a,t,g, or c
  misc_feature (12)..(12): n equals a,t,g, or c
  misc_feature (21)..(21): n equals a,t,g, or c
  misc_feature (31)..(31): n equals a,t,g, or c
  misc_feature (55)..(55): n equals a,t,g, or c
  misc_feature (106)..(106): n equals a,t,g, or c
  misc_feature (115)..(115): n equals a,t,g, or c
  misc_feature (123)..(123): n equals a,t,g, or c
gtatnacattanatctacaanacttccattnattaggaagcacattaaccatttntatagcatgatatcttaaagatggaggcaaaaggatataaattctataatngacttgagnactttaanccttgt

SEQ ID NO: 4032 - DNA, 57 bp, Homo sapiens
  misc_feature (33)..(33): n equals a,t,g, or c
  misc_feature (44)..(44): n equals a,t,g, or c
  misc_feature (47)..(47): n equals a,t,g, or c
  misc_feature (51)..(51): n equals a,t,g, or c
  misc_feature (53)..(53): n equals a,t,g, or c
gctcaaggtctcctccttccctccccccccccncacgtattcanagngggngncttg

SEQ ID NO: 4033 - DNA, 180 bp, Homo sapiens
  misc_feature (4)..(4): n equals a,t,g, or c
  misc_feature (8)..(8): n equals a,t,g, or c
  misc_feature (11)..(11): n equals a,t,g, or c
  misc_feature (14)..(14): n equals a,t,g, or c
  misc_feature (35)..(35): n equals a,t,g, or c
tatntggnacnccngcccgtaccggtccggaattnccgggtcgacccacgcgtccgattttgtcctacctgcattctgtaaaaattgaaaaaagaacaattgaatccatcattgggcagatgaataaaaggagataaggatgaaattaaaataaggttctaatcctaaaaaaaaaaaaaa

SEQ ID NO: 4034 - DNA, 347 bp, Homo sapiens
gcaaatattaagaaggtttaccactcatagatccttactaaaagagatattataggatgttctttaggaagaaaaaataaatactggaggaaagagtaggttaaaaaataacaagaaaacataaagtataattcattatttttcgtaaaaaatatttttcttacaaatggtaaaactaaatctctagccatcaataataagatgggtgctattttacgggtagtaaaagcatgataaagtctttagtaagttagggaaaagaccaaaattaggaaatgattctgtacagtattaaaaaaagacataaatatatatgtcaaagtgttaaggataactagtaaaaaaaa

SEQ ID NO: 4035 - DNA, 375 bp, Homo sapiens
  misc_feature (43)..(43): n equals a,t,g, or c
  misc_feature (370)..(370): n equals a,t,g, or c
ggccaaggtatttcttgtgcttttgggatcttatgctgtttgnaaaatgttactgtccaatgttggattattgttttggtttcaggcatttgctgaataggtgatgatacatgggtatttttctgcaagtatttaaaccaggggcatatgcaaaggcagttgtaatttcctcttggaaaaagcgccaaatgtttgaaggttaaaatcaaatgctagggttgatatttaggcttataacaaaataggcttgttttcaaagcagttttttcctagagttttaactgttaactcactagtttgctgctgtttttaactatgttaaataacatatggtatttggcaaatagatttatttttcaaaatgaaaaanaaaaa

SEQ ID NO: 4036 - DNA, 121 bp, Homo sapiens
  misc_feature (7)..(7): n equals a,t,g, or c
  misc_feature (17)..(18): n equals a,t,g, or c
  misc_feature (41)..(41): n equals a,t,g, or c
  misc_feature (58)..(58): n equals a,t,g, or c
  misc_feature (108)..(108): n equals a,t,g, or c
  misc_feature (113)..(114): n equals a,t,g, or c
ccgggtngacccacgcnngccggccgagctgatctgtaaancgctcaggaataagtantacgaggggggggatgggtgtaagacaattggcccggggagaaagagggnctgannaaacgga

SEQ ID NO: 4037 - DNA, 229 bp, Homo sapiens
  misc_feature (1)..(2): n equals a,t,g, or c
  misc_feature (18)..(18): n equals a,t,g, or c
  misc_feature (43)..(43): n equals a,t,g, or c
  misc_feature (70)..(70): n equals a,t,g, or c
  misc_feature (162)..(162): n equals a,t,g, or c
  misc_feature (185)..(186): n equals a,t,g, or c
  misc_feature (202)..(202): n equals a,t,g, or c
  misc_feature (225)..(225): n equals a,t,g, or c
nngaaacactgtctatantaacggactggaccgtatgacgggngctaacccgggccacggtgtagagacnatgctactcgatgacgctgtgagaccggactaaatgggagtggagaacgggttagggtggacgcttgaagatgagcattatatcacaacacngtaatgaaacctggtgcccatgnngacccgaagacttgtntcttcagcatgcatgggccttcnaata

SEQ ID NO: 4038 - DNA, 72 bp, Homo sapiens
  misc_feature (12)..(12): n equals a,t,g, or c
  misc_feature (35)..(35): n equals a,t,g, or c
  misc_feature (67)..(67): n equals a,t,g, or c
  misc_feature (69)..(69): n equals a,t,g, or c
  misc_feature (72)..(72): n equals a,t,g, or c
gttggaatgcgntcggagcacttgctctgaggaanaccatagtgactctgtcgaagaagaatccggncncan

SEQ ID NO: 4039 - DNA, 595 bp, Homo sapiens
  misc_feature (13)..(13): n equals a,t,g, or c
  misc_feature (201)..(201): n equals a,t,g, or c
  misc_feature (286)..(286): n equals a,t,g, or c
  misc_feature (323)..(323): n equals a,t,g, or c
  misc_feature (577)..(577): n equals a,t,g, or c
  misc_feature (579)..(579): n equals a,t,g, or c
  misc_feature (583)..(584): n equals a,t,g, or c
  misc_feature (590)..(590): n equals a,t,g, or c
gctgaaatgcatngtgctttcatcaatgaaccttttcaaacttttctatgattgcagagaagctttttatatacccagcataacttggaaacaggtatctgacctattcttatttagttaacacaagtgtgattaatttgatttctttaattccttattgaatcttatgtgatatgattttctggatttacagaacattancacatgtaccttgtgcctcccattcaagtgaagttataatttacactgaggggtttcaaaattcgactagaagtggagatatatnatttatttatgcactgtactggattttatattgctgnttaaaacttttaagctggcctcacttattaaagcacaaaatgttttacctactccttatttacgacgcaattaaaatacatcaatagatttttaggctgaattaatttgaaagcacaatttgctgttctcaccattctttcaaggcttttcattgtcaaaggtaataaaaaaggtaggacaattaaagtgaaaaaaaaaaaaaaagggcgggccgtctagaggatccaagcttacgtacgccgtgcatgcgacntnatannctcttntatag

SEQ ID NO: 4040 - DNA, 119 bp, Homo sapiens
  misc_feature (8)..(8): n equals a,t,g, or c
  misc_feature (42)..(42): n equals a,t,g, or c
  misc_feature (46)..(46): n equals a,t,g, or c
  misc_feature (61)..(61): n equals a,t,g, or c
  misc_feature (97)..(97): n equals a,t,g, or c
  misc_feature (108)..(108): n equals a,t,g, or c
ctccccanggtccttatgcacatgtggactgcactgaaaagngccnttggattgaatcatnatgatctatgagaggcatccatcctggatttggaanagctcaaatcngaagttaccag

SEQ ID NO: 4041 - DNA, 522 bp, Homo sapiens
  misc_feature (71)..(71): n equals a,t,g, or c
  misc_feature (418)..(418): n equals a,t,g, or c
  misc_feature (481)..(481): n equals a,t,g, or c
  misc_feature (506)..(506): n equals a,t,g, or c
  misc_feature (508)..(508): n equals a,t,g, or c
  misc_feature (514)..(514): n equals a,t,g, or c
  misc_feature (518)..(518): n equals a,t,g, or c
ctccgacttacttttagggaaccgctggtacgcctgcaggtaccggtccggaattcccgggtcgactcatncgtccggagcaaactgctcagcgcgtctcagctcagtgccgaggaggaggaagaaaaacaggccgagtgaaggtgctggaaagggagggaggacgcgaggggaaaggcctgtggggagccacgggcgtcagagagacccgggaaggaaggctctcgggtgggggagccaggagacctgctctccggcgcagacaggcggggcccagcgctctcctggacgcccccgcccgcacagctcccggcgggtgctctgaggcctcactactcgagcccacccagcatcccgcgcgcccttccttcccgaggaactcgcctcagcctgatcaggcttcctggtgagaactgangagcggactcacttgatgtttcctggaagcagagcaaaatgctcttgtccttgtcgcgtcttnattttgcccatgtccccccgtgcancnggttcnattnggtt

SEQ ID NO: 4042 - DNA, 352 bp, Homo sapiens
  misc_feature (8)..(8): n equals a,t,g, or c
  misc_feature (54)..(54): n equals a,t,g, or c
  misc_feature (93)..(93): n equals a,t,g, or c
  misc_feature (98)..(98): n equals a,t,g, or c
  misc_feature (295)..(295): n equals a,t,g, or c
  misc_feature (308)..(308): n equals a,t,g, or c
  misc_feature (314)..(314): n equals a,t,g, or c
  misc_feature (328)..(328): n equals a,t,g, or c
  misc_feature (330)..(330): n equals a,t,g, or c
gccagaanctgcagatccagaatgttcaaagaaagagccctccttgccttcctnttcttccacccctgccctctgcagactggggttctgtanacccncaaagtaagtccgccacaccggaaggaagtgagttacacaggggcccacatgggaaccgctttttgtcctgtcttggtgggaaaatggccacgaccccagcccaggctctgccacgccacaactccacgggcatagcctgtgaggccgcagcgtgaactgtgactagggctgaggatggtgccatggtaaaagtganggcctggcacccngtcaantgcatgaattcttngnagtggggttgggaaaaacacct

SEQ ID NO: 4043 - DNA, 132 bp, Homo sapiens
  misc_feature (60)..(60): n equals a,t,g, or c
  misc_feature (66)..(66): n equals a,t,g, or c
  misc_feature (68)..(68): n equals a,t,g, or c
  misc_feature (78)..(78): n equals a,t,g, or c
  misc_feature (80)..(80): n equals a,t,g, or c
gcaggtacccggtccggaattcccgggtcgacccacgcgttcggcgcttatcagcatccngtgacngncggtgctgcngnctaacacacacctaatgacagacaccaacagccatacgcttggggagcccgg

SEQ ID NO: 4044 - DNA, 275 bp, Homo sapiens
  misc_feature (27)..(27): n equals a,t,g, or c
  misc_feature (31)..(31): n equals a,t,g, or c
  misc_feature (37)..(37): n equals a,t,g, or c
  misc_feature (52)..(52): n equals a,t,g, or c
  misc_feature (79)..(79): n equals a,t,g, or c
  misc_feature (103)..(103): n equals a,t,g, or c
  misc_feature (147)..(147): n equals a,t,g, or c
  misc_feature (196)..(196): n equals a,t,g, or c
  misc_feature (217)..(217): n equals a,t,g, or c
  misc_feature (225)..(225): n equals a,t,g, or c
  misc_feature (243)..(243): n equals a,t,g, or c
  misc_feature (269)..(269): n equals a,t,g, or c
ggaaatcccttaagctggttcgcctgnaggnaccggnccggaattcccgggncgacccacgcgtccgaaagatagcaangataatagcggtggagacccaccngcacaaatgcacccaagagacaagccatttacatacagatattnacagtcacacatagaaacacccacatggacacaaggaatgttgctgcanagactgaatgacatgcaacangtgaaggnttatacggtatacacaangccaggtaagcgctcataaatcacanacaata

SEQ ID NO: 4045 - DNA, 243 bp, Homo sapiens
  misc_feature (4)..(6): n equals a,t,g, or c
  misc_feature (9)..(9): n equals a,t,g, or c
  misc_feature (17)..(17): n equals a,t,g, or c
  misc_feature (160)..(160): n equals a,t,g, or c
  misc_feature (178)..(178): n equals a,t,g, or c
  misc_feature (200)..(200): n equals a,t,g, or c
  misc_feature (212)..(212): n equals a,t,g, or c
  misc_feature (242)..(242): n equals a,t,g, or c
gaannntcntcgggaanacccctactataggtaacgctggtacgcctgcaggtaccggtccggaattcccgggtcgacccacgcgttcgcttattgattccagacccatttcagcagactgtgacacttcagcgacctgcaaattctacacattagagtncatattttatacaaactncgtacacctaagatgtggactnaacatttctacnaacaacatccaacttcaacaaaagatgcang

SEQ ID NO: 4046 - DNA, 251 bp, Homo sapiens
  misc_feature (6)..(6): n equals a,t,g, or c
  misc_feature (37)..(37): n equals a,t,g, or c
  misc_feature (73)..(73): n equals a,t,g, or c
  misc_feature (173)..(173): n equals a,t,g, or c
  misc_feature (180)..(180): n equals a,t,g, or c
  misc_feature (183)..(183): n equals a,t,g, or c
  misc_feature (244)..(245): n equals a,t,g, or c
gcttanttagtctggctcaagtactttgtttacaatnaaaatggatattatagcatttaatagaagaaatggntatggcttatccaaaaagaatgtcagcatgacctggtgtagacttaaaaaactacatgtttgtgaatattttataatgtggaatgatcattgaaatattnaggattntangtaattgtatttcctgaataaacgtatgttcatgaattttctaacttacatcttgtagtgnnctctgc

SEQ ID NO: 4047 - DNA, 175 bp, Homo sapiens
  misc_feature (8)..(8): n equals a,t,g, or c
  misc_feature (10)..(10): n equals a,t,g, or c
  misc_feature (12)..(12): n equals a,t,g, or c
  misc_feature (20)..(20): n equals a,t,g, or c
  misc_feature (59)..(59): n equals a,t,g, or c
  misc_feature (101)..(101): n equals a,t,g, or c
  misc_feature (107)..(107): n equals a,t,g, or c
  misc_feature (132)..(132): n equals a,t,g, or c
  misc_feature (144)..(144): n equals a,t,g, or c
  misc_feature (146)..(146): n equals a,t,g, or c
ttggaaanancncactatanggttaagctggtacgcctgcaggtaccggtccggaattnccgggtcgacccacgcgttccgcgaccgaccttcagcagggntgaggntaccatgttctctcgcgcgggtagncactgggcatgncnagtctggacctttgcagagcgcaaatgga

SEQ ID NO: 4048 - DNA, 293 bp, Homo sapiens
  misc_feature (7)..(7): n equals a,t,g, or c
  misc_feature (15)..(16): n equals a,t,g, or c
  misc_feature (28)..(28): n equals a,t,g, or c
  misc_feature (136)..(136): n equals a,t,g, or c
  misc_feature (145)..(145): n equals a,t,g, or c
  misc_feature (168)..(168): n equals a,t,g, or c
  misc_feature (184)..(184): n equals a,t,g, or c
  misc_feature (234)..(234): n equals a,t,g, or c
  misc_feature (240)..(240): n equals a,t,g, or c
  misc_feature (248)..(248): n equals a,t,g, or c
  misc_feature (259)..(259): n equals a,t,g, or c
  misc_feature (288)..(288): n equals a,t,g, or c
gcccggngttttcanntattctgcattnacgttgaccattttaccaagatgataaaacatgcattattttctccattttataatttttacagggggaacagcgaagccagatgatttattagttattgccggtganaatacaganatcctttgaaacatttgtctctnctagaattctcatcanaccatatgcttctaacacagcacttaacagtcatggggagtatgtgggantaacanatactcgnttccctgccanaaccacacatacacccacacacttgaaanaaaaa

SEQ ID NO: 4049 - DNA, 87 bp, Homo sapiens
  misc_feature (6)..(6): n equals a,t,g, or c
  misc_feature (81)..(82): n equals a,t,g, or c
  misc_feature (86)..(86): n equals a,t,g, or c
gaattntaagaagacaatcaagttttattagaaacaaaaaccatgttggaagaccaactagagggaactcgtgccttatannattna

SEQ ID NO: 4050 - DNA, 59 bp, Homo sapiens
  misc_feature (2)..(2): n equals a,t,g, or c
  misc_feature (8)..(8): n equals a,t,g, or c
  misc_feature (10)..(10): n equals a,t,g, or c
  misc_feature (16)..(16): n equals a,t,g, or c
  misc_feature (57)..(57): n equals a,t,g, or c
gnaaaatntntgtgantaaattctctctttgatcaataaaaaaaaaaaaggggcggncg

SEQ ID NO: 4051 - DNA, 104 bp, Homo sapiens
  misc_feature (12)..(12): n equals a,t,g, or c
  misc_feature (16)..(16): n equals a,t,g, or c
  misc_feature (29)..(29): n equals a,t,g, or c
  misc_feature (53)..(53): n equals a,t,g, or c
  misc_feature (65)..(65): n equals a,t,g, or c
aaaaaaatacgngggnaaaaagccccaantttttggggaaaaaaacccccgcnccttgggaaacnttaattaagggggcgggaaaaaggccctggggggtgaac

SEQ ID NO: 4052 - DNA, 413 bp, Homo sapiens
  misc_feature (275)..(275): n equals a,t,g, or c
  misc_feature (304)..(305): n equals a,t,g, or c
  misc_feature (343)..(343): n equals a,t,g, or c
  misc_feature (363)..(363): n equals a,t,g, or c
  misc_feature (381)..(381): n equals a,t,g, or c
  misc_feature (392)..(392): n equals a,t,g, or c
  misc_feature (410)..(410): n equals a,t,g, or c
gagcctgaataaaaacagaaatggacacataatatgcatattccatagtctttgggaggctggaatgtgcctgggatttgggtctaagtgtatgcgtaattcttacctcactaaagaatttgccttgtttttttccttttggtgagtgactaaaacgtctgggcttccctgtgtgcgtgctacagtaagcaagcagaggctgtgcaaaggtgtgagcaggatcacgtggaatctggaggatacatcttggcttgcaaactgcctctgtctcctgngtgggactgttctgtccttgcactgctgnnctgtggttacctcttggggtgtaaggttttgcttacanggaacatactttgggcgtanaatggatccattgccaantctctgtgctnagaaagaaaggtgcttcngtt

SEQ ID NO: 4053 - DNA, 112 bp, Homo sapiens
  misc_feature (20)..(20): n equals a,t,g, or c
  misc_feature (51)..(51): n equals a,t,g, or c
  misc_feature (58)..(58): n equals a,t,g, or c
  misc_feature (77)..(77): n equals a,t,g, or c
  misc_feature (92)..(92): n equals a,t,g, or c
tttcaccaaggagctatacntgggccaagacccggatacttatccgttttnaccttgnaccctggaaattgaatggnacggaccctgatgantttcattatgattgggcacg

SEQ ID NO: 4054 - DNA, 55 bp, Homo sapiens
  misc_feature (17)..(17): n equals a,t,g, or c
  misc_feature (50)..(51): n equals a,t,g, or c
ggttgcacatgattgtntaagcatgctttctttgagttttaaatgggggnntagg

SEQ ID NO: 4055 - DNA, 374 bp, Homo sapiens
  misc_feature (11)..(11): n equals a,t,g, or c
  misc_feature (18)..(18): n equals a,t,g, or c
  misc_feature (155)..(155): n equals a,t,g, or c
  misc_feature (219)..(220): n equals a,t,g, or c
  misc_feature (262)..(262): n equals a,t,g, or c
  misc_feature (267)..(267): n equals a,t,g, or c
  misc_feature (270)..(271): n equals a,t,g, or c
  misc_feature (282)..(282): n equals a,t,g, or c
  misc_feature (290)..(290): n equals a,t,g, or c
  misc_feature (312)..(312): n equals a,t,g, or c
  misc_feature (321)..(321): n equals a,t,g, or c
  misc_feature (372)..(372): n equals a,t,g, or c
ggctcagaacnaaagatnagcaaaaaaagtcttcagggtaggactgccaacatataggactttgtaatgccatcttctttatatttctgggacattaaaattcaaatctctgttgaaaatgaaaaatgtaaaacttagttgcaaacagtataganaataagtgatgatgaaatatttgttttcatacaaacatgctttcccattctaaatagatgctanntttcttttttccttggctgtaaataaaagtgccccaaatganaaacnaannaaaagggcggncgctctanaggatccaagcttacgtacgcngtgcatgcnacgtcatagctcttctataggtgtccacctaaattcaattcactgggccgntc

SEQ ID NO: 4056 - DNA, 53 bp, Homo sapiens
  misc_feature (22)..(22): n equals a,t,g, or c
  misc_feature (39)..(39): n equals a,t,g, or c
  misc_feature (45)..(45): n equals a,t,g, or c
  misc_feature (52)..(52): n equals a,t,g, or c
gggggaagttggaaaaaaatgntatttttaaattatggngccccntaacatng

SEQ ID NO: 4057 - DNA, 403 bp, Homo sapiens
  misc_feature (4)..(4): n equals a,t,g, or c
  misc_feature (243)..(243): n equals a,t,g, or c
  misc_feature (323)..(323): n equals a,t,g, or c
  misc_feature (394)..(394): n equals a,t,g, or c
  misc_feature (396)..(396): n equals a,t,g, or c
  misc_feature (401)..(401): n equals a,t,g, or c
  misc_feature (403)..(403): n equals a,t,g, or c
gganaatttcacattaatatttgctgacagctgacctttgtcatctttcttctattttattccctttcacaaaattttattcctatatagtttattgacaataatttcaggttttgtaaagatgccgggttttatatttttatagacaaataataagcaaagggagcactgggttgactttcaggtactaaatacctcaacctatggtataatggttgactgggtttctctgtatagtactgncatggtacggagatgtttcacgaagtttgttcatcagactcctgtgcaactttcccaatgtggcctaaaaatgcaacttntttttattttcttttgtaaatgtttaggtttttttgtatagtaaaagtgataatttctggaattagaaaanantcgancn

SEQ ID NO: 4058 - DNA, 535 bp, Homo sapiens
  misc_feature (2)..(2): n equals a,t,g, or c
  misc_feature (7)..(7): n equals a,t,g, or c
  misc_feature (378)..(378): n equals a,t,g, or c
  misc_feature (447)..(447): n equals a,t,g, or c
  misc_feature (481)..(481): n equals a,t,g, or c
  misc_feature (499)..(499): n equals a,t,g, or c
  misc_feature (514)..(514): n equals a,t,g, or c
  misc_feature (516)..(516): n equals a,t,g, or c
gntctgntggaaagggccaggcactcagaagtatcccatgcttgaaattcttaattttatctttgaatttgtgttttttaagtgaagtccaatgggacaggttctcagttgccctggcccactcgagctgccctggggcttctccctaccctccctgatcccactcttgcccaggcagcgttgggattgcaccctccgaatctcagggcagggtggctggtaccacagcacattaggcaggcaagtgggcaggggcctctcacctgtcccatccctgcagggaagttgcaatccattagggctgtagtaacggggagtctgacttctgtgctctgctccaggccgggaattttgcactgggccttgtaaatcatgtanatggcacagggtgatgagtaccattattatccctattttataaagagagtattaaagagaagtaacttnaccaactgcaaaaatgtctatacatatatcccanatggatttaaaaaactangcccggccatgggtngnctcaaacctggaaatccca

SEQ ID NO: 4059 - DNA, 123 bp, Homo sapiens
  misc_feature (3)..(3): n equals a,t,g, or c
  misc_feature (5)..(5): n equals a,t,g, or c
  misc_feature (39)..(39): n equals a,t,g, or c
  misc_feature (73)..(73): n equals a,t,g, or c
  misc_feature (75)..(75): n equals a,t,g, or c
  misc_feature (101)..(101): n equals a,t,g, or c
  misc_feature (103)..(103): n equals a,t,g, or c
cgncncaccgggccggaattcccgggtcgacccacgcgnccggaaaaaaaaaacattctgcgaatgaaatatngnatggggagaggttataaaagacattngnaaaagcccaatttacagccg

SEQ ID NO: 4060 - DNA, 252 bp, Homo sapiens
  misc_feature (197)..(197): n equals a,t,g, or c
  misc_feature (205)..(205): n equals a,t,g, or c
  misc_feature (220)..(220): n equals a,t,g, or c
  misc_feature (238)..(238): n equals a,t,g, or c
  misc_feature (249)..(249): n equals a,t,g, or c
gaaatgctttctaactgggcccccaactccgcaccccagttcgcagtgaggccctgggtgggtcacctgccctctctggacttgtttcttcaactggaggaggtccctgcctatgctgacattccattgtagaaaaatggggcctctggtgtctctttaccaggggcaagtgcctctctgcgggggaggaaaagctnaaggttanctgtcttaacccaantgacttaccaggcctacnaaatgagtcanttc

SEQ ID NO: 4061 - DNA, 282 bp, Homo sapiens
  misc_feature (101)..(101): n equals a,t,g, or c
  misc_feature (115)..(115): n equals a,t,g, or c
  misc_feature (122)..(122): n equals a,t,g, or c
  misc_feature (130)..(130): n equals a,t,g, or c
  misc_feature (205)..(205): n equals a,t,g, or c
  misc_feature (214)..(214): n equals a,t,g, or c
  misc_feature (237)..(237): n equals a,t,g, or c
  misc_feature (245)..(246): n equals a,t,g, or c
gcacaaaactgattttaaaatcaagttaatgtgaattttgaaaattactacttaatcctaattcacaataacaatggcattaaggtttgacttgagttggntcttagtattattnatggtanataggctnttaccacttgcaaataactggccacatcattaatgactgacttcccagtaaggctctctaaggggtaagtctgangatccacangatttgagatgctaaggccccanagatcgtnngatccaaccctcttattttcagaggggaaaatgggg

SEQ ID NO: 4062 - DNA, 143 bp, Homo sapiens
  misc_feature (27)..(27): n equals a,t,g, or c
  misc_feature (73)..(73): n equals a,t,g, or c
  misc_feature (100)..(100): n equals a,t,g, or c
  misc_feature (105)..(105): n equals a,t,g, or c
  misc_feature (120)..(120): n equals a,t,g, or c
  misc_feature (127)..(127): n equals a,t,g, or c
gatgcccactcactttagggaaagctngtacgcctgcaggtaccggtccggaattcccgggtttgacccacgntttcggcaaagcaaccccctgcttatncacgnggacaccaaggcggnccacggngcggggaagcccacag

SEQ ID NO: 4063 - DNA, 131 bp, Homo sapiens
  misc_feature (17)..(17): n equals a,t,g, or c
  misc_feature (101)..(101): n equals a,t,g, or c
  misc_feature (122)..(122): n equals a,t,g, or c
  misc_feature (125)..(125): n equals a,t,g, or c
  misc_feature (128)..(129): n equals a,t,g, or c
acccactactatttggnaagctggcccgcctgcaggtaccggtccggaattcccgggtcgacccacgcgtttgctgagatgagggtcttagcctacagggntttttgaaatgaaaggagctnagntannta

SEQ ID NO: 4064 - DNA, 400 bp, Homo sapiens
  misc_feature (373)..(373): n equals a,t,g, or c
  misc_feature (394)..(394): n equals a,t,g, or c
  misc_feature (397)..(399): n equals a,t,g, or c
gcaacttagaagaaatcatttagtgacttaattctttctaaagatgaaatgggattgttttttactcgtcttccttgttaaatcattatttaagccgttcttattgaccaattcctgacacttgattgtctcctaatgctttatccatcaccacctgggctcctgcatcctcactgtggaatcaggcaccagccacataatgttccagacaaagcctggaagggtgtggacccagacgtggagtggagtgattctcttgacgtttacatatatctctgtgtctctccatcattccaaagctaaatgtacatgtttagaataacttattttataaactcttcgggagacatgttgagatttgaccgtaatgaangcccattttcctgaaaaaaanaannnt

SEQ ID NO: 4065 - DNA, 156 bp, Homo sapiens
  misc_feature (5)..(5): n equals a,t,g, or c
  misc_feature (26)..(26): n equals a,t,g, or c
  misc_feature (56)..(56): n equals a,t,g, or c
  misc_feature (81)..(81): n equals a,t,g, or c
  misc_feature (91)..(91): n equals a,t,g, or c
  misc_feature (106)..(106): n equals a,t,g, or c
  misc_feature (109)..(109): n equals a,t,g, or c
  misc_feature (134)..(134): n equals a,t,g, or c
ggccnaccaaccggttttggttggcncggcccggcttggtggggcctcttaaaggngcccttaacccaaccccttttcaangaaaagttcnaaccctggtggggcnaanatggttgggccttaccccttggccnaatgccgccaatgaagaaaagg

SEQ ID NO: 4066 - DNA, 374 bp, Homo sapiens
  misc_feature (237)..(237): n equals a,t,g, or c
  misc_feature (266)..(266): n equals a,t,g, or c
  misc_feature (299)..(299): n equals a,t,g, or c
  misc_feature (309)..(309): n equals a,t,g, or c
  misc_feature (317)..(317): n equals a,t,g, or c
  misc_feature (360)..(360): n equals a,t,g, or c
  misc_feature (370)..(370): n equals a,t,g, or c
gggacctggagcccatcccgggagccttggacgctgtgcgggagatgaacgacctaccggagtaaggagagaggggggcgggcggagtcctgggcgggctcctggctcccggcggtaaccgcgtccttctccgcagcacgcaggtcttcatctgcaccagccccctgctgaagtaccaccactgtgtgggtgagaagtaccgctgggtggagcagcacctggggccccagttcgtanaacgaattatcctgacaagggacaagacngtggtcttgggggacctgctcattgatgacaangacacagttngaggccangaggatgaccccaagctgggagcacatcttgtttacctgctgncacaatcggnacct

SEQ ID NO: 4067 - DNA, 193 bp, Homo sapiens
  misc_feature (90)..(90): n equals a,t,g, or c
  misc_feature (113)..(113): n equals a,t,g, or c
  misc_feature (154)..(154): n equals a,t,g, or c
  misc_feature (168)..(168): n equals a,t,g, or c
  misc_feature (173)..(173): n equals a,t,g, or c
  misc_feature (180)..(180): n equals a,t,g, or c
ggacgcgtgggcggccgtgaagtagcgttggatgcgtgtgcctgtgtgtgtctggggtgggggtgaggggcgcgccgggccgcgtgctcnagtagaaggggccggagggcggngagcggttcggcgtggtcatcctggaccctgggggctggcngggcggcgtgtgcngtctnggagggnccgaggcggtgga

SEQ ID NO: 4068 - DNA, 345 bp, Homo sapiens
  misc_feature (62)..(62): n equals a,t,g, or c
  misc_feature (98)..(98): n equals a,t,g, or c
  misc_feature (141)..(141): n equals a,t,g, or c
  misc_feature (143)..(143): n equals a,t,g, or c
  misc_feature (156)..(156): n equals a,t,g, or c
  misc_feature (182)..(182): n equals a,t,g, or c
  misc_feature (222)..(222): n equals a,t,g, or c
  misc_feature (227)..(227): n equals a,t,g, or c
  misc_feature (236)..(236): n equals a,t,g, or c
  misc_feature (257)..(257): n equals a,t,g, or c
  misc_feature (264)..(264): n equals a,t,g, or c
  misc_feature (274)..(274): n equals a,t,g, or c
  misc_feature (283)..(283): n equals a,t,g, or c
  misc_feature (344)..(344): n equals a,t,g, or c
gatttctggaatggatttaataggctgtgtctaatgtacaaactgggtgagtcctgccttantgtgtcctgccccaccggtacgcttccaggatactnttttcccctctgtaaagatcactttcttctgatggccagtgtnantatgatgtcagtnaggtctggggatgatgacagtgggtnctgaaattcacaggactgactcctcaccccagtgcacgangattnctgtggcangacggtgctgctgtacctggngtaggancctaatcatngaaccatcngctgttacctcacatctctatgctacagaacatatcatgtctcaagaaggatttggtggang

SEQ ID NO: 4069 - DNA, 397 bp, Homo sapiens
  misc_feature (263)..(263): n equals a,t,g, or c
  misc_feature (301)..(301): n equals a,t,g, or c
  misc_feature (361)..(361): n equals a,t,g, or c
  misc_feature (383)..(383): n equals a,t,g, or c
  misc_feature (387)..(387): n equals a,t,g, or c
  misc_feature (389)..(389): n equals a,t,g, or c
ggtgagtattaaatatttcagaagtgtgaatttcatgtatttgagctcctctagttgctgtcggtttttcttctgctgccaacctgtgactcacaaatgactaggatctcttgttctttaattttagggtcttgttccaggactcaaatcagtaacttggtgattacaaggtgctgaatgtgttggtaaccatatcgcaatacacctcaaggaaaaggttcagatttttatttttaaaatattttcatttttttcttgaattntatatccgtttgttcactcgtacatgcctagcctacanaaggggatatatattatgaaatggtcatttttctgaagagaatattttgcttgaaatgcnaaggactgaaagagatttgtangttngntgattttg

SEQ ID NO: 4070 - DNA, 193 bp, Homo sapiens
  misc_feature (70)..(70): n equals a,t,g, or c
  misc_feature (174)..(174): n equals a,t,g, or c
  misc_feature (176)..(176): n equals a,t,g, or c
  misc_feature (182)..(182): n equals a,t,g, or c
  misc_feature (191)..(191): n equals a,t,g, or c
  misc_feature (193)..(193): n equals a,t,g, or c
ttcggctgcctgtacacctgctgcctacatcttcttggcaacaaagttacctgccacaggctctgctgancctatgtcctggtcagtaataactgaacagttgcattcttggctttggatgctgtctgcggacaatcttgctgaggatctctaccatattctgagcacacggtntnttttgntctaacttnan

SEQ ID NO: 4071 - DNA, 316 bp, Homo sapiens
  misc_feature (155)..(155): n equals a,t,g, or c
  misc_feature (175)..(175): n equals a,t,g, or c
  misc_feature (192)..(192): n equals a,t,g, or c
  misc_feature (255)..(255): n equals a,t,g, or c
  misc_feature (266)..(266): n equals a,t,g, or c
  misc_feature (271)..(271): n equals a,t,g, or c
  misc_feature (283)..(283): n equals a,t,g, or c
  misc_feature (294)..(294): n equals a,t,g, or c
gattggcacatgggtggacacggatctgctgggctctgccttaaacacacattgcagcttcaacttttctctttagtgttctgtttgaaactaatacttaccgagtcagactttgtgttcatttcatttcagggtcttggctgcctgtgggcttncccaggtggcctgtaggtgngcaaagggaagtaacanacacacgatgttgtcaaggatggttttgggactagaggctcagttggtgggagagatccctgnagaacccaccnaccanaacgtggtttgnctgaggctgtnactgagagaaagattctggggc

SEQ ID NO: 4072 - DNA, 103 bp, Homo sapiens
  misc_feature (53)..(53): n equals a,t,g, or c
  misc_feature (57)..(57): n equals a,t,g, or c
  misc_feature (65)..(65): n equals a,t,g, or c
  misc_feature (81)..(81): n equals a,t,g, or c
  misc_feature (83)..(83): n equals a,t,g, or c
gggaaaaaagggccttggggtttatccgtctccttggccaagggggttaatcnccgnggttctcngggggaaaatatttcncnccgggggggttctgtatctc

SEQ ID NO: 4073 - DNA, 158 bp, Homo sapiens
  misc_feature (88)..(88): n equals a,t,g, or c
  misc_feature (99)..(99): n equals a,t,g, or c
  misc_feature (127)..(127): n equals a,t,g, or c
  misc_feature (145)..(145): n equals a,t,g, or c
  misc_feature (148)..(148): n equals a,t,g, or c
aatggcaacacacaggaactttgattaggaaaacttgggccaggcacaggcagaagtcacttttcattcatccttgccaacgtgtgancttcagaagantggaaatgatggactatcaacaccttcngcctacgactcaaataanaanttgatgactt

SEQ ID NO: 4074 - DNA, 74 bp, Homo sapiens
  misc_feature (20)..(21): n equals a,t,g, or c
  misc_feature (45)..(45): n equals a,t,g, or c
  misc_feature (63)..(63): n equals a,t,g, or c
  misc_feature (71)..(71): n equals a,t,g, or c
ttttgggaaaaagccccccnntttttggggggaaaaaaatccccnggaacttgcaaacgtganttttttgnggg

SEQ ID NO: 4075 - DNA, 104 bp, Homo sapiens
  misc_feature (40)..(40): n equals a,t,g, or c
  misc_feature (43)..(43): n equals a,t,g, or c
  misc_feature (70)..(70): n equals a,t,g, or c
  misc_feature (86)..(86): n equals a,t,g, or c
  misc_feature (98)..(98): n equals a,t,g, or c
gctagaggagtttgtatcaatttgtgagtattaatgtcangtnctaccagcactttgccaaaactgtcanagggacccgtttctanagtgagtcccanttacat

SEQ ID NO: 4076 - DNA, 70 bp, Homo sapiens
  misc_feature (49)..(49): n equals a,t,g, or c
  misc_feature (52)..(52): n equals a,t,g, or c
  misc_feature (64)..(64): n equals a,t,g, or c
gctcaaggtctcctccttccctccccccccccccccgtcatatcttttnttngtttttttaaanttagga

SEQ ID NO: 4077 - DNA, 53 bp, Homo sapiens
  misc_feature (12)..(12): n equals a,t,g, or c
  misc_feature (31)..(31): n equals a,t,g, or c
  misc_feature (34)..(34): n equals a,t,g, or c
gcggtttctggntccgacggtagtgggtagnggntctcgggttgcgggttgca

SEQ ID NO: 4078 - DNA, 202 bp, Homo sapiens
  misc_feature (3)..(3): n equals a,t,g, or c
  misc_feature (13)..(14): n equals a,t,g, or c
  misc_feature (18)..(18): n equals a,t,g, or c
  misc_feature (42)..(42): n equals a,t,g, or c
  misc_feature (158)..(158): n equals a,t,g, or c
  misc_feature (166)..(166): n equals a,t,g, or c
  misc_feature (174)..(174): n equals a,t,g, or c
  misc_feature (181)..(181): n equals a,t,g, or c
  misc_feature (202)..(202): n equals a,t,g, or c
ccngtgaaattanngctnttggggacatgaaatatatggagngataaattatagaacacagtattccaagaataaagtactcttgaggttccttcctgattcaccctggggtacacacaggtgcatactccctgcctctcacccatccagagaaaacnctttgcantgactcangtccaanagcactgctcttgggtggaan

SEQ ID NO: 4079 - DNA, 348 bp, Homo sapiens
  misc_feature (284)..(284): n equals a,t,g, or c
  misc_feature (324)..(324): n equals a,t,g, or c
  misc_feature (330)..(330): n equals a,t,g, or c
  misc_feature (345)..(345): n equals a,t,g, or c
  misc_feature (347)..(347): n equals a,t,g, or c
ggtttatggatttttaaaagtctcattagcaatgatttctgagttttaaacaatttgtgtgtatgaatgaacttccggcatttgggaaacttaatctgctccatggatataattgtaattgttttacatgggaatttaatacaaacctaacaatcaaatccctctcattaaattttacattcattcactataaatggactagattttaaaactcagaaacctaaaaataagatgaagttagacaactttagattttgtgtggtgtgtacatctatgtgcacagnatgtaaattatcttttattggattgcttaatagaataaanaagtanaaatttaattcctgngng

SEQ ID NO: 4080 - DNA, 115 bp, Homo sapiens
  misc_feature (5)..(5): n equals a,t,g, or c
  misc_feature (71)..(71): n equals a,t,g, or c
  misc_feature (75)..(75): n equals a,t,g, or c
  misc_feature (95)..(95): n equals a,t,g, or c
  misc_feature (97)..(97): n equals a,t,g, or c
  misc_feature (111)..(111): n equals a,t,g, or c
agagnccaaaaaggccacgggataaacggacacccgacaagagataaacacagagatacacagggaaaaanatanacacagagagatacagaacncncaaccggcagatanacag

SEQ ID NO: 4081 - DNA, 52 bp, Homo sapiens
  misc_feature (25)..(25): n equals a,t,g, or c
  misc_feature (27)..(27): n equals a,t,g, or c
  misc_feature (45)..(45): n equals a,t,g, or c
  misc_feature (50)..(50): n equals a,t,g, or c
gatggaagtaatttagatttggaanantcatacataaaatgattntagtnca

SEQ ID NO: 4082 - DNA, 89 bp, Homo sapiens
  misc_feature (57)..(57): n equals a,t,g, or c
  misc_feature (78)..(78): n equals a,t,g, or c
  misc_feature (82)..(83): n equals a,t,g, or c
  misc_feature (88)..(88): n equals a,t,g, or c
gctcttcctctcaggcgggcagggcttgggcagcggcctgagtctcagcggacttgncgaccctcgagttgaatcggnttgnngagcng

SEQ ID NO: 4083 - DNA, 100 bp, Homo sapiens
  misc_feature (28)..(28): n equals a,t,g, or c
  misc_feature (43)..(43): n equals a,t,g, or c
  misc_feature (66)..(66): n equals a,t,g, or c
  misc_feature (73)..(73): n equals a,t,g, or c
  misc_feature (78)..(78): n equals a,t,g, or c
gcaggtaccggtccggaattcccgggtngacccacgcgtccgnaaaagcttcgagctgttgcgggngtgagtntgttntgttgatgaccaatggggaaaa

SEQ ID NO: 4084 - DNA, 52 bp, Homo sapiens
  misc_feature (17)..(17): n equals a,t,g, or c
  misc_feature (20)..(20): n equals a,t,g, or c
  misc_feature (29)..(29): n equals a,t,g, or c
  misc_feature (38)..(38): n equals a,t,g, or c
  misc_feature (42)..(42): n equals a,t,g, or c
ggtgttgcttttacggncanagctgactntgttgaggntgangttaaaagtg

SEQ ID NO: 4085 - DNA, 256 bp, Homo sapiens
  misc_feature (10)..(10): n equals a,t,g, or c
  misc_feature (21)..(21): n equals a,t,g, or c
  misc_feature (23)..(23): n equals a,t,g, or c
  misc_feature (137)..(137): n equals a,t,g, or c
  misc_feature (179)..(179): n equals a,t,g, or c
  misc_feature (183)..(183): n equals a,t,g, or c
  misc_feature (211)..(211): n equals a,t,g, or c
  misc_feature (227)..(227): n equals a,t,g, or c
  misc_feature (234)..(234): n equals a,t,g, or c
cctacaaacnccatggtaatncnactacaacagggaaagctggtacgcctgcaggtaccggtccggaattcccgggtcgacccacgcgtccgctcccccaatgcaggccacttctcctccctcctctctaaatgtantcccctctcctccatctaaaggcaacattccttacccattantctnagaaattgtcttaagcaacagccccaantgctggctgcccccanccaagcnttggggccgccatcctgcctgg

SEQ ID NO: 4086 - DNA, 171 bp, Homo sapiens
  misc_feature (40)..(40): n equals a,t,g, or c
  misc_feature (50)..(50): n equals a,t,g, or c
  misc_feature (53)..(53): n equals a,t,g, or c
  misc_feature (56)..(57): n equals a,t,g, or c
  misc_feature (119)..(119): n equals a,t,g, or c
  misc_feature (123)..(123): n equals a,t,g, or c
  misc_feature (144)..(144): n equals a,t,g, or c
  misc_feature (150)..(150): n equals a,t,g, or c
  misc_feature (165)..(165): n equals a,t,g, or c
cttcaggaggaagcacatttaaatcatctttcaagcactntatttttttngtncannaattcaaccttattgatagaagagaacttgcaccactccaagaactgattgaaaaactcacntcanaagacagataaaaggatgcanagcttntgcaaattggtcctnaaatga

SEQ ID NO: 4087 - DNA, 331 bp, Homo sapiens
  misc_feature (7)..(7): n equals a,t,g, or c
  misc_feature (11)..(12): n equals a,t,g, or c
  misc_feature (90)..(90): n equals a,t,g, or c
  misc_feature (139)..(139): n equals a,t,g, or c
  misc_feature (169)..(169): n equals a,t,g, or c
  misc_feature (174)..(174): n equals a,t,g, or c
  misc_feature (197)..(197): n equals a,t,g, or c
  misc_feature (272)..(272): n equals a,t,g, or c
  misc_feature (279)..(279): n equals a,t,g, or c
  misc_feature (283)..(283): n equals a,t,g, or c
  misc_feature (310)..(310): n equals a,t,g, or c
  misc_feature (315)..(315): n equals a,t,g, or c
ggtcagncaanngagtcaagatttaagtttacaagaggctgaaactgagcaatcagatactttagataataaagaagctgtcatcctaanggaaaaacctccatctggacgccagacaccgcagcctttaaggcatcantcttacatcttggcagtaaatgaccagganaccangtcagacactacctgctggctgnccaatgatgcacgtcagaggtccacataataagaatggaggaaagaaaagcctcgagtccaatcccgctggcgantctttgncttncatcccatttatagagtcctctgatgnccagnctggagtgcaattggc

SEQ ID NO: 4088 - DNA, 152 bp, Homo sapiens
  misc_feature (6)..(6): n equals a,t,g, or c
  misc_feature (10)..(10): n equals a,t,g, or c
  misc_feature (14)..(14): n equals a,t,g, or c
  misc_feature (20)..(20): n equals a,t,g, or c
  misc_feature (43)..(43): n equals a,t,g, or c
  misc_feature (102)..(102): n equals a,t,g, or c
  misc_feature (113)..(113): n equals a,t,g, or c
  misc_feature (119)..(119): n equals a,t,g, or c
  misc_feature (135)..(135): n equals a,t,g, or c
  misc_feature (146)..(146): n equals a,t,g, or c
aggganaagntggnacgccngcaggtaccggtccggaattccngggtcgacccacgcgtccggaggagccgggctgatgcggggctgctcagggcaggcccnagggcgagctngccatngaggccaggcagcctncacctgtgctncagtgg

SEQ ID NO: 4089 - DNA, 166 bp, Homo sapiens
  misc_feature (5)..(5): n equals a,t,g, or c
  misc_feature (9)..(9): n equals a,t,g, or c
  misc_feature (15)..(15): n equals a,t,g, or c
  misc_feature (17)..(17): n equals a,t,g, or c
  misc_feature (25)..(25): n equals a,t,g, or c
  misc_feature (151)..(151): n equals a,t,g, or c
  misc_feature (160)..(160): n equals a,t,g, or c
  misc_feature (163)..(163): n equals a,t,g, or c
  misc_feature (165)..(166): n equals a,t,g, or c
gatgnccanttgggncngaattccngggtcgacccacgcgtccggtactccctaaattttttaaaatacatataaatgcttgacattattatacatgtaagtggaatagaaatagaaacagaaaataaatgcttcaaggtgttttacaccntgaaaaaanaantnn

SEQ ID NO: 4090 - DNA, 100 bp, Homo sapiens
  misc_feature (49)..(49): n equals a,t,g, or c
  misc_feature (62)..(62): n equals a,t,g, or c
  misc_feature (74)..(74): n equals a,t,g, or c
  misc_feature (88)..(88): n equals a,t,g, or c
  misc_feature (93)..(93): n equals a,t,g, or c
ccgtaccggtccggaattcccgggtcgacccacgcgtccgggatatctngggggccattagncagcctgctatnaccatcagtcagcnggatntaatcaa

SEQ ID NO: 4091 - DNA, 136 bp, Homo sapiens
  misc_feature (7)..(7): n equals a,t,g, or c
  misc_feature (21)..(21): n equals a,t,g, or c
  misc_feature (56)..(56): n equals a,t,g, or c
  misc_feature (69)..(69): n equals a,t,g, or c
  misc_feature (73)..(73): n equals a,t,g, or c
  misc_feature (132)..(133): n equals a,t,g, or c
tgactgnaatgaaaagaacgnggcctttttgcaacgcttgaacctgagatcaaggntgtcattgagcancttnaacctgggcaccaccctgggttgcaacttgcaaaaaaccttcggatttgggggatgggnnacc

SEQ ID NO: 4092 - DNA, 277 bp, Homo sapiens
  misc_feature (4)..(4): n equals a,t,g, or c
  misc_feature (15)..(16): n equals a,t,g, or c
  misc_feature (28)..(28): n equals a,t,g, or c
  misc_feature (38)..(38): n equals a,t,g, or c
  misc_feature (135)..(135): n equals a,t,g, or c
  misc_feature (142)..(142): n equals a,t,g, or c
  misc_feature (155)..(156): n equals a,t,g, or c
  misc_feature (199)..(199): n equals a,t,g, or c
  misc_feature (210)..(210): n equals a,t,g, or c
  misc_feature (217)..(217): n equals a,t,g, or c
  misc_feature (223)..(223): n equals a,t,g, or c
  misc_feature (240)..(240): n equals a,t,g, or c
ggancttgtactggnnggtctccctgcncgtactcggnccggaattcccgggtcgacccacgcgtccgaagaagcgaaattttattctggatcagacaaatgtgtctgcttgcttgcccagaaggagaaaaatgngcctgtnttcaggctttccnncgaaaacttgttggaagttggccaaaagatgaagactattgcnaaagacccagnataaacntaattnaagggaaagactaccanacatgcggtcttaaaatgaaaggaactttcctccaaa

SEQ ID NO: 4093 - DNA, 415 bp, Homo sapiens
  misc_feature (3)..(3): n equals a,t,g, or c
  misc_feature (6)..(6): n equals a,t,g, or c
  misc_feature (24)..(24): n equals a,t,g, or c
  misc_feature (39)..(39): n equals a,t,g, or c
  misc_feature (55)..(55): n equals a,t,g, or c
  misc_feature (323)..(323): n equals a,t,g, or c
  misc_feature (346)..(346): n equals a,t,g, or c
  misc_feature (402)..(402): n equals a,t,g, or c
  misc_feature (407)..(407): n equals a,t,g, or c
  misc_feature (415)..(415): n equals a,t,g, or c
ggncgnggaacttctaacgggaanactcctatagggaantctggtacgcctgccngtaccggtccggaattcccgggtcgacccacgcgtccgcaaattattagtgtataactctgaattgaatttagatctctttgattccaaggcttgggatcttacatgcccctttattaggtaggaatagatacttcatgaagatgataacatgccatctacagaatatgatatggcattgatgtgacactttacctacaaaatatcttatttctgagtcttccgcaagagaaaaagcaattttatttttatgggacaagattggatgntacatttttaatcaattacatgnaagtgtattctacctttaaaattgctatggaaaagtttaattatttccaacagganttatnactatcan

SEQ ID NO: 4094 - DNA, 303 bp, Homo sapiens
  misc_feature (6)..(6): n equals a,t,g, or c
  misc_feature (19)..(19): n equals a,t,g, or c
  misc_feature (26)..(26): n equals a,t,g, or c
  misc_feature (28)..(28): n equals a,t,g, or c
  misc_feature (43)..(43): n equals a,t,g, or c
  misc_feature (289)..(289): n equals a,t,g, or c
  misc_feature (291)..(291): n equals a,t,g, or c
  misc_feature (296)..(296): n equals a,t,g, or c
  misc_feature (298)..(298): n equals a,t,g, or c
  misc_feature (302)..(302): n equals a,t,g, or c
tcaacnggcacggctcccngtttagnanctggcccgcctgcangtaccggtccggaattcccgggtcgacccacgcgtccggccccgcagctcctccgggagcccgctggtaactcgcgtccctcgcgcttctccggcgcctgaggggcccgcctcgggccatggtgctctcccaggaggagccggactccgcgcggggcacgagcgaggcgcagccgctcggccccgcgcccacgggggccgctccgccgcccggcccgggaccctcggacagccccgaggcggctgncnagaangnggang

SEQ ID NO: 4095 - DNA, 122 bp, Homo sapiens
  misc_feature (2)..(2): n equals a,t,g, or c
  misc_feature (15)..(15): n equals a,t,g, or c
  misc_feature (59)..(59): n equals a,t,g, or c
  misc_feature (92)..(92): n equals a,t,g, or c
  misc_feature (102)..(102): n equals a,t,g, or c
  misc_feature (115)..(115): n equals a,t,g, or c
  misc_feature (117)..(117): n equals a,t,g, or c
gnaaagttcttatgntagtatacatataaatatcagtgttctgacatgtaagaaaatgntacggtatcacacttatattttatgaacattgnactggtgctntaatatgagcttnantataa

SEQ ID NO: 4096 - DNA, 148 bp, Homo sapiens
  misc_feature (15)..(15): n equals a,t,g, or c
  misc_feature (24)..(24): n equals a,t,g, or c
  misc_feature (26)..(26): n equals a,t,g, or c
  misc_feature (74)..(74): n equals a,t,g, or c
  misc_feature (94)..(94): n equals a,t,g, or c
  misc_feature (128)..(128): n equals a,t,g, or c
  misc_feature (133)..(133): n equals a,t,g, or c
  misc_feature (142)..(142): n equals a,t,g, or c
catgcagagaatatnctgaagaantnaagcgtgactgctggcgaactgtgacacgggtgagctcgatcacatcnctctcatacatcattcattnaagcatttctttagcccacggatccagacccaantgctntgtatgtgnagatac

SEQ ID NO: 4097 - DNA, 177 bp, Homo sapiens
  misc_feature (32)..(32): n equals a,t,g, or c
  misc_feature (50)..(50): n equals a,t,g, or c
  misc_feature (61)..(61): n equals a,t,g, or c
  misc_feature (70)..(70): n equals a,t,g, or c
  misc_feature (96)..(96): n equals a,t,g, or c
  misc_feature (147)..(147): n equals a,t,g, or c
  misc_feature (152)..(152): n equals a,t,g, or c
  misc_feature (159)..(160): n equals a,t,g, or c
cggcccggaattcccgggtcgacccacgcgtncggtaggagtcaatgatnacatcctagtnttaacaagntacagataatcgctgactggcatgtngtctgcttctagcttggagctaaatgctgctcatgctgaaaagaataatgnctatntctttgnntgggtattagctctatt

SEQ ID NO: 4098 - DNA, 317 bp, Homo sapiens
  misc_feature (10)..(10): n equals a,t,g, or c
  misc_feature (19)..(19): n equals a,t,g, or c
  misc_feature (22)..(22): n equals a,t,g, or c
  misc_feature (24)..(24): n equals a,t,g, or c
  misc_feature (72)..(72): n equals a,t,g, or c
  misc_feature (103)..(103): n equals a,t,g, or c
  misc_feature (293)..(294): n equals a,t,g, or c
  misc_feature (305)..(305): n equals a,t,g, or c
  misc_feature (317)..(317): n equals a,t,g, or c
tcactatatntgagggcanggncncctgcaggtaccggtccggaattcccgggtcgacccacgcgtccgganttaggtctattaggataattaggagtttgancccatcaacactattcttgtagcagttaggaatcttgagctatttttttctcatacgattactatagtccagtttaccaaagttttctttagatgtctgataatcttgagatgattgcttaccttaaaaggtatagaaaggatcacttaaatatatggaaaaatgaaataagggtgaagctgaataaagnnctacttactgnattaaaaaaaan

SEQ ID NO: 4099 - DNA, 548 bp, Homo sapiens
  misc_feature (1)..(1): n equals a,t,g, or c
  misc_feature (39)..(39): n equals a,t,g, or c
  misc_feature (327)..(327): n equals a,t,g, or c
  misc_feature (375)..(375): n equals a,t,g, or c
  misc_feature (392)..(392): n equals a,t,g, or c
  misc_feature (415)..(415): n equals a,t,g, or c
  misc_feature (477)..(478): n equals a,t,g, or c
  misc_feature (510)..(510): n equals a,t,g, or c
  misc_feature (519)..(519): n equals a,t,g, or c
  misc_feature (547)..(547): n equals a,t,g, or c
nagttcactgaaaacttttactatatttgagcgctggtnccctgcaggtaccggtccggaattcccgggtcgacccacgcgtccgatggtgtcatttttcctgcagagaaatttaatctttcactttaatctttcattggcctatagcagccagtggggtcttttaaaaaattcttttccttcatattccccgtttgagcttaaggtacaaaaaaagaaaatactcttgaaatgctgtgaccagatctagactgtaacatgccccttcgctcctctggtgaggaagtgcgggaaggtggaagacattgaggggttgattatttactncgtttggaagtaagaagggaggtagctcttatttggaataagagctgncttcagaacaggtgtgngctctcctgaagcccagagctgngactccctgggtgtgtctcttacctgtgcccttgggcaagtggcacgggagaagaatacgannagaggaggatggtacagacagaggagtcacangctgaacangctgtcaccggggcaagatgactgacang

SEQ ID NO: 4100 - DNA, 51 bp, Homo sapiens
  misc_feature (43)..(43): n equals a,t,g, or c
  misc_feature (45)..(46): n equals a,t,g, or c
  misc_feature (49)..(49): n equals a,t,g, or c
gctcaaggtctcctccttccctccccccccccccccgtcattnanntgncc

SEQ ID NO: 4101 - DNA, 402 bp, Homo sapiens
  misc_feature (5)..(5): n equals a,t,g, or c
  misc_feature (331)..(331): n equals a,t,g, or c
  misc_feature (370)..(370): n equals a,t,g, or c
  misc_feature (375)..(375): n equals a,t,g, or c
  misc_feature (381)..(381): n equals a,t,g, or c
  misc_feature (402)..(402): n equals a,t,g, or c
gattntcgccagggccaatacttatccgcaggggtgtgtgccaggcagcccaggtcagcctccctccaccgggccacccgcaccaggttgcctcccatcgtttgcaggagcggaagacccgatggagcaggtttcacagtgccctcgctgctgcctcccgtttcatctgcacgtctctttcaatgcgggcgtgcgaacttccaggtagagccgagttcaagaaaatgaagtactgcatgcgacgagcaagtttattgaagagggtgtgaggtcgcggcgcctgaccctcattatgtcaagttactactaaatgaaattagaacttcactgncctttttctttttcccatcgaggtgcaagaggaattgancttanggtagnattttgggatttaaaaaaaan

SEQ ID NO: 4102 - DNA, 214 bp, Homo sapiens
  misc_feature (2)..(2): n equals a,t,g, or c
  misc_feature (36)..(36): n equals a,t,g, or c
  misc_feature (93)..(93): n equals a,t,g, or c
  misc_feature (177)..(177): n equals a,t,g, or c
  misc_feature (183)..(183): n equals a,t,g, or c
  misc_feature (195)..(195): n equals a,t,g, or c
  misc_feature (208)..(208): n equals a,t,g, or c
  misc_feature (211)..(211): n equals a,t,g, or c
gnctggttcacagggaatctagttactatattgaangctggtacccctgcaggtaccggtccggaattcccgggtcgacccacgcgtccgaangactacagagccccgaattaataccaatagaaggggcaatggcttttaaaataaaaatgaaaggggaattaaaacagcttaaangttaanttaaaaagtggnaggggaataaaanaanttg

SEQ ID NO: 4103 - DNA, 98 bp, Homo sapiens
  misc_feature (9)..(9): n equals a,t,g, or c
  misc_feature (28)..(28): n equals a,t,g, or c
  misc_feature (30)..(30): n equals a,t,g, or c
  misc_feature (55)..(55): n equals a,t,g, or c
  misc_feature (69)..(69): n equals a,t,g, or c
agagggatnctggaaaccctttcgggantnaaggccaggtacccctgcaggtacncggtccggaattcncgggtcgacccacgcgttcgctaatccag

SEQ ID NO: 4104 - DNA, 146 bp, Homo sapiens
  misc_feature (6)..(6): n equals a,t,g, or c
  misc_feature (17)..(17): n equals a,t,g, or c
  misc_feature (36)..(36): n equals a,t,g, or c
  misc_feature (90)..(90): n equals a,t,g, or c
  misc_feature (113)..(113): n equals a,t,g, or c
  misc_feature (119)..(119): n equals a,t,g, or c
  misc_feature (126)..(126): n equals a,t,g, or c
  misc_feature (138)..(138): n equals a,t,g, or c
agacanaagtggaattncggaactacattgaaagcnggtacccctgcaggtaccggtccggaattcccgggtcgacccacgcgtccggtngcatgggggaaaatcgagtgggnccaggngggcaancgaagcaaggcnttggcgtc

SEQ ID NO: 4105 - DNA, 279 bp, Homo sapiens
  misc_feature (51)..(51): n equals a,t,g, or c
  misc_feature (258)..(259): n equals a,t,g, or c
  misc_feature (263)..(263): n equals a,t,g, or c
  misc_feature (272)..(272): n equals a,t,g, or c
  misc_feature (274)..(274): n equals a,t,g, or c
tgtatctttgtaaaaaaaaagatctttataaacaatatatgaatgtgccgncttatttattgattactgtaaattaagatataaatggctatttgaataatttatacctgtgggaattaactggagtatttgttatttgactgttttctattaaggaatattaggcttggtgctatgatgaatgatcttgtaaaatcatgtgtattcttaagaaaatttttgaatataaatttcttgaactgacaaaaaacaaaaaannaatntataaaatnanaaaat

SEQ ID NO: 4106 - DNA, 281 bp, Homo sapiens
  misc_feature (45)..(45): n equals a,t,g, or c
  misc_feature (155)..(155): n equals a,t,g, or c
  misc_feature (178)..(178): n equals a,t,g, or c
  misc_feature (195)..(195): n equals a,t,g, or c
  misc_feature (211)..(211): n equals a,t,g, or c
  misc_feature (240)..(241): n equals a,t,g, or c
  misc_feature (258)..(258): n equals a,t,g, or c
cgatatatttaaactttccctctatattataggttttgtggcatncacggtcaggtgtagaggaagctggccccttgcagaactgtactgaaaaatttttaataaatattttcacaggactgaattgaccacaggggcttgtaataaaaattttnacactggagctgggaaaaccaanctattggggggaaatcntccaatttggaaaggnctacctttcatggggccaccctggaaaanntgggaagtgggttaatnagcctaattgaactttttcctaa

SEQ ID NO: 4107 - DNA, 222 bp, Homo sapiens
  misc_feature (171)..(171): n equals a,t,g, or c
  misc_feature (181)..(181): n equals a,t,g, or c
  misc_feature (188)..(188): n equals a,t,g, or c
  misc_feature (203)..(203): n equals a,t,g, or c
  misc_feature (211)..(211): n equals a,t,g, or c
gcgaccatctcaatgtcaccaagaaatggtcctaatcctgagtcgtcacccttggattttatggatcacggagctgaccatctttacctggtcctggaactgaaaaactgtagcttgtgtgaaaatgagcctttggaccagtctttattaaaacaaacaaacatgaaaaanaaaaaaaaanatctaanaaaaaaaaaaaaaanaaaaaaanaaaaaaaaaaa

SEQ ID NO: 4108 - DNA, 235 bp, Homo sapiens
  misc_feature (10)..(10): n equals a,t,g, or c
  misc_feature (14)..(14): n equals a,t,g, or c
  misc_feature (123)..(123): n equals a,t,g, or c
  misc_feature (183)..(183): n equals a,t,g, or c
  misc_feature (209)..(210): n equals a,t,g, or c
  misc_feature (223)..(223): n equals a,t,g, or c
  misc_feature (226)..(226): n equals a,t,g, or c
cgaatagacntctntggaacgcctactatagggatgctggtacgcctgcaggtaccggtccggaattcccgggtcgacccacgcgtccgcggacgcgtgggagaatatgggataagtagtcangatcagaaaggtgagacaataaaaacaagatatattccaaagcctaatcctaaattctgnttcaaattctttatcatatttcaagnnctttctcatactncantgatcttgg

SEQ ID NO: 4109 - DNA, 66 bp, Homo sapiens
  misc_feature (9)..(9): n equals a,t,g, or c
  misc_feature (43)..(43): n equals a,t,g, or c
  misc_feature (50)..(50): n equals a,t,g, or c
  misc_feature (53)..(53): n equals a,t,g, or c
  misc_feature (65)..(65): n equals a,t,g, or c
gaaaaaaanaagagatagaataaaagggtgaagacagaaaaancaagagnaanatgaatgtaatnt

SEQ ID NO: 4110 - DNA, 454 bp, Homo sapiens
  misc_feature (255)..(255): n equals a,t,g, or c
  misc_feature (293)..(293): n equals a,t,g, or c
  misc_feature (307)..(308): n equals a,t,g, or c
  misc_feature (339)..(339): n equals a,t,g, or c
  misc_feature (400)..(400): n equals a,t,g, or c
  misc_feature (404)..(404): n equals a,t,g, or c
  misc_feature (436)..(436): n equals a,t,g, or c
  misc_feature (441)..(441): n equals a,t,g, or c
  misc_feature (448)..(448): n equals a,t,g, or c
gcaagcataaggcaataaatacctgcagcaacgtgggagaaagaagttgctggaccaggagaaaaggcagttatgaagccaattcattttgaaggaagcacaatttccaccttattttttgaactttggcagtttcaatgtctgtctctgttgcttcggggcataagctgatcaccgtctagttgggaaagtaaccctacagggtttgtagggacatgatcagcatcctgatttgaaccctgaaatgttgtgtanacaccctctttgggtccaatgaggtagttgggttgaantagcaagatgttgnncttttctggatttttttgccatgggttcttnacttgaccttggacttttggcatgattcttagtcatactttgaacttggctcattccactntttntcagagcaactcttcctttgggaaaagagttnttcanatcatanaccata

SEQ ID NO: 4111 - DNA, 66 bp, Homo sapiens
  misc_feature (7)..(7): n equals a,t,g, or c
  misc_feature (16)..(16): n equals a,t,g, or c
  misc_feature (27)..(27): n equals a,t,g, or c
  misc_feature (57)..(57): n equals a,t,g, or c
gcccatnaccatcttncatgagctganatcccttcaaaatcaagagggggcgatgcntggcagcta

SEQ ID NO: 4112 - DNA, 68 bp, Homo sapiens
  misc_feature (39)..(41): n equals a,t,g, or c
  misc_feature (57)..(57): n equals a,t,g, or c
  misc_feature (68)..(68): n equals a,t,g, or c
ggatcatcacctgtaaagcagagctatattaagccaagnnncaggaagcagtagaangctaatcttgn

SEQ ID NO: 4113 - DNA, 349 bp, Homo sapiens
  misc_feature (54)..(54): n equals a,t,g, or c
ggcctgaagcacattgtcaaagatgaaagctcttttggggaaaagggctctccngtggaatcatcccttgtcatagcatgtggctctaaattttcagcctcattcacagtagcttgcattgttgtattgcttttgggacacctgtgttttatctggaaatgtagacaggaatagcggttttttttgtatgtgtattatatattgtttcactgctaatcttctacacaattttttagaataaaaaagggtaaatagcttgtgccattttgctaattacatagatttgacttttgatcacataaataaaaaataaaacaaggcaggacattgtcctgcacatagttgaaaa

SEQ ID NO: 4114 - DNA, 227 bp, Homo sapiens
  misc_feature (16)..(16): n equals a,t,g, or c
  misc_feature (19)..(19): n equals a,t,g, or c
  misc_feature (43)..(43): n equals a,t,g, or c
  misc_feature (65)..(65): n equals a,t,g, or c
  misc_feature (72)..(72): n equals a,t,g, or c
  misc_feature (103)..(103): n equals a,t,g, or c
  misc_feature (121)..(121): n equals a,t,g, or c
  misc_feature (126)..(126): n equals a,t,g, or c
  misc_feature (158)..(158): n equals a,t,g, or c
  misc_feature (178)..(178): n equals a,t,g, or c
  misc_feature (191)..(191): n equals a,t,g, or c
  misc_feature (195)..(195): n equals a,t,g, or c
  misc_feature (217)..(217): n equals a,t,g, or c
gaacgctggtacgccngcngggaccggtccggaattcccgggncgacccacgcgtccgatcgaangcgccgntgagacctcagccttgacctccctcagacgnggccgggaccctgagccnctgcncaaagccacccgccccgacgtacttaggcggnatagccctgagacctctggncagcgccaggcangcancgggggcgaaagaggcctgggnctgagacttc

SEQ ID NO: 4115 - DNA, 147 bp, Homo sapiens
  misc_feature (3)..(3): n equals a,t,g, or c
  misc_feature (13)..(13): n equals a,t,g, or c
  misc_feature (24)..(24): n equals a,t,g, or c
  misc_feature (36)..(36): n equals a,t,g, or c
  misc_feature (46)..(46): n equals a,t,g, or c
  misc_feature (127)..(127): n equals a,t,g, or c
  misc_feature (135)..(136): n equals a,t,g, or c
  misc_feature (142)..(142): n equals a,t,g, or c
  misc_feature (145)..(145): n equals a,t,g, or c
ctncagggcccangttcgagaccnaaacccccaggnagccaaaacntctcttgaaaagcacagggaccgaccaggggagatggggaggagatatggagtgagacacctgctccagaagaagccagcnttctctanncagggngcnaa

SEQ ID NO: 4116 - DNA, 190 bp, Homo sapiens
  misc_feature (6)..(6): n equals a,t,g, or c
  misc_feature (12)..(13): n equals a,t,g, or c
  misc_feature (40)..(40): n equals a,t,g, or c
  misc_feature (43)..(43): n equals a,t,g, or c
  misc_feature (133)..(133): n equals a,t,g, or c
  misc_feature (138)..(138): n equals a,t,g, or c
  misc_feature (175)..(175): n equals a,t,g, or c
  misc_feature (180)..(180): n equals a,t,g, or c
  misc_feature (189)..(189): n equals a,t,g, or c
cgcccnagaccnncgtttggaacgacctactatagggaangcnggtacgcctgcaggtaccggtccggaattcccgggtcgacccacgcgtccgaaaagtagccctctttctcctggatcttgctgagggagnggctnggggggtgggggagataaaaaagaacttaaaatgggnaaagnaagaaatgnt

SEQ ID NO: 4117 - DNA, 625 bp, Homo sapiens
  misc_feature (5)..(5): n equals a,t,g, or c
  misc_feature (10)..(10): n equals a,t,g, or c
  misc_feature (14)..(14): n equals a,t,g, or c
  misc_feature (26)..(26): n equals a,t,g, or c
  misc_feature (30)..(30): n equals a,t,g, or c
  misc_feature (231)..(231): n equals a,t,g, or c
  misc_feature (349)..(349): n equals a,t,g, or c
  misc_feature (425)..(425): n equals a,t,g, or c
  misc_feature (504)..(504): n equals a,t,g, or c
  misc_feature (542)..(542): n equals a,t,g, or c
  misc_feature (546)..(546): n equals a,t,g, or c
  misc_feature (609)..(609): n equals a,t,g, or c
  misc_feature (619)..(619): n equals a,t,g, or c
  misc_feature (622)..(622): n equals a,t,g, or c
ctgtnagctntcgnctatagttttgngctngtacccctgcaggtaccggtccggaattcccgggtcgacccacgcgtccggtctacaaccacgtaatatccttttcatcagccttatgaaattttcccccaatttatccaagtcaggatttcagtatgcagaagtctaatgtcatcttggagagttcattgtgcctcccccatatccaagaccatttactaaaaccttagntcagtctttaaagagtcacaagatcctattatgcctagttttttttccagtcttttaagtctattccttaccttgccaaaaaagtacctgtttctatggtttaacaaatggagcttanaatatggaactatgacaaaaatacctgctacatgcttccttctgtatgaatacatgagacctaccttcattcatgnttcctctatgaagctttccctgcactccaaacacagagctgagacttccacctaatgtagaaagctagcacgagccggngctgacagatggaagacttgagatggtacaagattatntatnggaaacacaaaagggagatacccggagccatgacagactgggatggggctggggggacaggtnaagcaagacnttnata

SEQ ID NO: 4118 - DNA, 64 bp, Homo sapiens
  misc_feature (38)..(38): n equals a,t,g, or c
  misc_feature (51)..(51): n equals a,t,g, or c
  misc_feature (53)..(53): n equals a,t,g, or c
  misc_feature (63)..(64): n equals a,t,g, or c
ggttctagatcgcgagtggccgccctttttttttgggntttttttttcttnancataaaacgnn

SEQ ID NO: 4119 - DNA, 56 bp, Homo sapiens
  misc_feature (34)..(34): n equals a,t,g, or c
  misc_feature (39)..(39): n equals a,t,g, or c
  misc_feature (46)..(47): n equals a,t,g, or c
  misc_feature (49)..(49): n equals a,t,g, or c
gctcaaggtctcctccttccctcccccccccccnccggnatgtttnngngatataa

SEQ ID NO: 4120 - DNA, 502 bp, Homo sapiens
  misc_feature (230)..(230): n equals a,t,g, or c
  misc_feature (304)..(304): n equals a,t,g, or c
  misc_feature (313)..(313): n equals a,t,g, or c
  misc_feature (426)..(426): n equals a,t,g, or c
  misc_feature (430)..(430): n equals a,t,g, or c
  misc_feature (453)..(453): n equals a,t,g, or c
  misc_feature (468)..(468): n equals a,t,g, or c
  misc_feature (498)..(498): n equals a,t,g, or c
gtgttagaaggacccaaggggaatggttggaaggcatgtcatagaaggagaagataaagaaagcccagatgatttttgcctgtagaagaggagggctgatgggattcaactgcctaagtttgtatctaaatcttgttttatggaattgaggttacattttgtttgtatggctcttaagaacagaattcagatttctgcctttgaaaaaggggaaaccctttaccaattangattattaaaaaatggaatttctctgcattttgagatagtaaactctacattgaagtattctgctacttgttanaaattttgntcaaaactttaagcattaaatggggaattggtctggatgactgttaagatccccaagagaatccaaatttttgatcttagctgcaattaaagatgtttataaatgcttaacanctgntctacctacttccttattcttangatgtattactattncatatttaaacgatcactcaaggaccattnaatc

SEQ ID NO: 4121 - DNA, 139 bp, Homo sapiens
  misc_feature (47)..(47): n equals a,t,g, or c
  misc_feature (58)..(58): n equals a,t,g, or c
  misc_feature (71)..(71): n equals a,t,g, or c
  misc_feature (90)..(90): n equals a,t,g, or c
  misc_feature (128)..(128): n equals a,t,g, or c
gctcaaggtctcctccttccctcccccccctcccccgtctgggcttnacttcctttcntacttggattctnctgctagctgcctcccatnatcttttttggaggcccgtctcttgctgtggggaagantgggctggctg

SEQ ID NO: 4122 - DNA, 377 bp, Homo sapiens
  misc_feature (13)..(13): n equals a,t,g, or c
  misc_feature (27)..(27): n equals a,t,g, or c
  misc_feature (31)..(31): n equals a,t,g, or c
  misc_feature (131)..(131): n equals a,t,g, or c
  misc_feature (136)..(136): n equals a,t,g, or c
  misc_feature (141)..(141): n equals a,t,g, or c
  misc_feature (155)..(155): n equals a,t,g, or c
  misc_feature (162)..(162): n equals a,t,g, or c
  misc_feature (217)..(217): n equals a,t,g, or c
  misc_feature (329)..(329): n equals a,t,g, or c
  misc_feature (331)..(331): n equals a,t,g, or c
  misc_feature (369)..(369): n equals a,t,g, or c
  misc_feature (373)..(373): n equals a,t,g, or c
  misc_feature (376)..(376): n equals a,t,g, or c
gtaaccttagtangatagaacttcatntggnagggccagctggtacgcctgcaggtaccggtccggaattcccgggtcgacccacgcgtccgtttgaatttttgagttatcaatgtactgaagtctctttntaatnttatngggtggttcagtgnggtcagngccttgagtgtttcaagatctctattctggattttagtttagcttttattgactntctaggttgtggccattgcctgaaatacatgacagtgagctcacagaaaccttatactttgaatttcacaaaaatcatataatgttaggttcttgcttgctttccctttatntnttttactgtcaataaaatactgatcctgaaaaaaaaanaaanaana

SEQ ID NO: 4123 - DNA, 530 bp, Homo sapiens
  misc_feature (13)..(13): n equals a,t,g, or c
  misc_feature (281)..(281): n equals a,t,g, or c
  misc_feature (385)..(385): n equals a,t,g, or c
  misc_feature (398)..(398): n equals a,t,g, or c
  misc_feature (447)..(447): n equals a,t,g, or c
  misc_feature (468)..(469): n equals a,t,g, or c
  misc_feature (484)..(484): n equals a,t,g, or c
  misc_feature (491)..(491): n equals a,t,g, or c
cgattaactgccnatcatcacctcatttgctttttttgacaacatactactagaaacctaggctgtgagtgtaaaaccataactgttagaatcatttttttggcaatagctcacattctgttaagagtcatttgctttaatcaaagatcatgatttattatatattttttataagtagggatggggccaagattattcctttggcacagcagtaagtgtgctcaagatctttgcctgtaagcttgaatatttggcttaaattttgtgcatatgaatactgntaaaggtatatttgactacattttgaaaggaaaaaggtagtcctgctaaaattgacatttagggatattttaatctatgtatttggtaaaggtaattagtgaangtattaagttatnaaaattttaagggaaaacatttaaaaagcaaaatagtccgtatcagatnaatagaggtagaataccactnnagattaaacaaggcnctggtancaatgaaggttgtcttgttcagacgactgagatatttaa

SEQ ID NO: 4124 - DNA, 68 bp, Homo sapiens
  misc_feature (44)..(44): n equals a,t,g, or c
  misc_feature (55)..(55): n equals a,t,g, or c
  misc_feature (62)..(62): n equals a,t,g, or c
  misc_feature (65)..(65): n equals a,t,g, or c
  misc_feature (67)..(67): n equals a,t,g, or c
ggaaaagagaaagagaaaaggaattaattcaatcctggcagaantgatttatatnctgattngancna

SEQ ID NO: 4125 - DNA, 211 bp, Homo sapiens
  misc_feature (17)..(17): n equals a,t,g, or c
  misc_feature (39)..(39): n equals a,t,g, or c
  misc_feature (73)..(73): n equals a,t,g, or c
  misc_feature (76)..(76): n equals a,t,g, or c
  misc_feature (87)..(87): n equals a,t,g, or c
  misc_feature (142)..(142): n equals a,t,g, or c
  misc_feature (155)..(155): n equals a,t,g, or c
  misc_feature (167)..(167): n equals a,t,g, or c
  misc_feature (174)..(174): n equals a,t,g, or c
  misc_feature (193)..(193): n equals a,t,g, or c
cgcgtggggtaccggtncggaatggccgggaagacccangcgtacgaaaaaaattatctgggttaataagganatntataaaaggcncaagaatctgaggactagatgtcataaatatgaaataggtaaaaacaaggtcacnagaaaatgggtanttaagaacttanctggtgnggtaagaagcatacagaantggaaaggtaagaacttg

SEQ ID NO: 4126 - DNA, 101 bp, Homo sapiens
  misc_feature (12)..(12): n equals a,t,g, or c
  misc_feature (14)..(14): n equals a,t,g, or c
  misc_feature (21)..(21): n equals a,t,g, or c
  misc_feature (67)..(67): n equals a,t,g, or c
  misc_feature (82)..(82): n equals a,t,g, or c
aaaagaaaaacntnaaataantgacttgattttacacaacatccttcccttttctacaagttaattnttttacaaatcattngggatatctcctaaatagg

SEQ ID NO: 4127 - DNA, 440 bp, Homo sapiens
  misc_feature (22)..(22): n equals a,t,g, or c
  misc_feature (46)..(46): n equals a,t,g, or c
  misc_feature (75)..(75): n equals a,t,g, or c
  misc_feature (98)..(98): n equals a,t,g, or c
  misc_feature (106)..(106): n equals a,t,g, or c
  misc_feature (108)..(108): n equals a,t,g, or c
  misc_feature (113)..(113): n equals a,t,g, or c
  misc_feature (271)..(271): n equals a,t,g, or c
  misc_feature (284)..(284): n equals a,t,g, or c
  misc_feature (291)..(291): n equals a,t,g, or c
  misc_feature (360)..(360): n equals a,t,g, or c
  misc_feature (402)..(402): n equals a,t,g, or c
  misc_feature (414)..(414): n equals a,t,g, or c
  misc_feature (434)..(434): n equals a,t,g, or c
  misc_feature (440)..(440): n equals a,t,g, or c
ggccatttctcacagaagattnacactggaagctgatgaaaggatngaataatggagagcaccactttcctgcanctgatcacacagcaaacataaancatggatngncaatntatttggaggcacagcgctcccccggggtggccaagcttggaagtcctgttcttacaaaattgctcactgcctctaccccatgtcagatcttataaaggtgcagcaagtgtggcaataagcagactgaggaaggcataaagggtctgatgtgaagcanagaaggcagaggnggctganggtttggagtaaaatcgagaatggccatgaagatttgaccaaggagctctgagattgagaaggaattanaacgaagtccacagggaagttgagaaaattggcagaaaattngaagaggagggnttcaacaggagatgatcaanattaan

SEQ ID NO: 4128 - DNA, 69 bp, Homo sapiens
  misc_feature (51)..(51): n equals a,t,g, or c
  misc_feature (54)..(54): n equals a,t,g, or c
  misc_feature (65)..(65): n equals a,t,g, or c
  misc_feature (67)..(68): n equals a,t,g, or c
gcaagtactgcaagaaatggcaggatgagggatggcaagaaagcagctggnaanaaagggatttnanna

SEQ ID NO: 4129 - DNA, 196 bp, Homo sapiens
  misc_feature (88)..(88): n equals a,t,g, or c
  misc_feature (107)..(107): n equals a,t,g, or c
  misc_feature (112)..(112): n equals a,t,g, or c
  misc_feature (121)..(121): n equals a,t,g, or c
  misc_feature (124)..(124): n equals a,t,g, or c
  misc_feature (129)..(129): n equals a,t,g, or c
gcgaggcgctgctggcgcagtggagccaggcacagctgagcgacggggagctgggccgcgaggtggacgcctggctgcgccgcgcccnagaacaagtaccccgcggngcgcntgcgccagnagntgcancgcgtgtggcgcgggcacacggacaaggtgttggggctggcccgggccctgtgggcccagggacggc

SEQ ID NO: 4130 - DNA, 198 bp, Homo sapiens
  misc_feature (33)..(33): n equals a,t,g, or c
  misc_feature (69)..(69): n equals a,t,g, or c
  misc_feature (113)..(113): n equals a,t,g, or c
  misc_feature (137)..(137): n equals a,t,g, or c
  misc_feature (151)..(151): n equals a,t,g, or c
  misc_feature (183)..(183): n equals a,t,g, or c
  misc_feature (198)..(198): n equals a,t,g, or c
ggggattgtgggaggagcccctgggggcctggnctgtcctccaccagaacttggcattgctgccaacanaggatctgtgcctcagctgaagactagctccggaatgtcataangggtgtgactgtgtatgccttctncttcttctcgattntgtggcatggcacaagttggctgggtgctttnacctttcccatggtn

SEQ ID NO: 4131 - DNA, 93 bp, Homo sapiens
  misc_feature (8)..(8): n equals a,t,g, or c
  misc_feature (10)..(10): n equals a,t,g, or c
  misc_feature (22)..(22): n equals a,t,g, or c
  misc_feature (35)..(35): n equals a,t,g, or c
  misc_feature (40)..(40): n equals a,t,g, or c
aattcctntntcgatccacgcntccgcaatgtccnggcanatagtaattaattaagaaaatcgtgcacccttgttacctagaatgcacggatg

SEQ ID NO: 4132 - DNA, 52 bp, Homo sapiens
  misc_feature (17)..(17): n equals a,t,g, or c
  misc_feature (34)..(34): n equals a,t,g, or c
  misc_feature (36)..(36): n equals a,t,g, or c
gaaaaaaaatagctgtncaataagtagatttaangnaattagaacactttat

SEQ ID NO: 4133 - DNA, 338 bp, Homo sapiens
  misc_feature (12)..(12): n equals a,t,g, or c
  misc_feature (49)..(49): n equals a,t,g, or c
  misc_feature (71)..(71): n equals a,t,g, or c
  misc_feature (74)..(74): n equals a,t,g, or c
  misc_feature (113)..(113): n equals a,t,g, or c
  misc_feature (171)..(171): n equals a,t,g, or c
  misc_feature (268)..(268): n equals a,t,g, or c
  misc_feature (291)..(291): n equals a,t,g, or c
  misc_feature (294)..(294): n equals a,t,g, or c
  misc_feature (300)..(300): n equals a,t,g, or c
  misc_feature (330)..(330): n equals a,t,g, or c
ttcctgggcgancacgcgtccgggagagctccccctgcaccgtgggccncagccagagaaggcctgggacnaanacccactggggggcctcccacggagcagccagaggggcnaggctgggtggggggccggagcacctgctgcacctgtattcagggtggatttttaagnaagatctcgttgtagccgtgtcgctttcctaccaggaggcccatgacatccggctgtctctctggtaatgttcatatcaatgacggttgttacctgngtcattatctcactggggctgtnacngggganagtttattctatactttcttcatttaccanctgcaatg

SEQ ID NO: 4134 - DNA, 169 bp, Homo sapiens
  misc_feature (7)..(7): n equals a,t,g, or c
  misc_feature (20)..(20): n equals a,t,g, or c
  misc_feature (24)..(24): n equals a,t,g, or c
  misc_feature (31)..(31): n equals a,t,g, or c
  misc_feature (46)..(46): n equals a,t,g, or c
  misc_feature (122)..(122): n equals a,t,g, or c
  misc_feature (137)..(137): n equals a,t,g, or c
  misc_feature (139)..(139): n equals a,t,g, or c
  misc_feature (151)..(151): n equals a,t,g, or c
  misc_feature (161)..(161): n equals a,t,g, or c
aacctantgccattcgggcntttntatcagnatcttttctaattgngagcatgtgtatgagactatttatacccaaggatatgaaggaacataatgtgactacaaggctctaataagccacngagggcaggaggctnangcggttctgttnactaaatttntctcctgt

SEQ ID NO: 4135 - DNA, 274 bp, Homo sapiens
  misc_feature (38)..(38): n equals a,t,g, or c
  misc_feature (207)..(207): n equals a,t,g, or c
  misc_feature (222)..(222): n equals a,t,g, or c
  misc_feature (239)..(239): n equals a,t,g, or c
  misc_feature (245)..(245): n equals a,t,g, or c
  misc_feature (269)..(269): n equals a,t,g, or c
aacattctatgcatatttggttgttataccaattcatnaatgaattcataaaatgactatgaaaaaaattatatgctatgggatactggcaacagtgcacatatttcataaccaaattagcagcaccggtcttaatttgatgtttttcaacttttattcattgagatgttttgaagcaattaggatatgtgtgtttactgtactttntggtttgatcccggntgtataaatgatagcantatctnggacacatttgaaatacaaaatgnttttg

SEQ ID NO: 4136 - DNA, 151 bp, Homo sapiens
  misc_feature (34)..(34): n equals a,t,g, or c
  misc_feature (47)..(47): n equals a,t,g, or c
  misc_feature (63)..(63): n equals a,t,g, or c
  misc_feature (66)..(66): n equals a,t,g, or c
  misc_feature (108)..(108): n equals a,t,g, or c
  misc_feature (136)..(136): n equals a,t,g, or c
  misc_feature (140)..(140): n equals a,t,g, or c
tcgggtttccccggggaaaatttcccccgggggnttccggacccccnaccggccgttccccgnacnccttggtttgggttttaaattaaaaaggtttttttttcaacnttcttgggccaaaaaaaaaaaaaaaatntttntataaaaaagt

SEQ ID NO: 4137 - DNA, 241 bp, Homo sapiens
  misc_feature (22)..(22): n equals a,t,g, or c
  misc_feature (33)..(33): n equals a,t,g, or c
  misc_feature (69)..(69): n equals a,t,g, or c
  misc_feature (98)..(98): n equals a,t,g, or c
  misc_feature (116)..(116): n equals a,t,g, or c
  misc_feature (129)..(130): n equals a,t,g, or c
  misc_feature (154)..(154): n equals a,t,g, or c
  misc_feature (193)..(193): n equals a,t,g, or c
  misc_feature (210)..(210): n equals a,t,g, or c
  misc_feature (216)..(216): n equals a,t,g, or c
  misc_feature (239)..(239): n equals a,t,g, or c
gtcaggtgacggcaggtgtctnaccgctcgacncggcccctgccctctggacgtgcgcggctccaggtncccgcggccctccgccacgccagctctcncggtcttagcaacaaggnggctgaccgccgnnccctgcagcggctgatcccgtggnccctgcagacccagccaacacccagcggtcccagagcgncccgcctgctacccgcngtgggnggcacccgatggccggcgagggngc

SEQ ID NO: 4138 - DNA, 286 bp, Homo sapiens
gaacctagtaacctccagatcccagaggctctcctcacctcagctgagctcctttgaaagtgattcaagggactatgtcactcagcctcatttgctggaccaaatctggagggagaacccctaaaacccctaagtgaggttgcccagggggttgtccccaggtggggggaagcaggggagagaaaatggtagccatttttacattgttttgtatagtatttattgattcaggaaacaaacacaaaattctgaataaaatgacttggaaactgccaaaaaaaaaaaa

SEQ ID NO: 4139 - DNA, 151 bp, Homo sapiens
  misc_feature (22)..(22): n equals a,t,g, or c
  misc_feature (39)..(39): n equals a,t,g, or c
  misc_feature (43)..(43): n equals a,t,g, or c
  misc_feature (49)..(50): n equals a,t,g, or c
  misc_feature (104)..(104): n equals a,t,g, or c
  misc_feature (130)..(130): n equals a,t,g, or c
  misc_feature (133)..(133): n equals a,t,g, or c
  misc_feature (137)..(137): n equals a,t,g, or c
  misc_feature (147)..(147): n equals a,t,g, or c
gggccaaggggtttaacccccnggggttccccccggggnaaanaatttnnccccggggggggttcccgggaaacccccccaaaggggcccggttttcccccgtnaaaaacccttttcacttttggggggnttntaanaaaaagaaanatac

SEQ ID NO: 4140 - DNA, 149 bp, Homo sapiens
  misc_feature (1)..(1): n equals a,t,g, or c
  misc_feature (5)..(5): n equals a,t,g, or c
  misc_feature (19)..(19): n equals a,t,g, or c
  misc_feature (85)..(85): n equals a,t,g, or c
  misc_feature (96)..(96): n equals a,t,g, or c
  misc_feature (113)..(113): n equals a,t,g, or c
  misc_feature (115)..(115): n equals a,t,g, or c
  misc_feature (134)..(134): n equals a,t,g, or c
nggangtggaaagctggtncgcctgcaggtaccggtccggaattcccgggtcgacccacgcgttcgagagtgtctaatcctgcantcatggcgcangaagaggaagatgctananattacaatttgacctgaanaacataaggcgatca

SEQ ID NO: 4141 - DNA, 266 bp, Homo sapiens
  misc_feature (10)..(11): n equals a,t,g, or c
  misc_feature (83)..(83): n equals a,t,g, or c
  misc_feature (149)..(149): n equals a,t,g, or c
  misc_feature (241)..(241): n equals a,t,g, or c
  misc_feature (252)..(252): n equals a,t,g, or c
  misc_feature (254)..(254): n equals a,t,g, or c
  misc_feature (258)..(258): n equals a,t,g, or c
  misc_feature (265)..(265): n equals a,t,g, or c
gctgtatacnnttaagagatttctgacatttattcttacactaaatggatcaactctaggatttaggcatgttaacttctgtngtgttttgaatctctccagagttgcatgtagatagcatttatttctgtgcccttaaacccatttanaaaataactacaaagtaaaaatgtagaggaaatagaaatgtattttttcatgaacattttgatacaaatttcatcatttaatgattcaccanagttctccgtntngtcnattttana

SEQ ID NO: 4142 - DNA, 132 bp, Homo sapiens
  misc_feature (2)..(3): n equals a,t,g, or c
  misc_feature (12)..(12): n equals a,t,g, or c
  misc_feature (15)..(15): n equals a,t,g, or c
  misc_feature (24)..(24): n equals a,t,g, or c
  misc_feature (106)..(106): n equals a,t,g, or c
  misc_feature (110)..(111): n equals a,t,g, or c
  misc_feature (122)..(123): n equals a,t,g, or c
gnntttgattanatnaattagacntaattaaattagacggtattccctaaaatgtataaatgtgtcactttttaaatctgaaagccttctgatgatcacaatactntatnnggctataaatnnaatccacat

SEQ ID NO: 4143 - DNA, 274 bp, Homo sapiens
  misc_feature (270)..(274): n equals a,t,g, or c
gattgttgcctttcaccccgagtttgactagcagcaagcctgtcaataaatgtaacattggtttcacttaggtgctcttcctggttttagaattccctgaatgggcagtttgacaggtaaatgtggtccaaatcagtcgttctttttaccacttaaaaaaaaaattttcctttgtagtttttttgctgtctccccgtagcctaaattgtggctgagctgcctgaagcattcctctgctttagaaaagaattatccctagtggcaaaaaannnnn

SEQ ID NO: 4144 - DNA, 433 bp, Homo sapiens
  misc_feature (95)..(95): n equals a,t,g, or c
  misc_feature (97)..(98): n equals a,t,g, or c
  misc_feature (314)..(314): n equals a,t,g, or c
  misc_feature (350)..(350): n equals a,t,g, or c
  misc_feature (393)..(393): n equals a,t,g, or c
  misc_feature (396)..(396): n equals a,t,g, or c
  misc_feature (412)..(412): n equals a,t,g, or c
  misc_feature (428)..(428): n equals a,t,g, or c
gcgaactcccacctctccatggcctgcctagccaggctggcactgccactcacactcggccccagggcccaggagggacagtgcctggagcctgngnnaggcccagcccatctgtgtgtgtgtatgtgcgtgtgatgctacctctcctcccgtccctctccaggggccccgcatacacacggccatgcacgcacacactgggcctgggccagggccccagagctcctgcctgagctggaccttatgcaaacatttctgtgcctgctgggtaggggcacgtctgaagggccctgctccaagcctgcaggaccganggccacaagccggacaagggggtagcccctggattnagcacacgaacaccacacgagcacgtgccacgcatgccttcgngtngctcattttacacaanacccccttcccgggtnacgca

SEQ ID NO: 4145 - DNA, 63 bp, Homo sapiens
  misc_feature (41)..(41): n equals a,t,g, or c
  misc_feature (51)..(51): n equals a,t,g, or c
  misc_feature (54)..(54): n equals a,t,g, or c
  misc_feature (61)..(61): n equals a,t,g, or c
gcggacgcgtggggtttgtttaaaaggactgtcttttattnataattggantgnaaatctntg

SEQ ID NO: 4146 - DNA, 133 bp, Homo sapiens
  misc_feature (68)..(68): n equals a,t,g, or c
  misc_feature (70)..(70): n equals a,t,g, or c
  misc_feature (91)..(91): n equals a,t,g, or c
  misc_feature (111)..(111): n equals a,t,g, or c
  misc_feature (114)..(114): n equals a,t,g, or c
gactagttctagatcgcgagcggccgctcgcgactagttctagatcgcgagcggccgcccgcgatctngntctagccggcgcgtgggtcgncccgggatttccggaccggnacntgctggcgtaccagctatc

SEQ ID NO: 4147 - DNA, 616 bp, Homo sapiens
  misc_feature (7)..(7): n equals a,t,g, or c
  misc_feature (364)..(364): n equals a,t,g, or c
  misc_feature (417)..(417): n equals a,t,g, or c
  misc_feature (491)..(491): n equals a,t,g, or c
  misc_feature (495)..(495): n equals a,t,g, or c
  misc_feature (565)..(565): n equals a,t,g, or c
  misc_feature (571)..(572): n equals a,t,g, or c
  misc_feature (582)..(582): n equals a,t,g, or c
  misc_feature (584)..(584): n equals a,t,g, or c
gaactgnaagccgaggcggaaaagatgcgggtgtcccagcaagaattactttctgttgatgaatctgtttacactccagactctgatgtggccgcaccacagatcaacaggaacctcatccagaaggctggttaccttaatcttagaaactggcagatgagagccatgtgctggagacctacctgcaaggccagaggcaagcaaaacagggctggtcaccaccacctgggagaggctttatttcttcacccaaggcgggaatctcatgtgtcagcccaggggagccgtggctggaggtttgatccaggacctggacaactgctcagtgatggccgtggattgcgaagaccggcgctactgcttncagatcaccacgcccaatggaaaatcgggaataatcctccaggctgagagcanaaaggaaaatgaagagtggatatgtgcaataaacaacatctccagacagatctacctgacccgacaaccctgangcangtcgcgatcaagttgaatcagaccgctctgcaagcaagtgacttccattacaagttttgaaaaaaaaaanaaaaannggccggccgntntaaaggatccaagctttacgtacgcgtgcatg

SEQ ID NO: 4148 - DNA, 447 bp, Homo sapiens
  misc_feature (221)..(221): n equals a,t,g, or c
  misc_feature (240)..(240): n equals a,t,g, or c
  misc_feature (278)..(278): n equals a,t,g, or c
  misc_feature (284)..(284): n equals a,t,g, or c
  misc_feature (304)..(304): n equals a,t,g, or c
  misc_feature (307)..(307): n equals a,t,g, or c
  misc_feature (310)..(310): n equals a,t,g, or c
  misc_feature (344)..(344): n equals a,t,g, or c
  misc_feature (378)..(378): n equals a,t,g, or c
  misc_feature (405)..(405): n equals a,t,g, or c
  misc_feature (412)..(412): n equals a,t,g, or c
  misc_feature (417)..(417): n equals a,t,g, or c
  misc_feature (441)..(441): n equals a,t,g, or c
ccacgcgttcgcccacgcgtccggtgtcaactaaattaatactgttgttaaaagtaagttgtggatcttggtcactccacacaagctagattgtcttaatatttgtatggtgcacttttacttacaaaagggaagataaaatgttttggggaataattaccaggggtctggccaggtcaaaattggttagtccccttctcccatcttctaattttggtagntaatacttggtaaaacatngggttttttaataactcactaaaaagggtattctattntggtantttggataaaatgacttgancanaangttacagcacacgaaattttcctttaagcaaatngctctcaaatatagctttttgtcatatgcttatncatgtttaagatgacatgaaaaccctnacaactntaatnttaaaataaatttttctttaatanggtatt

SEQ ID NO: 4149 - DNA, 389 bp, Homo sapiens
  misc_feature (48)..(48): n equals a,t,g, or c
  misc_feature (181)..(181): n equals a,t,g, or c
  misc_feature (243)..(243): n equals a,t,g, or c
  misc_feature (308)..(308): n equals a,t,g, or c
  misc_feature (316)..(316): n equals a,t,g, or c
  misc_feature (334)..(334): n equals a,t,g, or c
  misc_feature (347)..(347): n equals a,t,g, or c
  misc_feature (373)..(373): n equals a,t,g, or c
gtaaaatcataatcgtggattaccgcattaaatagttctaaatcagtngaactgctaataacccttggttatattgtattctctgatatagcattatcagagaaaactgtaggaggaatagtctctgttgacagtggtcaaaggtagattagagaatagtgggtttccctcaagtctgaanctgacctactaatcagcacatgtgtgagggaactgccaaggcagagaaagaattttcagaanggaggaggatgacagtctctggagctcaacacggctaagccatctaaattttctctttactttgngttacatnaatgatgaattgaaattncaaattcataaanacagttatgattctcaactacctgangttgcgttcaacatca

SEQ ID NO: 4150 - DNA, 55 bp, Homo sapiens
  misc_feature (29)..(29): n equals a,t,g, or c
  misc_feature (39)..(40): n equals a,t,g, or c
  misc_feature (53)..(53): n equals a,t,g, or c
gaatacgtaaaaaagtataagggaagcantgcattcganntactgcactattntc

SEQ ID NO: 4151 - DNA, 251 bp, Homo sapiens
  misc_feature (47)..(47): n equals a,t,g, or c
  misc_feature (115)..(115): n equals a,t,g, or c
  misc_feature (120)..(120): n equals a,t,g, or c
  misc_feature (134)..(134): n equals a,t,g, or c
  misc_feature (172)..(172): n equals a,t,g, or c
  misc_feature (191)..(191): n equals a,t,g, or c
  misc_feature (204)..(204): n equals a,t,g, or c
  misc_feature (219)..(219): n equals a,t,g, or c
  misc_feature (233)..(233): n equals a,t,g, or c
gctgcagatttgtgttacagttatttcagtatatgtcctgtccctgntaatgtgtaggtttgtaatagggagatacatttcatatcttctttgttttatccatgctgcctgccanacagncttgtacatggtanatactgaataactatcaaatgaataagtagttattaanaccaagatactttacaganaaaactttaccancttctctaggactangaccccaaatctgngctcagagctgctagctt

SEQ ID NO: 4152 - DNA, 96 bp, Homo sapiens
  misc_feature (5)..(5): n equals a,t,g, or c
  misc_feature (72)..(72): n equals a,t,g, or c
  misc_feature (82)..(82): n equals a,t,g, or c
  misc_feature (90)..(91): n equals a,t,g, or c
ggaanaaaagtctttaatgatgaacatattttccccttaagcttaaaatgtcttgcctttgaatggtatctnagcttaaggngaaaatannattaa

SEQ ID NO: 4153 - DNA, 443 bp, Homo sapiens
  misc_feature (291)..(291): n equals a,t,g, or c
  misc_feature (386)..(386): n equals a,t,g, or c
  misc_feature (390)..(390): n equals a,t,g, or c
  misc_feature (401)..(401): n equals a,t,g, or c
  misc_feature (412)..(412): n equals a,t,g, or c
gggaaaatgcaaaagcacatatatgttttaatatctttatgggctctgttcaaggcagtgctgagagggaggggttatagcttcaggagggaaccagcttctgataaacacaatctgctaggaacttgggaaaggaatcagagagctgcccttcagcgattatttaaattattgttaaagaatacacaatttggggtattgggatttttctccttttctctgagacattccaccattttaatttttgtaactgcttatttatgtgaaaagggttatttttacttagcttanctatgtcagccaatccgattgccttaggtgaaagaaaccaccgaaatccctcaggtcccttggtcaggagcctctcaagattttttttgtcagangctncaaatagaaantaagaaaaggntttcttcatttcatggctagagctagatttt

SEQ ID NO: 4154 - DNA, 385 bp, Homo sapiens
  misc_feature (2)..(2): n equals a,t,g, or c
  misc_feature (142)..(142): n equals a,t,g, or c
  misc_feature (237)..(237): n equals a,t,g, or c
  misc_feature (243)..(243): n equals a,t,g, or c
  misc_feature (280)..(280): n equals a,t,g, or c
  misc_feature (285)..(285): n equals a,t,g, or c
  misc_feature (317)..(317): n equals a,t,g, or c
  misc_feature (351)..(351): n equals a,t,g, or c
  misc_feature (368)..(368): n equals a,t,g, or c
  misc_feature (382)..(382): n equals a,t,g, or c
  misc_feature (384)..(384): n equals a,t,g, or c
gntctaattaaaggtgcagcacttcaaacgtgatttatacagttgtttttataggaaaatggaaatatattgtagggataggtagcaggacactaatagtgagtcccactcatgactgtaagtagtgactttgggaggtatnttaaatactgatgtcattaagtaattaacttgaattacttgtattttacttttagttatcaagctgactgctattatagtaaatatgtgtcttanacttanagtgaaatggaaactgcttagaagcttaactgtgtangagtnaaagtgcacgggaacagatgggaacatttaanttatagaaataattctggtggagttctagggctngtgcctatttgttttantttgttgtgaagantna

SEQ ID NO: 4155 - DNA, 151 bp, Homo sapiens
  misc_feature (2)..(2): n equals a,t,g, or c
  misc_feature (18)..(18): n equals a,t,g, or c
  misc_feature (31)..(31): n equals a,t,g, or c
  misc_feature (49)..(49): n equals a,t,g, or c
  misc_feature (72)..(72): n equals a,t,g, or c
  misc_feature (103)..(103): n equals a,t,g, or c
  misc_feature (113)..(114): n equals a,t,g, or c
  misc_feature (133)..(133): n equals a,t,g, or c
gnaagcatgtttaatttnaatagaagagagnaaaggatatggctggtcntggaacatcaagttgttccttgntccaactgcatgaaatgctggagaaaattanaacattgctnnagagaattggcctctttanaatcaattgccccaggaa

SEQ ID NO: 4156 - DNA, 436 bp, Homo sapiens
  misc_feature (432)..(436): n equals a,t,g, or c
gtatgattttctgtgtatgagatcatgggatctgtgagtaggtagttttacttttttctttcacatatgaatgactttgtatatatatatatatttttttttttctaattgttctggatggaacttctagtacagtgttgaacacaatgatgaaagtgagcatcagtgctgtgttcctgatcttaaagctttgggtgccaacaattcaggtggtgattgttatgggttttgcataaaggtgttttatcatgtgaagaaaattcgaatcttcagcttattggtggtttttatcattaaatacgttgattatctttaagtactttctgtaacagttgagataaacgtgtttttcccatcattttaattatatagtatacggaaaaggaatggctttagtatgttgaaaaacctttgattttctgaaaaaaaaannnnn

SEQ ID NO: 4157 - DNA, 414 bp, Homo sapiens
  misc_feature (353)..(353): n equals a,t,g, or c
  misc_feature (362)..(362): n equals a,t,g, or c
  misc_feature (376)..(376): n equals a,t,g, or c
  misc_feature (398)..(398): n equals a,t,g, or c
  misc_feature (403)..(403): n equals a,t,g, or c
ggtaacatgcctttcacatgtccaccttcttgccatgttccagctgctctcccaacctggaaggccgtctccccttagccaagtcctcctcaggcttggagaacttcctcagcgtcacctccttcattgagccttctctgatcactccatccctctcctacccctccctcccccaaccctcaatgtataaattgcttcttgatgcttagcattcacaatttttgattgatcgttatttgtgtgtgtgtgtccgatctcacaagtatattgtaaacccttcggtgggtgggggccatatcctagatcgcgagcggccgctctagaggatccaagcttacgtacgcgtgcatgcnacgtcatanctcttctatagtgncacctaaattcaattcactggncgcgntttacaacgct

SEQ ID NO: 4158 - DNA, 442 bp, Homo sapiens
  misc_feature (295)..(295): n equals a,t,g, or c
  misc_feature (316)..(316): n equals a,t,g, or c
  misc_feature (388)..(388): n equals a,t,g, or c
  misc_feature (390)..(390): n equals a,t,g, or c
  misc_feature (413)..(413): n equals a,t,g, or c
  misc_feature (417)..(417): n equals a,t,g, or c
  misc_feature (421)..(421): n equals a,t,g, or c
gaagccatagatgaggacccatccttgactcctctccctcatcctccattttcagtcagtagttagaaaccttcttgttattcctgtgaacccatttacttgtcatctctctactcttagcaccttaacttagactctctttatttcccacctacctgaatttcctaaaagcatcatccacttttgaaggcttaggactttgcgtatcttccctcagggcttagcttagaaaatcaggacttctctgacctgttcctataccctcaggtgagcttggtgctgatgtccccttctncctcttcatccatacctctantcttcttctccccgtctcccatgggctctcacagcaccctgtgctatccttctgacacatataacatttgcngnaatcgctagcttttctgggtcanaggncagnaactatgttgactcatattat

SEQ ID NO: 4159 - DNA, 412 bp, Homo sapiens
  misc_feature (336)..(336): n equals a,t,g, or c
  misc_feature (348)..(348): n equals a,t,g, or c
  misc_feature (380)..(380): n equals a,t,g, or c
  misc_feature (398)..(399): n equals a,t,g, or c
gaaaataatgtaattgtaattttgaaatgtggttttcctgaaatcaagtcatctatagttgatatgttttatttcattggttaatttttacatggagaaaaccaaaatgatacttactgaactgtgtgtaattgttccttttatttttttggtacctatttgacttaccatggagttaacatcatgaatttattgcacattgttcaaaaggaaccaggaggttttttttgtcaacattgtgatgtatattcctttgaagatagtaactgtagatggaaaaacttgtgctataaagctagatgctttcctaaatcagatgttttggtcaagtagttngactcagtatangtagggagatatttaagtataaaatacaacanaaggaagtctaaatattnngaatctttgttaa

SEQ ID NO: 4160 - DNA, 497 bp, Homo sapiens
ggattgcacttcctgaccaatcttattttggagaaagatggagacgataatcctgtctgtcgactgccagacttctaattcaatagataacgttcttgagaaagaccccagaccaaaaagagacacagatataacttctgaaagtgactatggaaacagaaaagaatgcaatagaaaagttcctcgaagatcaaaaatcccttatgatgccaaaaccattcaaactattaagcaccacaataaaaactacaactcttttgtaagttgtaatcgtaaaatgaaaccaccttaccttaaagaattatatgtaagctcatctttagcaaactgtcctatgttacaagaatcagaaaagccaaagactgaaataattaaagtagaccaaagtcactcagaagacaacacttaccagtcccttgttgaacagctagaccaagagagagagaagagatggagagctgagcaagccgaaaataaactcatggattatattgatg

SEQ ID NO: 4161 - DNA, 392 bp, Homo sapiens
  misc_feature (214)..(214): n equals a,t,g, or c
  misc_feature (239)..(239): n equals a,t,g, or c
  misc_feature (241)..(241): n equals a,t,g, or c
  misc_feature (263)..(263): n equals a,t,g, or c
  misc_feature (317)..(317): n equals a,t,g, or c
  misc_feature (356)..(356): n equals a,t,g, or c
  misc_feature (363)..(363): n equals a,t,g, or c
  misc_feature (376)..(376): n equals a,t,g, or c
  misc_feature (388)..(388): n equals a,t,g, or c
gaaagtatataaatataaaatgtataaatgatggatagatttttgtattgatttgcaaaatgcagattatatttgataggctatagtatgtagatattccttttaggaatattacagctgtaaattatatgagacttgccagtcaaatgctatttggtttaaaaaaattattgcaatctcaagttaatggaatatttttaaatcccacattcanagtttaaaacactggttttcaatgngnctattagtgttgtcacttgttnatagataaatatataaataacctgtttggatcctggtcctttttaactgatccnttggcaattctgagcatttatttgatgacttaatatttntcactanctttggagaacanatgaaccatttnttca

SEQ ID NO: 4162 - DNA, 71 bp, Homo sapiens
  misc_feature (61)..(62): n equals a,t,g, or c
  misc_feature (64)..(64): n equals a,t,g, or c
  misc_feature (67)..(67): n equals a,t,g, or c
  misc_feature (69)..(69): n equals a,t,g, or c
gtgcttttataaagttgaacaaattgaatttagacattcaggcaaagctactgggggttgnntnctncnac

SEQ ID NO: 4163 - DNA, 509 bp, Homo sapiens
  misc_feature (401)..(401): n equals a,t,g, or c
  misc_feature (448)..(448): n equals a,t,g, or c
  misc_feature (482)..(482): n equals a,t,g, or c
  misc_feature (486)..(486): n equals a,t,g, or c
  misc_feature (494)..(494): n equals a,t,g, or c
  misc_feature (496)..(496): n equals a,t,g, or c
gccctgacattacaggaaatctacttagcaacctcgtaagtgagaacaagtctaaaagcagataaaattaattatcctagatcctagatgcaacttttaacttggcagttattcccacagcatttctgtttggtattcttacaattgccttacactcagaattcttactaaggggccattaccatagtagatattacttggcaaataataaatacagggattgagcaagctgatgtaattgactgtcttgatttaaaatgtgtattaaacttagatctacagaatggtagggaggcagaaacaagcaaatgacttaatttgtattgatgccaaattggtgcttgcttgagcgcttcaaaatagcagagttgttaacactagctacaactctaaggaccatnccataagtagggcacatagggaatttgaattcataccagaattttanggattttattttaccttctaatatataattaagntctnattgtggngntaacccttttttt

SEQ ID NO: 4164 - DNA, 453 bp, Homo sapiens
ggcgtttagtgtgttctaattttaattgttttatatcctgaaaccaatggtgaaaagtaatttcattgagggtaccttttcaatgcctgagtagcatacagaatcatgattatgagactttcttttatctttctttataaaaatatgtgtttttttttgttgaaagttttggtctctttaaattcagattttgtcttaggacagtaaaacccaggttgactgactcaggaaacagttgtctgctagtcactcataaatgtacggtcatatgttcactcttcttaaatatccaccttttataacacaaatgtaaaatagtatcagtctagccaatgatgaactctggaatccacttagtcttcagtaagtatgtgctgtcctctaaactttgccctgaagccaggggatcttctcctaatgtatgtgacataaaaatccattttccatgtaaaa

SEQ ID NO: 4165 - DNA, 169 bp, Homo sapiens
  misc_feature (17)..(17): n equals a,t,g, or c
  misc_feature (20)..(20): n equals a,t,g, or c
  misc_feature (47)..(47): n equals a,t,g, or c
  misc_feature (56)..(56): n equals a,t,g, or c
  misc_feature (87)..(87): n equals a,t,g, or c
  misc_feature (101)..(102): n equals a,t,g, or c
  misc_feature (104)..(104): n equals a,t,g, or c
  misc_feature (123)..(123): n equals a,t,g, or c
ggccttaaaaaaaatgnttnttaaagactttggaaccaaggttgganggaatttantggaaaaaactttggaaaaaaaggaagggtncaacttcaataatnnanatagaacagaaagtttaancttggctggtgggtaaagaagaagaatggccagttattgaaatatg

SEQ ID NO: 4166 - DNA, 172 bp, Homo sapiens
  misc_feature (25)..(25): n equals a,t,g, or c
  misc_feature (37)..(37): n equals a,t,g, or c
  misc_feature (53)..(53): n equals a,t,g, or c
  misc_feature (60)..(60): n equals a,t,g, or c
  misc_feature (68)..(68): n equals a,t,g, or c
  misc_feature (130)..(130): n equals a,t,g, or c
  misc_feature (141)..(142): n equals a,t,g, or c
  misc_feature (167)..(167): n equals a,t,g, or c
  misc_feature (172)..(172): n equals a,t,g, or c
cacgaaaaacatctactactatctntcaagccagtanatgccaaatttctttntgatcantagtgatntacaactcaagtgccatgttgctctacaggtgcactgctataacgacagcatttccagaatngcatgttcttnnattgtttgtgtcgcacttatatganatgtn

SEQ ID NO: 4167 - DNA, 485 bp, Homo sapiens
  misc_feature (7)..(7): n equals a,t,g, or c
  misc_feature (408)..(408): n equals a,t,g, or c
  misc_feature (439)..(439): n equals a,t,g, or c
  misc_feature (450)..(450): n equals a,t,g, or c
  misc_feature (472)..(472): n equals a,t,g, or c
  misc_feature (484)..(484): n equals a,t,g, or c
tagactntgaaataagtgaaatgactggtcactgatcatgatgtatatctgttacatacataatgatttgtagactgaagagctagcagtatagtttgtactccatgccattattcacagatactatattgaagtttgaactgtgttgctggcagactggcattatttagctaacctgtggtaactgaaattcctgcatgtcagaattctgcaaagtaaggactacctgtatctatatatttttttctctaagcactgctttagttttatctcacaaattttgacattttgtgttctcatattaattaaattcaagttactttctaattcctcttttgactttctcattgacacataggttattttataagtgtgtttaattttctaatatttggggggacttctganatgtctttttattatttatttctaattaatnccattatggtnggttaatatactctgaatgatntccattcttatna

SEQ ID NO: 4168 - DNA, 324 bp, Homo sapiens
  misc_feature (304)..(304): n equals a,t,g, or c
  misc_feature (306)..(306): n equals a,t,g, or c
  misc_feature (314)..(315): n equals a,t,g, or c
  misc_feature (318)..(318): n equals a,t,g, or c
gcctcagtggacgacatgctcaaggtgagctcccgggtgtcaagcggaggccttttcctccaggacgaccctgtaggtaccaggaggggtggggcagggttgagcccttcgtggtctggttgccacactagctgcccttgggaggggccagtgtcccatgtggactaaggaggccaggcctggccagactccacatagcccagagctgaccgcttgccccaaatcaaagcatcttggccaggtcagactccttgaccaggactgccattgtggttaaaaattagccttgtgtggtggtgtgttncntgtggtcnnagnttactt

SEQ ID NO: 4169 - DNA, 134 bp, Homo sapiens
  misc_feature (2)..(3): n equals a,t,g, or c
  misc_feature (16)..(16): n equals a,t,g, or c
  misc_feature (39)..(39): n equals a,t,g, or c
  misc_feature (81)..(81): n equals a,t,g, or c
  misc_feature (114)..(114): n equals a,t,g, or c
  misc_feature (118)..(118): n equals a,t,g, or c
  misc_feature (126)..(126): n equals a,t,g, or c
cnnttaccaacaggtnagcgcacgctgaatggcgaatgngacgcgccctgaagacggagcattaaaacacggcaggaatgnaggttggttacaacacagggtgacccgctacantacnccatacgngctaacag

SEQ ID NO: 4170 - DNA, 84 bp, Homo sapiens
  misc_feature (56)..(56): n equals a,t,g, or c
  misc_feature (62)..(62): n equals a,t,g, or c
  misc_feature (65)..(65): n equals a,t,g, or c
  misc_feature (70)..(70): n equals a,t,g, or c
  misc_feature (84)..(84): n equals a,t,g, or c
gaaaaggatcaaaggatattgaattcccggtccgacagaaagaggtctatatcaanagagtngtngatcnggcaaaagatcttn

SEQ ID NO: 4171 - DNA, 310 bp, Homo sapiens
  misc_feature (7)..(7): n equals a,t,g, or c
  misc_feature (10)..(10): n equals a,t,g, or c
  misc_feature (54)..(54): n equals a,t,g, or c
  misc_feature (64)..(64): n equals a,t,g, or c
  misc_feature (66)..(66): n equals a,t,g, or c
  misc_feature (159)..(159): n equals a,t,g, or c
  misc_feature (161)..(161): n equals a,t,g, or c
  misc_feature (165)..(165): n equals a,t,g, or c
  misc_feature (199)..(199): n equals a,t,g, or c
  misc_feature (217)..(217): n equals a,t,g, or c
  misc_feature (240)..(240): n equals a,t,g, or c
  misc_feature (279)..(279): n equals a,t,g, or c
  misc_feature (298)..(298): n equals a,t,g, or c
  misc_feature (304)..(304): n equals a,t,g, or c
acgcctnccngtaccggtccggaattcccgggtcgacccacgcgtccgcccacncgtccgcccncncgtccgggacatgaatagtcgccaggcttggcggctctttctctcccaaggcagaggagatcgttgggtttcaaggccccgcgggcatttctngncggncctgcggagagagttcttcactaccacaaccaantgagggatatgataggcngtcagtggatataacttctttanaacaaaggaaattaacttttgatacccatgcattggttnaggacttggaaactcatgngatttnacaaaa

SEQ ID NO: 4172 - DNA, 126 bp, Homo sapiens
  misc_feature (11)..(11): n equals a,t,g, or c
  misc_feature (13)..(13): n equals a,t,g, or c
  misc_feature (40)..(40): n equals a,t,g, or c
  misc_feature (42)..(42): n equals a,t,g, or c
  misc_feature (89)..(89): n equals a,t,g, or c
  misc_feature (123)..(123): n equals a,t,g, or c
  misc_feature (125)..(125): n equals a,t,g, or c
tcctacggcangntctaatacgactcactataggcaaagntncaacgcctgcagttaccggcacgaaattcccgggtcgacccacgcgnccgctcaataaatattctcattgtcaatcacccnana

SEQ ID NO: 4173 - DNA, 145 bp, Homo sapiens
  misc_feature (7)..(7): n equals a,t,g, or c
  misc_feature (10)..(10): n equals a,t,g, or c
  misc_feature (66)..(66): n equals a,t,g, or c
  misc_feature (69)..(69): n equals a,t,g, or c
  misc_feature (87)..(87): n equals a,t,g, or c
  misc_feature (131)..(131): n equals a,t,g, or c
  misc_feature (134)..(134): n equals a,t,g, or c
acgcctnccngtaccggtccggaattcccgggtcgacccacgcgtccggcccgcagaagcgagatnacnaagggaacgtcatcgttnggaaagcgtcggcaataagacgcacactgttgtgccgtcgctgnggntctaaggccta

SEQ ID NO: 4174 - DNA, 230 bp, Homo sapiens
  misc_feature (13)..(13): n equals a,t,g, or c
  misc_feature (122)..(123): n equals a,t,g, or c
  misc_feature (136)..(136): n equals a,t,g, or c
  misc_feature (187)..(187): n equals a,t,g, or c
  misc_feature (193)..(193): n equals a,t,g, or c
  misc_feature (210)..(210): n equals a,t,g, or c
  misc_feature (220)..(220): n equals a,t,g, or c
ggaattccatttntggtcatattatggcagcttacaagcctggcacagtccagttatgcagtcagccttggtgcctggctgccagccacattctataccctatttgggggtgaatggtgcanngtttctcctgcangtatgttcccctgactcttctttgccccccagaatatgctttagggagtcncagacnacagaacactgccccanggcgctgtcnatcactctat

SEQ ID NO: 4175 - DNA, 135 bp, Homo sapiens
  misc_feature (22)..(22): n equals a,t,g, or c
  misc_feature (24)..(24): n equals a,t,g, or c
  misc_feature (33)..(33): n equals a,t,g, or c
  misc_feature (49)..(49): n equals a,t,g, or c
  misc_feature (62)..(62): n equals a,t,g, or c
  misc_feature (109)..(109): n equals a,t,g, or c
  misc_feature (121)..(121): n equals a,t,g, or c
  misc_feature (132)..(132): n equals a,t,g, or c
tatgaccatgattacggcaagntntaatacgantcactatagggaaagntggtacagcgtgnaggtaccggtccggaattgccgggaacgacccacgcgtacgatttanatgctgctgggnatgttaatganaga

SEQ ID NO: 4176 - DNA, 130 bp, Homo sapiens
  misc_feature (16)..(16): n equals a,t,g, or c
  misc_feature (19)..(19): n equals a,t,g, or c
  misc_feature (43)..(43): n equals a,t,g, or c
  misc_feature (59)..(59): n equals a,t,g, or c
  misc_feature (69)..(69): n equals a,t,g, or c
  misc_feature (101)..(101): n equals a,t,g, or c
  misc_feature (117)..(117): n equals a,t,g, or c
tgggacgcctgcaggnacnggaccggaattcccgggtcgaccnacgcgttcggaggaanactgtgcagntaccagcacacatgcaaagcggaaaggcgacntttctaggtgcccgangcaatacaagcat

SEQ ID NO: 4177 - DNA, 119 bp, Homo sapiens
  misc_feature (2)..(2): n equals a,t,g, or c
  misc_feature (15)..(15): n equals a,t,g, or c
  misc_feature (27)..(27): n equals a,t,g, or c
  misc_feature (69)..(69): n equals a,t,g, or c
  misc_feature (91)..(91): n equals a,t,g, or c
  misc_feature (107)..(107): n equals a,t,g, or c
  misc_feature (115)..(115): n equals a,t,g, or c
tntaatacgactcantatagggaaagntggtacgcctgcaggtaccggtccggaatatcccgggtcganccacgcgtccgtgggatttttntgtgttacttttggcngtattttnaaac

SEQ ID NO: 4178 - DNA, 171 bp, Homo sapiens
  misc_feature (27)..(27): n equals a,t,g, or c
  misc_feature (50)..(50): n equals a,t,g, or c
  misc_feature (52)..(52): n equals a,t,g, or c
  misc_feature (61)..(61): n equals a,t,g, or c
  misc_feature (83)..(83): n equals a,t,g, or c
  misc_feature (139)..(139): n equals a,t,g, or c
  misc_feature (164)..(164): n equals a,t,g, or c
  misc_feature (166)..(166): n equals a,t,g, or c
  misc_feature (168)..(168): n equals a,t,g, or c
  misc_feature (171)..(171): n equals a,t,g, or c
cataacaattttacacaggaaaacagntatgaccatgattactggcaagntntaatacgantcactatagggaaaggtggtangcctgcaggtaccggtccggaattccgagggacgacccacgcgtccgctttgaatnagagtcgaaggttaaaatgagagangnangan

SEQ ID NO: 4179 - DNA, 169 bp, Homo sapiens
  misc_feature (23)..(23): n equals a,t,g, or c
  misc_feature (25)..(25): n equals a,t,g, or c
  misc_feature (34)..(34): n equals a,t,g, or c
  misc_feature (62)..(62): n equals a,t,g, or c
  misc_feature (68)..(68): n equals a,t,g, or c
  misc_feature (128)..(128): n equals a,t,g, or c
  misc_feature (131)..(131): n equals a,t,g, or c
  misc_feature (137)..(137): n equals a,t,g, or c
  misc_feature (143)..(143): n equals a,t,g, or c
  misc_feature (169)..(169): n equals a,t,g, or c
tatgaccatgattactggcaagntntaatacgantcactatagggaaaggtgagacgcctgnaggtancggaccggaattcccggatacgacaccacgcgtccgagagagtgtgcttgctcagagacntgnagccantcaganacaggattaaatggtgctgtgagttn

SEQ ID NO: 4180 - DNA, 169 bp, Homo sapiens
  misc_feature (18)..(18): n equals a,t,g, or c
  misc_feature (28)..(28): n equals a,t,g, or c
  misc_feature (30)..(30): n equals a,t,g, or c
  misc_feature (43)..(43): n equals a,t,g, or c
  misc_feature (55)..(55): n equals a,t,g, or c
  misc_feature (138)..(138): n equals a,t,g, or c
  misc_feature (144)..(144): n equals a,t,g, or c
  misc_feature (147)..(147): n equals a,t,g, or c
  misc_feature (156)..(156): n equals a,t,g, or c
  misc_feature (164)..(164): n equals a,t,g, or c
aacaggtatgaccatgantacggcaagntntaatacgactcantatagggaaagntgggacgcgtgcaggaaccggtccggaattccagggtcgacccacgcgaccgaaagtgtatgtagtatataaagaatttggtntatgantgnagaatcaanataataanatgta

SEQ ID NO: 4181 - DNA, 160 bp, Homo sapiens
  misc_feature (25)..(25): n equals a,t,g, or c
  misc_feature (52)..(53): n equals a,t,g, or c
  misc_feature (76)..(76): n equals a,t,g, or c
  misc_feature (91)..(91): n equals a,t,g, or c
  misc_feature (112)..(112): n equals a,t,g, or c
  misc_feature (128)..(128): n equals a,t,g, or c
  misc_feature (139)..(139): n equals a,t,g, or c
gaaacccaaggaaagccgttcggtnaaggtccggtccggaattcccgggtcnncccacgcgtccggtgtatcctgntttaaaaaaatgtanttttttttgaaataaaccttnatattctgtatatttnctaaggggggngagaaccttttgaatgtgtca

SEQ ID NO: 4182 - DNA, 258 bp, Homo sapiens
  misc_feature (16)..(16): n equals a,t,g, or c
  misc_feature (19)..(19): n equals a,t,g, or c
  misc_feature (23)..(23): n equals a,t,g, or c
  misc_feature (40)..(40): n equals a,t,g, or c
  misc_feature (72)..(72): n equals a,t,g, or c
  misc_feature (108)..(108): n equals a,t,g, or c
  misc_feature (122)..(122): n equals a,t,g, or c
  misc_feature (145)..(146): n equals a,t,g, or c
  misc_feature (175)..(175): n equals a,t,g, or c
  misc_feature (180)..(180): n equals a,t,g, or c
  misc_feature (236)..(236): n equals a,t,g, or c
  misc_feature (240)..(240): n equals a,t,g, or c
  misc_feature (245)..(245): n equals a,t,g, or c
acaaccttacacaggnagncagntatgaccatgattacgncaagctctaatacgactcactatagggaaagntggtacgcctgcaggtaccgggccggaattcccggntcgacccacgcgtncgttctatttcttttgacaaatnngaacatttctaaaactaaaagagtctttntattnttaaaacacaagtagaatgatttaaataggattttaatgaatttttggcaagtggntgtnttaanttttaaattgaga

SEQ ID NO: 4183 - DNA, 150 bp, Homo sapiens
  misc_feature (17)..(17): n equals a,t,g, or c
  misc_feature (34)..(34): n equals a,t,g, or c
  misc_feature (44)..(45): n equals a,t,g, or c
  misc_feature (79)..(79): n equals a,t,g, or c
  misc_feature (104)..(104): n equals a,t,g, or c
  misc_feature (129)..(129): n equals a,t,g, or c
  misc_feature (147)..(147): n equals a,t,g, or c
  misc_feature (150)..(150): n equals a,t,g, or c
gctctaatacgactcantatagttgattgctggnacgcctgcanntaccgggccggaattcccggatcgacccacgcgnccgaattgctggcagccatttatgntaaaaatgcatatatgcattctgtnaggaagactttatactgntan

SEQ ID NO: 4184 - DNA, 201 bp, Homo sapiens
  misc_feature (1)..(1): n equals a,t,g, or c
  misc_feature (9)..(9): n equals a,t,g, or c
  misc_feature (13)..(13): n equals a,t,g, or c
  misc_feature (37)..(37): n equals a,t,g, or c
  misc_feature (57)..(57): n equals a,t,g, or c
  misc_feature (142)..(142): n equals a,t,g, or c
  misc_feature (164)..(165): n equals a,t,g, or c
  misc_feature (172)..(172): n equals a,t,g, or c
  misc_feature (190)..(190): n equals a,t,g, or c
nacgcctgnaggnaccggtccggaattcccgttcganccacgcgtccgcccacgcgnccgcatatttatagcttatcacttaattttgtgtgccagggaaggcatggccagaattaatatgccacagtaccctcatcattgnttttatagccattcatgccccnncttcctntggcacattttctaaganattatttcata

SEQ ID NO: 4185 - DNA, 131 bp, Homo sapiens
  misc_feature (8)..(9): n equals a,t,g, or c
  misc_feature (19)..(19): n equals a,t,g, or c
  misc_feature (45)..(45): n equals a,t,g, or c
  misc_feature (56)..(56): n equals a,t,g, or c
  misc_feature (111)..(111): n equals a,t,g, or c
  misc_feature (120)..(120): n equals a,t,g, or c
  misc_feature (123)..(123): n equals a,t,g, or c
tgattacnncaagctctantacgactcaatatagtgattgctggnacgcctgcagntaccggtccggaattcccgggtcgacccacgcgtccgcccgtccccgtctctcgnatttgtggnctncttggctc

SEQ ID NO: 4186 - DNA, 181 bp, Homo sapiens
  misc_feature (8)..(8): n equals a,t,g, or c
  misc_feature (51)..(51): n equals a,t,g, or c
  misc_feature (59)..(60): n equals a,t,g, or c
  misc_feature (72)..(72): n equals a,t,g, or c
  misc_feature (119)..(119): n equals a,t,g, or c
  misc_feature (149)..(149): n equals a,t,g, or c
  misc_feature (160)..(160): n equals a,t,g, or c
  misc_feature (166)..(166): n equals a,t,g, or c
  misc_feature (178)..(178): n equals a,t,g, or c
aaacagcnctgaccatgattacgccaagctctaatacgactcactataggnattgcttnnacgcctgcaggnaccggaccggaattcccgaatcgacccacgcgtccgctaacaggccncatacttaagattccatctactttaagttnaaaggattttnagaatnaccttaagtgcnaaa

SEQ ID NO: 4187 - DNA, 296 bp, Homo sapiens
  misc_feature (1)..(1): n equals a,t,g, or c
  misc_feature (7)..(7): n equals a,t,g, or c
  misc_feature (11)..(11): n equals a,t,g, or c
  misc_feature (31)..(31): n equals a,t,g, or c
  misc_feature (85)..(85): n equals a,t,g, or c
  misc_feature (118)..(118): n equals a,t,g, or c
  misc_feature (136)..(136): n equals a,t,g, or c
  misc_feature (141)..(141): n equals a,t,g, or c
  misc_feature (149)..(149): n equals a,t,g, or c
  misc_feature (163)..(163): n equals a,t,g, or c
  misc_feature (221)..(221): n equals a,t,g, or c
  misc_feature (239)..(239): n equals a,t,g, or c
  misc_feature (247)..(247): n equals a,t,g, or c
  misc_feature (257)..(257): n equals a,t,g, or c
  misc_feature (270)..(270): n equals a,t,g, or c
naaccgncaanatgcgacaaatccccgaaantttggggttaagggcacgtaccgcgtccggaattcccgggtcgacccacgcgtncgcggacgcgtggggccctgttccgttacccgngctacctcagcggctacnagacnacactggncctgggcccgctgnatgagtcaccctgtgtccacgccacgcccccgctgagcctcccccagaacctcacagntgaagggacaggcaaccntggagccngcgtgtcagncatccgggaactnttcaacttctccagctgccagggcca

SEQ ID NO: 4188 - DNA, 166 bp, Homo sapiens
  misc_feature (20)..(20): n equals a,t,g, or c
  misc_feature (30)..(30): n equals a,t,g, or c
  misc_feature (42)..(42): n equals a,t,g, or c
  misc_feature (77)..(77): n equals a,t,g, or c
  misc_feature (91)..(91): n equals a,t,g, or c
  misc_feature (137)..(137): n equals a,t,g, or c
  misc_feature (139)..(139): n equals a,t,g, or c
  misc_feature (154)..(154): n equals a,t,g, or c
cacacacaactattattatnattatgtttncaagttcagttnttagactgatcattcacaaagggtggttttcagtntgctgagatcttgnttttctttttgtgttcacagatgaagcccggggcaagaactgtggngncttggtacattgctnggctggcattag

SEQ ID NO: 4189 - DNA, 297 bp, Homo sapiens
  misc_feature (2)..(2): n equals a,t,g, or c
  misc_feature (16)..(16): n equals a,t,g, or c
  misc_feature (28)..(28): n equals a,t,g, or c
  misc_feature (51)..(51): n equals a,t,g, or c
  misc_feature (54)..(54): n equals a,t,g, or c
  misc_feature (111)..(111): n equals a,t,g, or c
  misc_feature (159)..(159): n equals a,t,g, or c
  misc_feature (164)..(164): n equals a,t,g, or c
  misc_feature (181)..(181): n equals a,t,g, or c
  misc_feature (191)..(191): n equals a,t,g, or c
  misc_feature (196)..(196): n equals a,t,g, or c
  misc_feature (236)..(236): n equals a,t,g, or c
  misc_feature (238)..(238): n equals a,t,g, or c
  misc_feature (253)..(253): n equals a,t,g, or c
  misc_feature (267)..(267): n equals a,t,g, or c
  misc_feature (290)..(290): n equals a,t,g, or c
tncctcttccacgagnaccggaagatgngcacatgcgagcctggggctgcncgntgaagggactacttgcttcgaaccgctagacagtgaacaaaggaacttgatagctgncctggaccaggacgtcttggcacaaccttatccggaatgcaactacanctacnccatagaacatcttacnccccatcaantgagntgagggggcgcaacccgggttggccccattggcaacccangncctttagtagtcccnccccccaaaaaaanccctttaggcatttccttgggcnaaaatcg

SEQ ID NO: 4190 - DNA, 128 bp, Homo sapiens
  misc_feature (3)..(3): n equals a,t,g, or c
  misc_feature (5)..(5): n equals a,t,g, or c
  misc_feature (62)..(62): n equals a,t,g, or c
  misc_feature (79)..(80): n equals a,t,g, or c
  misc_feature (113)..(114): n equals a,t,g, or c
ttngnggactgggtgtctctggtcgaactctgtccaaaaacgtgcatgggatataacttganaagcttgccacaattgnngtataaagcatgtggccatacccaatttcaganngcttaccaatagag

SEQ ID NO: 4191 - DNA, 403 bp, Homo sapiens
  misc_feature (311)..(311): n equals a,t,g, or c
  misc_feature (362)..(362): n equals a,t,g, or c
  misc_feature (386)..(386): n equals a,t,g, or c
  misc_feature (395)..(395): n equals a,t,g, or c
  misc_feature (397)..(397): n equals a,t,g, or c
gagaacaatactgtaagggtaagaaggatagatttctttttctattgactgctgaggaccgaagctctagaatgtctaacagttcagccaggatcacataggaatattccgattcagaggcagaaatctgtggtctgcactatgctttcaggtcagattagaggctcattccttttgacaccatgccattgtgagcttccaaaacaagatccgctctcaggcaagcctctgaatgggttacaaagttcaaaatggagccaagcacaagaagagttgccaagagtgatacagaacgctctgtgggaagctgntgtggaaaatcagcacacccagcgcctgtagtaatttaaccaatacagcanaaaaacgtagcttgcgtgtttttnaaaaaaccntncacaga

SEQ ID NO: 4192 - DNA, 174 bp, Homo sapiens
  misc_feature (22)..(23): n equals a,t,g, or c
  misc_feature (31)..(31): n equals a,t,g, or c
  misc_feature (49)..(49): n equals a,t,g, or c
  misc_feature (67)..(67): n equals a,t,g, or c
  misc_feature (112)..(112): n equals a,t,g, or c
  misc_feature (118)..(118): n equals a,t,g, or c
  misc_feature (148)..(148): n equals a,t,g, or c
  misc_feature (155)..(155): n equals a,t,g, or c
  misc_feature (163)..(163): n equals a,t,g, or c
caggtacgcgggccggaattcnngggtcganccacgcgttcggcgttcnatccgctggaaggagagnaatcaggaaacccattgataggattatcgccaggcatgacctctntcaatngccactttctattcttttgaagtagaactntggagcnacagggcnacagacggcgg

SEQ ID NO: 4193 - DNA, 581 bp, Homo sapiens
  misc_feature (1)..(1): n equals a,t,g, or c
  misc_feature (6)..(6): n equals a,t,g, or c
  misc_feature (523)..(523): n equals a,t,g, or c
  misc_feature (527)..(527): n equals a,t,g, or c
  misc_feature (539)..(539): n equals a,t,g, or c
  misc_feature (560)..(561): n equals a,t,g, or c
nggttntcacattcaaagggaatgagatttgaaaatgatttctttgagtcctctgctgaggtctttccaaggcactacaattagggctttgcacccaaatacccttgcctcattttggtcattttgtcctggaacagaggttcagctgggagacccctcacacacaggtgaaggcgtggctgtagaacctcagaccccctggtctcctcaggaatgaaggtcattgccatcctcaccctcctcctcttctgctgtaagtagagagcttggtgggtcagcaccaagcttctgtcttcctgtttatgtcagtgggaggggggactctccaggtggcaccaggtgagggaagtcacaagtcctgcagaaaagaatcaggaaaggaacgggctcccaccaacgtcctcttgcttctgtttctgctataaaatgggctgatcccagtgttgggatcttataaagtgtctaggaaatcagaggttgccaaccatttgctagaaagggagtttgactactattttacccncctnaccctcaagagncttttttcctttggatgctannagcctttatttaaggccatt

SEQ ID NO: 4194 - DNA, 76 bp, Homo sapiens
  misc_feature (50)..(50): n equals a,t,g, or c
  misc_feature (52)..(52): n equals a,t,g, or c
  misc_feature (60)..(60): n equals a,t,g, or c
  misc_feature (65)..(65): n equals a,t,g, or c
  misc_feature (72)..(72): n equals a,t,g, or c
gcggacgcgtgggattgaataggtcagaagtagaatcttttcaatagggnanaaagttgnggtgnagaggantatg

SEQ ID NO: 4195 - DNA, 66 bp, Homo sapiens
  misc_feature (29)..(29): n equals a,t,g, or c
  misc_feature (50)..(50): n equals a,t,g, or c
  misc_feature (64)..(65): n equals a,t,g, or c
aacagcttaagtccatgggtaatccgttnatagaaattgtgtttgctaanaaggtgccatttannc

SEQ ID NO: 4196 - DNA, 156 bp, Homo sapiens
  misc_feature (30)..(30): n equals a,t,g, or c
  misc_feature (49)..(49): n equals a,t,g, or c
  misc_feature (119)..(119): n equals a,t,g, or c
  misc_feature (122)..(122): n equals a,t,g, or c
  misc_feature (136)..(136): n equals a,t,g, or c
  misc_feature (143)..(143): n equals a,t,g, or c
  misc_feature (146)..(146): n equals a,t,g, or c
gaaaactgtcttcatatatttaaaagtgtnatcattttcttaaaagttntacaaaagctttgtatttcttatttaaaaaatctttgccccatttggtgaagatattctcttatttgttntcntaaaaattaccttnatagctntgnttttaatatt

SEQ ID NO: 4197 - DNA, 172 bp, Homo sapiens
  misc_feature (133)..(133): n equals a,t,g, or c
  misc_feature (137)..(137): n equals a,t,g, or c
  misc_feature (152)..(153): n equals a,t,g, or c
  misc_feature (169)..(169): n equals a,t,g, or c
gcttttgaattttgttcaacatgatcaatattacatgttaggatcattcagatgtagtgaatgagagtttatagtggtttacttatttaaatatttgacttttaagttcctcacaatatatttcattcttttntctnctgttgcatggatanngcatatacatacctanaaa

SEQ ID NO: 4198 - DNA, 138 bp, Homo sapiens
  misc_feature (7)..(7): n equals a,t,g, or c
  misc_feature (18)..(18): n equals a,t,g, or c
  misc_feature (32)..(32): n equals a,t,g, or c
  misc_feature (38)..(38): n equals a,t,g, or c
  misc_feature (77)..(77): n equals a,t,g, or c
  misc_feature (122)..(122): n equals a,t,g, or c
  misc_feature (128)..(128): n equals a,t,g, or c
  misc_feature (135)..(135): n equals a,t,g, or c
  misc_feature (137)..(137): n equals a,t,g, or c
cgaccgncggctgcggcntggacggggcatgncatgtngccattgactgcggcgcggtcggccatgcaggactactntgtaagccccataggagatccttggcgcacaatgctgcggttctncctcgngggcttnang

SEQ ID NO: 4199 - DNA, 67 bp, Homo sapiens
  misc_feature (22)..(22): n equals a,t,g, or c
  misc_feature (56)..(56): n equals a,t,g, or c
gactagttctagatcgcgagcngccgccctttttttccctttttacatttttcttnttgtttatgat

SEQ ID NO: 4200 - DNA, 453 bp, Homo sapiens
  misc_feature (2)..(2): n equals a,t,g, or c
  misc_feature (12)..(12): n equals a,t,g, or c
  misc_feature (41)..(41): n equals a,t,g, or c
  misc_feature (52)..(53): n equals a,t,g, or c
  misc_feature (60)..(60): n equals a,t,g, or c
  misc_feature (70)..(70): n equals a,t,g, or c
  misc_feature (96)..(96): n equals a,t,g, or c
  misc_feature (100)..(100): n equals a,t,g, or c
  misc_feature (102)..(102): n equals a,t,g, or c
  misc_feature (110)..(110): n equals a,t,g, or c
  misc_feature (119)..(119): n equals a,t,g, or c
  misc_feature (124)..(124): n equals a,t,g, or c
  misc_feature (129)..(129): n equals a,t,g, or c
  misc_feature (139)..(139): n equals a,t,g, or c
  misc_feature (163)..(163): n equals a,t,g, or c
  misc_feature (231)..(231): n equals a,t,g, or c
  misc_feature (357)..(357): n equals a,t,g, or c
  misc_feature (364)..(364): n equals a,t,g, or c
  misc_feature (430)..(430): n equals a,t,g, or c
  misc_feature (450)..(450): n equals a,t,g, or c
  misc_feature (453)..(453): n equals a,t,g, or c
tncttattgaangatgagatttacattttcaaagatgattnaaataattttnnttaatgnctgcaaaccnttggcttgtctaaggaatgaacaganggtntnaagggctnattaagaantaaantgaantgacatttanaaatatggaaatccattaagagtntttaaggagcttggggagaggagctttaataagaaaagccatctgcattgacagccaagaaccattgnttctttgttgaaaactgaccatttcaacctgcacatgcagttgaggataagtttactgatcttgccacagatgagtttcaaacagaaggaataaggaaaacagtatcaattgtttccctggaactncattcanatttcaaggcgagtgcaatcagaaaggatgatttctacttgctgggttgatttaatccctttccanatgattgacattttctgctnggn

SEQ ID NO: 4201 - DNA, 104 bp, Homo sapiens
  misc_feature (7)..(7): n equals a,t,g, or c
  misc_feature (54)..(54): n equals a,t,g, or c
  misc_feature (74)..(74): n equals a,t,g, or c
  misc_feature (95)..(95): n equals a,t,g, or c
  misc_feature (103)..(103): n equals a,t,g, or c
gcccacncgtccgcccacgcgtccgctttagacgtaatacgtctaaaggggatnggaccatgatctttacctgntgactctggaattgaataaanaaaaattnc

SEQ ID NO: 4202 - DNA, 393 bp, Homo sapiens
  misc_feature (7)..(7): n equals a,t,g, or c
  misc_feature (40)..(40): n equals a,t,g, or c
  misc_feature (48)..(48): n equals a,t,g, or c
  misc_feature (51)..(51): n equals a,t,g, or c
  misc_feature (59)..(59): n equals a,t,g, or c
  misc_feature (81)..(81): n equals a,t,g, or c
  misc_feature (120)..(120): n equals a,t,g, or c
  misc_feature (156)..(156): n equals a,t,g, or c
  misc_feature (172)..(172): n equals a,t,g, or c
  misc_feature (195)..(195): n equals a,t,g, or c
  misc_feature (216)..(216): n equals a,t,g, or c
  misc_feature (221)..(221): n equals a,t,g, or c
  misc_feature (225)..(225): n equals a,t,g, or c
  misc_feature (230)..(230): n equals a,t,g, or c
  misc_feature (253)..(253): n equals a,t,g, or c
  misc_feature (262)..(262): n equals a,t,g, or c
  misc_feature (264)..(264): n equals a,t,g, or c
  misc_feature (267)..(267): n equals a,t,g, or c
  misc_feature (272)..(272): n equals a,t,g, or c
  misc_feature (283)..(283): n equals a,t,g, or c
  misc_feature (286)..(286): n equals a,t,g, or c
  misc_feature (292)..(292): n equals a,t,g, or c
  misc_feature (310)..(310): n equals a,t,g, or c
  misc_feature (313)..(313): n equals a,t,g, or c
  misc_feature (359)..(359): n equals a,t,g, or c
  misc_feature (386)..(386): n equals a,t,g, or c
  misc_feature (391)..(391): n equals a,t,g, or c
ttttccnttcagccctgacaacccatccacacacgggcangcctgttnatntacactgntgcccactactctctccagctncacatgctgtacctggatcattctgaagcaaattccgancattacatcattgtgtccataaatatttctaacatncttaaatatacaatcngaattcaagcatctcccattgtnccacaaatgtttggctgatgntgtanttgnattgnttgtattaggattaaagcaaggnccatatatngnatntattngaaatgtctgnaantctctntccatctacagagtttancanatttgaacgttgctggttgaaatcccgaggtgtcatttgacatggntctctgaacttatctttcctataaaanggtanta

SEQ ID NO: 4203 - DNA, 267 bp, Homo sapiens
  misc_feature (135)..(135): n equals a,t,g, or c
  misc_feature (147)..(147): n equals a,t,g, or c
  misc_feature (149)..(149): n equals a,t,g, or c
  misc_feature (218)..(218): n equals a,t,g, or c
  misc_feature (222)..(222): n equals a,t,g, or c
  misc_feature (243)..(243): n equals a,t,g, or c
  misc_feature (249)..(249): n equals a,t,g, or c
  misc_feature (259)..(259): n equals a,t,g, or c
ggtaacgttactgtattattctacgtaaatgtgggtacttggatgtttatcatactgtttctctgtgtttacatactaatttgtgtaagaaatgcattttagtctgtgtacctcaacctgctgtttgtttcctanaggtgttagtantntttaaatacaagtaagacttaagaggatatttgatgttatttacctggatattttattccccttttatntatncacaggaaattgacattctangaccantaaaatgaanacaaaatt

SEQ ID NO: 4204 - DNA, 301 bp, Homo sapiens
  misc_feature (98)..(98): n equals a,t,g, or c
  misc_feature (139)..(139): n equals a,t,g, or c
  misc_feature (192)..(192): n equals a,t,g, or c
  misc_feature (201)..(201): n equals a,t,g, or c
  misc_feature (218)..(218): n equals a,t,g, or c
  misc_feature (228)..(228): n equals a,t,g, or c
  misc_feature (268)..(268): n equals a,t,g, or c
  misc_feature (275)..(275): n equals a,t,g, or c
  misc_feature (282)..(282): n equals a,t,g, or c
gcgcctgtgtgtggaacctgcaatcacactgggaagttgagttgggaggagattcctgattcttacacgcacttcttcatatgtggttccctcctggngatcaccaggaggtccccaaaagtccctgattgcagggtangtttgcagctctgtttcagtccattcttttggggtagctaggaggtgtcattnactctgcancatgatggcaggagcanaagccacatntcctccccaataaatacctctgtctttccttacgctaatnacaaaanaaaaaanaaaaaaaaaagggcggccg

SEQ ID NO: 4205 - DNA, 110 bp, Homo sapiens
  misc_feature (1)..(1): n equals a,t,g, or c
  misc_feature (3)..(3): n equals a,t,g, or c
  misc_feature (7)..(7): n equals a,t,g, or c
  misc_feature (42)..(42): n equals a,t,g, or c
  misc_feature (93)..(93): n equals a,t,g, or c
  misc_feature (101)..(101): n equals a,t,g, or c
  misc_feature (105)..(105): n equals a,t,g, or c
  misc_feature (109)..(109): n equals a,t,g, or c
ngnacgnctgcaggtaccggtccggaattcccgggtcgaccnatgcgtccggttatatcagtaataaaaaaaataacagaacccttaaagggnatccacantgantggnt

SEQ ID NO: 4206 - DNA, 461 bp, Homo sapiens
  misc_feature (409)..(409): n equals a,t,g, or c
  misc_feature (428)..(428): n equals a,t,g, or c
  misc_feature (433)..(433): n equals a,t,g, or c
  misc_feature (440)..(440): n equals a,t,g, or c
  misc_feature (455)..(455): n equals a,t,g, or c
gccacgtggagagaagttgccctccaggccgacaggaggccatgcccaccgcccctggacaggcttcgtctcagaaggctctatctgctgggctggcggccatccccgtgttgggtggaccccgagcacggttgcctgaggtccgatggcccgagagctgggactcagttcttggcctgctagcggctgaacaggccgcacatctcacttcagttgtggcctcattcagcagatgactctggaaccatcctctgttacccgcagatcctgtcccatgggctctggccccaagatgttggggggccccacggagagttgacttggtagagttcctttctgggaagaaagtaggagtggctgaccaggccctgctcatcacccggatagaggacacggacccttgtgtggnattttggcattttggcttnaaagnccaatgnaccattgtttgccanaaattt

SEQ ID NO: 4207 - DNA, 376 bp, Homo sapiens
  misc_feature (64)..(64): n equals a,t,g, or c
  misc_feature (73)..(73): n equals a,t,g, or c
  misc_feature (101)..(101): n equals a,t,g, or c
  misc_feature (115)..(115): n equals a,t,g, or c
  misc_feature (120)..(120): n equals a,t,g, or c
  misc_feature (126)..(126): n equals a,t,g, or c
  misc_feature (155)..(155): n equals a,t,g, or c
  misc_feature (194)..(194): n equals a,t,g, or c
  misc_feature (201)..(201): n equals a,t,g, or c
  misc_feature (210)..(210): n equals a,t,g, or c
  misc_feature (218)..(218): n equals a,t,g, or c
  misc_feature (248)..(248): n equals a,t,g, or c
  misc_feature (250)..(250): n equals a,t,g, or c
  misc_feature (276)..(276): n equals a,t,g, or c
  misc_feature (300)..(300): n equals a,t,g, or c
  misc_feature (307)..(307): n equals a,t,g, or c
  misc_feature (315)..(315): n equals a,t,g, or c
  misc_feature (331)..(331): n equals a,t,g, or c
  misc_feature (369)..(369): n equals a,t,g, or c
gcggacgcgtggggagtgggggagggaggtgtgcataccattttatatggtgtgagagcttcanaccaagganacatttaaccatctctccccctttcctntggggtgactgcanttgangaaagnatgccatggggtaaggggacattggtggncacattttggtgacagacccctgctgttgtctctgtgtncccattntctggactntggcctgncctcctagtgcttgtgactccctctctttnanccccacccccatggtatgtatattcnttacaagtcctccacaagagcagntgtctangatgcggngaggggaggctccttnccttagggagcgtggatagaaaggagcatacttgttgntgtattt

SEQ ID NO: 4208 - DNA, 65 bp, Homo sapiens
  misc_feature (47)..(47): n equals a,t,g, or c
  misc_feature (57)..(58): n equals a,t,g, or c
  misc_feature (63)..(63): n equals a,t,g, or c
ggagggagggtgggaaagtttggggggggggttgtgaaaacttaggnctaattctgnnctganct

SEQ ID NO: 4209 - DNA, 355 bp, Homo sapiens
  misc_feature (6)..(7): n equals a,t,g, or c
  misc_feature (98)..(98): n equals a,t,g, or c
  misc_feature (107)..(107): n equals a,t,g, or c
  misc_feature (277)..(277): n equals a,t,g, or c
  misc_feature (294)..(294): n equals a,t,g, or c
  misc_feature (317)..(317): n equals a,t,g, or c
  misc_feature (339)..(339): n equals a,t,g, or c
  misc_feature (354)..(354): n equals a,t,g, or c
gaaganngtgtagaagaaatctgccatttatattaaaaagaggaaaaggagcctctttcttaagacatctctggatgaatgtttaagaaactgatggntattgcctntgatgaggggaattagatggcttgaggacgaagtggatggaagactttatattatctttacccctttgtgtccttttaattttaaactacgtgatgtaacttgctcaaaaagtagagataaaatttaaaacaacccgaaaaataaactctagatcaattctattgcttgncaaaggctttaattaancttgagggcaattctgccttggntaaaggtattaaagctatgcangcaccaagctgaaant

SEQ ID NO: 4210 - DNA, 56 bp, Homo sapiens
  misc_feature (5)..(5): n equals a,t,g, or c
gctantaataaacggttgaagtattgcaataaaacttgagttttaaaaaaaaaaaa

SEQ ID NO: 4211 - DNA, 178 bp, Homo sapiens
  misc_feature (6)..(6): n equals a,t,g, or c
  misc_feature (35)..(35): n equals a,t,g, or c
  misc_feature (65)..(65): n equals a,t,g, or c
  misc_feature (114)..(114): n equals a,t,g, or c
  misc_feature (152)..(152): n equals a,t,g, or c
  misc_feature (162)..(162): n equals a,t,g, or c
  misc_feature (167)..(167): n equals a,t,g, or c
  misc_feature (174)..(174): n equals a,t,g, or c
gaaccntacattttccaagactcagggaacacagngatctacacagagtcttgtgtttgcacaanatgcccagtggcaccatatggtttattttggtaggcaggatctttgcanatgaaaaaaaaatctacatgtacttgattttaattganttacattganaatangctcctntgga

SEQ ID NO: 4212 - DNA, 50 bp, Homo sapiens
  misc_feature (6)..(6): n equals a,t,g, or c
  misc_feature (15)..(15): n equals a,t,g, or c
  misc_feature (41)..(41): n equals a,t,g, or c
  misc_feature (50)..(50): n equals a,t,g, or c
ggtccnacgggtccnggtaccagcacgtgcaggagtggtgngagctgagn

SEQ ID NO: 4213 - DNA, 616 bp, Homo sapiens
  misc_feature (479)..(479): n equals a,t,g, or c
  misc_feature (482)..(482): n equals a,t,g, or c
  misc_feature (565)..(565): n equals a,t,g, or c
  misc_feature (581)..(581): n equals a,t,g, or c
  misc_feature (598)..(598): n equals a,t,g, or c
  misc_feature (605)..(605): n equals a,t,g, or c
  misc_feature (614)..(614): n equals a,t,g, or c
gcttgaagcctgaaattgcagcactcatttggtgaccaggagtgggcaaacagaaggacaaaggcctacaagattaaataatcaagtcattattgtgaatttggatctaaatgacctggcagaaaccatggagatgatcttggatttaaagaggaaaaactcaaagcaatgtattctgatcaagaaatggcaggaaatggcagctacctgatatggaacaatcaacaactgaaggtttattttgaatgagaggtgttgtccaactgcgagacggagtgattgaagctgagaataaatggaaacacaatcaatagtcactccagtgaggtaggaaagaaagccattccgaagtggcagagaagctgctttttcctcctgcatgctgcctgctagtgtggatcttggcataacagacactacttggcaaaagatccatccttccttttcctatactttgctcagcggcctggaagattganctnaaaagcaaaatcacctggatttccttgccatttggctttcaaatgtgctcagccaatgacaggctggaaagaaattgacagcntgggaaaaagaggaanaatttgtgtccaagaanccttccncttcccatntt

SEQ ID NO: 4214 - DNA, 94 bp, Homo sapiens
  misc_feature (6)..(6): n equals a,t,g, or c
  misc_feature (28)..(28): n equals a,t,g, or c
  misc_feature (73)..(73): n equals a,t,g, or c
  misc_feature (77)..(77): n equals a,t,g, or c
  misc_feature (86)..(86): n equals a,t,g, or c
gaaacnttgcagacatggaggtcctgtnctggacacaccgtgaaggagcagtatggaaactcttcggaagctncaanatgatggangtggctga

SEQ ID NO: 4215 - DNA, 370 bp, Homo sapiens
  misc_feature (310)..(310): n equals a,t,g, or c
  misc_feature (313)..(313): n equals a,t,g, or c
  misc_feature (315)..(315): n equals a,t,g, or c
  misc_feature (320)..(320): n equals a,t,g, or c
  misc_feature (347)..(347): n equals a,t,g, or c
gtctcgaattgctttatctaagtggcttccatcagcagaggataggttctttagtcctatatgtttatatgtggagaaatggtacaggataggaactgtgtttgaagacctgatgtatatttacaaataggtagatctcattagcttataatatttggctttgaagttgaaggctagttttattcattgcactgtattttgctatcagatgtgaatttatttagaaataaagaattctgctgtgaataattgaggaaatacttaattccttgacttatgtaaagaacaccttgttcaattggattggggnaantngttanggtgctaaggctctgagtgaaactctnagtactgtatctgtgtcaatggt

SEQ ID NO: 4216 - DNA, 351 bp, Homo sapiens
  misc_feature (13)..(14): n equals a,t,g, or c
  misc_feature (27)..(27): n equals a,t,g, or c
  misc_feature (65)..(65): n equals a,t,g, or c
  misc_feature (78)..(78): n equals a,t,g, or c
  misc_feature (102)..(102): n equals a,t,g, or c
  misc_feature (105)..(105): n equals a,t,g, or c
  misc_feature (108)..(109): n equals a,t,g, or c
  misc_feature (132)..(132): n equals a,t,g, or c
  misc_feature (154)..(154): n equals a,t,g, or c
  misc_feature (156)..(156): n equals a,t,g, or c
  misc_feature (164)..(164): n equals a,t,g, or c
  misc_feature (208)..(208): n equals a,t,g, or c
  misc_feature (211)..(211): n equals a,t,g, or c
  misc_feature (213)..(213): n equals a,t,g, or c
  misc_feature (217)..(217): n equals a,t,g, or c
  misc_feature (220)..(220): n equals a,t,g, or c
  misc_feature (231)..(231): n equals a,t,g, or c
  misc_feature (233)..(233): n equals a,t,g, or c
  misc_feature (237)..(237): n equals a,t,g, or c
  misc_feature (250)..(250): n equals a,t,g, or c
  misc_feature (284)..(284): n equals a,t,g, or c
  misc_feature (305)..(305): n equals a,t,g, or c
  misc_feature (322)..(322): n equals a,t,g, or c
  misc_feature (338)..(338): n equals a,t,g, or c
  misc_feature (351)..(351): n equals a,t,g, or c
tccactatagggnnagctggtacgccngcaggtaccggtccggaattcccgggtcgacccacgcntccggaccaattncgggacagtcaaggattctcaatntgnatnntccaggcaagagaactttgtacnccttctctgtgtggatagactncncagcgttnttcctatggaaatgcccacagggcttgacgcgtggagactgatntgntncatncgntagcgcgaggnancagngtcgcctcgcccntcccactgcgggctcacggggagctggcgtctgncagtgccttggcacgcctggnataaaggttggctggangcctgtcactggcttntggagctgaaggn

SEQ ID NO: 4217 - DNA, 391 bp, Homo sapiens
  misc_feature (109)..(109): n equals a,t,g, or c
  misc_feature (154)..(154): n equals a,t,g, or c
  misc_feature (159)..(159): n equals a,t,g, or c
  misc_feature (166)..(166): n equals a,t,g, or c
  misc_feature (168)..(168): n equals a,t,g, or c
  misc_feature (197)..(197): n equals a,t,g, or c
  misc_feature (223)..(223): n equals a,t,g, or c
  misc_feature (340)..(340): n equals a,t,g, or c
  misc_feature (342)..(342): n equals a,t,g, or c
  misc_feature (345)..(345): n equals a,t,g, or c
  misc_feature (350)..(350): n equals a,t,g, or c
  misc_feature (389)..(389): n equals a,t,g, or c
ggtggattctttttctctcgtggtctcactttgttacttgtttctgtccccgggagcctcagggctctgagagctgtgctccaggccaggggttacacctgccctccgnggtccctccctgggctccaggggcctctggtgcggttccgggaanaagcnacacccnanaggtgacagctgagcccctgccacacccnagcctctgacttgctgtgttgtccanaggtgaggctgggccctccctggtctccagcttaaacaggactgaactccctctgtccccagggcctcccttctgggccccctacagtctaccctacccctcctccatgggccctgnanganggganacccaccttgaagtgggggatcaagtataggcttgcacntg

SEQ ID NO: 4218 - DNA, 140 bp, Homo sapiens
  misc_feature (35)..(35): n equals a,t,g, or c
  misc_feature (84)..(84): n equals a,t,g, or c
  misc_feature (97)..(97): n equals a,t,g, or c
  misc_feature (117)..(117): n equals a,t,g, or c
  misc_feature (121)..(121): n equals a,t,g, or c
  misc_feature (140)..(140): n equals a,t,g, or c
gaattctaatggaaacgcccgactatagggtttgntggaacgccccgcaggtaccggtccggaattcccgggtcgacccacgcnttcgtacagtttntgggaccacattgaggtggntgangatgaagacgagacgcacn

SEQ ID NO: 4219 - DNA, 360 bp, Homo sapiens
  misc_feature (6)..(6): n equals a,t,g, or c
  misc_feature (12)..(12): n equals a,t,g, or c
  misc_feature (14)..(15): n equals a,t,g, or c
  misc_feature (89)..(89): n equals a,t,g, or c
  misc_feature (144)..(144): n equals a,t,g, or c
  misc_feature (195)..(195): n equals a,t,g, or c
  misc_feature (212)..(212): n equals a,t,g, or c
  misc_feature (227)..(227): n equals a,t,g, or c
  misc_feature (237)..(237): n equals a,t,g, or c
  misc_feature (315)..(315): n equals a,t,g, or c
  misc_feature (338)..(338): n equals a,t,g, or c
  misc_feature (347)..(347): n equals a,t,g, or c
  misc_feature (350)..(350): n equals a,t,g, or c
  misc_feature (357)..(357): n equals a,t,g, or c
ggatgnaccttntnngtggcggttgtggtggtcctctgagagagcagaaaccctgcatgtcagatagggtctgccaaccctaccctganatggagctgcttccagccacatcccatcgtggcatcattgtggctggtctcttgngctgtatcactgagctgtggcgctgcgtatgtggaggagaagactcaatanaaagaggagtacactangctgaagcagtacantgccagggcntgatggccctcacagcttgaaagtggaacagctgcttgtgtggactgaaagcaagttgtcctgccttccttgtacttnaaaccctgctttgttctgaaagnacctgatgngcnggttcgngag

SEQ ID NO: 4220 - DNA, 157 bp, Homo sapiens
  misc_feature (13)..(13): n equals a,t,g, or c
  misc_feature (26)..(26): n equals a,t,g, or c
  misc_feature (30)..(30): n equals a,t,g, or c
  misc_feature (34)..(34): n equals a,t,g, or c
  misc_feature (87)..(87): n equals a,t,g, or c
  misc_feature (102)..(102): n equals a,t,g, or c
  misc_feature (132)..(132): n equals a,t,g, or c
  misc_feature (140)..(140): n equals a,t,g, or c
  misc_feature (150)..(150): n equals a,t,g, or c
catgtataaaaanagttacattttanttangcgncaaaatattatggtggagcctaatttgatatgctctttaagtaatattgagtntttcaaaagatactncataatgatgaattaaaataactttatatntctctaangaaataacanatagtat

SEQ ID NO: 4221 - DNA, 215 bp, Homo sapiens
  misc_feature (14)..(14): n equals a,t,g, or c
  misc_feature (38)..(38): n equals a,t,g, or c
  misc_feature (44)..(44): n equals a,t,g, or c
  misc_feature (89)..(89): n equals a,t,g, or c
  misc_feature (95)..(95): n equals a,t,g, or c
  misc_feature (106)..(106): n equals a,t,g, or c
  misc_feature (165)..(166): n equals a,t,g, or c
  misc_feature (181)..(181): n equals a,t,g, or c
  misc_feature (209)..(209): n equals a,t,g, or c
  misc_feature (212)..(212): n equals a,t,g, or c
ttaatacattaccnaaaaaaaagaatgggggaaaaagnaaaggnggcgttaaggccccctacgaccgccatgcacgctagctctatagngcaccnatcatcactgncgcgttacaacgcgtgctggaaaccctgcgtacccactaatcgcttgacacatcccttnncagtgggaaacgaanaggccgccgtcgccttccacagtggcanctnatg

SEQ ID NO: 4222 - DNA, 103 bp, Homo sapiens
  misc_feature (19)..(19): n equals a,t,g, or c
  misc_feature (29)..(29): n equals a,t,g, or c
  misc_feature (69)..(69): n equals a,t,g, or c
  misc_feature (73)..(73): n equals a,t,g, or c
  misc_feature (84)..(84): n equals a,t,g, or c
ggttgtaaggaacctgcangcatggacgnactcgaatagatgctcatactcttcctggtgtgcctgtancctncctattctcanacccactttcctgttgctt

SEQ ID NO: 4223 - DNA, 211 bp, Homo sapiens
  misc_feature (4)..(4): n equals a,t,g, or c
  misc_feature (10)..(10): n equals a,t,g, or c
  misc_feature (45)..(45): n equals a,t,g, or c
  misc_feature (64)..(64): n equals a,t,g, or c
  misc_feature (79)..(79): n equals a,t,g, or c
  misc_feature (108)..(108): n equals a,t,g, or c
  misc_feature (155)..(155): n equals a,t,g, or c
  misc_feature (168)..(168): n equals a,t,g, or c
  misc_feature (172)..(172): n equals a,t,g, or c
  misc_feature (181)..(181): n equals a,t,g, or c
  misc_feature (189)..(189): n equals a,t,g, or c
aggnataccnttctttggttgagctaatcatgatatgtccgaganctggatttttagaactgcnatcttctcctaatgnacctgaccccaaagtcaggctgtccgcgnctcggcctgaccgtcacacagggcggcaacagagcactaagacgtgngacatatgaaatngaanagaacgtgnaacagatnattattctcttgaatgtgatag

SEQ ID NO: 4224 - DNA, 162 bp, Homo sapiens
  misc_feature (20)..(20): n equals a,t,g, or c
  misc_feature (31)..(31): n equals a,t,g, or c
  misc_feature (33)..(33): n equals a,t,g, or c
  misc_feature (49)..(49): n equals a,t,g, or c
  misc_feature (70)..(70): n equals a,t,g, or c
  misc_feature (101)..(101): n equals a,t,g, or c
  misc_feature (130)..(131): n equals a,t,g, or c
  misc_feature (134)..(134): n equals a,t,g, or c
gtccttcttctctatagcancctcaccgtcncncgagcaggtggagcangcgaacgcttctcatgctcgnatgcatgaggctgtgacaaccactcacgcanaaagcctctcctgtcccggtaaatgagtnnacngccggaagcccccgtccccggctctcgc

SEQ ID NO: 4225 - DNA, 129 bp, Homo sapiens
  misc_feature (9)..(9): n equals a,t,g, or c
  misc_feature (51)..(51): n equals a,t,g, or c
  misc_feature (57)..(57): n equals a,t,g, or c
  misc_feature (95)..(95): n equals a,t,g, or c
  misc_feature (99)..(99): n equals a,t,g, or c
  misc_feature (128)..(128): n equals a,t,g, or c
agtgaagtntgcgaagataagctcttaattcgtggttgatctgtatctctngctttntaatgtaacaaaaatatcttacagatacatgaaattangaanatctaaaagtaccattactctaaactaana

SEQ ID NO: 4226 - DNA, 302 bp, Homo sapiens
  misc_feature (11)..(11): n equals a,t,g, or c
  misc_feature (16)..(16): n equals a,t,g, or c
  misc_feature (24)..(24): n equals a,t,g, or c
  misc_feature (64)..(64): n equals a,t,g, or c
  misc_feature (96)..(96): n equals a,t,g, or c
  misc_feature (102)..(102): n equals a,t,g, or c
  misc_feature (106)..(106): n equals a,t,g, or c
  misc_feature (130)..(130): n equals a,t,g, or c
  misc_feature (146)..(146): n equals a,t,g, or c
  misc_feature (151)..(151): n equals a,t,g, or c
  misc_feature (160)..(160): n equals a,t,g, or c
  misc_feature (169)..(169): n equals a,t,g, or c
  misc_feature (191)..(191): n equals a,t,g, or c
  misc_feature (194)..(194): n equals a,t,g, or c
  misc_feature (214)..(214): n equals a,t,g, or c
  misc_feature (229)..(229): n equals a,t,g, or c
  misc_feature (256)..(256): n equals a,t,g, or c
  misc_feature (291)..(291): n equals a,t,g, or c
  misc_feature (298)..(298): n equals a,t,g, or c
ttgctgcttgngtgtnatcttgtncatgcctgctcatgaactgtaagttcaatcaaccagcagncatgcacactcgggatcactccaaatgatagnaaagcnaaanatttaaaggggtgtctcttgatanacagaacatcaccatntaagncgctgtttnacgactgtnacactgacaagttgtggtcaanccngaggaatgtcaagcagacantggtgaacatttganaggtcatagtgagctttgtcaatgganctacctgcgatctgtggattgggcgaataaaaaangacacgntttg

SEQ ID NO: 4227 - DNA, 127 bp, Homo sapiens
  misc_feature (3)..(3): n equals a,t,g, or c
  misc_feature (21)..(21): n equals a,t,g, or c
  misc_feature (26)..(26): n equals a,t,g, or c
  misc_feature (68)..(68): n equals a,t,g, or c
  misc_feature (81)..(81): n equals a,t,g, or c
  misc_feature (108)..(109): n equals a,t,g, or c
  misc_feature (124)..(124): n equals a,t,g, or c
canccggaggaaaggcacgtnagganctggtttggcgggattcgtgaagccgcgcaggtggtgggtgnacggtgcaggagnagattgtttggtactgagcgtgcgcgnnacaggttgggggganatt

SEQ ID NO: 4228 - DNA, 359 bp, Homo sapiens
  misc_feature (16)..(16): n equals a,t,g, or c
  misc_feature (24)..(24): n equals a,t,g, or c
  misc_feature (37)..(37): n equals a,t,g, or c
  misc_feature (66)..(66): n equals a,t,g, or c
  misc_feature (92)..(92): n equals a,t,g, or c
  misc_feature (101)..(101): n equals a,t,g, or c
  misc_feature (110)..(110): n equals a,t,g, or c
  misc_feature (152)..(152): n equals a,t,g, or c
  misc_feature (193)..(194): n equals a,t,g, or c
  misc_feature (252)..(252): n equals a,t,g, or c
  misc_feature (256)..(257): n equals a,t,g, or c
  misc_feature (259)..(259): n equals a,t,g, or c
  misc_feature (265)..(265): n equals a,t,g, or c
  misc_feature (295)..(295): n equals a,t,g, or c
  misc_feature (306)..(306): n equals a,t,g, or c
  misc_feature (315)..(315): n equals a,t,g, or c
  misc_feature (346)..(346): n equals a,t,g, or c
gcgcggcggtctgatnttcatctntgcggagatgtcngcctgtagctgaccttacgacctgtggtncagagagtccgggaggccgtctgacnacccagccngaaacagcnctcggatcccagctgataaggagctggggctcggtgtctatntgtgaaccactgcacgcggacacattacaggctcgggctgnncgtcctctcctgctgcagctgcatctccgctaatggggccagctgctaacattgaggntggnncncatccnttcggcgctccgtgagacaaggcagcctgnccaccagctgngcacttcgnctgatgacacagatggctcatgaatgcctgngaccgggtgcggc

SEQ ID NO: 4229 - DNA, 139 bp, Homo sapiens
  misc_feature (22)..(22): n equals a,t,g, or c
  misc_feature (24)..(24): n equals a,t,g, or c
  misc_feature (29)..(29): n equals a,t,g, or c
  misc_feature (76)..(76): n equals a,t,g, or c
  misc_feature (86)..(86): n equals a,t,g, or c
  misc_feature (96)..(96): n equals a,t,g, or c
  misc_feature (111)..(111): n equals a,t,g, or c
  misc_feature (114)..(114): n equals a,t,g, or c
aaatctgctggtttgtcctttntnctctntttcctacccctcttaataaagtgcatgaaaagtacaggccaacctnccactgcctnctctgctccnagaaaactcgaggantgncttcttttggtttactaactgttca

SEQ ID NO: 4230 - DNA, 257 bp, Homo sapiens
  misc_feature (23)..(23): n equals a,t,g, or c
  misc_feature (33)..(34): n equals a,t,g, or c
  misc_feature (43)..(43): n equals a,t,g, or c
  misc_feature (48)..(48): n equals a,t,g, or c
  misc_feature (104)..(104): n equals a,t,g, or c
  misc_feature (133)..(133): n equals a,t,g, or c
  misc_feature (155)..(155): n equals a,t,g, or c
  misc_feature (209)..(209): n equals a,t,g, or c
  misc_feature (224)..(224): n equals a,t,g, or c
  misc_feature (233)..(234): n equals a,t,g, or c
  misc_feature (252)..(252): n equals a,t,g, or c
tcgcttgagtccaggggcctttnactatgtttnntactgtcangaggnatatactgacccattgcttagaagaagtggcccgctcagggaacccagccctacancgccaaatccgaaagggcaactctctggnccctccaggaggaccccagggntgaaggaagctgccttgaccacatctccgcaggaaatggctcagtccgtcaagntgtgaaaaaagctgnccgcgctgnngagtccttccaatgctgncatgg

SEQ ID NO: 4231 - DNA, 288 bp, Homo sapiens
  misc_feature (9)..(9): n equals a,t,g, or c
  misc_feature (53)..(53): n equals a,t,g, or c
  misc_feature (66)..(66): n equals a,t,g, or c
  misc_feature (73)..(73): n equals a,t,g, or c
  misc_feature (84)..(84): n equals a,t,g, or c
  misc_feature (148)..(148): n equals a,t,g, or c
  misc_feature (150)..(150): n equals a,t,g, or c
  misc_feature (163)..(163): n equals a,t,g, or c
  misc_feature (167)..(167): n equals a,t,g, or c
  misc_feature (225)..(225): n equals a,t,g, or c
  misc_feature (246)..(246): n equals a,t,g, or c
  misc_feature (267)..(267): n equals a,t,g, or c
  misc_feature (280)..(280): n equals a,t,g, or c
  misc_feature (288)..(288): n equals a,t,g, or c
tgctggtgnaaggtgaaaagggaacctaaagctaaaaagccaagaaggggaanccattgaccgcancctgccntgcagagaatngcaggatcccgatctgcatgattcagaaaggcatgacaagagaagactcaccgtaaatcaaggntnaaagaaaagaagngaangtctcgcactgtcaaaccagtggtggtacaagaacggcggacccgggtggtaaactcncaaatgctagaattatctctnaagatgtcctcgaagctgttngccacggaaaaancgatagtn

SEQ ID NO: 4232 - DNA, 149 bp, Homo sapiens
  misc_feature (9)..(9): n equals a,t,g, or c
  misc_feature (46)..(47): n equals a,t,g, or c
  misc_feature (74)..(74): n equals a,t,g, or c
  misc_feature (84)..(84): n equals a,t,g, or c
  misc_feature (111)..(111): n equals a,t,g, or c
  misc_feature (132)..(132): n equals a,t,g, or c
  misc_feature (138)..(138): n equals a,t,g, or c
ttgactttncaaagaaacacggctccgtccgaccagaataaaggcnnccacaaaaactcactcagggaggtggncgcggggccncggctggaaaacaatgcatgagggggngcatctcttcagcttagcagngtgacncaagaggctaa

SEQ ID NO: 4233 - DNA, 112 bp, Homo sapiens
  misc_feature (27)..(27): n equals a,t,g, or c
  misc_feature (36)..(36): n equals a,t,g, or c
  misc_feature (42)..(42): n equals a,t,g, or c
  misc_feature (48)..(48): n equals a,t,g, or c
  misc_feature (87)..(87): n equals a,t,g, or c
catacagacaactctataagactaccngaggacccnctacanattcancatgacaagcgataaggatcactataactgtcccacaangagtacagtctataacatagctgga

SEQ ID NO: 4234 - DNA, 200 bp, Homo sapiens
  misc_feature (11)..(11): n equals a,t,g, or c
  misc_feature (18)..(18): n equals a,t,g, or c
  misc_feature (28)..(28): n equals a,t,g, or c
  misc_feature (38)..(38): n equals a,t,g, or c
  misc_feature (64)..(64): n equals a,t,g, or c
  misc_feature (133)..(133): n equals a,t,g, or c
  misc_feature (158)..(158): n equals a,t,g, or c
  misc_feature (175)..(175): n equals a,t,g, or c
  misc_feature (178)..(178): n equals a,t,g, or c
  misc_feature (189)..(189): n equals a,t,g, or c
attatatgttntaaaagncctgattctnaatgagggcnaaaagctggtgtattgtgtattgtgncgcgggataaccctgtgtggaattgtgactggtatttcagaagaagagaatggcaagatgagaagctgnataaggagatgggtagatcataggnaccaatgcataacatanatngaagatataangaagggaaaaa

SEQ ID NO: 4235 - DNA, 102 bp, Homo sapiens
  misc_feature (33)..(33): n equals a,t,g, or c
  misc_feature (57)..(57): n equals a,t,g, or c
  misc_feature (60)..(60): n equals a,t,g, or c
  misc_feature (87)..(87): n equals a,t,g, or c
  misc_feature (98)..(98): n equals a,t,g, or c
aactcgctaccttcggagcttttaaccttttgnctcggctcaaccatcccgagattnggngataatggaaccgacacacacacaagnccccatcgcanccac

SEQ ID NO: 4236 - DNA, 135 bp, Homo sapiens
  misc_feature (23)..(23): n equals a,t,g, or c
  misc_feature (44)..(44): n equals a,t,g, or c
  misc_feature (46)..(46): n equals a,t,g, or c
  misc_feature (85)..(86): n equals a,t,g, or c
  misc_feature (102)..(102): n equals a,t,g, or c
tgtgagaatggggaagggggggncttaaaattctgtgggggggntnttctccaaacatagttccaccatcgcatccccggacccnnctgcatatcgatgctngacatcggggagggagtaagctaccactgtctt

SEQ ID NO: 4237 - DNA, 180 bp, Homo sapiens
  misc_feature (11)..(11): n equals a,t,g, or c
  misc_feature (21)..(21): n equals a,t,g, or c
  misc_feature (58)..(58): n equals a,t,g, or c
  misc_feature (74)..(74): n equals a,t,g, or c
  misc_feature (87)..(87): n equals a,t,g, or c
  misc_feature (103)..(103): n equals a,t,g, or c
  misc_feature (147)..(147): n equals a,t,g, or c
  misc_feature (158)..(158): n equals a,t,g, or c
  misc_feature (171)..(171): n equals a,t,g, or c
attagatagtnttcaaggctnacagaggtgacttgggcactttaggcgaatctactcnaaggtttggtatgtgnaacccaaggtatncgattattgaacagcnatatgataggaatcttttcatacagcagtcttgggatgtataanctgaactgggncatggcgagatanttgccaaag

SEQ ID NO: 4238 - DNA, 212 bp, Homo sapiens
  misc_feature (1)..(2): n equals a,t,g, or c
  misc_feature (11)..(11): n equals a,t,g, or c
  misc_feature (33)..(33): n equals a,t,g, or c
  misc_feature (49)..(49): n equals a,t,g, or c
  misc_feature (112)..(112): n equals a,t,g, or c
  misc_feature (123)..(123): n equals a,t,g, or c
  misc_feature (185)..(185): n equals a,t,g, or c
  misc_feature (191)..(191): n equals a,t,g, or c
  misc_feature (200)..(200): n equals a,t,g, or c
  misc_feature (207)..(207): n equals a,t,g, or c
nngagctcaantgcgtgacggctcacacttgtnaccagactacatctgntttgatacattcacacacaaggtggacaagagagtcaccaaatttgtacaaaactcacacatnccacgtgcagncactgactctgcggggacgcagcttctcttcccaaaaccaaggacacctcatgaatctcctnaccctnacgtacatnctcgtgntggac

SEQ ID NO: 4239 - DNA, 145 bp, Homo sapiens
  misc_feature (4)..(4): n equals a,t,g, or c
  misc_feature (12)..(12): n equals a,t,g, or c
  misc_feature (30)..(30): n equals a,t,g, or c
  misc_feature (86)..(86): n equals a,t,g, or c
  misc_feature (98)..(98): n equals a,t,g, or c
  misc_feature (130)..(132): n equals a,t,g, or c
tctntcaaaatnttgggagctttaagaacnttgacattgaaacgagctgggaatggaaaggctagcaagtatgctgggcatgcccnctgaagcccccngtgacgaggataccataaatctcttgtggaannnagaccagacgaca

SEQ ID NO: 4240 - DNA, 309 bp, Homo sapiens
  misc_feature (2)..(2): n equals a,t,g, or c
  misc_feature (11)..(11): n equals a,t,g, or c
  misc_feature (17)..(17): n equals a,t,g, or c
  misc_feature (55)..(55): n equals a,t,g, or c
  misc_feature (78)..(78): n equals a,t,g, or c
  misc_feature (208)..(208): n equals a,t,g, or c
  misc_feature (231)..(231): n equals a,t,g, or c
  misc_feature (274)..(274): n equals a,t,g, or c
  misc_feature (302)..(303): n equals a,t,g, or c
  misc_feature (307)..(307): n equals a,t,g, or c
tnttacagcgntcatgnatggcttaaaacgtgacctcggcactaaagagattcgnaattgcatgaaggagatggaacncagatgtgcgcattgcaccaggctcaacaaagctgctggccaaaggaataaggatgtccataccgaatccgtgtgccggctgccagaaacgtaatgaggatgaagatcaccagataagctaatacttggnacctatgacctgtaccactttcnaaatctacagacagcaatgtgatgaaacaaatcgctgtcgtanatcaaataaagtataaatcgcttcaaanngaanat

SEQ ID NO: 4241 - DNA, 115 bp, Homo sapiens
  misc_feature (36)..(36): n equals a,t,g, or c
  misc_feature (48)..(48): n equals a,t,g, or c
  misc_feature (50)..(50): n equals a,t,g, or c
  misc_feature (70)..(70): n equals a,t,g, or c
  misc_feature (81)..(81): n equals a,t,g, or c
cactgcatctggacttcctgaatgaggcgctcggtncccagctggatncnggaacctgcccttcctaggnacaccctaggntaccctctgctccttccctgctgtgtggggagat

SEQ ID NO: 4242 - DNA, 253 bp, Homo sapiens
  misc_feature (9)..(9): n equals a,t,g, or c
  misc_feature (11)..(11): n equals a,t,g, or c
  misc_feature (22)..(22): n equals a,t,g, or c
  misc_feature (30)..(30): n equals a,t,g, or c
  misc_feature (47)..(47): n equals a,t,g, or c
  misc_feature (145)..(145): n equals a,t,g, or c
  misc_feature (170)..(170): n equals a,t,g, or c
  misc_feature (196)..(196): n equals a,t,g, or c
  misc_feature (204)..(204): n equals a,t,g, or c
  misc_feature (208)..(208): n equals a,t,g, or c
  misc_feature (217)..(217): n equals a,t,g, or c
aagcccagntntccaaggtgtnagacagtnacgcaaatgttgtgtcnagtgccaccgtcccagcaccacctgtggcaggacgcagcttctcccccccaaacccaaggcaccctatgatctccggaccctgaggcacgtgcgtggnggtgacgtgaccacgaagacccgangtccagttcaacctggaccgtggacngcatggangtgncataatgcnagacaagccacggaggagcagtcaacagcacgtccg

SEQ ID NO: 4243 - DNA, 102 bp, Homo sapiens
  misc_feature (6)..(6): n equals a,t,g, or c
  misc_feature (59)..(59): n equals a,t,g, or c
  misc_feature (67)..(67): n equals a,t,g, or c
  misc_feature (69)..(69): n equals a,t,g, or c
  misc_feature (78)..(78): n equals a,t,g, or c
gaagtncatcgcttaacctgcgtggaattttgcgaccttgtatgcagggaaacagggcncctgaagngnactcttctnagatatcaactattgatgatatcc

SEQ ID NO: 4244 - DNA, 231 bp, Homo sapiens
  misc_feature (20)..(20): n equals a,t,g, or c
  misc_feature (28)..(29): n equals a,t,g, or c
  misc_feature (73)..(73): n equals a,t,g, or c
  misc_feature (76)..(76): n equals a,t,g, or c
  misc_feature (121)..(121): n equals a,t,g, or c
  misc_feature (157)..(157): n equals a,t,g, or c
  misc_feature (194)..(194): n equals a,t,g, or c
  misc_feature (224)..(225): n equals a,t,g, or c
  misc_feature (229)..(229): n equals a,t,g, or c
caagactgcttgtagacgcncaattccnnataccaaagctgaaaatggctgcataaatatttccccgtaattntcnaaggaaaatgatacaagactaattacatactgattaaaaagcaanctagaaacttcttacatatctctatttaacatttgnaaagaaacaaattgtcaggggctctgcagacaacatnatatctcttaatcatgcaaattaaatgatnnatanaa

SEQ ID NO: 4245 - DNA, 202 bp, Homo sapiens
  misc_feature (10)..(10): n equals a,t,g, or c
  misc_feature (18)..(18): n equals a,t,g, or c
  misc_feature (44)..(44): n equals a,t,g, or c
  misc_feature (66)..(66): n equals a,t,g, or c
  misc_feature (69)..(69): n equals a,t,g, or c
  misc_feature (140)..(140): n equals a,t,g, or c
  misc_feature (145)..(145): n equals a,t,g, or c
  misc_feature (156)..(156): n equals a,t,g, or c
  misc_feature (164)..(164): n equals a,t,g, or c
  misc_feature (185)..(185): n equals a,t,g, or c
cctaattganacaacttnttcagagaaaccccttccccggattngattgaaaaggacctggacagnatngctgttcacagactggttatcttctcaggaaagaacaaaaagtacaacaggctcttctagaaagtctggantctgnctggagatagncagggagnaccagtgtagtgaaggagaanctacatcttaagaagtg

SEQ ID NO: 4246 - DNA, 103 bp, Homo sapiens
  misc_feature (30)..(30): n equals a,t,g, or c
  misc_feature (52)..(52): n equals a,t,g, or c
  misc_feature (64)..(64): n equals a,t,g, or c
  misc_feature (73)..(73): n equals a,t,g, or c
  misc_feature (75)..(75): n equals a,t,g, or c
ttatacatgcattgtgagaaaatgtgatgnggcaagagtgagtaataatganccctacaaaccncagcagaantngcatcttatctttagaaaaaaaagataa

SEQ ID NO: 4247 - DNA, 390 bp, Homo sapiens
  misc_feature (15)..(15): n equals a,t,g, or c
  misc_feature (22)..(22): n equals a,t,g, or c
  misc_feature (39)..(39): n equals a,t,g, or c
  misc_feature (103)..(103): n equals a,t,g, or c
  misc_feature (128)..(128): n equals a,t,g, or c
  misc_feature (130)..(130): n equals a,t,g, or c
  misc_feature (181)..(181): n equals a,t,g, or c
  misc_feature (194)..(194): n equals a,t,g, or c
  misc_feature (199)..(199): n equals a,t,g, or c
  misc_feature (227)..(227): n equals a,t,g, or c
  misc_feature (235)..(235): n equals a,t,g, or c
  misc_feature (241)..(241): n equals a,t,g, or c
  misc_feature (277)..(277): n equals a,t,g, or c
  misc_feature (303)..(303): n equals a,t,g, or c
  misc_feature (356)..(357): n equals a,t,g, or c
  misc_feature (384)..(385): n equals a,t,g, or c
agaagctattctctnacgattnatgtgttagccctgtgnagttaactttgtgtcggtgcctaccgcatataagataagctgaaacgctgctggagtgtgtgcngtgccacctttggcgcttcgggctnancaggtgcaagtggactgcaccttctgcagctctactgtggcgtttgtggcncgaagaactcgtnacttntgtgacgaagtggtggctctgtgcctgnctgccagncctgtnccatggacccagtgtggtgaggcatctgcagcgcgntaggccagcgctgcatgaccgtctgncctgacccatggacccagatctgtctcggtggccttccctcatgcaggtgcannccggctaataacatgtgtggctccaanntaaaa

SEQ ID NO: 4248 - DNA, 122 bp, Homo sapiens
  misc_feature (12)..(12): n equals a,t,g, or c
  misc_feature (72)..(72): n equals a,t,g, or c
  misc_feature (82)..(82): n equals a,t,g, or c
tacggggaaacncgactcacttttgggaaagctgccacgcctgcaggtaccggtccggaattcccgggtctncccacgcttncgctaaagagttgctgcttttttcataaaaaaaaaaaaaa

SEQ ID NO: 4249 - DNA, 349 bp, Homo sapiens
  misc_feature (20)..(20): n equals a,t,g, or c
  misc_feature (47)..(47): n equals a,t,g, or c
  misc_feature (109)..(109): n equals a,t,g, or c
  misc_feature (270)..(270): n equals a,t,g, or c
  misc_feature (288)..(288): n equals a,t,g, or c
  misc_feature (316)..(316): n equals a,t,g, or c
  misc_feature (319)..(319): n equals a,t,g, or c
  misc_feature (321)..(321): n equals a,t,g, or c
gagggattgtgacgacgagnttgggagaggacaacagagaaatgganagatgtggatggagttcctttagtctctgctcttgtgctcctctgggggaatgtcttatacngttttaaaggactctgtggtcaagaaagtttgggaaacactgttccaaatgtctgcaagccccatgaccctattcaactccatgacagcttctattgataggctctatcctcactgtaaaaattttcaatgtatgctctgatggtcactggtaaagaatgntacggaaccagcttggtnttctggaaactggtaaataacaggaacnatnangcattaattctgctattggtcactaata

SEQ ID NO: 4250 - DNA, 300 bp, Homo sapiens
  misc_feature (19)..(19): n equals a,t,g, or c
  misc_feature (53)..(53): n equals a,t,g, or c
  misc_feature (86)..(86): n equals a,t,g, or c
  misc_feature (107)..(107): n equals a,t,g, or c
  misc_feature (165)..(165): n equals a,t,g, or c
  misc_feature (250)..(250): n equals a,t,g, or c
  misc_feature (276)..(276): n equals a,t,g, or c
  misc_feature (287)..(288): n equals a,t,g, or c
  misc_feature (290)..(290): n equals a,t,g, or c
ggcatggcggagccgctgntgcgccgcggagaggccgggcgagtcgggcgggntcggcgcccgcgctgagccgcggaggaggggcngaggacgcccctgcagccggngcgtctgccctcagtgaggcggggcgcgcggcggacgcccccgggcaggggcgggagnggtggaggcgccggcggatggcactgacaggggcggtgagcgagccgctccggtctccgggcgaggcttggccttcctagcaganacgccgtctaccgcaggacgttccancgagggaaaannantcggatcgta

SEQ ID NO: 4251 - DNA, 131 bp, Homo sapiens
  misc_feature (12)..(13): n equals a,t,g, or c
  misc_feature (22)..(22): n equals a,t,g, or c
  misc_feature (66)..(66): n equals a,t,g, or c
  misc_feature (70)..(70): n equals a,t,g, or c
  misc_feature (99)..(99): n equals a,t,g, or c
  misc_feature (126)..(127): n equals a,t,g, or c
ggtacgtgatanntttgggaangcccccggtccggttttgccgggtcgccccacgcgtgcgaaagngatnatacatgtatttgaacacttgatggttcnaacagtcttaaatgtaatgcttggggnnaagc

SEQ ID NO: 4252 - DNA, 146 bp, Homo sapiens
  misc_feature (2)..(2): n equals a,t,g, or c
  misc_feature (4)..(4): n equals a,t,g, or c
  misc_feature (25)..(25): n equals a,t,g, or c
  misc_feature (88)..(88): n equals a,t,g, or c
  misc_feature (91)..(91): n equals a,t,g, or c
  misc_feature (121)..(121): n equals a,t,g, or c
  misc_feature (132)..(132): n equals a,t,g, or c
  misc_feature (140)..(140): n equals a,t,g, or c
cncngggaacgccccctatagggtnaggtggaacgcccgcaggtaccggtccggaatttccgggtcgacccacgcgtccggcgtgatncanggtctggggaccacagtgctgatggagggngaggctacctnaagaaagngagatg

SEQ ID NO: 4253 - DNA, 300 bp, Homo sapiens
  misc_feature (1)..(1): n equals a,t,g, or c
  misc_feature (6)..(6): n equals a,t,g, or c
  misc_feature (15)..(15): n equals a,t,g, or c
  misc_feature (49)..(49): n equals a,t,g, or c
  misc_feature (77)..(77): n equals a,t,g, or c
  misc_feature (109)..(109): n equals a,t,g, or c
  misc_feature (273)..(273): n equals a,t,g, or c
  misc_feature (287)..(287): n equals a,t,g, or c
  misc_feature (293)..(293): n equals a,t,g, or c
  misc_feature (296)..(296): n equals a,t,g, or c
  misc_feature (298)..(298): n equals a,t,g, or c
ncctantatagggtnaggtggaacgcccgcaggtaccggtccggaattnccgggtcgacccacgcgtccggggctcntcgggaccagatccgcgagcccgtcagcctgngccatgggctgcgacggccgcgtgtcggggctgctccgccgcaacctgcagcccacgctcacctactggagcgtcttcttcagcttcggcctgtgcatcgccttcctggggcccacgctgctggacctgcgctgtcagacgcacagctcgctgccccagatctnctgggtcttcttcncgcagnagntntg

SEQ ID NO: 4254 - DNA, 318 bp, Homo sapiens
  misc_feature (15)..(15): n equals a,t,g, or c
  misc_feature (28)..(28): n equals a,t,g, or c
  misc_feature (49)..(49): n equals a,t,g, or c
  misc_feature (74)..(74): n equals a,t,g, or c
  misc_feature (76)..(76): n equals a,t,g, or c
  misc_feature (214)..(214): n equals a,t,g, or c
  misc_feature (271)..(271): n equals a,t,g, or c
  misc_feature (297)..(297): n equals a,t,g, or c
  misc_feature (301)..(301): n equals a,t,g, or c
  misc_feature (304)..(304): n equals a,t,g, or c
  misc_feature (311)..(311): n equals a,t,g, or c
aggccccggtccggntttcccgggtcgncccacgcgtccgctctgtttnagagaggccaggctggtttctgccntnatcctttaacacagcatcttctcccagaggcctgaggatgggaaaaagtgatggagaaaaggggaacccctaaggtcacccctcagccagggggaactgtttaacaggggtttgtctctgcccttttgagcctttggntttctacctggctcaggcacccaggtttatgttttctagatcaaaactctgcatggnctccctgagaagactgggagaagaanttgnccntcaggantgggatt

SEQ ID NO: 4255 - DNA, 206 bp, Homo sapiens
  misc_feature (36)..(36): n equals a,t,g, or c
  misc_feature (67)..(67): n equals a,t,g, or c
  misc_feature (73)..(74): n equals a,t,g, or c
  misc_feature (86)..(87): n equals a,t,g, or c
  misc_feature (94)..(94): n equals a,t,g, or c
  misc_feature (101)..(101): n equals a,t,g, or c
  misc_feature (114)..(114): n equals a,t,g, or c
  misc_feature (121)..(121): n equals a,t,g, or c
  misc_feature (155)..(155): n equals a,t,g, or c
  misc_feature (159)..(159): n equals a,t,g, or c
  misc_feature (179)..(179): n equals a,t,g, or c
ggctcgcctttcacaaagagcttcaacaggggagantgttagagggagaagtgcccccacctgctgntcagcnncagcctgacccnntcccatnctctggnctctgaccctttnttcacangggacctacccctattgcggtcctccagctcatntttnacctgacccctcttcttctncttggctttaattatgctaatgttgga

SEQ ID NO: 4256 - DNA, 137 bp, Homo sapiens
  misc_feature (4)..(4): n equals a,t,g, or c
  misc_feature (7)..(7): n equals a,t,g, or c
  misc_feature (52)..(52): n equals a,t,g, or c
  misc_feature (55)..(55): n equals a,t,g, or c
  misc_feature (76)..(76): n equals a,t,g, or c
  misc_feature (113)..(113): n equals a,t,g, or c
  misc_feature (126)..(126): n equals a,t,g, or c
cctnttngaaagccccggtccggatttggcgggtcgacccacgctgtccggnganctttttattaggaaatgcatntaaccatgttttagatgagtgctaaaggaagcttttnagggggcccctgncaataagggag

SEQ ID NO: 4257 - DNA, 108 bp, Homo sapiens
  misc_feature (26)..(26): n equals a,t,g, or c
  misc_feature (35)..(35): n equals a,t,g, or c
  misc_feature (54)..(54): n equals a,t,g, or c
  misc_feature (66)..(66): n equals a,t,g, or c
  misc_feature (89)..(89): n equals a,t,g, or c
agggtggaacgcccgcaggtaccggnccggaattnccgggtcgacccacgcgtncgggcataatcngggctcacctggacttaagcagnctggctggaatccacagtg

SEQ ID NO: 4258 - DNA, 164 bp, Homo sapiens
  misc_feature (6)..(6): n equals a,t,g, or c
  misc_feature (11)..(11): n equals a,t,g, or c
  misc_feature (22)..(22): n equals a,t,g, or c
  misc_feature (40)..(40): n equals a,t,g, or c
  misc_feature (99)..(99): n equals a,t,g, or c
  misc_feature (130)..(130): n equals a,t,g, or c
  misc_feature (137)..(137): n equals a,t,g, or c
  misc_feature (160)..(160): n equals a,t,g, or c
  misc_feature (162)..(162): n equals a,t,g, or c
accacngacanctcggaaacgncccactatagggttaggnggaacgcccgcaggtaccggtccggaattcccgggtcgacccacgcgtccggtactctnttaaaattcctgtgtaaactgggactttgcngttcacnttcttgtgtttcaagaacagtancncg

SEQ ID NO: 4259 - DNA, 196 bp, Homo sapiens
  misc_feature (5)..(5): n equals a,t,g, or c
  misc_feature (9)..(9): n equals a,t,g, or c
  misc_feature (12)..(12): n equals a,t,g, or c
  misc_feature (21)..(21): n equals a,t,g, or c
  misc_feature (34)..(34): n equals a,t,g, or c
  misc_feature (111)..(111): n equals a,t,g, or c
  misc_feature (132)..(133): n equals a,t,g, or c
  misc_feature (144)..(144): n equals a,t,g, or c
  misc_feature (163)..(163): n equals a,t,g, or c
ggacnctgnccntgagtccgnccgaatccgctcnccacgcgtcgaactggcctacggcttgtctatctgctgatgagctaagaatttgcaagacagtacagctgcagcagncatcactaagcagaacttctnnagccacacatnaccacagaatctcactggncattgtgctatgctctgccaatggcatgctgaa

SEQ ID NO: 4260 - DNA, 259 bp, Homo sapiens
  misc_feature (4)..(4): n equals a,t,g, or c
  misc_feature (31)..(31): n equals a,t,g, or c
  misc_feature (33)..(33): n equals a,t,g, or c
  misc_feature (49)..(49): n equals a,t,g, or c
  misc_feature (51)..(51): n equals a,t,g, or c
  misc_feature (121)..(121): n equals a,t,g, or c
  misc_feature (138)..(138): n equals a,t,g, or c
  misc_feature (152)..(152): n equals a,t,g, or c
  misc_feature (196)..(196): n equals a,t,g, or c
  misc_feature (200)..(200): n equals a,t,g, or c
  misc_feature (209)..(209): n equals a,t,g, or c
  misc_feature (247)..(247): n equals a,t,g, or c
  misc_feature (249)..(249): n equals a,t,g, or c
cccntttctcgcccatgatgaatgagggtgngnatgtctcgtagtacangnacgatgacctctttccaccgtgtgctgggaaaaggcatcggagacctggcatcgcaaagctctctttgangaaagatgatctcgatncatcccgagctgangcctcatcaagaaggggaagattcgtgaaaccctgaagtgaccntgtnctggtggcnagttcctaattatgaaaggatatgcactgaaagccgtncngataacttga

SEQ ID NO: 4261 - DNA, 187 bp, Homo sapiens
  misc_feature (6)..(6): n equals a,t,g, or c
  misc_feature (30)..(30): n equals a,t,g, or c
  misc_feature (40)..(40): n equals a,t,g, or c
  misc_feature (45)..(45): n equals a,t,g, or c
  misc_feature (50)..(50): n equals a,t,g, or c
  misc_feature (133)..(134): n equals a,t,g, or c
  misc_feature (143)..(143): n equals a,t,g, or c
  misc_feature (148)..(148): n equals a,t,g, or c
  misc_feature (163)..(163): n equals a,t,g, or c
ccaccncgtctttgactgcgtactctgtangttgctcacngcatntgcanacatcctattatgtcatataatatgcagatgacataagactattttctaaacatcctccatcttccacagagtgtgatgtcanncctcagtgnctatntggacttagatgggntcactcttctctggaatgatgaga

SEQ ID NO: 4262 - DNA, 134 bp, Homo sapiens
  misc_feature (2)..(2): n equals a,t,g, or c
  misc_feature (12)..(12): n equals a,t,g, or c
  misc_feature (18)..(18): n equals a,t,g, or c
  misc_feature (65)..(65): n equals a,t,g, or c
  misc_feature (70)..(70): n equals a,t,g, or c
  misc_feature (112)..(112): n equals a,t,g, or c
  misc_feature (117)..(117): n equals a,t,g, or c
  misc_feature (130)..(130): n equals a,t,g, or c
cnctgctgaccngtccanagtcctgtagaatgtcgttctgtctgtctctgactgcctgtctactntggtncgcttgggacaactagaaacttaaacagcaaatggccaagtnaacanacattgtgcatangctg

SEQ ID NO: 4263 - DNA, 115 bp, Homo sapiens
  misc_feature (2)..(2): n equals a,t,g, or c
  misc_feature (7)..(7): n equals a,t,g, or c
  misc_feature (41)..(41): n equals a,t,g, or c
  misc_feature (79)..(79): n equals a,t,g, or c
  misc_feature (84)..(84): n equals a,t,g, or c
  misc_feature (102)..(102): n equals a,t,g, or c
  misc_feature (105)..(105): n equals a,t,g, or c
gngactncgccgaagcaggcttctcgcaactccgggagagnacaaggatgcagtgtccaggcaacatgtgtcgccaggnagganctgtaccttctgttcganacnaatgcggctg

SEQ ID NO: 4264 - DNA, 104 bp, Homo sapiens
  misc_feature (25)..(25): n equals a,t,g, or c
  misc_feature (39)..(39): n equals a,t,g, or c
  misc_feature (48)..(48): n equals a,t,g, or c
  misc_feature (77)..(77): n equals a,t,g, or c
  misc_feature (84)..(84): n equals a,t,g, or c
acattggtggctctatgtggatatnatgcctcatttcanctgcatctntacatttactgagagctgtcattgagccntcatcantcgctactggagaacatatg

SEQ ID NO: 4265 - DNA, 242 bp, Homo sapiens
  misc_feature (8)..(8): n equals a,t,g, or c
  misc_feature (10)..(10): n equals a,t,g, or c
  misc_feature (20)..(20): n equals a,t,g, or c
  misc_feature (47)..(47): n equals a,t,g, or c
  misc_feature (123)..(123): n equals a,t,g, or c
  misc_feature (165)..(165): n equals a,t,g, or c
  misc_feature (211)..(211): n equals a,t,g, or c
  misc_feature (218)..(218): n equals a,t,g, or c
  misc_feature (237)..(237): n equals a,t,g, or c
  misc_feature (241)..(241): n equals a,t,g, or c
tggaccgngnaacgcccctngggcgtcgtccctaactcgtcattgtnttgtcgtcaagacttgaacactaacgagatattgcagcccttgacggagaatagagcacatagaagctcggtgacnaaaggtgagacactcacctagaacagtgccgtgctgtgctgngaaggtgcttacacacacaggccacatgggaaaggcccagcagccntaagctnctacttctccataaagagnacang

SEQ ID NO: 4266 - DNA, 235 bp, Homo sapiens
  misc_feature (4)..(4): n equals a,t,g, or c
  misc_feature (25)..(25): n equals a,t,g, or c
  misc_feature (37)..(37): n equals a,t,g, or c
  misc_feature (78)..(78): n equals a,t,g, or c
  misc_feature (87)..(87): n equals a,t,g, or c
  misc_feature (118)..(118): n equals a,t,g, or c
  misc_feature (142)..(142): n equals a,t,g, or c
  misc_feature (162)..(162): n equals a,t,g, or c
  misc_feature (190)..(190): n equals a,t,g, or c
  misc_feature (216)..(216): n equals a,t,g, or c
  misc_feature (222)..(222): n equals a,t,g, or c
cttncgtcgaccgatctgtgagctnagcggagcctgngctgcccacactccatccgcgcgtacacttctctgctctanggctcagancacatacgacggatagcaccacaacctgctncggacgtcgattgagctaagcatnggtgctgtcgtatccgtctntgccgaagactgtgacgtgaaatgaatntggcagtctctcaactcgattcccanagccgngactgattgactg

SEQ ID NO: 4267 - DNA, 266 bp, Homo sapiens
  misc_feature (8)..(8): n equals a,t,g, or c
  misc_feature (33)..(33): n equals a,t,g, or c
  misc_feature (61)..(61): n equals a,t,g, or c
  misc_feature (66)..(66): n equals a,t,g, or c
  misc_feature (82)..(82): n equals a,t,g, or c
  misc_feature (141)..(141): n equals a,t,g, or c
  misc_feature (193)..(193): n equals a,t,g, or c
  misc_feature (215)..(215): n equals a,t,g, or c
  misc_feature (217)..(217): n equals a,t,g, or c
  misc_feature (237)..(237): n equals a,t,g, or c
  misc_feature (255)..(255): n equals a,t,g, or c
cgaatccnctcaccacgcgtcgagctcctgtantctgggctgtatgcctgggtctctggancagtngaaatgggagactagnctcagctcctatacgcaccctggagagcggctcatctctgatgtctagcagacctcctnatagaatggaacaactattggatggtacctgagaaccaggcagtctcacagntcctgatcattggtctaatccngnctccgggtcctgcaggtcantgcagtgggtatgcacanacttacactga

SEQ ID NO: 4268 - DNA, 101 bp, Homo sapiens
  misc_feature (9)..(9): n equals a,t,g, or c
  misc_feature (27)..(27): n equals a,t,g, or c
  misc_feature (44)..(44): n equals a,t,g, or c
  misc_feature (79)..(80): n equals a,t,g, or c
ggggaaggnaccggggaccagttgggnaaaagggcccccatttnggggaaaaacgggcccccgtaagaagggaaggatnnggagagcggcgacgaaaccgg

SEQ ID NO: 4269 - DNA, 105 bp, Homo sapiens
  misc_feature (14)..(14): n equals a,t,g, or c
  misc_feature (26)..(26): n equals a,t,g, or c
  misc_feature (83)..(83): n equals a,t,g, or c
  misc_feature (87)..(87): n equals a,t,g, or c
  misc_feature (91)..(91): n equals a,t,g, or c
attgcttaattgcntggttacctttnatatcaactattatctttctgggaaagttttcgtttttctgtaaaccaacctccatngacncganaaatcatttcttaa

SEQ ID NO: 4270 - DNA, 101 bp, Homo sapiens
  misc_feature (18)..(18): n equals a,t,g, or c
  misc_feature (20)..(20): n equals a,t,g, or c
  misc_feature (58)..(58): n equals a,t,g, or c
  misc_feature (69)..(69): n equals a,t,g, or c
  misc_feature (91)..(91): n equals a,t,g, or c
ccattgatctgccgcagnantttctagacaatcggccacaatagaagctgcgtaatanatagatgaaancattcctctgtactctttaatnccatccttga

SEQ ID NO: 4271 - DNA, 314 bp, Homo sapiens
  misc_feature (29)..(29): n equals a,t,g, or c
  misc_feature (58)..(58): n equals a,t,g, or c
  misc_feature (94)..(94): n equals a,t,g, or c
  misc_feature (115)..(115): n equals a,t,g, or c
  misc_feature (117)..(117): n equals a,t,g, or c
  misc_feature (124)..(124): n equals a,t,g, or c
  misc_feature (138)..(138): n equals a,t,g, or c
  misc_feature (163)..(163): n equals a,t,g, or c
  misc_feature (191)..(191): n equals a,t,g, or c
  misc_feature (201)..(201): n equals a,t,g, or c
  misc_feature (227)..(227): n equals a,t,g, or c
  misc_feature (271)..(271): n equals a,t,g, or c
  misc_feature (275)..(275): n equals a,t,g, or c
  misc_feature (307)..(307): n equals a,t,g, or c
  misc_feature (310)..(310): n equals a,t,g, or c
ggcaccctttccctacctttcccttcttnaatctcctggtttaccattaatgacttcncctctgccatctactgacttaattttcaattctgcnactccatcttcaaaccccctnanctttccnatcctactcctgcnatgcattgaagggtcaatgcatttnggggtgagctctgggtttaggggccccntccatccctnagctaccctggatctttgcccacctnttcctcagagcccccactgaggggccgtagcctatctaggggtntggnaggagcagattggttcctaactgttttccctngtntttg

SEQ ID NO: 4272 - DNA, 372 bp, Homo sapiens
  misc_feature (54)..(54): n equals a,t,g, or c
  misc_feature (70)..(70): n equals a,t,g, or c
  misc_feature (90)..(90): n equals a,t,g, or c
  misc_feature (92)..(92): n equals a,t,g, or c
  misc_feature (94)..(94): n equals a,t,g, or c
  misc_feature (158)..(158): n equals a,t,g, or c
  misc_feature (166)..(166): n equals a,t,g, or c
  misc_feature (202)..(202): n equals a,t,g, or c
  misc_feature (210)..(210): n equals a,t,g, or c
  misc_feature (297)..(297): n equals a,t,g, or c
  misc_feature (328)..(328): n equals a,t,g, or c
  misc_feature (357)..(357): n equals a,t,g, or c
  misc_feature (360)..(360): n equals a,t,g, or c
  misc_feature (371)..(371): n equals a,t,g, or c
gcaggaccagtttggaaaagggtcaggtaagggtttccactctgcacattgtanagggaacactctgtangcccatgggtcccttactananangttgagtgaatttgccttcagttaacatgggaccttctgtttagcttcctcttgcttcccaaanattttaancattttgtaaatgtataaactcacctctggtaacantggcccanacctgctttgtgctaaaaacatgggaaattttaagcagtctttctcttggaaatggatgctattctattctgctgcccctacttttnccgaaggcctcttttaaaaaaaaaatccccncaaaaggtttctggcacccattttcttanccnggccaattttnt

SEQ ID NO: 4273 - DNA, 559 bp, Homo sapiens
ggacagaggctgttccctatggcagaaggcaaccacagaaaaaagccacttaaggtgttggaatccctgggcaaagatttcctcactggtgttttggataacttggtggaacaaaatgtactgaactggaaggaagaggaaaaaaagaaatattacgatgctaaaactgaagacaaagttcgggtcatggcagactctatgcaagagaagcaacgtatggcaggacaaatgcttcttcaaaccttttttaacatagaccaaatatcccccaataaaaaaggtgataaattgggtcacagaggcagaaatcacaatttatgttctgcaatatcctgcagctcatccgaatatggaggctggaccacctgagtcaggagaatctacagatgccctcaagctttgtcctcatgaagaattcctgagactatgtaaagaaagagctgaagagatctatccaataaaggagagaaacaaccgcacacggctggctctcatcatatgcaatacagagtttgaccatctgcctccgaggaattgagctgactttgacatcacaggg

SEQ ID NO: 4274 - DNA, 541 bp, Homo sapiens
  misc_feature (26)..(26): n equals a,t,g, or c
  misc_feature (28)..(28): n equals a,t,g, or c
  misc_feature (30)..(31): n equals a,t,g, or c
  misc_feature (34)..(34): n equals a,t,g, or c
  misc_feature (78)..(78): n equals a,t,g, or c
  misc_feature (97)..(97): n equals a,t,g, or c
  misc_feature (132)..(132): n equals a,t,g, or c
  misc_feature (492)..(492): n equals a,t,g, or c
ttaacccgcactaagggcacaaagtntngnnctncaccaggtggaggccgctcctagcaactagtgggtcccccgggnctgcagggaatggtcacgnggggtcatgcaggatgtggtggagggacttcaagnaataagtacgaagatgaaattaaccgccgcacagctgctgagaatgagtttgtggtgctgaagaaggatgtggatgctgcctacatgagcaagtggagctggaggccaaggtggatgccctgaatgatgagatcaacttcctcaggaccctcaatgagacggagttgacagagctgcagtcccagatctccgacacatctgtggtgctgtccatggacaacagtcgctccctggacctggacggcatcatcgctgaggtcaaggcacagtatgaggagatggccaaatgcagccgggctgaggctgaagcctggtaccagaccaagtttgagaccctccaggcccaggctgggaagcatngggacgacctccggaatacccggaatgagatttcagagatgaaccgggc

SEQ ID NO: 4275 - DNA, 455 bp, Homo sapiens
  misc_feature (1)..(1): n equals a,t,g, or c
  misc_feature (5)..(5): n equals a,t,g, or c
  misc_feature (10)..(10): n equals a,t,g, or c
  misc_feature (31)..(31): n equals a,t,g, or c
  misc_feature (60)..(60): n equals a,t,g, or c
  misc_feature (128)..(128): n equals a,t,g, or c
  misc_feature (141)..(141): n equals a,t,g, or c
  misc_feature (155)..(155): n equals a,t,g, or c
  misc_feature (158)..(158): n equals a,t,g, or c
  misc_feature (170)..(170): n equals a,t,g, or c
  misc_feature (185)..(186): n equals a,t,g, or c
  misc_feature (195)..(195): n equals a,t,g, or c
  misc_feature (213)..(214): n equals a,t,g, or c
  misc_feature (225)..(225): n equals a,t,g, or c
  misc_feature (230)..(230): n equals a,t,g, or c
  misc_feature (249)..(249): n equals a,t,g, or c
  misc_feature (252)..(252): n equals a,t,g, or c
  misc_feature (293)..(293): n equals a,t,g, or c
  misc_feature (297)..(297): n equals a,t,g, or c
  misc_feature (303)..(303): n equals a,t,g, or c
  misc_feature (311)..(311): n equals a,t,g, or c
  misc_feature (319)..(319): n equals a,t,g, or c
  misc_feature (384)..(384): n equals a,t,g, or c
  misc_feature (406)..(406): n equals a,t,g, or c
  misc_feature (418)..(418): n equals a,t,g, or c
  misc_feature (426)..(426): n equals a,t,g, or c
  misc_feature (440)..(440): n equals a,t,g, or c
naggnggggnattccttgattaccactctcnaaattaaccctcactaaagggaacaaaanctggagctccaccgcggtggcggccgctctagaactagtggatcccccgggctgcaaggaaattcggnacaattcccaggncacagcaaaggtcngtnaaaccccccccnccatccccagttatnngggtccccnggaatcctcctgttcctnnaatcaggctcngtttnccccctagccactacgggnagnctctgagagtgccgctttacttgcattctgcaacaattacntgtntccttnagatcctngggccaanttccctccctctcccagctcctggcccctggggccagggcccctcttgctgtttttacctctgtnccttggggcctactacccaagnaagcacccgaanggggggangttttggggattanaagaggaaaccttct

SEQ ID NO: 4276 - DNA, 271 bp, Homo sapiens
  misc_feature (7)..(7): n equals a,t,g, or c
  misc_feature (10)..(10): n equals a,t,g, or c
  misc_feature (47)..(47): n equals a,t,g, or c
ccgccanccncactaaagggaacaaaagctggagctccaccgcggtngcggccgctctagaactagtggatcccccgggctgcaggaattcggcacgagtgccattttaatcaaagttgtaatttttaaaaagtcacctaaaactctggttttaaaagatcctctgtattgaaaacttctgataatgtatgtcattatgtccttactattccttaattgtagttttaaaatattggtatagtacttgacagagtaaatacttcatctgatt

SEQ ID NO: 4277 - DNA, 355 bp, Homo sapiens
  misc_feature (20)..(20): n equals a,t,g, or c
  misc_feature (87)..(87): n equals a,t,g, or c
  misc_feature (224)..(224): n equals a,t,g, or c
  misc_feature (311)..(311): n equals a,t,g, or c
  misc_feature (334)..(334): n equals a,t,g, or c
  misc_feature (347)..(347): n equals a,t,g, or c
  misc_feature (354)..(355): n equals a,t,g, or c
gtcccaaagtgctgcgattntaggtaatgaaagtatgggatgctcatgtgacagcagtttgctcccaagatgccagtgaacttgtcnggaagcttggtgcagacgatgtaattgattacaaatctggaagtgtggaagagcagttgaaatccttaaaaccatttgattttatccttgataatgttggcggatccactgaaacatgggctccagattttctcaanaaatggtcaggagccacctatgtgactttggtgactcctttcctcctgaacatggaccgatagggcatagcagatggcatgttgcanacaggagtcactgtagttcaaangcattaaagcatntctggann

SEQ ID NO: 4278 - DNA, 338 bp, Homo sapiens
  misc_feature (76)..(76): n equals a,t,g, or c
  misc_feature (82)..(82): n equals a,t,g, or c
  misc_feature (271)..(271): n equals a,t,g, or c
  misc_feature (290)..(290): n equals a,t,g, or c
  misc_feature (330)..(330): n equals a,t,g, or c
gccgtcatctactctaccatctttgcaggcacactcatcacagcgctaagctcgcactgattttttacctgagtangcctanaaataaacatgctagcttttattccagttctaaccaaaaaaataaaccctcgttccacagaagctgccatcaagtatttcctcacgcaagcaaccgcatccataatccttctaatagctatcctcttcaacaatatactctccggacaatgaaccataaccaatactaccaaatcaatactcatcattnataatcataatggctattncaataaaactaaggaatagcccctttcattctgaatcccnaaagttac

SEQ ID NO: 4279 - DNA, 479 bp, Homo sapiens
  misc_feature (187)..(187): n equals a,t,g, or c
  misc_feature (210)..(210): n equals a,t,g, or c
  misc_feature (226)..(227): n equals a,t,g, or c
  misc_feature (249)..(249): n equals a,t,g, or c
  misc_feature (258)..(259): n equals a,t,g, or c
  misc_feature (324)..(324): n equals a,t,g, or c
  misc_feature (328)..(328): n equals a,t,g, or c
  misc_feature (355)..(355): n equals a,t,g, or c
  misc_feature (360)..(360): n equals a,t,g, or c
  misc_feature (404)..(404): n equals a,t,g, or c
  misc_feature (410)..(410): n equals a,t,g, or c
  misc_feature (426)..(426): n equals a,t,g, or c
  misc_feature (461)..(461): n equals a,t,g, or c
  misc_feature (479)..(479): n equals a,t,g, or c
gaagctatcgggcccataccccgaaaatgttggttatacccttcccgtactaattaatcccctggcccaacccgtcatctactctaccatctttgcaggcacactcatcacagcggctaagctcgcactgattttttacctgagtaggcctagtaaataaacatgctagcttttattccagttctanccaaaaaaataaaccctcgttcnacagaagctgccatcnngttatttcctcacgcaagcaancgcatccannatccttctaatggctatcctcttcaacaatatactctccggaacaatgaaaccataaccaatacnaccnatcaatactcatcattggataagcatnatggntattggcaattaaaactaggaatagcccccctttcacttctgantcccanaaggttaccccaaggnaccccctgaaatcgggctgcttcttctcacatganaaaaataaccccgctcan

SEQ ID NO: 4280 - DNA, 376 bp, Homo sapiens
  misc_feature (359)..(359): n equals a,t,g, or c
  misc_feature (366)..(366): n equals a,t,g, or c
  misc_feature (372)..(372): n equals a,t,g, or c
  misc_feature (374)..(374): n equals a,t,g, or c
  misc_feature (376)..(376): n equals a,t,g, or c
cccacgcgtccggacccacgcgtccgatcaacaccctcctagccttactactaataattattacattttgactaccacaactcaacggctacatagaaaaatccaccccttacgagtgcggcttcgaccctatatcccccgcccgcgtccctttctccataaaattcttcttagtagctattaccttcttattatttgatctagaaattgccctccttttacccctaccatgagccctacaaacaactaacctgccactaatagttatgtcatccctcttattaatcatcatcctagccctaagtctggcctatgagtgactacaaaaaggattagactgaaccggataaaaaaagaanaagagangaagananan

SEQ ID NO: 4281 - DNA, 542 bp, Homo sapiens
  misc_feature (482)..(482): n equals a,t,g, or c
  misc_feature (527)..(527): n equals a,t,g, or c
  misc_feature (536)..(536): n equals a,t,g, or c
gagtaaacattgctcaccagatctctctacgttcagaagcattttttcatgcaatgacctctcaacacgagttgcaggactacctcaggaaaacttcccaggctgtaaaaatgcttcgagataaaattgcacagattgataaagtaatgtgtgaaggatcactccacattttaagactggcacttaccagaaataattgtgttaaagtatacaataagctgaagttaatggccactgtacaccagactcagcctacagtacaggtgttattatctacttctgaatttgttggagcattggacttaatagcaacaacacaagaggttctacagcaggaacttcagggcattcacagtttccggcatttgggatcacagctttgtgaattagaaaaactgatagataaaatgatgattgcagaattttctacttattctcacagtgacttaaatagaccactggaagatgactgtcaagtttanaaagaggaaagactaatatctcttggatttggctttaaaaccaanaaagcttanttttaa

SEQ ID NO: 4282 - DNA, 611 bp, Homo sapiens
  misc_feature (340)..(340): n equals a,t,g, or c
  misc_feature (460)..(460): n equals a,t,g, or c
  misc_feature (469)..(469): n equals a,t,g, or c
  misc_feature (530)..(530): n equals a,t,g, or c
  misc_feature (534)..(534): n equals a,t,g, or c
  misc_feature (579)..(579): n equals a,t,g, or c
  misc_feature (582)..(582): n equals a,t,g, or c
  misc_feature (587)..(587): n equals a,t,g, or c
ggaagagcacccgctctccctgggtgaccaggtgacccccatcatcgacctaatggccatcagcaacgctcactttgccaagctgcgcgacttcatcactctgcgccttccacctggcttccccgtcaaaattgagattccccttttccacgtgctcaatgcccgcatcaccttcagcaacctgtgtggctgtgatgagcccctgagctccgtgtgggtgccggcccccagctctgctgtcgccgcatcagggaaccctttcccgtgcgaggtggaccccaccgtgtttgaagtgcccaacgggtacagcgtgctgggcatggagcgcaacgagcccctncgggacgaggacgatgacctcctgcagttcgccatccagcagagcctgcttgaagcgggcactgaggcggagcaggtgggacttgcccagggggtgggctctggcctctgcagacacacngcagaagtnacagctgtgggctctggtggctgcaggtgaccgtctgggaaggccctgaccaacacccggnccgntgcccggccttcttcccaggccacggtttatgaggaacagcttangcntggancggggcccttcaggaaaagccctg

SEQ ID NO: 4283 - DNA, 352 bp, Homo sapiens
  misc_feature (46)..(46): n equals a,t,g, or c
  misc_feature (54)..(54): n equals a,t,g, or c
  misc_feature (75)..(75): n equals a,t,g, or c
  misc_feature (115)..(116): n equals a,t,g, or c
  misc_feature (151)..(151): n equals a,t,g, or c
  misc_feature (159)..(159): n equals a,t,g, or c
  misc_feature (177)..(177): n equals a,t,g, or c
  misc_feature (190)..(191): n equals a,t,g, or c
  misc_feature (205)..(205): n equals a,t,g, or c
  misc_feature (235)..(235): n equals a,t,g, or c
  misc_feature (268)..(268): n equals a,t,g, or c
  misc_feature (307)..(307): n equals a,t,g, or c
  misc_feature (324)..(324): n equals a,t,g, or c
  misc_feature (333)..(333): n equals a,t,g, or c
  misc_feature (345)..(345): n equals a,t,g, or c
tattggtggcatcacagctcccacagtaagacagtactacgcttanctcaccgncacacagtgcaagcccgtagnaacacaatgctgggtgtttggggtcattggtttcctgggnngtccattgtttgcataaaatttggacaagatctcntgtctaanacccaaatactctatgtngtgctttggcttnnttgcgtggctttgnaccactttcctctgttcttttacggcatgntttggtatgcagaacactatgggtgcactgggnaaaagacctgacttcggaagtgtgaaagatgggcacctnttggttcccagtggatncttcctggncatccttaggtnaagggga

SEQ ID NO: 4284 - DNA, 407 bp, Homo sapiens
  misc_feature (297)..(297): n equals a,t,g, or c
  misc_feature (334)..(334): n equals a,t,g, or c
cagaaaatatgcctcatacaacatgagagatgtcatacaggaaagactccctttgtatgtaccgagtgcggaaaatcctattcacacaaatatggcctcattacccatcagagaattcacacaggagagaaaccttatgagtgcaatgaatgtggaaaagccttcaccacaaagtcagtactcaatgtacatcaaagaacgcatacaggagagaggccgtatggatgcagtgattgtgagaaagccttctcccacttatcaaaccttgtcaaacataagaaaatgcacacaagaganatgggtagaatcagtcaagttgaaaactcctgtaatngagagtcacagctccttccttataagtgaactcatgcagaagaaaaccctactagtgccgtgactatggaaaa

SEQ ID NO: 4285 - DNA, 538 bp, Homo sapiens
  misc_feature (2)..(2): n equals a,t,g, or c
  misc_feature (9)..(9): n equals a,t,g, or c
  misc_feature (54)..(54): n equals a,t,g, or c
  misc_feature (128)..(128): n equals a,t,g, or c
gntcgaaantaaccctcactaaagggaacaaaagctggagctccaccgcggtgncggccgctctagaactagtggatcccccgggctgcaggaattcggcacgaggtaagtggcgcgattcgggcagnccccgatggaacctcctggtcctgtgagggtacacagggacaagagaagatgatgatgatgggaccaaaggaagaggaacagtcttgtgagtatgagaccaggctacctgggaaccactctaccagtcaagagatcttccgccaacgcttcaggcatctccgctaccaggagactcctggtccccgggaggccttgagccaactacgagtactctgctgtgagtggctgaggccagagaaacacacgaaggagcagatcctggagttcctggtgctggaacaattcttgaccatcctgcctgaggagctccaatcctgggtgcggggacatcaccctaagagtggagaggaggctgtgactgtgctggaggatttagagaaaggacttgaaccagagccgcagtcccagg

SEQ ID NO: 4286 - DNA, 300 bp, Homo sapiens
  misc_feature (59)..(59): n equals a,t,g, or c
  misc_feature (231)..(231): n equals a,t,g, or c
  misc_feature (262)..(262): n equals a,t,g, or c
  misc_feature (271)..(271): n equals a,t,g, or c
  misc_feature (275)..(275): n equals a,t,g, or c
  misc_feature (282)..(282): n equals a,t,g, or c
gcaggggaaaaaccctatgtgtgtgataggtgtgggaaggccttcaggaaacagctcangcctcacagtgcataaaaggatccacacaggtgaaaccccactatgaatgtgatgagtgtgggaaggcatacatctcacactcaagtcttattcaatcataaaagtgtccaccaggggaaagcagccctattattgttgaattgttgggaaatccttccaattatgaatcantcccttgaaccagcacaaaagggatcccccnctgggaaanaaanccctccnaattttaagaagtttggg

SEQ ID NO: 4287 - DNA, 405 bp, Homo sapiens
  misc_feature (335)..(335): n equals a,t,g, or c
  misc_feature (347)..(347): n equals a,t,g, or c
  misc_feature (377)..(377): n equals a,t,g, or c
  misc_feature (383)..(383): n equals a,t,g, or c
  misc_feature (402)..(402): n equals a,t,g, or c
gccagggcctgagggggaggtttcctgagaactccggccccaggctggcctgagctgccgggcagaggcctgtgctggcaacaggcattgccgggcctgcagctcagagggtcactgggactgagggcgatctgtggcctgaaaagcaaatgcacagttagtgcagctcctgaccaggccttcagggtggacagagggaggatcggtcatggcagccacacctgggcctggccttgctccgggacctgccagaggagctggcctggctctgtgcctgcctgcctccaggagcaggacggtggctgggagggtagtgactggggacacaggtgcangtgttagtgcangaccggaagggtgaggtggcctggtcctcngggctnctggcctgggctggctgangca

SEQ ID NO: 4288 - protein, 108 aa, Homo sapiens
  MISC_FEATURE (10): Xaa equals any of the naturally occurring L-amino acids
  MISC_FEATURE (91): Xaa equals any of the naturally occurring L-amino acids
NKKKDNHLLXPVQENANSGYYEAHPVTNGIEEPLEESSHEPEPEPESETKTEELKPQVEEKNLEELEEKSTTPPPAEPVSLPQEPPKPRVXAKPEVQSQPPRVRGTTT

SEQ ID NO: 4289 - protein, 59 aa, Homo sapiens
GFPVLFHSAFMSQLPLIPSKLSQVEWPNPGMMYYFLQSCDCLGGPFANFPRAHVCLVVK

SEQ ID NO: 4290 - protein, 147 aa, Homo sapiens
  MISC_FEATURE (53): Xaa equals any of the naturally occurring L-amino acids
  MISC_FEATURE (93): Xaa equals any of the naturally occurring L-amino acids
  MISC_FEATURE (135): Xaa equals any of the naturally occurring L-amino acids
REFDGKPGLAGLATPPPPPPHQRHLHLHCPAKLRLLPLQRQLASRHRWTPGSXSDVARLSGKSVLPLPISMPSPSVSPESAVYLIGPVMLTFXATAFSSKEFSSHHGVSGPLASWSKVGLGGRYGSGMCYRSYQXWGPLSVSGSERV

SEQ ID NO: 4291 - protein, 53 aa, Homo sapiens
  MISC_FEATURE (53): Xaa equals any of the naturally occurring L-amino acids
REFDGKPGLAGLATPPPPPPHQRHLHLHCPAKLRLLPLQRQLASRHRWTPGSX

SEQ ID NO: 4292 - protein, 45 aa, Homo sapiens
ALIFHWGSAITKNSSDIFQLPKWPGTFCFYENRFILYFPVCLLCL

SEQ ID NO: 4293 - protein, 58 aa, Homo sapiens
IASGRPFFFLIYMNLQIIYINLLLCGDFGQEDCLRPGIQDQPGKQSETLSLQKIKTKI

SEQ ID NO: 4294 - protein, 65 aa, Homo sapiens
VFQHSHCTSAGNLSILYRQSELKSLMSRDYGLNKLVCPIGGKKPRNHLLKRMICHIPLDFHFALY

SEQ ID NO: 4295 - protein, 94 aa, Homo sapiens
  MISC_FEATURE (40): Xaa equals any of the naturally occurring L-amino acids
HRIHFTYLTSTISSDTFSMKQTIAIFKIMNLSIILPNSFXHLCNFSLFLLPLPVPSQPLICSGNYQSSFCHYRLICIFKEIYIHGTIHHLCFVV

SEQ ID NO: 4296 - protein, 62 aa, Homo sapiens
AEVLLEAIRKGIQLRKVEEQREQEAKHERIENDVATILSRRIAVEYSDSEDDSEFDEVDWLE

SEQ ID NO: 4297 - protein, 29 aa, Homo sapiens
  MISC_FEATURE (8): Xaa equals any of the naturally occurring L-amino acids
  MISC_FEATURE (18): Xaa equals any of the naturally occurring L-amino acids
CRLLRRTXKLGFSGRMTXLRDPLQARTKF

SEQ ID NO: 4298 - protein, 129 aa, Homo sapiens
FLKEGSTPVSNVYVSMCVCAIHMYSHEDRHGQVLLEEHSSVTSRATGPCRAVVYIVQLWRWNSIFTLFYGAFRVPGFHLRLSVWMAVFRPPLTSLPSILYFGGLLSCYKTFYQVKHRYHLCFHSHWCKY

SEQ ID NO: 4299 - protein, 345 aa, Homo sapiens
  MISC_FEATURE (156): Xaa equals any of the naturally occurring L-amino acids
  MISC_FEATURE (186): Xaa equals any of the naturally occurring L-amino acids
  MISC_FEATURE (209): Xaa equals any of the naturally occurring L-amino acids
  MISC_FEATURE (288): Xaa equals any of the naturally occurring L-amino acids
  MISC_FEATURE (301): Xaa equals any of the naturally occurring L-amino acids
ESDGMALITLRKNLYRLSDFQMHRALAALKNKPLNHVHKVVKERLCPWLCSRQPEPFGVRFHHAHCKKFHSKNGNDLHPLGGPVFSQVSDCDRLEQNVKNEESQMFYRRLSNLTSSEEVLSFISTMETLPDTMAAGALQRICEVEKKDGDQGLPKXILENSIFQALCFQFEKEPSQLSNTSLVTAXQALILLHVDPQSSLLLNLVAECXNRLRKGGMEVRNLCILGESLITLHSSGCVTLELIINQLQGEKLETFTPEDIVALYRILQACTEKVDEHQTFLNKINNFXLSIVSNLSPKLIXQMLTALVVLDQSQAFPLIIKLGKICREACPTFHLTRSLGESFEA

SEQ ID NO: 4300 - protein, 82 aa, Homo sapiens
  MISC_FEATURE (53): Xaa equals any of the naturally occurring L-amino acids
  MISC_FEATURE (76): Xaa equals any of the naturally occurring L-amino acids
ESPFHTVERCRCGKPQRWLPILNPFISHLSFFSPFCPDVAMVGWVRPEETASXRGSSRSGGSAGIGAHRSEEWPMXLPSKCA

SEQ ID NO: 4301 - protein, 72 aa, Homo sapiens
  MISC_FEATURE (66): Xaa equals any of the naturally occurring L-amino acids
  MISC_FEATURE (70): Xaa equals any of the naturally occurring L-amino acids
  MISC_FEATURE (71): Xaa equals any of the naturally occurring L-amino acids
LSICIINIIMMFFSCSFQGLSHLKKLLLTKLLTLFPLMIQVSVPALYVNYQNSPASEHDIYNRRYXNKMXXL

SEQ ID NO: 4302 - protein, 40 aa, Homo sapiens
HINNIKMAIPFYGVTLFLGIVSKEIILNIGKKYFYNLQSV

SEQ ID NO: 4303 - protein, 58 aa, Homo sapiens
  MISC_FEATURE (17): Xaa equals any of the naturally occurring L-amino acids
AVALMAPPSGMIRVTAXRGSFEWRPAGGDPNRRAGRRPFSREGPIWRKSSRLVKLGGR

SEQ ID NO: 4304 - protein, 39 aa, Homo sapiens
PYRSSKNSMPFRLAHYQKHHESILKTNYLLQCISLVLCV

SEQ ID NO: 4305 - protein, 104 aa, Homo sapiens
  MISC_FEATURE (96): Xaa equals any of the naturally occurring L-amino acids
GHIFSLKSDILSLLLSHYCHTFVFFVVIVWVEQLQETLKPLDIKEICLLIFKSFLSKSWDTHGSCLGNFPCCYRAATKWELTRRAVYTVSLATVAXGSGIWLTG

SEQ ID NO: 4306 - protein, 74 aa, Homo sapiens
  MISC_FEATURE (70): Xaa equals any of the naturally occurring L-amino acids
EVDLGVSWRVSLLVAGGRDSWLWGWREVVGRKRGCVPATRICIPEPKPGGISLRQHHPREICHNLRFTAXDAEA

SEQ ID NO: 4307 - protein, 53 aa, Homo sapiens
QVQAAEQPKPLLCLWSRHSLFLCFLDELAFTLLYGLAPNSLLREIQEPSFGSA

SEQ ID NO: 4308 - protein, 55 aa, Homo sapiens
  MISC_FEATURE (14): Xaa equals any of the naturally occurring L-amino acids
  MISC_FEATURE (45): Xaa equals any of the naturally occurring L-amino acids
SNVPKTSKQNLIPXKYALFLLICFVLQLRSKSLVKLYYLPKYKRXLELHCNIDVL

SEQ ID NO: 4309 - protein, 41 aa, Homo sapiens
  MISC_FEATURE (25): Xaa equals any of the naturally occurring L-amino acids
  MISC_FEATURE (31): Xaa equals any of the naturally occurring L-amino acids
MGGLIALAREAAGKEDRWHPETAQXWNRTPXVQGLKFHGLV

SEQ ID NO: 4310 - protein, 79 aa, Homo sapiens
  MISC_FEATURE (13): Xaa equals any of the naturally occurring L-amino acids
  MISC_FEATURE (79): Xaa equals any of the naturally occurring L-amino acids
QAAARGHPHPAFXRQFDRGERGPAGLLLCWAWQPPPEKMEFRTASIRLFGHLTRSATETVRTSSWTKWWAGWRPAAAPX

SEQ ID NO: 4311 - protein, 67 aa, Homo sapiens
  MISC_FEATURE (22): Xaa equals any of the naturally occurring L-amino acids
  MISC_FEATURE (23): Xaa equals any of the naturally occurring L-amino acids
  MISC_FEATURE (59): Xaa equals any of the naturally occurring L-amino acids
  MISC_FEATURE (60): Xaa equals any of the naturally occurring L-amino acids
TSSLLQAHSLIESLVINLLNAXXAANLGKLLSWWGHCWINNVRYELSDALTWILHFKVXXGAYGQPT

SEQ ID NO: 4312 - protein, 134 aa, Homo sapiens
PDQPYEWLSYKQVAELSECIGSALIQKGFKTAPDQFIGIFAQNRPEWVIIEQGCFAYSMVIVPLYDTLGNEAITYIVNKAELSLVFVDKPEKAKLLLEGVENKLIPGLKIIVVMDAYGSNWWNEARGVGWKSPA

SEQ ID NO: 4313 - protein, 355 aa, Homo sapiens
  MISC_FEATURE (5): Xaa equals any of the naturally occurring L-amino acids
  MISC_FEATURE (347): Xaa equals any of the naturally occurring L-amino acids
CISLXPNISLRHLWPQRMCPSGVVMITWGMSRHPQVLQATQETLQRHGAGAGGTRNISGTSKFHVELEQELAELHQKDSALLFSSCFVANDSTLFTLAKILPGCEIYSDAGNHASMIQGIRNSGAAKFVFRHNDPDHLKKLLEKSNPKIPKIVAFETVHSMDGAICPLEELCDVSHQYGALTFVDEVHAVGLYGSRGAGIGERDGIMHKIDIISGTLGKAFGCVGGYIASTRDLVDMVRSYAAGFIFTTSLPPMVLSGALESVRLLKGEEGQALRRAHQRNVKHMRHYSWTGAFLSSPAPATSSPSGWAMQHSTASSVISCSPSMASMCRPSTTQLSPGVKSSCAWXPPPTTALR

SEQ ID NO: 4314 - protein, 161 aa, Homo sapiens
  MISC_FEATURE (91): Xaa equals any of the naturally occurring L-amino acids
  MISC_FEATURE (136): Xaa equals any of the naturally occurring L-amino acids
  MISC_FEATURE (138): Xaa equals any of the naturally occurring L-amino acids
  MISC_FEATURE (140): Xaa equals any of the naturally occurring L-amino acids
TKEKKNRQGNSLDMASEIHMTGPMCLIENTNGRLMANPEALKILSAITQPMVVVAIVGLYRTGKSYLMNKLAGKKKGFSLGSTVQSHTKGXWMWCVPHPKKPGHILVLLDTEGLGDVEKGDNQNDSWIFALAVLLXSXFXYNSIGTINQQAMDQLHYQSRS

SEQ ID NO: 4315 - protein, 109 aa, Homo sapiens
  MISC_FEATURE (97): Xaa equals any of the naturally occurring L-amino acids
VLHSVLGGWLGPGAVASQGAASPWQASLPWAALPQTPDHPLGPVPHQSPSSCLWGSHHGVRAVHSASQCVSPGTWEGREHWGLGPQLRGCLALPSDXAYPEFGGYFPLA

SEQ ID NO: 4316 - protein, 36 aa, Homo sapiens
LFLSSPGLERVTMLFLGLHNVRQTSMFPRDPKRLTP

SEQ ID NO: 4317 - protein, 89 aa, Homo sapiens
  MISC_FEATURE (88): Xaa equals any of the naturally occurring L-amino acids
GQPEVTFIAILVLVSFFTAACFIIKVFITCILCRPPVSSCDLECLTSWECSPVGLSLILLHPLIQDGSFSGFQTTPGHVFPPPFLQQXP

SEQ ID NO: 4318 - protein, 69 aa, Homo sapiens
MFLIVFCFLQSLSAMPIVLIFYRSSLKILNRGIGSGQSEWLEFWLSKKNFILHKHVVRSFCAYAAWIGC

SEQ ID NO: 4319 - protein, 74 aa, Homo sapiens
SFLFHYFCYFKCISSGILFGAIPTKSGTRMCLRAVTFQHDGFGLVWFCVLFICSFFCCNRKWLGSLRWYVTNSF

SEQ ID NO: 4320 - protein, 171 aa, Homo sapiens
MLSPPRTTTGSMTSWGTCGSGQHHRTRLLSRTCASSGGHPGSTQLMALPITGPGSPPGWATLQIQPQTTSVSAVLQTQAGRQGSCKQPGGDKEKSLLGSLSFPGHVANSAIPSSRASASGKNFPFPVSHPSVAGASHQGRRGLSLLCFGEGAQCVLTMAGGQVFLLEAKYY

SEQ ID NO: 4321 - protein, 44 aa, Homo sapiens
  MISC_FEATURE (28): Xaa equals any of the naturally occurring L-amino acids
SSHLSLNEAVVISGRKLAQQIKQEVRQXVEDGVGSRQQTATPEC

SEQ ID NO: 4322 - protein, 74 aa, Homo sapiens
RFKSRLSILLSILFHFKKKGFGICQPLLSLLYKATALVLDIMPGLISQTSGLNQVHAWLLKKLMLIPKSAQSQP

SEQ ID NO: 4323 - protein, 103 aa, Homo sapiens
  MISC_FEATURE (47): Xaa equals any of the naturally occurring L-amino acids
  MISC_FEATURE (92): Xaa equals any of the naturally occurring L-amino acids
AQVDFRRTPIDSTAAPGAQTPAARSKARSCCSHVGPQPPHSGPAHGXPPASCQQGLGNFSPGCRALSRWPCSWSSLQSPLQSTTSGARRSRXWESWWGTDWKV

SEQ ID NO: 4324 - protein, 126 aa, Homo sapiens
  MISC_FEATURE (14): Xaa equals any of the naturally occurring L-amino acids
  MISC_FEATURE (71): Xaa equals any of the naturally occurring L-amino acids
  MISC_FEATURE (76): Xaa equals any of the naturally occurring L-amino acids
  MISC_FEATURE (124): Xaa equals any of the naturally occurring L-amino acids
PRPRGAGAMVRGRXFRLSVRDVRFPTSLGGHGADAMHTDPDYSAAYVVIETDAEDGIKGCGITFTLGKGTXVVVCXVNALAHHVLNKDLKDIVGDFRGFYRQLTSDGQLRWIGPEKGVVHLATXPS

SEQ ID NO: 4325 - protein, 39 aa, Homo sapiens
WIKDLNVRPESMKLLEENIWETLQYPGLGEDFMEKTSKA

SEQ ID NO: 4326 - protein, 84 aa, Homo sapiens
  MISC_FEATURE (75): Xaa equals any of the naturally occurring L-amino acids
APAGLRRSPWRCGAIGGDGRGRGASTVSHPPLATLIFLLHLGPGASSTTQAGCFKKNCFLKCLSLKEISLTLEVXGASSQYTSC

SEQ ID NO: 4327 - protein, 209 aa, Homo sapiens
  MISC_FEATURE (2): Xaa equals any of the naturally occurring L-amino acids
  MISC_FEATURE (97): Xaa equals any of the naturally occurring L-amino acids
  MISC_FEATURE (104): Xaa equals any of the naturally occurring L-amino acids
WXCILNILKGYNFSRESVESPEQKGLTYHRIVEAFRFAYAKRTLLGDPKFVDVTEVVRNMTSEFFAAQLRAQISDDTTHPISYYKPEFYTPDDGGTXHLSVVAXDGSAVSATSTINLYFGSKVRSPVSGILFNNEMDDFSSPSITNEFGVPPHLPISSSQGSSRSRPCARRSWWARTARSGWWWELLGAHRSPRPLHWPSSTTSGSAMT

SEQ ID NO: 4328 - protein, 47 aa, Homo sapiens
MFNELENDSWVVNIVNVDELFSFAESSYFVGGFNSAWQFAAFLVVLL

SEQ ID NO: 4329 - protein, 297 aa, Homo sapiens
  MISC_FEATURE (105): Xaa equals any of the naturally occurring L-amino acids
  MISC_FEATURE (183): Xaa equals any of the naturally occurring L-amino acids
PLPPQLQTPPRSNSVFAVNQAVSPNFSQGSAIIIASPVQPVLQGMVGMIPVSVVGQNGNNFSTPPRQVLHMPLTAPVCNRSIPQFPVPPKSQKAQGLRNKPCIGXQVNNLVDSSGHSVGCHAQKTEVSDKSIATDLGKKSEETTVPFPEESIVPAAKPCHRRVLCFDSTTAPVANTQGPNHKXVSQNKERNAVSFPNLDSPNVSSTLKPPSNNAIKREKEKPPLPKILSKSESAISRHTTIRETQSEKKVSPTEIVLESFHKATANKENELCSDVGKTEKSRKFKTIYWAAKWGFAK

SEQ ID NO: 4330 - protein, 131 aa, Homo sapiens
  MISC_FEATURE (2): Xaa equals any of the naturally occurring L-amino acids
  MISC_FEATURE (38): Xaa equals any of the naturally occurring L-amino acids
  MISC_FEATURE (69): Xaa equals any of the naturally occurring L-amino acids
WXPRAAGIRHELESFAVPNLWKSEDITQIVANYGLICXTRAGNDAQKFIYESDVLWKHRSNIHVVNEWXANDISSTKIRRALRRGQSIRYLVPDLVQEYIEKHNLYSSESEDRNAGVILAPLQRNTAEAKT

SEQ ID NO: 4331 - protein, 75 aa, Homo sapiens
DHPRTISSRILQWLDEELPDLSVSRRSSHLHWGIPVPGDDSQTIYVWLDALVNYLTVIGYPNAEFKSWWPATLIS

SEQ ID NO: 4332 - protein, 93 aa, Homo sapiens
  MISC_FEATURE (79): Xaa equals any of the naturally occurring L-amino acids
  MISC_FEATURE (89): Xaa equals any of the naturally occurring L-amino acids
SMWGKERSDCYCVCVEKEDIRNSILICTKKNCFCFEMLLAYNFSPNSVLTETCAVMDQSLMDLGLCRMCLVNNMFGRRXALGRSHRPFXHSPV

SEQ ID NO: 4333 - protein, 133 aa, Homo sapiens
  MISC_FEATURE (22): Xaa equals any of the naturally occurring L-amino acids
  MISC_FEATURE (115): Xaa equals any of the naturally occurring L-amino acids
PAGPGQKPDPGKLPAAGVLRIXRGSSGLWKKRRATDFGRGRAGLSAAMSAKAISEQTGKELLYKFICTTSAIQNRFKYARVTPDTDWARLLQDHPWLLSQNLVVKPDQLDQTSWXNLVFVGVQPHSGWGQVLG

SEQ ID NO: 4334 - protein, 85 aa, Homo sapiens
  MISC_FEATURE (4): Xaa equals any of the naturally occurring L-amino acids
LERXGAGGRDFWVPVCCRGLHVISMEKAVYAVTQSLVRGQAPGGGGSSCGSHSPRKPPLPSVSQIDRESRDSDRQVTSQIESIFV

SEQ ID NO: 4335 - protein, 88 aa, Homo sapiens
  MISC_FEATURE (88): Xaa equals any of the naturally occurring L-amino acids
PPLTLDSNPVVILGWDLGACRWLRSQPLVIRATSLALGALAPAEPLVHRTAWEPGRGLWQPPRAEVQTLFRLTQVHTWIGLGVEAWFX

SEQ ID NO: 4336 - protein, 71 aa, Homo sapiens
VFQGISQRQSVQQWDINAYLHFPTAIYIKCYSIQRMPFIPTLKHRSLSNKNQIVCHSNYNCSYFCMVRVRC

SEQ ID NO: 4337 - protein, 58 aa, Homo sapiens
NFGQVFVYQYFVLLGNILFFSYLCQIIIIKGTAENIPCFYIGSHLYLGGTLSIYILFV

SEQ ID NO: 4338 - protein, 79 aa, Homo sapiens
  MISC_FEATURE (74): Xaa equals any of the naturally occurring L-amino acids
HRKKHFLKPTVSDQWGKQQKTKRRIFPLIFLQKSISLIAHCHKFCLVLREATCTGSFYVQRKDFTIKKINLARXGVSHW

SEQ ID NO: 4339 - protein, 41 aa, Homo sapiens
PLGHHQVPLTTKLSVKKTEDGNTLVFIVNVKANKHRIKQAS

SEQ ID NO: 4340 - protein, 120 aa, Homo sapiens
  MISC_FEATURE (16): Xaa equals any of the naturally occurring L-amino acids
  MISC_FEATURE (20): Xaa equals any of the naturally occurring L-amino acids
  MISC_FEATURE (21): Xaa equals any of the naturally occurring L-amino acids
  MISC_FEATURE (44): Xaa equals any of the naturally occurring L-amino acids
IRHRHGCPSVLRMGSXQVGXXGCWQNRRIPSFAEWGTCSEPAQXPGLLQVKLDGRPRSQFLSTRRGRCLEPLPTFSWMGEASQESKQCCPHGRRTERLGKLGSTSHPERLLETPQLESPG

SEQ ID NO: 4341 - protein, 92 aa, Homo sapiens
  MISC_FEATURE (49): Xaa equals any of the naturally occurring L-amino acids
GMPTASQRVGGGLCTLSTNLPPTRLLTTAPRRLSNSVSCPRGRGLPVEXPMCLPLVQPAARKWVTATGLGWARPGSGRCGIGETTAPVVSSA

SEQ ID NO: 4342 - protein, 136 aa, Homo sapiens
  MISC_FEATURE (87): Xaa equals any of the naturally occurring L-amino acids
  MISC_FEATURE (88): Xaa equals any of the naturally occurring L-amino acids
  MISC_FEATURE (127): Xaa equals any of the naturally occurring L-amino acids
  MISC_FEATURE (133): Xaa equals any of the naturally occurring L-amino acids
CKHDGWGKHSNCTHQQDAGVTCSDGSNLEMRLTRGGNMCSGRIEIKFQGRWGTVCDDNFNIDHASVICRQLECGSAVSFSGSSNFGXXSGPIWFDDLICNGNESALWNCKHQGWGKHNCDHAEDAGXICSKGXDLT

SEQ ID NO: 4343 - protein, 59 aa, Homo sapiens
ATAHGLTMLSIPYMERCFPFQSSLKLCRRFTCVYRAKRNQGMEIECVIKIKLFMLYNHA

SEQ ID NO: 4344 - protein, 52 aa, Homo sapiens
  MISC_FEATURE (46): Xaa equals any of the naturally occurring L-amino acids
KACLLHCEQDSSPLNHEYVSVLWITKLVMLLSPNVFFKKYSFVHLXVIKLQN

SEQ ID NO: 4345 - protein, 42 aa, Homo sapiens
  MISC_FEATURE (12): Xaa equals any of the naturally occurring L-amino acids
YESLEMYQTEGXFSLQIMSNVAILTHFINIYFVIGGEHHLLF

SEQ ID NO: 4346 - protein, 51 aa, Homo sapiens
  MISC_FEATURE (15): Xaa equals any of the naturally occurring L-amino acids
ALNAKLFYTEKTLKXVLCGITVICHEKPYMGDMLKWLLNEIRQQRKMPLKC

SEQ ID NO: 4347 - protein, 62 aa, Homo sapiens
  MISC_FEATURE (37): Xaa equals any of the naturally occurring L-amino acids
  MISC_FEATURE (62): Xaa equals any of the naturally occurring L-amino acids
DYSDFVSFLLNFGQFCFCLCHLSFQMYWHEYFHNIPXLSFTFLGYLSGVSLFIPKMFIHAFX

SEQ ID NO: 4348 - protein, 141 aa, Homo sapiens
  MISC_FEATURE (108): Xaa equals any of the naturally occurring L-amino acids
DMMPLLHNYVTVDTDTLLSDTKYLEMIYSMCKKVLTGVAGEDAECHAAKLLEVIILQCKGRGIDQCIPLFVEAALERLTREVKTSELRTMCLQVAIAALYYNPHLLLXTLENLRFPNNVEPVTNHFITQWLNDVGLFLGAS

SEQ ID NO: 4349 - protein, 91 aa, Homo sapiens
LASMGIPQVVVQPRSWWLGLMLLPSPSVSCSGSAYVPGVWYLIFQDADIYFLPTTPYTLSLANIFECLLLVCLSSVVLLLCPKCMLCSVSA

SEQ ID NO: 4350 - protein, 68 aa, Homo sapiens
SYSYSHERQNVCFKINLVFCTFKFEKVTTGSFPVFLHVSFLIDHYWQTVSVNYQMCKIFCISLCLICK

SEQ ID NO: 4351 - protein, 125 aa, Homo sapiens
GAAPPLSSEHKEPVAGDAVPGPKDGSAPEVRGARNSEPQDEGELFQGVDPRALAAVLLQALDRPASPPAPSGSQQGPEEEAAEALLTETVRSQTHSLPAPESPEPASASPSDSGEWARGERSLRG

SEQ ID NO: 4352 - protein, 50 aa, Homo sapiens
FLLWQILSSNLSFLVEQALFFEPSNDLEADVISVPFAICCVGFFFFKATQ

SEQ ID NO: 4353 - protein, 273 aa, Homo sapiens
DPRVREDPQPGPKPVPEPEPEPEPSREPVAGAPGCGTAGPPAMATLWGGLLRLGSLLSLSCLALSVLLLAHCQTPPRISRMSDVNVSALPIKKNSGHIYNKNISQKDCDCLHVVEPMPVRGPDVEAYCLRCECKYEERSSVTIKVTIIIYLSILGLLLLYMVYLTLVEPILKRRLFGHAQLIQSDDDIGDHQPFANAHDVLARSRSRANVLNKVEYGTAALEASSPRAAKSLSLTGMLSSANWGIEFKVTRKKQADNWKGTDWVLLGFILIPC

SEQ ID NO: 4354 - protein, 72 aa, Homo sapiens
VMAPKDVLFILIPGTCKHVTLYGKRDFGQAPVIPDTQEAEAKESLKPGRRRLQGAKIVPMHSSLSNKVRLCL

SEQ ID NO: 4355 - protein, 94 aa, Homo sapiens
  MISC_FEATURE (52): Xaa equals any of the naturally occurring L-amino acids
RWRDTLTQLSLSYYATDQGKRWDDRWGQTERASGKQAYIVFFKMHKASQLRXHLVWASLGLETLLEFFLGTWRVDDIQALKHSQRSPEGATFSR

SEQ ID NO: 4356 - protein, 92 aa, Homo sapiens
REQIKRVKDSEDVPMVLVGNKCDLPSRTVDTKQAQDLARSYGIPFIETSAKTRQGVDDAFYTLVREIRKHKEKMSKDGKKKKKKSKTKCVIM

SEQ ID NO: 4357 - protein, 66 aa, Homo sapiens
PASEVLMDDDLQKSVDMIMDMFCPPGIKIDAYPWLECFIKSYNVTNGTDNQICYQIFDTTVAEDVI

SEQ ID NO: 4358 - protein, 51 aa, Homo sapiens
LRCHKKQHSDQSENKNSDLVTFPPESGASGQLSTLVSVGQLEAPLEPSQDL

SEQ ID NO: 4359 - protein, 69 aa, Homo sapiens
  MISC_FEATURE (40): Xaa equals any of the naturally occurring L-amino acids
  MISC_FEATURE (64): Xaa equals any of the naturally occurring L-amino acids
KIAELEFSPVFHFTLPVSHAQNTRGSAGSQSTDENPNLSXFLGSSKWWSRMVGDLISYYLPGEXFLPGK

SEQ ID NO: 4360 - protein, 313 aa, Homo sapiens
  MISC_FEATURE (297): Xaa equals any of the naturally occurring L-amino acids
  MISC_FEATURE (310): Xaa equals any of the naturally occurring L-amino acids
GGGRGREGRRPERGCCEGRGPVTGREAAGGGGGTSTTMSRSVLQPSQQKLAEKLTILNDRGVGMLTRLYNIKKACGDPKAKPSYLIDKNLESAVKFIVRKFPAVETRNNNQQLAQLQKEKSEILKNLALYYFTFVDVMEFKDHVCELLNTIDVCQVFFDITVNFDLTKNYLDLIITYTTLMILLSRIEERKAIIGLYNYAHEMTHGASDREYPRLGQMIVDYENPLKKMMEEFVPHSKSLSDALISLQMVYPRRNLSADQWRNAQLLSLISAPSTMLNPAQSDTMPCEYLSLGCNGXIGLSLALFVPWGXLNT

SEQ ID NO: 4361 - protein, 57 aa, Homo sapiens
  MISC_FEATURE (53): Xaa equals any of the naturally occurring L-amino acids
GRGSVISWISGHICYSTDHGTLGEERCFPSTHLMFIGWGSWNRRQISKEKGTXIYVI

SEQ ID NO: 4362 - protein, 70 aa, Homo sapiens
  MISC_FEATURE (7): Xaa equals any of the naturally occurring L-amino acids
  MISC_FEATURE (8): Xaa equals any of the naturally occurring L-amino acids
VIPIYIXXCFTGLISTSSTPPMNSSNTSIIVCSSAEIRALFYWLGCRFLFYFLKRLISYRKGFFLYPVFT

SEQ ID NO: 4363 - protein, 93 aa, Homo sapiens
GTRESDGEKKYPCPECGSFFRSKSYLNKHIQKVHVRALGGPLGDLGPALGSPFSPQQNMSLLESFGFQIVQSAFASSLVDPEVDQQPMGPEGK

SEQ ID NO: 4364 - protein, 70 aa, Homo sapiens
  MISC_FEATURE (31): Xaa equals any of the naturally occurring L-amino acids
SHQIFMFKKISLWIESSPALREKEGPYGRLXSHYYCLYPAVLMKPPTLSHSRNHKTQAVLDSGGLPGKIR

SEQ ID NO: 4365 - protein, 92 aa, Homo sapiens
  MISC_FEATURE (3): Xaa equals any of the naturally occurring L-amino acids
  MISC_FEATURE (9): Xaa equals any of the naturally occurring L-amino acids
  MISC_FEATURE (75): Xaa equals any of the naturally occurring L-amino acids
  MISC_FEATURE (80): Xaa equals any of the naturally occurring L-amino acids
FSXPVQRLXCRRHPLAACSSAAPFAAVPCAPENENPAFATNHAPVNAKPHALCPERKPLTSKENVLMHSSILAPXRESWXTAGEGENWKKKK

SEQ ID NO: 4366 - protein, 140 aa, Homo sapiens
ECWSERSLKPGRGADPLCSAPTLCQGGLATTVFFLLFICSWIFLKPFHHQPSSSLPAPWRLKLFPAYVREGEPETATSGVKGVSSEPRTMAFCHCLLSSCCWGLGLLAAASFSANQESREVGTASTKTLKMSGEDRLSPG

SEQ ID NO: 4367 - protein, 58 aa, Homo sapiens
  MISC_FEATURE (10): Xaa equals any of the naturally occurring L-amino acids
  MISC_FEATURE (16): Xaa equals any of the naturally occurring L-amino acids
  MISC_FEATURE (51): Xaa equals any of the naturally occurring L-amino acids
LGLGQCLWPXFSHSYXAECSKSVQIRETTRCNQSSCSLPYFQILYVISHFXSINLLPP

SEQ ID NO: 4368 - protein, 178 aa, Homo sapiens
ALRLREDDRRGGTMLLPNILLTGTPGVGKTTLGKELASKSGLKYINVGDLAREEQLYDGYDEEYDCPILDEDRVVDELDNQMREGGVIVDYHGCDFFPERWFHIVFVLRTDTNVLYERLETRGYNEKKLTDNIQCEIFQVLYEEATASYKEEIVHQLPSNKPEELENNVDQILKWIEQ

SEQ ID NO: 4369 - protein, 32 aa, Homo sapiens
  MISC_FEATURE (16): Xaa equals any of the naturally occurring L-amino acids
LMVIDFIPKHNWKIEXEPLPNGKEMKSFHSDY

SEQ ID NO: 4370 - protein, 57 aa, Homo sapiens
  MISC_FEATURE (39): Xaa equals any of the naturally occurring L-amino acids
NINPNSPFHFSLRHESYKTQYRAMFVMNCSINKEEVLRXKASEEQEGKGGSIRKMRS

SEQ ID NO: 4371 - protein, 41 aa, Homo sapiens
  MISC_FEATURE (31): Xaa equals any of the naturally occurring L-amino acids
NGFETIGTDKSQIGGSLILNWPCHQCLFLRXFGGCHVYHFF

SEQ ID NO: 4372 - protein, 391 aa, Homo sapiens
TWVPTTILDLHGILDHVKKQPPKSLRSMELECAVLGRKLETWDKHEELEELVARFLGVEAAMAYGMGFATNSMNIPALVGKGCLILSDELNHASLVLGARLSGATIRIFKHNNMQSLEKLLKDAIVYGQPRTRRPWKKILILVEGIYSMEGSIVRLPEVIALKKKYKAYLYLDEAHSIGALGPTGRGVVEYFGLDPEDVDVMMGTFTKSFGASGGYIGGKKELIDYLRTHSHSAVYATSLSPPVVEQIITSMKCIMGQDGTSLGKECVQQLAENTRYFRRRLKEMGFIIYGNEDSPVVPLMLYMPAKIGAFGREMLKRNIGVVVVGFPATPIIESRARFCLSAAHTKEILDTALKEIDEVGDLLQLKYSRHRLVPLLDRPFDETTYEETED

SEQ ID NO: 4373 - protein, 62 aa, Homo sapiens
  MISC_FEATURE (34): Xaa equals any of the naturally occurring L-amino acids
  MISC_FEATURE (54): Xaa equals any of the naturally occurring L-amino acids
  MISC_FEATURE (59): Xaa equals any of the naturally occurring L-amino acids
SGVVTACEGTELSAGSRDHGHKALTLTRPQQALXEGQPPPLLLLSLTVAVDLRXYILRXHSL

SEQ ID NO: 4374 - protein, 225 aa, Homo sapiens
  MISC_FEATURE (76): Xaa equals any of the naturally occurring L-amino acids
  MISC_FEATURE (143): Xaa equals any of the naturally occurring L-amino acids
  MISC_FEATURE (176): Xaa equals any of the naturally occurring L-amino acids
GTRSGSEEDPETESGPPVERCGVLSKWTNYIHGWQDRWVVLKNNALSYYKSEDETEYGCRGSICLSKAVITPHDFXECRFDISVNDSVWYLRAQDPDHRQQWIDAIEQHKTESGYGSESSLRRHGSMVSLVSGASGYSETSTXSFKKGHSLREKLAEMETFRDILCRQVDTLQKYXDACADAVSKDELQRDKVVEDDEDDFPTTRSDGDFLHSTNGNKEKLFPHV

SEQ ID NO: 4375 - protein, 114 aa, Homo sapiens
  MISC_FEATURE (5): Xaa equals any of the naturally occurring L-amino acids
IASAXFYARLNYEPVRPGGGSGGHSARCRRRERGAAAAHGAPSASFFPPPVPNPFVQQTQIGSARRVQIVLLGIILLPIRVLLVALIYYLHGHCCISTVCCPEKLTHPITGWRR

SEQ ID NO: 4376 - protein, 56 aa, Homo sapiens
VGMVSHSSRCRFGLLGTIWLDPESAWNRDRDLSGPAAGSSLVVAVVRGLRWLPGLV

SEQ ID NO: 4377 - protein, 389 aa, Homo sapiens
GTSSSSSSQLAPNGAKCIPVRDRGFLVQTIEFAEQRIPVLNEYCVVCDEPHVFQNGPMLRPTVCERELCVFAFQTLGVMNEAADEIATGAQVVDLLVSMCRSALESPRKVVIFEPYPSVVDPNDPQMLAFNPRKKNYDRVMKALDSITSIREMTQAPYLEIKKQMDKQDPLAHPLLQWVISSNRSHIVKLPVNRQLKFMHTPHQFLLLSSPPAKESNFRAAKKLFGSTFAFHGSHIENWHSILRNGLVVASNTRLQLHGAMYGSGIYLSPMSSISFGYSGMNKKQKVSAKDEPASSSKSSNTSQSQKKGQQSQFLQSRNLKCIALCEVITSSDLHKHGEIWVVPNTDHVCTRFFFVYEDGQVGDANINTQEGGIHKEILRVIGNQTATG

SEQ ID NO: 4378 - protein, 195 aa, Homo sapiens
TSLQLMMSSFSQGVQRQEVVCKRLDDNSIVQNNYCDPDSKPPENQRACNTEPCPPEWFIGDWLECSKTCDGGMRTRAVLCIRKIGPSEEETLDYSGCLTHRPVEKEPCNNQSCPPQWVALDWSECTPKCGPGFKHRIVLCKSSDLSKTFPAAQCPEESKPPVRIRCSLGRCPPPRWVTGDWGQCSAQCGLGQHLG

SEQ ID NO: 4379 - protein, 92 aa, Homo sapiens
  MISC_FEATURE (8): Xaa equals any of the naturally occurring L-amino acids
  MISC_FEATURE (9): Xaa equals any of the naturally occurring L-amino acids
  MISC_FEATURE (18): Xaa equals any of the naturally occurring L-amino acids
AQGFRHEXXLLVGGLLAXDGDCPGVVTMFLSAVFFAKSKSKNILVRMVSEAGTGFCFNTKRNRLREKLTLLHYDPVVKQRVLFVEKKKIRSL

SEQ ID NO: 4380 - protein, 63 aa, Homo sapiens
  MISC_FEATURE (36): Xaa equals any of the naturally occurring L-amino acids
RFQFPVCHRWPPIFQKSLAPLFLFLHPSPQRSLTRXKQEDSVIYKRHFSFTRTENSTQHYRNS

SEQ ID NO: 4381 - protein, 91 aa, Homo sapiens
DVCFNLIFLRDGGHHVETRKWGKCELSRQRFILCLYLFLIGLISNVLNSSIPGLGVCNGYQKTNKKRKKKEKKKENNCDMLLSLLYFSNNM

SEQ ID NO: 4382 - protein, 64 aa, Homo sapiens
KLSEGYYLYLMKENPNKAHLEIDILLYMCYRYTYIVQIDMCDAYIQCYICVYVCIHTESVICIH

SEQ ID NO: 4383 - protein, 255 aa, Homo sapiens
ERRVRRVHEEVRVKIKDLNEHIVCCLCAGYFVDATTITECLHTFCKSCIVKYLQTSKYCPMCNIKIHETQPLLNLKLDRVMQDIVYKLVPGLQDSEEKRIREFYQSRGLDRVTQPTGEEPALSNLGLPFSSFDHSKAHYYRYDEQLNLCLERLSSGKDKNKSVLQNKYVRCSVRAEVRHLRRVLCHRLMLNPQHVQLLFDNEVLPDHMTMKQIWLSRWFGKPSPLLLQYSVKEKRRLAKPPPHPTPLPSPDIYVK

SEQ ID NO: 4384 - protein, 34 aa, Homo sapiens
  MISC_FEATURE (2): Xaa equals any of the naturally occurring L-amino acids
MXLLYFSQQQARGRNIHKYDRSYMKFGSPPIKVA

SEQ ID NO: 4385 - protein, 80 aa, Homo sapiens
  MISC_FEATURE (36): Xaa equals any of the naturally occurring L-amino acids
CSPLAEEVVSFLWKNFQNSGFFFFFGVFHQLKSDSXFEFSSYICIVSSFFLPLYPSCFTLYLSIPCSNYCKSLYRKSSVI

SEQ ID NO: 4386 - protein, 93 aa, Homo sapiens
  MISC_FEATURE (10): Xaa equals any of the naturally occurring L-amino acids
  MISC_FEATURE (72): Xaa equals any of the naturally occurring L-amino acids
  MISC_FEATURE (74): Xaa equals any of the naturally occurring L-amino acids
RVFQAWLFTXSFRGTLKPWRHLALEPWRFPCHSPCWDKARAWHPGMMFPAAECAHNLSSSCVRQLHMLASNXPXQPSQYYCFSSSYRWGDDDI

SEQ ID NO: 4387 - protein, 86 aa, Homo sapiens
  MISC_FEATURE (22): Xaa equals any of the naturally occurring L-amino acids
  MISC_FEATURE (54): Xaa equals any of the naturally occurring L-amino acids
  MISC_FEATURE (64): Xaa equals any of the naturally occurring L-amino acids
  MISC_FEATURE (70): Xaa equals any of the naturally occurring L-amino acids
KENEKESPRQRRGKENKLRHSXFSFLTLCLEHHTAHKLFPNAQLAPKVGAWHGXGAHKTLTKLXAGMGEXLLVHSSYPLPPNPLLA

SEQ ID NO: 4388 - protein, 196 aa, Homo sapiens
  MISC_FEATURE (118): Xaa equals any of the naturally occurring L-amino acids
EKVSLSSPSPATLAMDQPAGLQVDYVFRGVEHAVRVMVSGQVLELEVEDRMTADQWRGEFDAGFIEDLTHKTGNFKQFNIFCHMLESALTQSSESVTLDLLTYTDLESLRNRRWGAAXSLAPRSAQLNSKRYLILIYSVEFDRIHYPLPLPYQGKPDPVVLQGIIRSLKEELGRLPSPCPGPVPPAAPGGLRCVRP

SEQ ID NO: 4389 - protein, 70 aa, Homo sapiens
  MISC_FEATURE (1): Xaa equals any of the naturally occurring L-amino acids
  MISC_FEATURE (2): Xaa equals any of the naturally occurring L-amino acids
  MISC_FEATURE (3): Xaa equals any of the naturally occurring L-amino acids
  MISC_FEATURE (4): Xaa equals any of the naturally occurring L-amino acids
XXXXTLTKGNKSWSSTAVAAALELVDPPGCRNSAREKNYLYITLKGVEGLFAELLRLKYTLFLEKITDFL

SEQ ID NO: 4390 - protein, 118 aa, Homo sapiens
  MISC_FEATURE (2): Xaa equals any of the naturally occurring L-amino acids
RXWETAHPDLPMSQNKHMYSGSFSFSNTLPQKQVVCPRHKEGKLAIFPTSKFCKIIDLLKRFLFIIPTLCKWKGHCVPCVSSLQRLCPLACFVTISLGEEWVHPAPRPVVARGLPCEF

SEQ ID NO: 4391 - protein, 23 aa, Homo sapiens
EQVVSIFLHYLFLETHKMDCIFL

SEQ ID NO: 4392 - protein, 173 aa, Homo sapiens
  MISC_FEATURE (142): Xaa equals any of the naturally occurring L-amino acids
  MISC_FEATURE (144): Xaa equals any of the naturally occurring L-amino acids
  MISC_FEATURE (146): Xaa equals any of the naturally occurring L-amino acids
  MISC_FEATURE (155): Xaa equals any of the naturally occurring L-amino acids
  MISC_FEATURE (163): Xaa equals any of the naturally occurring L-amino acids
  MISC_FEATURE (172): Xaa equals any of the naturally occurring L-amino acids
EYIKNSQNNSTCEYGAPCKYIRKPIDYTVLDDVGHGVKWLKAKHGNNQPARTGTLSRTNPPTQKPPSPPMSGRGTLGRNTPYKTLEPVKPPTVPNDYMTSPARLGSQHSPGRTASLNQRPRTHSGSSGGSGKFEENSGSSSXGXPXAVPTPSAPXILKPFVDXSNFHRHHFXP

SEQ ID NO: 4393 - protein, 137 aa, Homo sapiens
LEVDWSLFDGFADGLGVAEAISYVDPQFLTYMALEERLAQAMETALAHLESLAVDVEVANPPASKESIDALPEILVTEDHGAVGQEMCCPICCSEYVKGEVATELPCHHYFHKPCVSIWLQKSGTCPVCRCMFPPPL

SEQ ID NO: 4394 - protein, 53 aa, Homo sapiens
  MISC_FEATURE (1): Xaa equals any of the naturally occurring L-amino acids
  MISC_FEATURE (3): Xaa equals any of the naturally occurring L-amino acids
  MISC_FEATURE (9): Xaa equals any of the naturally occurring L-amino acids
  MISC_FEATURE (17): Xaa equals any of the naturally occurring L-amino acids
XPXLGRSQXEPPLSASXPPASQPPQMRFLPLPPRNQNPHCSQDGLIYKPDTCS

SEQ ID NO: 4395 - protein, 74 aa, Homo sapiens
  MISC_FEATURE (4): Xaa equals any of the naturally occurring L-amino acids
  MISC_FEATURE (65): Xaa equals any of the naturally occurring L-amino acids
  MISC_FEATURE (71): Xaa equals any of the naturally occurring L-amino acids
GRGXVNILSALFPRGINIKVMDILKSQFNFFLFTMQYSRGTSNVDLVFSSSNALITLPHRVVVGXNKTLWXQKK

SEQ ID NO: 4396 - protein, 82 aa, Homo sapiens
EASGQVLPPNLKTLGMQLGRDLSRFCLDKQVRMAEHWLIVNQCFFIYLKYSQQLILRSFLKVLHLHPHNSPIQNMEQGCGAV

SEQ ID NO: 4397 - protein, 63 aa, Homo sapiens
  MISC_FEATURE (11): Xaa equals any of the naturally occurring L-amino acids
GDSVSKKKKKXVPTVYVWALVLEPVLKESGQAQWLTPVISAHWEAEVGGSPEVRSSRPAWPTW

SEQ ID NO: 4398 - protein, 107 aa, Homo sapiens
KKKKLPIVTLAVLINKRCCVRSPVSVWIQQLSRESHCMGVELTVLVICKPPRPNLRVYLGFSVCPLGFCFTLFWCRFSIYSQISFMMFKTFTDVKWRKGTEKKIFTK

SEQ ID NO: 4399 - protein, 49 aa, Homo sapiens
  MISC_FEATURE (33): Xaa equals any of the naturally occurring L-amino acids
  MISC_FEATURE (35): Xaa equals any of the naturally occurring L-amino acids
LPGSCHSPASASRVAGTTGTCHHTRLLFYIFSXDXFHHVSQDGLDLLTS

SEQ ID NO: 4400 - protein, 131 aa, Homo sapiens
  MISC_FEATURE (26): Xaa equals any of the naturally occurring L-amino acids
  MISC_FEATURE (95): Xaa equals any of the naturally occurring L-amino acids
  MISC_FEATURE (121): Xaa equals any of the naturally occurring L-amino acids
PQSVAAGSTALGSDTVMVPMIGQDLXGETQETRPCSSRPEGRGAPELGSGMPHSLATCFGYAPCSSCTWLPRENSDLSGKWSQWLCGRPFLQPGXQSGFPWDCVAPVPTGLPIPHSHCWTXTRTGHRASFC

SEQ ID NO: 4401 - protein, 53 aa, Homo sapiens
KTVLRDSLVFGTLRSSLGRSLALIVVLKRVLSGLEPMLSLLFMGFHNILKLFV

SEQ ID NO: 4402 - protein, 71 aa, Homo sapiens
VFQHYLFDQSKIHFPSLQTEHNYSCLHIHIFDVPTFCILHETFGLNKILRILYFVSHLPSCSLPSSKDVLY

SEQ ID NO: 4403 - protein, 135 aa, Homo sapiens
  MISC_FEATURE (128): Xaa equals any of the naturally occurring L-amino acids
SSRPQWQPCGKWPTKPYPGSPNTLCLEPLLRVYSLRGLCGRSMLQFKHVSTTLLRAAWERTGHQDYLFKYKKRGKHTHGKKIVSTFFVKPMSVLLHTFHVVLCKCLICVIKLMQVKKKKKMGEVIPCXVISLLRV

SEQ ID NO: 4404 - protein, 134 aa, Homo sapiens
ATASRTRLAVHERARPGWRWGRAEAAEVLRATGGWQWAGERGRQARLGLGLWRRGTLCLGSLTAPPGSPERGTGGEGGGSWAPCAAGPRGARVAAGSAGPDRVNGRAWPVPRGAPAATALAAGTGVLRGRSLPF

SEQ ID NO: 4405 - protein, 47 aa, Homo sapiens
  MISC_FEATURE (23): Xaa equals any of the naturally occurring L-amino acids
  MISC_FEATURE (26): Xaa equals any of the naturally occurring L-amino acids
  MISC_FEATURE (42): Xaa equals any of the naturally occurring L-amino acids
IKITSICELNFIICHFVESTLHXLVXLELIVTTRLYDNSVLXLIPII

SEQ ID NO: 4406 - protein, 40 aa, Homo sapiens
ISLNPCYVFFFSQVLQNDYCTWSIVLIVNFVINLLCVKRG

SEQ ID NO: 4407 - protein, 33 aa, Homo sapiens
DPRVRPRVRKTERDRKEKLIQEGKLDRTFHLSY

SEQ ID NO: 4408 - protein, 439 aa, Homo sapiens
HEQPSAPSLRPALPSCPPRQRLVFLKTHKSGSSSVLSLLHRYGDQHGLRFALPARYQFGYPKLFQASRVKGYRPQGGGTQLPFHILCHHMRFNLKEVLQVMPSDSFFFSIVRDPAALARSAFSYYKSTSSAFRKSPSLAAFLANPRGFYRPGARGDHYARNLLWFDFGLPFPPEKRAKRGNIHPPRDPNPPQLQVLPSGAGPRAQTLNPNALIHPVSTVTDHRSQISSPASFDLGSSSFIQWGLAWLDSVFDLVMVAEYFDESLVLLADALCWGLDDVVGFMHNAQAGHKQGLSTVSNSGLTAEDRQLTARARAWNNLDWALYVHFNRSLWARIEKYGQGRLQTAVAELRARREALAKHCLVGGEASDPKYITDRRFRPFQFGSAKVLGYILRSGLSPQDQEECERLATPELQYKDKLDAKQFPPTVSLPLKTSRPLSP

SEQ ID NO: 4409 - protein, 104 aa, Homo sapiens
LVNSMTPHFRCLNTWYTRQYKPSASNAFMVCGVLYATRTMNTRTEEIFYYYDTNTGKEGKLDIVMHKMQEKVQSINYNPFDQKLYVYNDGYLLNYDLSVLQKPQ

SEQ ID NO: 4410 - protein, 143 aa, Homo sapiens
  MISC_FEATURE (117): Xaa equals any of the naturally occurring L-amino acids
LPSPFLETVSTVDSGAPTDLAQLPTVLKQPCCSVMASGQFVNKLQEEVICPICLDILQKPVTIDCGHNFCLKCITQIGETSCGFFKCPLCKTSVRKNAIRFNSLLRNLVEKIQSSTXPLRCSPKGKEATLPEAPGDVPLFLRG

SEQ ID NO: 4411 - protein, 50 aa, Homo sapiens
  MISC_FEATURE (49): Xaa equals any of the naturally occurring L-amino acids
RMETSVIKDILFLTLSRLLTCSLDYNPTCKKNLKMVMRKVRYIYIYVLXF

SEQ ID NO: 4412 - protein, 98 aa, Homo sapiens
NSARERPSSVKSLRSERLIRTSLDLELDLQATRTWHSQLTQEISVLKELKEQLEQAKSHGEKELPQWLREDERFRLLLRMLEKRMDRADTRVSFRQTR

SEQ ID NO: 4413 - protein, 74 aa, Homo sapiens
  MISC_FEATURE (4): Xaa equals any of the naturally occurring L-amino acids
TKFXGPLNHLNGLPSGPGHSKIKPERLVQAMMGSGSRTCLIIPSSININTDLKADKKHLQSILSEVFYLEASSA

SEQ ID NO: 4414 - protein, 305 aa, Homo sapiens
PSSHFASIFEESHVPVIEESLRVQICEKAEELKDIVPEKKSTLNENQPEIKHQSLLQKNVSKRDPPSSHGHSNKKNLLKVENGVTRRGRSVSPKKPASQHSEEHLDKIPSPLKNNPKRRPRDQSLSPSKGENKSCQVSTRAGSGQDQCRKSRVVASPKKQQKIEGSKAPSNAEAKLLEGKSRRIAGYTGSNAEQIPDGKEKSDVIRKDAKQNQLEKSRTRSPEKKIKRMVEKSLPSKMTNKTTSKEVSENEKGKKVTTGETSSSNDKIGENVQLSEKRLKQEPEEKVVSNKTEDHKGKELEAAVQ

SEQ ID NO: 4415 - protein, 71 aa, Homo sapiens
  MISC_FEATURE (46): Xaa equals any of the naturally occurring L-amino acids
SSNRFVFKDPNRFVILNKHVAIYKTCLKVLLSPWNFFLYFMLIYLXFYSLIIALERPHHCLHGNVVGTNTW

SEQ ID NO: 4416 - protein, 86 aa, Homo sapiens
  MISC_FEATURE (9): Xaa equals any of the naturally occurring L-amino acids
  MISC_FEATURE (16): Xaa equals any of the naturally occurring L-amino acids
  MISC_FEATURE (18): Xaa equals any of the naturally occurring L-amino acids
  MISC_FEATURE (20): Xaa equals any of the naturally occurring L-amino acids
  MISC_FEATURE (24): Xaa equals any of the naturally occurring L-amino acids
  MISC_FEATURE (25): Xaa equals any of the naturally occurring L-amino acids
  MISC_FEATURE (33): Xaa equals any of the naturally occurring L-amino acids
  MISC_FEATURE (37): Xaa equals any of the naturally occurring L-amino acids
  MISC_FEATURE (39): Xaa equals any of the naturally occurring L-amino acids
  MISC_FEATURE (48): Xaa equals any of the naturally occurring L-amino acids
  MISC_FEATURE (58): Xaa equals any of the naturally occurring L-amino acids
  MISC_FEATURE (79): Xaa equals any of the naturally occurring L-amino acids
  MISC_FEATURE (86): Xaa equals any of the naturally occurring L-amino acids
ISCNYCSCXNSCEWLXVXLXVLGXXWYTFVGCXLKEXAXPVCSLYHTXLPLTSLGLLXSKFCKPFSQVQRYILTLSSPXLLSRNFX

SEQ ID NO: 4417 - protein, 34 aa, Homo sapiens
SACLGLPKCWDYRHEPPHVAHFFFISEFVVFTLF

SEQ ID NO: 4418 - protein, 148 aa, Homo sapiens
  MISC_FEATURE (10): Xaa equals any of the naturally occurring L-amino acids
  MISC_FEATURE (21): Xaa equals any of the naturally occurring L-amino acids
  MISC_FEATURE (24): Xaa equals any of the naturally occurring L-amino acids
  MISC_FEATURE (37): Xaa equals any of the naturally occurring L-amino acids
  MISC_FEATURE (42): Xaa equals any of the naturally occurring L-amino acids
EIGYLMSKEXNYKRTREYIRXLKXVPSIPYLGIYLLXLIYIXSAYPASGVIMENEQRSNQMNNILRIIADLQVSCSYDHLTTLPHVQKYLKSVRYIEELQKFVEDDNYKLSLRIEPGSSSPRLVSSKEDLAGPSAGSGSARFSRRHLS

SEQ ID NO: 4419 - protein, 63 aa, Homo sapiens
  MISC_FEATURE (18): Xaa equals any of the naturally occurring L-amino acids
  MISC_FEATURE (37): Xaa equals any of the naturally occurring L-amino acids
TPYVSLRILYDSEFSISXKWSHFCFVPYNSTESFFFXRKGVGKGKWEKTWNHIPLFGAARQEF

SEQ ID NO: 4420 - protein, 83 aa, Homo sapiens
  MISC_FEATURE (2): Xaa equals any of the naturally occurring L-amino acids
  MISC_FEATURE (39): Xaa equals any of the naturally occurring L-amino acids
  MISC_FEATURE (56): Xaa equals any of the naturally occurring L-amino acids
  MISC_FEATURE (62): Xaa equals any of the naturally occurring L-amino acids
  MISC_FEATURE (69): Xaa equals any of the naturally occurring L-amino acids
IXRKAKISWWKSEVTRRSFWSRVLMSAAPAKPLASCCAXYSVSKARAIGQHSPGSXWATSAXFFFFFGXWQRHGPNGHHQSGL

SEQ ID NO: 4421 - protein, 39 aa, Homo sapiens
LNTSYLYFFSISFHLSVSSFSHDLTCLYFLLTDKAFKNS

SEQ ID NO: 4422 - protein, 78 aa, Homo sapiens
HFREGQGIMMPSCKGSLCEKKKSNNVDFKITKDIHLQFMKGKCSLDTKLIKLDQEILELNAKNNPCIYGFDFYIFPAS

SEQ ID NO: 4423 - protein, 62 aa, Homo sapiens
VPIILKNSHKYNKVHCFRVFKKRVVPKAILTLLCYHCKGVICMYYIKKKTLNALLSPKYLVN

SEQ ID NO: 4424 - protein, 121 aa, Homo sapiens
  MISC_FEATURE (24): Xaa equals any of the naturally occurring L-amino acids
  MISC_FEATURE (73): Xaa equals any of the naturally occurring L-amino acids
  MISC_FEATURE (85): Xaa equals any of the naturally occurring L-amino acids
  MISC_FEATURE (88): Xaa equals any of the naturally occurring L-amino acids
  MISC_FEATURE (92): Xaa equals any of the naturally occurring L-amino acids
  MISC_FEATURE (96): Xaa equals any of the naturally occurring L-amino acids
  MISC_FEATURE (102): Xaa equals any of the naturally occurring L-amino acids
  MISC_FEATURE (113): Xaa equals any of the naturally occurring L-amino acids
ILEDLEPECPLTQQSHYWLYTQRXINHSTIKTCAFYYKDMCMFIAALFTIAKTWNQPKCPSMIDWIKKTWHIXTMEYYAAIKKNXFMXFAGXWMKXETIILXKLTQEQKTKHXMLSLISGS

SEQ ID NO: 4425 - protein, 20 aa, Homo sapiens
PLLGIYLRKNKAYIHMKTCK

SEQ ID NO: 4426 - protein, 82 aa, Homo sapiens
LPVLWLGPSLSTSGECMCLSDQHHCTRRSSEPLAKCHTHSSQRRDELKLYSEIMKPEPVPDLLLPLIELLCNSKFKIRSRER

SEQ ID NO: 4427 - protein, 151 aa, Homo sapiens
  MISC_FEATURE (146): Xaa equals any of the naturally occurring L-amino acids
GTSAGAQTKGALCQLKVPTEKLPSPLPTMADEIDFTTGDAGASSTYPMQCSALRKNGFVVLKGRPCKIVEMSTSKTGKHGHAKVHLVGIDIFTGKKYEDICPSTHNMDVPNIKRNDYQLICIQDGYLSLLTETGEVREDLKLPEGXTRQRK

SEQ ID NO: 4428 - protein, 75 aa, Homo sapiens
DEETVKTPRKKTCVHFSGKFSNCVIQFSFNYIIWLYALKNICLNVPGFLLVLESAECWLCSHSYFCIQKGVTPFI

SEQ ID NO: 4429 - protein, 48 aa, Homo sapiens
VKATCLGFLNHINCYILYFIIILCVSVYWNNMFYLVSWCKSFLNLLLY

SEQ ID NO: 4430 - protein, 38 aa, Homo sapiens
YASSKLTLTKGNKSWSSTAVAAALELVDPPGCRNSARV

SEQ ID NO: 4431 - protein, 59 aa, Homo sapiens
  MISC_FEATURE (7): Xaa equals any of the naturally occurring L-amino acids
SCQSLDXEVSGKSLKYAFDTGKYILLMFHKRILESVENINYFHELFLKYNFKVLIFLFK

SEQ ID NO: 4432 - protein, 68 aa, Homo sapiens
EVIQITFVVVIFNYSSTLTHDELRNIKDNCCLNSTPRDTDLIGLGWRSGMVVFFKLQSSARQLLYVGF

SEQ ID NO: 4433 - protein, 160 aa, Homo sapiens
  MISC_FEATURE (56): Xaa equals any of the naturally occurring L-amino acids
  MISC_FEATURE (59): Xaa equals any of the naturally occurring L-amino acids
  MISC_FEATURE (63): Xaa equals any of the naturally occurring L-amino acids
  MISC_FEATURE (69): Xaa equals any of the naturally occurring L-amino acids
  MISC_FEATURE (147): Xaa equals any of the naturally occurring L-amino acids
  MISC_FEATURE (158): Xaa equals any of the naturally occurring L-amino acids
GPGKRRLQGRSRGHMAEGDARSDQRHNEEIEAMAPIYGEEWCVIDDCAKIFCIRIXDDXDDPXWTLCLXVMLPNEYPGTAPPIYQLNAPWLKGQERADLSNSLEEIYIQNIGESILYLWVEENKRCSYYKNLQVTEPGPDVKGGKLXEEDVGMWKVDXHF

SEQ ID NO: 4434 - protein, 70 aa, Homo sapiens
  MISC_FEATURE (6): Xaa equals any of the naturally occurring L-amino acids
GLTIKXIEKETLHGMSFIPPPNKVLKVFILPSIFLKLFYKRDFVEVPRFCQTSSSLTRLRGPCQQSNLRD

SEQ ID NO: 4435 - protein, 262 aa, Homo sapiens
DSHQARSRRLEALWSPSLGEVSSSTMKGILVAGITAVLVAAVESLSCVQCNSWEKSCVNSIASECPSHANTSCISSSASSSLETPVRLYQNMFCSAENCSEETHITAFTVHVSAEEHFHFVSQCCQGKECSNTSDALDPPLKNVSSNAECPACYESNGTSCHGKPWKCYEEEQCVFLVAELKNDIESKSLVLKGCSNVSNATCQFLSGENKTLGGVIFRKFECANVNSLTPTSAPTTSHNVGSKASLYLLALASLLLRGLLP

SEQ ID NO: 4436 - protein, 71 aa, Homo sapiens
QLKHVFSQEKMTVLMMYLMNLNFKSGAANWKEDLWCFKLLWTLLRNLEPMEPLFIAMQITILNECFLKIKY

SEQ ID NO: 4437 - protein, 97 aa, Homo sapiens
  MISC_FEATURE (26): Xaa equals any of the naturally occurring L-amino acids
  MISC_FEATURE (29): Xaa equals any of the naturally occurring L-amino acids
  MISC_FEATURE (33): Xaa equals any of the naturally occurring L-amino acids
SLKPSEKNIFTLFMVATAAICILLNXVEXIYLXSKRCHECLAARKAQAMCTGHHPHGTTSSCKQDDLLSGDLIFLGSDSHPPLLPDRPRDHVKKTIL

SEQ ID NO: 4438 - protein, 353 aa, Homo sapiens
  MISC_FEATURE (17): Xaa equals any of the naturally occurring L-amino acids
  MISC_FEATURE (39): Xaa equals any of the naturally occurring L-amino acids
  MISC_FEATURE (55): Xaa equals any of the naturally occurring L-amino acids
  MISC_FEATURE (75): Xaa equals any of the naturally occurring L-amino acids
VCAVLHLGLLLAAWPHXAEPFPLHPLPAPGPAPGTPSDXHPLQPWGSLRVAAKAXCLSASALAVIAHVLCCCSVXTMSKSLKKLVEESREKNQPEVDMSDRGISNMLDVNGLFTLSHITQLVLSHNKLTMVPPNIAELKNLEVLNFFNNQIEELPTQISSLQKLKHLNLGMNRLNTLPRGFGSLPALEVLDLTYNNLSENSLPGNFFYLTTLRALYLSDNDFEILPPDIGKLTKLQILSLRDNDLISLPKEIGELTQLKELHIQGNRLTVLPPELGNLDLTGQKQVFKAENNPWVTPIADQFQLGVSHVFEYIRSETYKYLYGRHMQANPEPPKKNNDKSKKISRKPLAAKNR

SEQ ID NO: 4439 - protein, 45 aa, Homo sapiens
GTRQNGPASHSRALVGICTGHSNPGEDARDGDAEEVRELGTVEEN

SEQ ID NO: 4440 - protein, 120 aa, Homo sapiens
FLHLPAIFSQTFLRVRANRQTRLNARIGKMKRRKQDEGQREGSCMAEDDAVDIEHENNNRFEEYEWCGQKRIRATTLLEGGFRGSGFIMCSGKENPDSDADLDVDGDDTLEYGEATIHRG

SEQ ID NO: 4441 - protein, 244 aa, Homo sapiens
  MISC_FEATURE (67): Xaa equals any of the naturally occurring L-amino acids
  MISC_FEATURE (173): Xaa equals any of the naturally occurring L-amino acids
  MISC_FEATURE (212): Xaa equals any of the naturally occurring L-amino acids
  MISC_FEATURE (221): Xaa equals any of the naturally occurring L-amino acids
  MISC_FEATURE (232): Xaa equals any of the naturally occurring L-amino acids
LLDRYRELQLSTESKVTEFLHQSKLKSFESERVQLLQEETARNLTQCQLECEKYQKKLEVLTKEFYXLQASSEKRITELQAQNSEHQARLDIYEKLEKELDEIIMQTAEIENEDEAERVLFSYGYGANVPTTAKRRLKQSVHLARRVLQLEKQNSLILKDLEHRKDQVTQLSXELDRANSLLNQTQQPYRYLIESVRQRDSKIDSLTESIAXLGERMSATXNKEKSALLQTXGIKMALGFRTNF

SEQ ID NO: 4442 - protein, 96 aa, Homo sapiens
  MISC_FEATURE (17): Xaa equals any of the naturally occurring L-amino acids
  MISC_FEATURE (40): Xaa equals any of the naturally occurring L-amino acids
  MISC_FEATURE (96): Xaa equals any of the naturally occurring L-amino acids
SSCCASLPPTRGEVSAXSLLPPLPPLPPWTISLFPLCSWXAQLCMCVWGVGVGSGLSGFGRGLGRVRGGWRMKSPTPFSSSRPQKPGKGRVPTLGX

SEQ ID NO: 4443 - protein, 86 aa, Homo sapiens
  MISC_FEATURE (78): Xaa equals any of the naturally occurring L-amino acids
NRSFFVSPFKSTGFKRGKCIHRPQCLAFSSASTWSTGLDAQTYLGNYFGRCLSLYRNCSWYFILLYIYSTCPLVFNYXQSLFRSKN

SEQ ID NO: 4444 - protein, 254 aa, Homo sapiens
KALNVVQSVLQINLSNSTNRGSVAAKKFKDIIHYDPTKQDHATYERKRDDKPKESKAKRKKKREEAEKLPEVSKEMYYNIAMDLKEIFQTTKYTSEKEEGTPWNEDCGKEKPEEIQDPAALTSDAEQPSGFTFSFFDSDTKDIKEETYRVETVKPGKIVWQEDPRLQDSSSEEEDVTEETDHRNSSPGEASLLEKETTRFFFFSKNDERLQGSDLFWRGVGSNMSRNSWEARTTNLRMDCRKKHKDAKRKMKPK

SEQ ID NO: 4445 - protein, 75 aa, Homo sapiens
  MISC_FEATURE (75): Xaa equals any of the naturally occurring L-amino acids
LLNLVKAVFGQACARGHLECSTHWQASPIPIHPGSPRLGWDINVGIGKKYFLFRGKQEETLPESDFLVISISTEX

SEQ ID NO: 4446 - protein, 47 aa, Homo sapiens
  MISC_FEATURE (6): Xaa equals any of the naturally occurring L-amino acids
KLIRDXATDSLRSPALPLNKCWCIQMVKYSAAIKGVKTASTYLEAHL

SEQ ID NO: 4447 - protein, 220 aa, Homo sapiens
  MISC_FEATURE (2): Xaa equals any of the naturally occurring L-amino acids
GXDTLEIQQQALLREQQKRLNRIKMQEGAKVDLDAIPSAKVREQRMPRDDTSDFLKNSLLESDSAFIGAYGETYPAIEDDVLPPPSQLPSARERRRNKWKGLDIDSSRPNVAPDGLSLKSISSVNVDELRVRNEERMRRLNEFHNKPINTDDESSLVDPDDIMKHIGDDGSNSVATEPWLRPGTSETLKRFMAEQLNQEQQQIPGKPGTFTWQGLSTAHG

SEQ ID NO: 4448 - protein, 44 aa, Homo sapiens
NGGNGNTYLKLLRELNEIILQDSYHSKAVNAPFRVPLLLTALKI

SEQ ID NO: 4449 - protein, 47 aa, Homo sapiens
YSTLLEKPPPSPDRCERMKVTMFCLRFSRFKLLLSSVSRDFHCWACL

SEQ ID NO: 4450 - protein, 57 aa, Homo sapiens
LLEVPEMGLTFIKQIAYYDLAAATVQLHINSTDQTICIWHHLLTHDMRLFCINCYDG

SEQ ID NO: 4451 - protein, 96 aa, Homo sapiens
  MISC_FEATURE (84): Xaa equals any of the naturally occurring L-amino acids
  MISC_FEATURE (93): Xaa equals any of the naturally occurring L-amino acids
VVEYRAVNFHAFFPDIKFYSKKATSDCTKNIKIHSFYKGVNLNNVIDWNMKINQSFKSFLANDPILTPFLPRLEKHNVFPPKVXNPRKAPVSXTNV

SEQ ID NO: 4452 - protein, 155 aa, Homo sapiens
  MISC_FEATURE (122): Xaa equals any of the naturally occurring L-amino acids
  MISC_FEATURE (143): Xaa equals any of the naturally occurring L-amino acids
NSASQRSSSLPPSNRKSSTPKKTYSEKATDNHVNHSSCPEPVPNGVKKVSVRTAWEKNKSVSYEQCKPVSVTPQGNDFEYTAKIRTLAETERFFDELTKEKDQIEAALSRMPSPGGRITLQXRLNQEALEDRLEGLIENWGSXRMTLKNSMFCAP

SEQ ID NO: 4453 - protein, 97 aa, Homo sapiens
  MISC_FEATURE (49): Xaa equals any of the naturally occurring L-amino acids
  MISC_FEATURE (93): Xaa equals any of the naturally occurring L-amino acids
  MISC_FEATURE (97): Xaa equals any of the naturally occurring L-amino acids
IRETFSIYLFVLPAWESDSTKYFPAGWGSVSQRNHPFPTFRLILYPSIXPVLMEAKDNPRVFIGNSLELCAIVFVVLLPFFFLNIYVGNSICXGILX

SEQ ID NO: 4454 - protein, 161 aa, Homo sapiens
  MISC_FEATURE (43): Xaa equals any of the naturally occurring L-amino acids
TETCFAWWMSASSPRRPSSETPAAPTCFLRSSAAAVTSAATWXLCKDSSFSEDGAVLPQWLCSNCQAPYDSSAIEMTLVEVLQKKLMAFTLQDLVCLKCRGVKETSMPVYCSCAGDFALTIHTQVFMEQIGIFRNIAQHYGMSYLLETLEWLLQKNPQLGH

SEQ ID NO: 4455 - protein, 112 aa, Homo sapiens
  MISC_FEATURE (77): Xaa equals any of the naturally occurring L-amino acids
  MISC_FEATURE (89): Xaa equals any of the naturally occurring L-amino acids
NVFVVTDFQDSVFNDLYKADCRVIGPPVVLNCSQKGEPLPFSCRPLYCTSMMNLVLCFTGFRKKEELVRLVTLVHHXGGVIRKDFNSKXTHLVAIVHKEKIQGCCESRYSIM

SEQ ID NO: 4456 - protein, 254 aa, Homo sapiens
  MISC_FEATURE (105): Xaa equals any of the naturally occurring L-amino acids
AEDPAGGLAGQDTMFARGLKRKCVGHEEDVEGALAGLKTVSSYSLQRQSLLDMSLVKLQLCHMLVEPNLCRSVLIANTVRQIQEEMTQDGTWRTVAPQAAERAPXDRLVSTEILCRAAWGQEGAHPAPGLGDGHTQGPVSDLCPVTSAQAPRHLQSSAWEMDGPRENRGSFHKSLDQIFETLETKNPSCMEELFSDVDSPYYDLDTVLTGMMGGARPGPCEGLEGLAPATPGPSSSCKSDLGELDHVVEILVET

SEQ ID NO: 4457 - protein, 169 aa, Homo sapiens
  MISC_FEATURE (98): Xaa equals any of the naturally occurring L-amino acids
  MISC_FEATURE (153): Xaa equals any of the naturally occurring L-amino acids
  MISC_FEATURE (159): Xaa equals any of the naturally occurring L-amino acids
SKVKQTENCGGFVGVQLRNMAQETNHSQVPMLCSTGCGFYGNPRTNGMCSVCYKEHLQRQNSSNGRISPPATSVSSLSESLPVQCTDGSVPEAQSALXSTSSSMQPSPVSNQSLLSESVASSQLDSTSVDKAVPETEDVQASVSDTAQQPSEXQSKSLXKPKQKKESLV

SEQ ID NO: 4458 - protein, 374 aa, Homo sapiens
  MISC_FEATURE (25): Xaa equals any of the naturally occurring L-amino acids
  MISC_FEATURE (38): Xaa equals any of the naturally occurring L-amino acids
SPSSTAATSAFRIASACLDELSCEXLLAGAGGAGAGAXPGTASPPTGSVPGDPVRIHCNITESYPAVPPIWSVESDDPNLAAVLERLVDIKKGNTLLLQHLKRIISDLCKLYNLPQHPDVEMLDQPLPAEQCTQEDVSSEDEDEEMPEDTEDLDHYEMKEEEPAEGKKSEDDGIGKENLAILEKIKKNQRQDYLNGAVSGSVQATDRLMKELRDIYRSQSFKGGNYAVELVNDSLYDWNVKLLKVDQDSALHNDLQILKEKEGADFILLNFSFKDNFPFDPPFVRVVSPVLSGGYVLGGGAICMELLTKQGWSSAYSIESVIMQISATLVKGKARVQFGANKSQYSLTRAQQSYKSLVQIHEKNGWYTPPKEDG

SEQ ID NO: 4459 - protein, 146 aa, Homo sapiens
  MISC_FEATURE (61): Xaa equals any of the naturally occurring L-amino acids
  MISC_FEATURE (73): Xaa equals any of the naturally occurring L-amino acids
  MISC_FEATURE (138): Xaa equals any of the naturally occurring L-amino acids
AEEVYAQLQKMLLEQQEKCLLFSKQFMHQGNVAETTRFEKLAQDRKKQLEILQLAQAQGLXPPTHHFELKTFXTVRIFSQLNSTEMHLIIVRGMNLPAPPGVTPDDLDAFVRFEFHYPDSDQAQKSKTAVVNNTNSPXLITLQLNS

SEQ ID NO: 4460 - protein, 61 aa, Homo sapiens
IMKESSSVLAKCSSIAGYIQWSSINSYLSGLNQNCVSLNSYHTEGASQITIFLSAVFLQKS

SEQ ID NO: 4461 - protein, 29 aa, Homo sapiens
  MISC_FEATURE (29): Xaa equals any of the naturally occurring L-amino acids
KTMMMTFKKKKKKKKKKKKKKKKKKKKKX

SEQ ID NO: 4462 - protein, 108 aa, Homo sapiens
DHLDLTKGTIKWCQVLGSRRVYKKKMNKDFTYWGSGITGCLDCPATQLPPIKSFITLQEGPDASIISTPCFSVISFEVAKNGSQKKMLRLFSSIYSCYFAEDRVNFFS

SEQ ID NO: 4463 - protein, 65 aa, Homo sapiens
  MISC_FEATURE (33): Xaa equals any of the naturally occurring L-amino acids
ISGKWLTERTIRCVYITSYSLFLTALMLWHCYXHIYVFLIYSSDSFNFLSSLSIRCAHLLCQVEV

SEQ ID NO: 4464 - protein, 293 aa, Homo sapiens
  MISC_FEATURE (17): Xaa equals any of the naturally occurring L-amino acids
  MISC_FEATURE (24): Xaa equals any of the naturally occurring L-amino acids
  MISC_FEATURE (31): Xaa equals any of the naturally occurring L-amino acids
  MISC_FEATURE (97): Xaa equals any of the naturally occurring L-amino acids
  MISC_FEATURE (112): Xaa equals any of the naturally occurring L-amino acids
  MISC_FEATURE (242): Xaa equals any of the naturally occurring L-amino acids
  MISC_FEATURE (243): Xaa equals any of the naturally occurring L-amino acids
VPGPAARGLGRLRRGVXVRGRRTXAKVAIKXLYRPFQSELFAKRAYRELRLLKHMRHENVIGLLDVFTPDETLDDFTDFYLVMPFMGTDLGKLMKHXKLGEDRIQFLVYQMXKGLRYIHAAGIIHRDLKPGNLAVNEDCELKILDFGLARQADSEMTGYVVTRWYRAPEVILNWMRYTQTVDIWSVGCIMAEMITGKTLFKGSDHLDQLKEIMKVTGTPPAEFVQRLQSDEAKNYMKGLPEXXEEGFCLYPDQCKPSGCEPPGEDAGAGRGAAGDGRRGAGPSLLRVPARHGR

SEQ ID NO: 4465 - protein, 82 aa, Homo sapiens
TRGLHLTLSTYQRNTWGDFLEAILPLAVQAAMEENVEFRRGLPRDFMDYMGAQHSDSKDPGKNRFHGEGAGLGCPPGTLCSC

SEQ ID NO: 4466 - protein, 72 aa, Homo sapiens
  MISC_FEATURE (1): Xaa equals any of the naturally occurring L-amino acids
  MISC_FEATURE (2): Xaa equals any of the naturally occurring L-amino acids
  MISC_FEATURE (44): Xaa equals any of the naturally occurring L-amino acids
  MISC_FEATURE (47): Xaa equals any of the naturally occurring L-amino acids
XXFLSRLPFMWVKDKVENTLLYLVSRVNLMSSSLCFEIFWNVIXNYXRWSMYVLGLVLMFNMHYLIQSSQQS

SEQ ID NO: 4467 - protein, 38 aa, Homo sapiens
DHVLCRDMDEAGTIILSKLTEEQETKHHMFSLVSGTEQ

SEQ ID NO: 4468 - protein, 114 aa, Homo sapiens
PRFCGALRHSLNATLTPRLENPVLMWWAGPLLMEDGGDGVVLKGSVVLEVYTPLRTACQEPQSSFTSAKAERERTWEAFCSLSYPSINSIIVDAKGDGDVPSTVVAVTTLTSLS

SEQ ID NO: 4469 - protein, 47 aa, Homo sapiens
  MISC_FEATURE (5): Xaa equals any of the naturally occurring L-amino acids
  MISC_FEATURE (34): Xaa equals any of the naturally occurring L-amino acids
  MISC_FEATURE (35): Xaa equals any of the naturally occurring L-amino acids
  MISC_FEATURE (43): Xaa equals any of the naturally occurring L-amino acids
  MISC_FEATURE (46): Xaa equals any of the naturally occurring L-amino acids
NQNYXWEKNKFIYENVKIILKVLFSNKMEKLVKXXKKKKKKRXPLXG

SEQ ID NO: 4470 - protein, 115 aa, Homo sapiens
SALFSLAEDKGIHAAPRFLVARLRTKQLRSSHSDPNVLTVLFLITVTLKVQAKCCQTPWLKQWRVMGKAVEGPQPTHWLKLPPTATMNPTAVYAPIFLFLYLHPHDSQCWIFLHE

SEQ ID NO: 4471 - protein, 106 aa, Homo sapiens
QSMVVSHYARPDLPLLMVISCESFFLPLHSFYSVYSPMPHPKSCTVNWPVKGTPTFKQGRQDTTGRRLIAQTLDCSGWDQILAPLLASCVALGKLLNLSGPQFLPL

SEQ ID NO: 4472 - protein, 49 aa, Homo sapiens
  MISC_FEATURE (9): Xaa equals any of the naturally occurring L-amino acids
  MISC_FEATURE (11): Xaa equals any of the naturally occurring L-amino acids
  MISC_FEATURE (16): Xaa equals any of the naturally occurring L-amino acids
  MISC_FEATURE (28): Xaa equals any of the naturally occurring L-amino acids
FYYFSLFKXEXQIESXQILQMTGIFVSXLSFCVFFLNKIFRGNAFTEKK

SEQ ID NO: 4473 - protein, 157 aa, Homo sapiens
IRHESKRNQVSYVRPAEPAFLARFKERVGYREGPTVETKRIQPQPPDEDGDHSDKEDEQPQVVVLKKGDLSVEEVMKIKAEIKAAKADEEPTPADGRIIYRKPVKHPSDEKYSGLTASSKKKKPNEDEVNQDSVKKNSQKQIKNSSLLSFDNEDENE

SEQ ID NO: 4474 - protein, 94 aa, Homo sapiens
  MISC_FEATURE (6): Xaa equals any of the naturally occurring L-amino acids
  MISC_FEATURE (7): Xaa equals any of the naturally occurring L-amino acids
NYDCFXXSPFGTRSFQLKGRGNIYLKSSIHERKRMETMSSVLLLPKHPCMCVHVCWRVCVCMHISKCVFACVCWGVYVIWVFVYLCYYSPLALF

SEQ ID NO: 4475 - protein, 197 aa, Homo sapiens
  MISC_FEATURE (97): Xaa equals any of the naturally occurring L-amino acids
  MISC_FEATURE (124): Xaa equals any of the naturally occurring L-amino acids
  MISC_FEATURE (129): Xaa equals any of the naturally occurring L-amino acids
RWARVEAAVMEGAGAGSGFRKELVSRLLHLHFKDDKTKVSGDALQLMVELLKVFVVEAAVRGVRQAQAEDALRVDVDQLEKVLRSCSGLLGISAVAXATPRGAPGPQKQALCFQRPLIRGREGXEGFGXDSNKISGSLQPVQKGQDCSALRALECPVGTLVWEGAAPGESLPLLPGTIVCMPPGVLQAGAGKGLASR

SEQ ID NO: 4476 - protein, 98 aa, Homo sapiens
  MISC_FEATURE (77): Xaa equals any of the naturally occurring L-amino acids
KAWSAFRGIRRKHRKSLLSRSWAPLPLGQRTGNRGSGISGPARERSSRARSCPANHAAPWAEAAPAMALGPAPAQGXLSPACWAPPWYIASSRTQITP

SEQ ID NO: 4477 - protein, 47 aa, Homo sapiens
GLPHRIIMHSPLLMHVKFLLGKLTHHLTTILSTIEYILFHKFGIHSE

SEQ ID NO: 4478 - protein, 70 aa, Homo sapiens
  MISC_FEATURE (56): Xaa equals any of the naturally occurring L-amino acids
  MISC_FEATURE (66): Xaa equals any of the naturally occurring L-amino acids
  MISC_FEATURE (70): Xaa equals any of the naturally occurring L-amino acids
FTNAFGQLDVTDFILCDYNKKHNFLKKKKKKKKKGGRSRGSKLTYACMRRHSSSIXSPKFNSLARXFTTX

SEQ ID NO: 4479 - protein, 74 aa, Homo sapiens
  MISC_FEATURE (2): Xaa equals any of the naturally occurring L-amino acids
WXYRILNRIQFDMTAKNVGLTSTNAEVRGFIDQNLSPTKGNISFVAFPVSNTNSPTKILPKTLGPINVNVGPQM

SEQ ID NO: 4480 - protein, 178 aa, Homo sapiens
  MISC_FEATURE (28): Xaa equals any of the naturally occurring L-amino acids
  MISC_FEATURE (134): Xaa equals any of the naturally occurring L-amino acids
  MISC_FEATURE (170): Xaa equals any of the naturally occurring L-amino acids
LPLYTGSSRGEHAPPPWSPPRAVNLGSXSRAVTLPEAPPPRRRPGAVNPSLAAAESAPGQAHLRINALMASPRRESLGMVFSTVKTFEPPERLTPAPLRGHFIQKLNHSEFQHCRGSSGSVHRHSLALSPTEPXRDLGPSWGLFIVEKASCQTRICGRGQAGGLGRWQWXVSAHGCGW

SEQ ID NO: 4481 - protein, 107 aa, Homo sapiens
LRWKGRYSENDVKNWTPELQKYLNFDPRTAQKIDNGIFWISWDDLCQYYDVIYLSWNPGLFKESTCIHSTWDAKQGPVKDAYSLANNPQYKLEVQCTTGGCCSLGFA

SEQ ID NO: 4482 - protein, 129 aa, Homo sapiens
AWADAWGEFSALRAENEKIKLELHQLKQQVMDEVIKVRTDTKLDFNLEKSRVKELYSLNEKKLLELRTEIVALHAQQDRALTQTDRKIETEVAGLKTMLESHKLDNIKYLAGSIFTCLTVALGFYRLWI

SEQ ID NO: 4483 - protein, 34 aa, Homo sapiens
ACSNACKTTYHSALVFLIQEGRAVNLFGANVKCK

SEQ ID NO: 4484 - protein, 90 aa, Homo sapiens
  MISC_FEATURE (23): Xaa equals any of the naturally occurring L-amino acids
TYYQNFFKEFFMKDFPPLQERNXVLPFCLVKAEFAVASKETFLNKNYVLWHNPFFELYREQSFGNSGRYLFLLNIYPIIGITVTYLGFHH

SEQ ID NO: 4485 - protein, 43 aa, Homo sapiens [sequence omitted]

SEQ ID NO: 4486 - protein, 104 aa, Homo sapiens
  MISC_FEATURE (91): Xaa equals any of the naturally occurring L-amino acids
SWRSNNSRKSSADTEFSDECTTAERVLMKSPSPALHPPQKYKDRGILHPKRGTEDRSDQSSLKSTDSSSYPSPCASPSPPSSGKGLKISFXKTKHACSILHNEE

SEQ ID NO: 4487 - protein, 87 aa, Homo sapiens
  MISC_FEATURE (50): Xaa equals any of the naturally occurring L-amino acids
TVVEVYVFVYLPAFENGQIDKLSLTDLGALWAGIKTEGGLSQSQSPGQTXFLSYGTSFSTPQPGQAPYSYQMQGLYIHIAIFLNPVG

SEQ ID NO: 4488 - protein, 104 aa, Homo sapiens
LQRRREQKQRRHDAQQLQQLKHLESFYEKPPPGLIKEDETKPEDCIPDVPGNEHAREFLAHAPTKGLWMPLGKEVKVMQCWRCKPMVTERVTKNALSLSKATKS

SEQ ID NO: 4489 - protein, 126 aa, Homo sapiens
  MISC_FEATURE (59): Xaa equals any of the naturally occurring L-amino acids
  MISC_FEATURE (63): Xaa equals any of the naturally occurring L-amino acids
  MISC_FEATURE (99): Xaa equals any of the naturally occurring L-amino acids
  MISC_FEATURE (102): Xaa equals any of the naturally occurring L-amino acids
LVKCNYCNFFPIQLYISLTDDQIIVVLNQFVVSKCFVGFCLFVFKEQFGSLDMVLQRDXMGCXWFWVITDLLDNLDKQPSCHVCLSNLKCSLYFMFLEXLSXKDLTLWQICLNRDTTMLPNKAFWP

SEQ ID NO: 4490 - protein, 70 aa, Homo sapiens
VTNLVIIFFLIQPQKLAILKRLMFTNGKNEMTLHLLRENSLRHSLSKLYFFYLILKTSAPKSVSIFPECL

SEQ ID NO: 4491 - protein, 41 aa, Homo sapiens
  MISC_FEATURE (7): Xaa equals any of the naturally occurring L-amino acids
  MISC_FEATURE (41): Xaa equals any of the naturally occurring L-amino acids
ELRQFSXMNRYNLKPNQTRKLRGHRMPVLGWATPLLFVKMX

SEQ ID NO: 4492 - protein, 53 aa, Homo sapiens
  MISC_FEATURE (5): Xaa equals any of the naturally occurring L-amino acids
NLNGXLIFPLCPLVPCKMLGHPKERGEIAMVVPKVLLALHVFLKSRTWSFSFM

SEQ ID NO: 4493 - protein, 80 aa, Homo sapiens
  MISC_FEATURE (59): Xaa equals any of the naturally occurring L-amino acids
  MISC_FEATURE (60): Xaa equals any of the naturally occurring L-amino acids
  MISC_FEATURE (70): Xaa equals any of the naturally occurring L-amino acids
  MISC_FEATURE (72): Xaa equals any of the naturally occurring L-amino acids
  MISC_FEATURE (78): Xaa equals any of the naturally occurring L-amino acids
  MISC_FEATURE (80): Xaa equals any of the naturally occurring L-amino acids
CRQERAVAPARRAMERIPSAQPPPACLPKAPGLEHGDLPGMYPAHMYQVYKSRRGIKRXXDSKETYKLPXRXIEKRDXTX

SEQ ID NO: 4494 - protein, 155 aa, Homo sapiens
  MISC_FEATURE (65): Xaa equals any of the naturally occurring L-amino acids
  MISC_FEATURE (96): Xaa equals any of the naturally occurring L-amino acids
  MISC_FEATURE (106): Xaa equals any of the naturally occurring L-amino acids
SFQQEMVTIRRIIQSQKRRRVKTLPGDGKGNKHKKHRKRRKGEESEGFLNPELLETSRKSREPTXVEENKTDSLFVLPSRDDATPVRDEPMDAESXTFKSVSEKDXRERDKPKAKGDKTKRKNDGSAVSKKENIVKPAKGPQEKVDGERERSPSI

SEQ ID NO: 4495 - protein, 71 aa, Homo sapiens
PPRRGLGGTSSRSPGPRFCGRVHCRGGDGVRARRQLPPRSSGPTWQSAAHGSPASEDPWLQPPIPTCRRTR

SEQ ID NO: 4496 - protein, 54 aa, Homo sapiens
  MISC_FEATURE (19): Xaa equals any of the naturally occurring L-amino acids
  MISC_FEATURE (26): Xaa equals any of the naturally occurring L-amino acids
DIDLDMRFFSFILSCRRNXSSICTRXKTTYTNTIEQLIMKTLPAFIKNVIIFFC

SEQ ID NO: 4497 - protein, 33 aa, Homo sapiens
QCSEICGANHSFMPIVLELIPLKIFEIGPVFTL

SEQ ID NO: 4498 - protein, 186 aa, Homo sapiens
AVPKDVSSEEAGQVEGVSTMVIDGEGDAAQVERFVHLPGVQEWVGGTTQSILYLAHTCWYWSWLAFPCATRRSCTVLSSQLTSAKMSGFSSELLCEATRMEVISASVLILEVEKWSESSVVKWPYTKVGDIQNRGEIGLSAPLGGREAVGVGGEMALCECGRPADWRWNWPQCLSWRWRSGQSPWW

SEQ ID NO: 4499 - protein, 134 aa, Homo sapiens
PVPFPTFALPVVGMWEAHLSSCDFMSQTKDERLVSAMMVVSEAFPCPVWCLPHIVPDTGFLDPLLLSFLSFRSRSPVLYPAPQKPQCFSSAGLGHKEALGYGERLLLPRVYSQARGLPSSSQTSLKGSPFGAGR

SEQ ID NO: 4500 - protein, 58 aa, Homo sapiens
EFGTRQWCDLSSLQPPRLGFMQLSCLSLPSSWDYRHVPPCPANFCIFSRDGVSLCWSG

SEQ ID NO: 4501 - protein, 25 aa, Homo sapiens
RAPVIPATQEAEAGEWREPGRRSLQ

SEQ ID NO: 4502 - protein, 351 aa, Homo sapiens
EPPPPAIRHHLPLLQLFSQDQPLAQPRAMAYVPAPGYQPTYNPTLPYYQPIPGGLNVGMSVYIQGVVSEHMKRFFVNFVVGQDPGSDVAFHFNPRFDGWDKVVFNTLQGGKWGSEERKRSMPFKKGAAFELVFIVLAEHYKVVVNGNPFYEYGHRLPLQMVTHLQVDGDLQLQSINFIGGQPLRPQGPPMMPPYPGPGHCHQQLNSLPTMEGPPTFNPPVPYFGRLQGGLTARRTIIIKGYVPPTGKSFAINFKVGSSGDIALHINPRMGNGTVVRNSLLNGSWGSEEKKITHNPFGPGQFFDLSIRCGLDRFKVYANGQHLFDFAHRLSAFQRVDTLEIQGDVTLSYVQI

SEQ ID NO: 4503 - protein, 83 aa, Homo sapiens
  MISC_FEATURE (41): Xaa equals any of the naturally occurring L-amino acids
  MISC_FEATURE (42): Xaa equals any of the naturally occurring L-amino acids
  MISC_FEATURE (79): Xaa equals any of the naturally occurring L-amino acids
VNECQGRQAPAPRALGVARGCLARTPCTYFPGAQHGNKAPXXALGPCEKKKKKKKKKKKKKKKKKKKKKKKKKKKGGRXKRFP

SEQ ID NO: 4504 - protein, 91 aa, Homo sapiens
  MISC_FEATURE (10): Xaa equals any of the naturally occurring L-amino acids
PQRARAGARXPSMGVLLTQRTLLSLVLALLFPSMASMAAIGSCSKEYRVLLGQLQKQTDLMQDTSRLLDPYVSTWALVASESQRTMGLGRE

SEQ ID NO: 4505 - protein, 36 aa, Homo sapiens
APVVAATREAEAGESLEPVGAEVAVSQDRATALQPG

SEQ ID NO: 4506 - protein, 50 aa, Homo sapiens
LPHPKFYGRLMFCYGDYHPSTWKHQNGLVQLGSSARSRCLLFEIVWKDYC

SEQ ID NO: 4507 - protein, 75 aa, Homo sapiens
QVNEVHIWKSLNIFRSWNSMATLVVYAFHCCGRGFGSKCHQQWIQKTWIWNKGKIYLMGLNCSARSIWYEMKWLS

SEQ ID NO: 4508 - protein, 444 aa, Homo sapiens
  MISC_FEATURE (34): Xaa equals any of the naturally occurring L-amino acids
NEQDNCVLIHDVDQRNSDKDIFGDACDNCLSVLXNDQKDTDGDGRGDACDDDMDGDGIKNILDNCPKFPNRDQRDKDGDGVGDACDSCPDVSNPNQSDVDNDLVGDSCDTNQDSDGDGHQDSTDNCPTVINSAQLDTDKDGIGDECDDDDDNDGIPDLVPPGPDNCRLVPNPAQEDSNSDGVGDICESDFDQDQVIDRIDVCPENAEVTLTDFRAYQTVVLDPEGDAQIDPNWVVLNQGMEIVQTMNSDPGLAVGYTAFNGVDFEGTFHVNTQTDDDYAGFIFGYQDSSSFYVVMWKQTEQTYWQATPFRAVAEPGIQLKAVKSKTGPGEHLRNSLWHTGDTSDQVRLLWKDSRNVGWKDKVSYRWFLQHRPQVGYIRVRFYEGSELVADSGVTIDTTMRGGRLGVFCFSQENIIWSNLKYRCNDTIPEDFQEFQTQNFDRFDN

SEQ ID NO: 4509 - protein, 358 aa, Homo sapiens
  MISC_FEATURE (234): Xaa equals any of the naturally occurring L-amino acids
LPQVMAEFRNNPGEVEGRKAKSMKGQTTGKNQDNPVIDEIDFLEAFKNIQPSSFRSVIGLMDIKPVDWEEIGGLEDVKLKLKQSIEWPLKFPWEFVRMGLTQPKGVLLYGPPGCAKTTLVRALATSCHCSFVSVSGADLFSPFVGDSEKVLSQIFRQARASTPAILFLDEIDSILGARSASKTGCDVQERVLSVLLNELDGVGLKTIERRGSKSSQQEFQEVFNRSVMIIAATXRPDVLDTALLRPGRLDKIIYIPPPDHKGRLSILKVCTKTMPIGPDVSLENLAAETCFFSGADLRNLCTEAALLALQENGLDATTVKQEHFLKSLKTVKPSLSCKDLALYENLFKKEGFSNVEGI

SEQ ID NO: 4510 - protein, 446 aa, Homo sapiens
NSAQVGRGDAVLKTWAPAQCLCSRMGPAWLWLLGTGILASVHCQPLLAHGDKSLQGPQPPRHQLSEPAPAYHRITPTITNFALRLYKELAADAPGNIFFSPVSISTTLALLSLGAQANTSALILEGLGFNLTETPEADIHQGFRSLLHTLALPSPKLELKVGNSLFLDKRLKPRQHYLDSIKELYGAFAFSANFTDSVTTGRQINDYLRRQTYGQVVDCLPEFSQDTFMVLANYIFFKAKWKHPFSRYQTQKQESFFVDERTSLQVPMMHQKEMHRFLYDQDLACTVLQIEYRGNALALLVLPDPGKMKQVEAALQPQTLRKWGQLLLPSLLDLHLPRFSISGTYNLEDILPQIGLTNILNLEADFSGVTGQLNKTISKVSHKAMVDMSEKGTEAGAASGLLSQPPSLNTMSDPHAHFNRPFLLLLWEVTTQSLLFLGKVVNPVAG

SEQ ID NO: 4511 - protein, 180 aa, Homo sapiens
  MISC_FEATURE (6): Xaa equals any of the naturally occurring L-amino acids
  MISC_FEATURE (13): Xaa equals any of the naturally occurring L-amino acids
  MISC_FEATURE (15): Xaa equals any of the naturally occurring L-amino acids
KARPLXLTKGNKXWXSTAVAAALQLVDPPGCRNSAREEHWPSQLLLRESLEDMMLHSALGLCLLLVTVSSNLAIAIKKEKRPPQTLSRGWGDDITWVQTYEEGLFYAQKSKKPLMVIHHLEDCQYSQALKKVFAQNEEIQEMAQNKFIMLNLMHETTDKNLSPDGQYVPRNHVCRPFFNS

SEQ ID NO: 4512 - protein, 29 aa, Homo sapiens
GGTSSLSTMNQTAILNLLPYLSDSKWHSR

SEQ ID NO: 4513 - protein, 238 aa, Homo sapiens
QDLKPVLDREYLAIYLKMVFFTCNACGESVKKIQVEKHVSVCRNCECLSCIDCGKDFWGDDYKNHVKCISEDQKYGGKGYEGKTHKGDIKQQAWIQKISELIKRPNVSPKVRELLEQISAFDNVPRKKAKFQNWMKNSLKVHNESILDQVWNIFSEASNSEPVNKEQDQRPLHPVANPHAEISTKVPASKVKDAVEQQGEVKKNKRERKEERQKKRKREKKELKVRKPPGKTPRDSEA

SEQ ID NO: 4514 - protein, 341 aa, Homo sapiens
THASAHASAHASAHASGWHVGQAQQGPVSALSRALPAPARTMRALEGPGLSLLCLVLALPALLPVPAVRGVAETPTYPWRDAETGERLVCAQCPPGTFVQRPCRRDSPTTCGPCPPRHYTQFWNYLERCRYCNVLCGEREEEARACHATHNRACRCRTGFFAHAGFCLEHASCPPGAGVIAPGTPSQNTQCQPCPPGTFSASSSSSEQCQPHRNCTALGLALNVPGSSSHDTLCTSCTGFPLSTRVPGAEECERAVIDFVAFQDISIKRLQRLLQALEAPEGWGPTPRAGRAALQLKLRRRLTELLGAQDGALLVRLLQALRVARMPGLERSVRERFLPVH

SEQ ID NO: 4515 - protein, 89 aa, Homo sapiens
  MISC_FEATURE (63): Xaa equals any of the naturally occurring L-amino acids
  MISC_FEATURE (82): Xaa equals any of the naturally occurring L-amino acids
  MISC_FEATURE (85): Xaa equals any of the naturally occurring L-amino acids
KGGQGSVGGERGCLCIKTCFPAVWRFLTELKIELPFIPAIPLLGIYSKENKLFYQKDTCTPMXIAALFTIAKTWSKPRCPSXVNXIKKM

SEQ ID NO: 4516 - protein, 75 aa, Homo sapiens
ISTSIHTYVLVFHYCNLKERLCIPFFNSVLVFVLFKKQNSALFSCIILEDTLLCTIPSALEHCLAFLSIYKCIYV

SEQ ID NO: 4517 - protein, 26 aa, Homo sapiens
VTAGVQTKTCTPMFIAALFTAAKRWK

SEQ ID NO: 4518 - protein, 67 aa, Homo sapiens
KQETLSDLGSSYAKQLGFRDSWVFIGAKDLRGKSPFEQFLKNSPDTNKYEGWPELLEMEGCMPPKPF

SEQ ID NO: 4519 - protein, 229 aa, Homo sapiens
  MISC_FEATURE (2): Xaa equals any of the naturally occurring L-amino acids
AXAPPGRSMGRFRGGLRCIKYLLLGFNLLFWLAGSAVIAFGLWFRFGGAIKELSSEDKSPEYFYVGLYVLVGAGALMMAVGFFGCCGAMRESQCVLGSFFTCLLVIFAAEVTTGVFAFIGKGVAIRHVQTMYEEAYNDYLKDRGKGNGTLITFHSTFQCCGKESSEQVQPTCPKELLGHKNCIDEIETIISVKLQLIGIVGIGIAGLTIFGMIFSMVLCCAIRNSRDVI

SEQ ID NO: 4520 - protein, 74 aa, Homo sapiens
IECVNTVLVNFITFLLPYSLNFSVFVVPKQLLNLEQINLTPAKKRLLLAYQLSLNSNAHVTFITSKNISLMIHL

SEQ ID NO: 4521 - protein, 41 aa, Homo sapiens
  MISC_FEATURE (29): Xaa equals any of the naturally occurring L-amino acids
  MISC_FEATURE (31): Xaa equals any of the naturally occurring L-amino acids
  MISC_FEATURE (36): Xaa equals any of the naturally occurring L-amino acids
  MISC_FEATURE (39): Xaa equals any of the naturally occurring L-amino acids
YIGFVILVFFASSYVKEIDNKILNNKKKXKXSSKGXVAXAI

SEQ ID NO: 4522 - protein, 288 aa, Homo sapiens
EIRVSCTAGAGFPAAQARVRCLCHLILMSGEIAMCEPEFGNDKAREPSVGGRWRVSWYERFVQPCLVELLGSALFIFIGCLSVIENGTDTGLLQPALAHGLALGLVIATLGNISGGHFNPAVSLAAMLIGGLNLVMLLPYWVSQLLGGMLGAALAKAVSPEERFWNASGAAFVTVQEQGQVAGALVAEIILTTLLALAVCMGAINEKTKGPLAPFSIGFAVTVDILAGGPVSGGCMNPARAFGPAVVANHWNFHWIYWLGPLLAGLLVGLLIRCFIGDGKTRLILKAQ

SEQ ID NO: 4523 - protein, 128 aa, Homo sapiens
SPPYARKTCSRSVAKLNRAIRIHQTLMESASLTYEQRLLAIQQLGRDYMAAGLYDRAEDMFNQLTDETDFRIGALQQLLQIYQATSEWQKAIDVAERLVKLGKDKQRVEIAHFYCELALQHMALLQTK

SEQ ID NO: 4524 - protein, 43 aa, Homo sapiens
  MISC_FEATURE (11): Xaa equals any of the naturally occurring L-amino acids
  MISC_FEATURE (34): Xaa equals any of the naturally occurring L-amino acids
GKKIKKLASAXRGGSLPVIPALSAAEASGSLEVXSSKTSLGQT

SEQ ID NO: 4525 - protein, 220 aa, Homo sapiens
  MISC_FEATURE (216): Xaa equals any of the naturally occurring L-amino acids
NTPGFMYKNLQCLVIDEADRIFDVGFEEELKQIIKLLPTRRQTMLFSATQTRKVEDLARISLKKEPLYVGVDDDKANATVDGLEQKNRKKKLMVFFSSCMSVKYHYELLNYIDLPVLAIHGKQKQNKRTTTFFQFCNADSGTLLCTDVAARGLDIPEVDWIVQYDPPDDPKEYIHRVGRTARGLNGRGHALLILRPEELGFLRYLKQSKVPLSEFXLFLV

SEQ ID NO: 4526 - protein, 82 aa, Homo sapiens
LELFCNITEFVRSLAKIFEQFINVEQMFLFTALFVTEGDKFSSHDYWLPCTAIFIHNSRHFPFLWKSCCYLNYKCNCVVNES

SEQ ID NO: 4527 - protein, 75 aa, Homo sapiens
  MISC_FEATURE (63): Xaa equals any of the naturally occurring L-amino acids
KPQPLAYSSFNTRDLWLIWGRKTLKVISLGQRPYCTRGKKYILHLLLLQLCLKFICLVILSTXTNFLVYFKHLVG

SEQ ID NO: 4528 - protein, 38 aa, Homo sapiens
VDPEMKVERYKRTFDQNEELGLNDMKTEGYEAGLAPQR

SEQ ID NO: 4529 - protein, 143 aa, Homo sapiens
ARANPAMAYANEVKRVVSSAQEKGRKIAAFFAESLPSVGGQIIPPAGYFSQVAEHIRKAGGVFVADEIQVGFGRVGKHFWAFQLQGKDFVPDIVTMGKSIGNGHPVACVAATQPVARAFEATGLSTSTRLGAAQCPALWGWPS

SEQ ID NO: 4530 - protein, 77 aa, Homo sapiens
  MISC_FEATURE (43): Xaa equals any of the naturally occurring L-amino acids
  MISC_FEATURE (59): Xaa equals any of the naturally occurring L-amino acids
  MISC_FEATURE (75): Xaa equals any of the naturally occurring L-amino acids
VTHSVMLGRPQAEKHLLQLTLFLAIHSFGLKILQHLQESFTNXSFGGVVLNYQLTRMRXLALGSQPANMDGLSQXLK

SEQ ID NO: 4531 - protein, 347 aa, Homo sapiens
RGVVDSEDLPLNISREMLQQSKILKVIRKNIVKKCLELFSELAEDKENYKKFYEAFSKNLKLGIHEDSTNRRRLSELLRYHTSQSGDEMTSLSEYVSRMKETQKSIYYITGESKEQVANSAFVERVRKRGFEVVYMTEPIDEYCVQQLKEFDGKSLVSVTKEGLELPEDEEEKKKMEESKAKFENLCKLMKEILDKKVEKVTISNRLVSSPCCIVTSTYGWTANMERIMKAQALRDNSTMGYMMAKKHLEINPDHPIVETLRQKAEADKNDKAVKDLVVLLFETALLSSGFSLEDPQTHSNRIYRMIKLGLGIDEDEVAAEEPNAAVPDEIPPLEGDEDASRMEEVD

SEQ ID NO: 4532 - protein, 81 aa, Homo sapiens
  MISC_FEATURE (4): Xaa equals any of the naturally occurring L-amino acids
  MISC_FEATURE (13): Xaa equals any of the naturally occurring L-amino acids
  MISC_FEATURE (14): Xaa equals any of the naturally occurring L-amino acids
LFLXGGKDPLVPXXKQLGKDLALYIYWMVLMAKLLNSLISHVSASRISDRNETHLKMRLTWRFFFPNLSYLNWKNNQLILC

SEQ ID NO: 4533 - protein, 56 aa, Homo sapiens
TQVMGLCCTDYFVVHVLSLVPNSYFFCSSPSSYPLPSSWPNVYCSLLCNNHSNLCF

SEQ ID NO: 4534 - protein, 193 aa, Homo sapiens
  MISC_FEATURE (188): Xaa equals any of the naturally occurring L-amino acids
  MISC_FEATURE (191): Xaa equals any of the naturally occurring L-amino acids
  MISC_FEATURE (193): Xaa equals any of the naturally occurring L-amino acids
GAGAAEPGPAAELEALLSSKDDVGKSVHELERACRVAEQAANDLRAQVTELEDELTAAEDAKLRLEVTVQALKTQHERDLQGRDEAGEERRRQLAKQLRDAEVERDEERKQRTLAVAARKKLEGELEELKAQMASAGQGKEEAVKQLRKMQAQMKELWREVEETRTFREEIFSQNRESEKRLKGLKLXCCXCX

SEQ ID NO: 4535 - protein, 218 aa, Homo sapiens
  MISC_FEATURE (96): Xaa equals any of the naturally occurring L-amino acids
  MISC_FEATURE (105): Xaa equals any of the naturally occurring L-amino acids
  MISC_FEATURE (180): Xaa equals any of the naturally occurring L-amino acids
  MISC_FEATURE (190): Xaa equals any of the naturally occurring L-amino acids
  MISC_FEATURE (194): Xaa equals any of the naturally occurring L-amino acids
  MISC_FEATURE (207): Xaa equals any of the naturally occurring L-amino acids
ASASICSGIKYAFQVIGELHSQLDGSEVLLLTDGEDNTASSCIDEVKQSGAIVHFIALGRAADEAVIEMSKITGGSHFYVSDEAQNNGLIDAFGAXTSGNTDLSXKSLQLESKGLTLNSNAWMNDTVIIDSTVGKDTFFLITWNSLPPSISLWDPSGTIMENFTVDATSKMAYLSIPGTXKVGTWAYNLXAKAXPETLTITVTSRAXKFFCASNHSEC

SEQ ID NO: 4536 - protein, 76 aa, Homo sapiens
GAFLMATAAWLTTVFKQPGCAPELHWASFHNYGSVSITLISECGRHLNKNHESHFTNQDTQDVRLSDLSYQGHKAS

SEQ ID NO: 4537 - protein, 147 aa, Homo sapiens
  MISC_FEATURE (41): Xaa equals any of the naturally occurring L-amino acids
CFSSSGFTCHDHGATVLQYAPKQQLLISGGRKRHVCIFDIXQRQLIHTFQAHDSAIKALALDPYEEYFTTGSAEGNIKVWRLTGHGLIHSFKSEHAKQSIFRNIGAGVMQIDIIQGNRLFSCGADGTLKTRVLPNAFNIPNRILDIL

SEQ ID NO: 4538 - protein, 423 aa, Homo sapiens
PENNQIETMEDLCVANTLFALNLFKHLAKASPTQNLFLSPWSISSTMAMVYMGSRGSTEDQMAKVLQFNEVGANAVTPMTPENFTSCGFMQQIQKGSYPDAILQAQAADKIHSSFRSLSSAINASTGNYLLESVNKLFGEKSASFREEYIRLCQKYYSSEPQAVDFLECAEEARKKINSWVKTQTKGKIPNLLPEGSVDGDTRMVLVNAVYFKGKWKTPFEKKLNGLYPFRVNSAQRTPVQMMYLREKLNIGYIEDLKAQILELPYAGDVSMFLLLPDEIADVSTGLELLESEITYDKLNKWTSKDKMAEDEVEVYIPQFKLEEHYELRSILRSMGMEDAFNKGRANFSGMSERNDLFLSEVFHQAMVDVNEEGTEAAAGTGGVMTGRTGHGGPQFVADHPFLFLIMHKITNCILFFGRFSSP

SEQ ID NO: 4539 - protein, 86 aa, Homo sapiens
TMEGCRPTSLITIEIHVTIEPWKCSLSKLRCAVSIKYIPDFKDVPKNVNYLNFYIGEINMSWYSGLNKTILAFLSLFFCKKIKNCT

SEQ ID NO: 4540 - protein, 244 aa, Homo sapiens
  MISC_FEATURE (101): Xaa equals any of the naturally occurring L-amino acids
GLRRLDSASGTVYTAMDVATGQEVAIKQMNLQQQPKKELIINEILVMRENKNPNIVNYLDSYLVGDELWVVMEYLAGGSLTDVVTETCMDEGQIAAVCREXLQALEFLHSNQITPEQSKRSTMVGTPYWMAPEVVTRKAYGPKVDIWSLGIMAIEMIEGEPPYLNENPLRALYLIATNGTPELQNPEKLSAIFRDFLNRCLEMDVEKRGSAKELLQHQFLKIAKPLSSLTPLIAAAKEATKNNH

SEQ ID NO: 4541 - protein, 624 aa, Homo sapiens
  MISC_FEATURE (2): Xaa equals any of the naturally occurring L-amino acids
  MISC_FEATURE (188): Xaa equals any of the naturally occurring L-amino acids
  MISC_FEATURE (192): Xaa equals any of the naturally occurring L-amino acids
HXHSFSSGYVEMEFEFDRLRAFQAMQVHCNNMHTLGARLPGGVECRFRRGPAMAWEGEPMRHNLGGNLGDPRARAVSVPLGGRVARFLQCRFLFAGPWLLFSEISFISDVVNNSSPALGGTFPPAPWWPPGPPPTNFSSLELEPRGQQPVAKAEGSPTAILIGCLVAIILLLLLIIALMLWRLHWRRXLSKXERRVLEEELTVHLSVPGDTILINNRPGPREPPPYQEPRPRGNPPHSAPCVPNGSALLLSNPAYRLLLATYARPPRGPGPPTPAWAKPTNTQAYSGDYMEPEKPGAPLLPPPPQNSVPHYAEADIVTLQGVTGGNTYAVPALPPGAVGDGPPRVDFPRSRLRFKEKLGEGQFGEVHLCEVDSPQDLVSLDFPLNVRKGHPLLVAVKILRPDATKNARNDFLKEVKIMSRLKDPNIIRLLGVCVQDDPLCMITDYMENGDLNQFLSAHQLEDKAAEGAPGDGQAAQGPTISYPMLLHVAAQIASGMRYLATLNFVHRDLATRNCLVGENFTIKIADFGMSRNLYAGDYYRVQGRAVLPIRWMAWECILMGKFTTASDVWAFGVTLWEVLMLCRAQPFGQLTDEQVIENAGEFFRDQGRQVYLSRPPACPQAYMS

SEQ ID NO: 4542 - protein, 202 aa, Homo sapiens
  MISC_FEATURE (1): Xaa equals any of the naturally occurring L-amino acids
  MISC_FEATURE (201): Xaa equals any of the naturally occurring L-amino acids
XQRWGGMEATARKPGQQWRSSVSPSSGLEPAETSAGVSSQGRWVCGVSRGAVPARVKRKLPRVLCTPTRRRPSPRGPSQPDARVLCVSNTRSVPAPRRPRCPQLEEDIAAKEKLLRVSEDERDRVLEELHKAEDSLLAAEEAAPRLKPDVASLNRRIQLVEEELDRAQERLATALQKLEEADKAADESERGMKVIESRAQXG

SEQ ID NO: 4543 - protein, 397 aa, Homo sapiens
PTRPSSVSRRDKSKQVWEAVLLPLSLLSMMDLRNTPAKSLDKFIEDYLLPDTCFRMQINHAIDIICGFLKERCFRGSSYPVCVSKVVKGGSSGKGTTLRGRSDADLVVFLSPLTTFQDQLNRRGEFIQEIRRQLEACQRERAFSVKFEVQAPRWGNPRALSFVLSSLQLGEGVEFDVLPAFDALDFARTGQLTGGYKPNPQIYVKLIEECTDLQKEGEFSTCFTELQRDFLKQRPTKLKSLIRLVKHWYQNCKKKLGKLPPQYALELLTVYAWERGSMKTHFNTAQGFRTVLELVINYQQLCIYWTKYYDFKNPIIEKYLRRQLTKPRPVILDPADPTGNLGGGDPKGWRQLAQEAEAWLNYPCFKNWDGSPVSSWILLVRPPASSLPFIPAPLHEA

SEQ ID NO: 4544 - protein, 262 aa, Homo sapiens
  MISC_FEATURE (20): Xaa equals any of the naturally occurring L-amino acids
  MISC_FEATURE (26): Xaa equals any of the naturally occurring L-amino acids
  MISC_FEATURE (52): Xaa equals any of the naturally occurring L-amino acids
  MISC_FEATURE (53): Xaa equals any of the naturally occurring L-amino acids
  MISC_FEATURE (55): Xaa equals any of the naturally occurring L-amino acids
  MISC_FEATURE (67): Xaa equals any of the naturally occurring L-amino acids
  MISC_FEATURE (71): Xaa equals any of the naturally occurring L-amino acids
PHRIPSVLSDLSIQIYQQLXKIAEGXLQPMIVSAMLENESIQGLSGVKPTGXXKXSSSMADGDNSYXLEAXIRQMNAFHTVMCDQGLDPEIILQVFKQLFYMINAVTLNNLLLRKDVCSWSTGMQLRYNISQLEEWLRGRNLHQSGAVQTMEPLIQAAQLLQLKKKTQEDAEAICSLCTSLSTQQIVKILNLYTPLNEFEERVTVAFIRTIQAQLQERNDPQQLLLDAKHMFPVLFPFNPSSLTMDSIHIPACLNLEFLNEV

SEQ ID NO: 4545 - protein, 451 aa, Homo sapiens
  MISC_FEATURE (371): Xaa equals any of the naturally occurring L-amino acids
GMEGSKTSNNSTMQVSFVCQRCSQPLKLDTSFKILDRVTIQELTAPLLTTAQAKPGETQEEETNSGEEPFIETPRQDGVSRRFIPPARMMSTESANSFTLIGEASDGGTMENLSRRLKVTGDLFDIMSGQTDVDHPLCEECTDTLLDQLDTQLNVTENECQNYKRCLEILEQMNEDDSEQLQMELKELALEEERLIQELEDVEKNRKIVAENLEKVQAEAERLDQEEAQYQREYSEFKRQQLELDDELKSVENQMRYAQTQLDKLKKTNVFNATFHIWHSGQFGTINNFRLGRLPSVPVEWNEINAAWGQTVLLLHALANKMGLKFQRYRLVPYGNHSYLESLTDKSKELPLYCSGGLRFFWDNKFDHAMXAFLDCVQQFKEEVEKGETRFCLPYRMDVEKGKIEDTGGSGGSYSIKTQFNSEEQWTKALKFMLTNLKWGLAWVSSQFYNK

SEQ ID NO: 4546 - protein, 35 aa, Homo sapiens
VYIRDPLVHSTADISSIFNTTVCSKARWSLLKLHF

SEQ ID NO: 4547 - protein, 201 aa, Homo sapiens
  MISC_FEATURE (127): Xaa equals any of the naturally occurring L-amino acids
NNCSLLWVLLAGFRLGNVVHAIQATEQSIHATDLVPRLCLTLANLNRVIYFICDTILWVRSVGLTSGINKEKWRTRAAHHYYYSLLLSLVRDLYEISLQMKRVTCDRAKKEKSASQDPLWFSVAEEXTEWLQSFLLLLFRSLKQHPPLLLDTVKNLCDILNPLDLLGIYKSNPGIIGLGGLVSSIAGMITVAYPQMKLKTR

SEQ ID NO: 4548 - protein, 70 aa, Homo sapiens
ADIAGVLAIRPDELRFRYSMVAYWRQAGLSYIRYSQICAKAVRDALKTEFKANAEKTSGSNVKIVKVKKE

SEQ ID NO: 4549 - protein, 72 aa, Homo sapiens
IKSLDEQCVVGKISKHWTGILREAFTDADNFGIQFPLDLDVKMKAVMIGACFLIDFMFFESTGSQEQKSGVW

SEQ ID NO: 4550 - protein, 376 aa, Homo sapiens
  MISC_FEATURE (364): Xaa equals any of the naturally occurring L-amino acids
  MISC_FEATURE (370): Xaa equals any of the naturally occurring L-amino acids
  MISC_FEATURE (372): Xaa equals any of the naturally occurring L-amino acids
  MISC_FEATURE (374): Xaa equals any of the naturally occurring L-amino acids
SNLVPVDIIESVVSKEMDKRYLQFDIKAFVENNPAIKWCPTPGCDRAVRLTKQGSNTSGSDTLSFPLLRAPAVDCGKGHLFCWECLGEAHEPCDCQTWKNWLQKITEMKPEELVGVSEAYEDAANCLWLLTNSKPCANCKSPIQKNEGCNHMQCAKCKYDFCWICLEEWKKHSSSTGGYYRCTRYEVIQHVEEQSKEMTVEAEKKHKRFQELDRFMHYYTRFKNHEHSYQLEQRLLKTAKEKMEQLSRALKETEGGCPDTTFIEDAVHVLLKTRRILKCSYPYGFFLEPKSTKKEIFELMQTDLEMVTEDLAQKVNRPYLRTPRHKIIKAACLVQQKRQEFLGICGLGGVAPADSPEASKAHFXGGNMGXGXYXGV

SEQ ID NO: 4551 - protein, 123 aa, Homo sapiens
ARVKLKYCFTCKMFRPPRTSHCSVCDNCVERFDHHCPWVGNCVGRRNYRFFYAFILSLSFLTAFIFACVVTHLTLRAQGSNFLSTLKETPASVLGVGDLLLLHLVHSGPLRVSHVPRRLQPDY

SEQ ID NO: 4552 - protein, 245 aa, Homo sapiens
  MISC_FEATURE (138): Xaa equals any of the naturally occurring L-amino acids
  MISC_FEATURE (142): Xaa equals any of the naturally occurring L-amino acids
  MISC_FEATURE (143): Xaa equals any of the naturally occurring L-amino acids
  MISC_FEATURE (144): Xaa equals any of the naturally occurring L-amino acids
  MISC_FEATURE (216): Xaa equals any of the naturally occurring L-amino acids
  MISC_FEATURE (238): Xaa equals any of the naturally occurring L-amino acids
  MISC_FEATURE (244): Xaa equals any of the naturally occurring L-amino acids
GDTTIPLSLCLSQRPHLTSPKGSRCSRHTFAPAAMTLSPLLLFLPPLLLLLDVPTAAVQASPLQALDFFGNGPPVNYKTGNLYLRGPLKKSNAPLVNVTLYYEALCGGCRAFLIRELFPTWLLVMEILNVTLVPYGNXQEQXXXGRWEFKCQHGEEECKFNKVEACVLDELDMELAFLTIVCMEEFEDMERSLPLCCSSTPRLSQNYHECAMGRGXSHHATPRQISQHKDMSWYAMEXEITSLXV

SEQ ID NO: 4553 - protein, 197 aa, Homo sapiens
YWCEQCDVQFSSSSELYLHFQEHSCDEQYLCQFCEHETNDPEDLHSHVVNEHACKLIELSDKYNNGEHGQYSLLSKITFDKCKNFFVCQVCGFRSRLHTNVNRHVAIEHTKIFPHVCDDCGKGFSSMLEYCKHLNSHLSEGIYLCQYCEYSTGQIEDLKIHLDFKHSADLPHKCSDCLMRFGNERELISHLPVHETT

SEQ ID NO: 4554 - protein, 272 aa, Homo sapiens
GHAMIDLRSDTVTRPSRAMLEAMMAAPVGDDVYGDDPTVNALQDYAAELSGKEAAIFLPTGTQANLVALLSHCERGEEYIVGQAAHNYLFEAGGAAVLGSIQPQPIDAAADGTLPLDKVAMKIKPDDIHFARTKLLSLENTHNGKVLPREYLKEAWEFTRERNLALHVDGARIFNAVVAYGCELKEITQYCDSFTICLSKGLGTPVGSLLVGNRDYIKRAIRWRKMTGGGMRQSGILAAAGIYALKNNVARLQEDHDNAAWMADSCVKQARM

SEQ ID NO: 4555 - protein, 21 aa, Homo sapiens
ECKMVQPLWKTIWHSFNPSNS

SEQ ID NO: 4556 - protein, 368 aa, Homo sapiens
  MISC_FEATURE (196): Xaa equals any of the naturally occurring L-amino acids
RQRRKGGQERGRRGKMAATKRKRRGGFAVQAKKPKRNEIDAEPPAKRHATAEEVEEEERDRIPGPVCKGKWKNKERILIFSSRGINFRTRHLMQDLRMLMPHSKADTKMDRKDKLFVINEVCEMKNCNKCIYFEAKKKQDLYMWLSNSPHGPSAKFLVQNIHTLAELKMTGNCLKGSRPLLSFDPAFDELPHYALXKELLIQIFSTPRYHPKSQPFVDHVFTFTILDNRIWFRNFQIIEEDAALVEIGPRFVLNLIKIFQGSFGGPTLYENPHYQSPNMHRRVIRSITAAKYREKQQVKDVQKLRKKEPKTLLPHDPTADVFVTPAEEKPIEIQWVKPEPKVDLKARKKRIYKRQRKMKQRMDSGKTK

SEQ ID NO: 4557 - protein, 565 aa, Homo sapiens
IPGSTHASAGNLDSPEGGFDAIMQVAVCGSLIGWRNVTRLLVFSTDAGFHFAGDGKLGGIVLPNDGQCHLENNMYTMSHYYDYPSIAHLVQKLSENNIQTIFAVTEEFQPVYKELKNLIPKSAVGTLSANSSNVIQLIIDAYNSLSSEVILENGKLSEGVTISYKSYCKNGVNGTGENGRKCSNISIGDEVQFEISITSNKCPKKDSDSFKIRPLGFTEEVEVILQYICECECQSEGIPESPKCHEGNGTFECGACRCNEGRVGRHCECSTDEVNSEDMDAYCRKENSSEICSNNGECVCGQCVCRKRDNTNEIYSGKFCECDNFNCDRSNGLICGGNGVCKCRVCECNPNYTGSACDCSLDTSTCEASNGQICNGRGICECGVCKCTDPKFQGQTCEMCQTCLGVCAEHKECVQCRAFNKGEKKDTCTQECSYFNITKVESRDKLPQPVQPDPVSHCKEKDVDDCWFYFTYSVNGNNEVMVHVVENPECPTGPDIIPIVAGVVAGIVLIGLALLLIWKLLMIIHDRREFAKFEKEKMNAKWDTGENPIYKSAVTTVVNPKYEGK

SEQ ID NO: 4558 - protein, 60 aa, Homo sapiens
VTSKTQVGLFKFLKFEIFYLQKIVLCFIISQMSVRFLSTNDHASIFFSFKPPNQYFSFKF

SEQ ID NO: 4559 - protein, 53 aa, Homo sapiens
  MISC_FEATURE (41): Xaa equals any of the naturally occurring L-amino acids
TRHKAQLIFVFLVETGFDYVGQAGLKLLTSSDPPASASQRXGTIDMSHRAWPS

SEQ ID NO: 4560 - protein, 166 aa, Homo sapiens
  MISC_FEATURE (3): Xaa equals any of the naturally occurring L-amino acids
  MISC_FEATURE (18): Xaa equals any of the naturally occurring L-amino acids
  MISC_FEATURE (131): Xaa equals any of the naturally occurring L-amino acids
AQXLSSPVRGISGEQSTXGSFPLRYVQDQVAAPFQLSNHTGRIKVVFTPSICKVTCTKGSCQNSCEKGNTTTLISENGHAADTLTATNFRVVICHLPCMNGGQCSSRDKCQCPPNFTGKLCQIPVHGASVXKLYQHSQQPGKALGTHVIHSTHTLPLTVTSQQESK

SEQ ID NO: 4561 - protein, 60 aa, Homo sapiens
CVPSTSSPGIILSLALAGILGICIVVVVSIWLFRRKSIKKGDNKGVIYKPATKMETEAHA

SEQ ID NO: 4562 - protein, 99 aa, Homo sapiens
HCILMLFENAIYIVKKRAGAPAALVPWGSHPSPGGLLGGLRRWATEGQAGAAHSPHEGISVSYSVQRRGKTQCPGFSPPEMKDTLYFLPNVPASRFIMN

SEQ ID NO: 4563 - protein, 73 aa, Homo sapiens
GGWFYPFCLLFGTQLVFFGLLSSGSRAVLSNTVTTCGCLKLSQLKSHKIKNSFLSCTNHVSRGVTVCSSWLLY

SEQ ID NO: 4564 - protein, 142 aa, Homo sapiens
  MISC_FEATURE (30): Xaa equals any of the naturally occurring L-amino acids
  MISC_FEATURE (40): Xaa equals any of the naturally occurring L-amino acids
  MISC_FEATURE (120): Xaa equals any of the naturally occurring L-amino acids
  MISC_FEATURE (126): Xaa equals any of the naturally occurring L-amino acids
  MISC_FEATURE (136): Xaa equals any of the naturally occurring L-amino acids
  MISC_FEATURE (138): Xaa equals any of the naturally occurring L-amino acids
CLCLHCPSSYLFCSMSHSYKKAISDEALRXFQMDYFGGLXPGQYATRMTGQVHGSGCHLRSAPCDLGASQRNYPVISLKSMLVCFPKANQQLIQTLGPQSRWNNGRRLPECQVLQDELKXRVVGRXVGGKGPCPDXCXPCIY

SEQ ID NO: 4565 - protein, 301 aa, Homo sapiens
  MISC_FEATURE (265): Xaa equals any of the naturally occurring L-amino acids
  MISC_FEATURE (271): Xaa equals any of the naturally occurring L-amino acids
GTSVCRRVEKNWGAVVRSPEGTPQKIRQLIDEGIAPEEGGVDAKDTSATSQSVNGSPQAEQPSLESTSKEAFFSRVETFSSLKWAGKPFELSPLVCAKYGWVTVECDMLKCSSCQAFLCASLQPAFDFDRYKQRCAELKKALCTAHEKFCFWPDSPSPDRFGMLPLDEPAILVSEFLDRFQSLCHLDLQLPSLRPEDLKTMCLTEDKISLLLHLLEDELDHRTDERKTTIKLGSDIQVHVTACILSVCGWACSSSLESMQLSLIXCSQCMXKVGLWGFQQIESSMTDLDASLPDQLPNPRP

SEQ ID NO: 4566 - protein, 163 aa, Homo sapiens
  MISC_FEATURE (1): Xaa equals any of the naturally occurring L-amino acids
XEPKPSVEPVKSISSMELKTEPFDDFLFPASSRPSGSETARSVPDMDLSGSFYAADWEPLHSGSLGMGPMAQSWSPCALRWSPVLPAALLTRLPSSSPTPRLTPSPAVQLPTARAAAAMSLPLTRSAHPRCWPCEGAGKGRQPAPTSATARAGALQRGETHLP

SEQ ID NO: 4567 - protein, 89 aa, Homo sapiens
QTASVWPCPHSYMSLSTSTSLRSLTSRWTLYSHVHLIPDELWSYLDAQIRGFYLSIQCSLRFQDISPQALGFTLGIRRLHVSLEMTCKI

SEQ ID NO: 4568 - protein, 353 aa, Homo sapiens
GSLDLWRGAELSPGHSTLFTLCACAKGAMAASCVLLHTGQKMPLIGLGTWKSEPGQVKAAVKYALSVGYRHIDCAAIYGNEPEIGEALKEDVGPGKAVPREELFVTSKLWNTKHHPEDVEPALRKTLADLQLEYLDLYLMHWPYAFERGDNPFPKNADGTICYDSTHYKETWKALEALVAKGLVQALGLSNFNSRQIDDILSVASVRPAVLQVECHPYLAQNELIAHCQARGLEVTAYSPLGSSDRAWRDPDEPVLLEEPVVLALAEKYGRSPAQILLRWQVQRKVICIPKSITPSRILQNIKVFDFTFSPEEMKQLNALNKNWRYIVPMLTVDGKRVPRDAGHPLYPFNDPY

SEQ ID NO: 4569 - protein, 275 aa, Homo sapiens
  MISC_FEATURE (271): Xaa equals any of the naturally occurring L-amino acids
  MISC_FEATURE (272): Xaa equals any of the naturally occurring L-amino acids
  MISC_FEATURE (273): Xaa equals any of the naturally occurring L-amino acids
GRVGGRVGPRDPKAPGQFGRPVVVPHGKEKEAERRWKEGNFNVYLSDLIPVDRAIEDTRPAGCAEQLVHNNLPTTSVIMCFVDEVWSTLLRSVHSVINRSPPHLIKEILLVDDFSTKDYLKDNLDKYMSQFPKVRILRLKERHGLIRARLAGAQNATGDVLTFLDSHVECNVGWLEPLLERVYLSRKKVACPVIEVINDKDMSYMTVDNFQRGIFVWPMNFGWRTIPPDVIAKNRIKETDTIRCPVMAGGIGFYCQKLLFLNLEHTNPWPXXXWG

SEQ ID NO: 4570 - protein, 105 aa, Homo sapiens
  MISC_FEATURE (59): Xaa equals any of the naturally occurring L-amino acids
AHLAASLPLQAQPSAMACPLDQAIGLLVAIFHKYSGREGDKHTLSKKELKELIQKELTXGSKLQDAEIARLMEDLDRNKDQEVNFQEYVTFLGALALIYNEALKG

SEQ ID NO: 4571 - protein, 176 aa, Homo sapiens
  MISC_FEATURE (146): Xaa equals any of the naturally occurring L-amino acids
LTKGNKSWSSTAVAAALELVDPPGCRNSARAAGHEKLPVHVEDALTYLDQVKIRFGSDPATYNGFLEIMKEFKSQSIDTPGVIRRVSQLFHEHPDLIVGFNAFLPLGYRIDIPKNGKLNIQSPLTSQENSHNHGDGAEDFKQQVPXKEDKPQVPLESDSVEFNNAISYVNKIKTRF

SEQ ID NO: 4572 - protein, 136 aa, Homo sapiens
  MISC_FEATURE (3): Xaa equals any of the naturally occurring L-amino acids
HEXREHAGPKMAASRYRRFLKLCEEWPVDETKRGRDLGAYLRQRVAQAFREGENTQVAEPEACDQMYESLARLHSNYYKHKYPRPRDTSFSGLSLEEYKLILSTDTLEELKEIDKGMWKKLQEKFAPKGPEEDHKA

SEQ ID NO: 4573 - protein, 283 aa, Homo sapiens
  MISC_FEATURE (41): Xaa equals any of the naturally occurring L-amino acids
  MISC_FEATURE (101): Xaa equals any of the naturally occurring L-amino acids
KRKIMIKRHEVEQQNIREELNKKRTQKEMEHAMLIRHDESXRELEYRQLHTLQKLRMDLIRLQHQTELENQLEYNKRRERELHRKHVMELRQQPKNLKAMXMQIKKQFQDTCKVQTKQYKALKNHQLEVTPKNEHKTILKTLKDEQTRKLAILAEQYEQSINEMMASQALRLDEAQEAECQALRLQLQQEMELLNAYQSKIKMQTEAQHERELQKLEQRVSLRRAHLEQKIEEELAALQKERSERIKNLLERQEREIETFDMESLRMGFGNLVTLDFPKEDYR

SEQ ID NO: 4574 - protein, 465 aa, Homo sapiens
  MISC_FEATURE (203): Xaa equals any of the naturally occurring L-amino acids
  MISC_FEATURE (460): Xaa equals any of the naturally occurring L-amino acids
  MISC_FEATURE (461): Xaa equals any of the naturally occurring L-amino acids
KNMETEQPEETFPNTETNGEFGKRPAEDMEEEQAFKRSRNTDEMVELRILLQSKNAGAVIGKGGKNIKALRTDYNASVSVPDSSGPERILSISADIETIGEILKKIIPTLEEGLQLPSPTATSQLPLESDAVECLNYQHYKGSDFDCELRLLIHQSLAGGIIGVKGAKIKELRENTQTTIKLFQECCPHSTDRVVLIGGKPDXVVECIKIILDLISESPIKGRAQPYDPNFYDETYDYGGFTMMFDDRRGRPVGFPMRGRGGFDRMPPGRGGRPMPPSRRDYDDMSPRRGPPPPPPGRGGRGGSRARNLPLPPPPPPRGGDLMAYDRRGRPGDRYDGMVGFSADETWDSAIDTWSPSEWQMAYEPQGGSGYDYSYAGGRGSYGDLGGPIITTQVTIPKDLAGSIIGKGGQRIKQIRHESGASIKIDEPLEGSEDRIITITGTQDQIQNAQYLLQNSVSSXXLALC

SEQ ID NO: 4575 - protein, 82 aa, Homo sapiens
  MISC_FEATURE (82): Xaa equals any of the naturally occurring L-amino acids
QLGPVVGGWYKVLDRFIPGTTKVDALKKMLLDQGGFAPCFLGCFLPLVGALNGLSAQDNWPNYSGIILMPLSPTTIYGLLCX

SEQ ID NO: 4576 - protein, 63 aa, Homo sapiens
EQKSIQDLQALLWMRLITMEASNTHLSMALIFSTSWPLKMTYNFSVCFTIFYKENSILWLIEH

SEQ ID NO: 4577 - protein, 73 aa, Homo sapiens
WIPRAAGIRHEQRRGGVRENMLVKYAGRLGDTKQRFRHSKAGMRSSKLCFNKLHWRVPYSLKFGNHDPEPGWA

SEQ ID NO: 4578 - protein, 98 aa, Homo sapiens
RTKNKTLIPTFISTLAKTGLAFFSNSSFISSLPCPSLPFLSGIGSVLPIHMAASLIALVQGIRYCAFWCQVQSQVPIYEPVYKKKKIQVFEGETLHCE

SEQ ID NO: 4579 - protein, 122 aa, Homo sapiens
  MISC_FEATURE (90): Xaa equals any of the naturally occurring L-amino acids
ALGFSAEGAPFPLDGSCHVIFENSWTAPEEALFSSRKLDGGSQKWLIGRGQASFQGSAVPSWFREGRAWLSLALSLSPCLSITTFPPEEXNYLPCKARFYTDFTNCAKNRPCSQKAQCFCKE

SEQ ID NO: 4580 - protein, 89 aa, Homo sapiens
PSCQRPKSVSWCHVHTPCHFTLHLSPSFPMHAYSEHPCVGPSSASRACSAVGLFCGRKEAVSAFSDGTGVEGRSCIVALLNSPFCSILV

SEQ ID NO: 4581 - protein, 148 aa, Homo sapiens
  MISC_FEATURE (51): Xaa equals any of the naturally occurring L-amino acids
  MISC_FEATURE (52): Xaa equals any of the naturally occurring L-amino acids
  MISC_FEATURE (55): Xaa equals any of the naturally occurring L-amino acids
SNVIRNEQLPLQYLADVDTSDEESIRAHVMASHHSKRRGRASSESQGLGAXXRTXADVEEEALRRKLEELTSNVSDQETSSEEEESKDEKAEPNRDKSVGPLPQADPEVARLPIKPTDRKKAPRTLGTPSSTTGPQMRSCQSWRTEWQ

SEQ ID NO: 4582 - protein, 231 aa, Homo sapiens
ALSPAMVVPEDQLTRWHPRFNVDEVPDIEPAALPQPPATEKLTTAQEVLARARNLISPRMEKALSQLALRSAAPSSPGSPRPALPATPPATPPAASPSALKGVSQDLLERIRAKEAQKQLAQMTRCPEQEQRLQRLERLPELARVLRSVFVSERKPALSMEVACARMVGSCCTIMSPGEMEKHLLLLSELLPDWLSLHRIRTDTYVKLDKAADLAHITARLAHQTRAEEGL

SEQ ID NO: 4583 - protein, 102 aa, Homo sapiens
DPRVRHASGGFSLGGQTKWQWGPGCPLLRNGELFSPVLLWGLPCGTKCLGEELLAGLQLLFVRGQLGLVHPCSELAPKRAMLNSSPSPSRQPLSLHARGIQL

SEQ ID NO: 4584 - protein, 88 aa, Homo sapiens
  MISC_FEATURE (43): Xaa equals any of the naturally occurring L-amino acids
  MISC_FEATURE (88): Xaa equals any of the naturally occurring L-amino acids
RSIGGFFPAGLTTLLSGLKPFHTFILFFNQKSFSYKINFGQTXKKKKKKKKKKKKKKKKKKKKKKKKKKKKKKKKKKKKKKKKKGGPX

SEQ ID NO: 4585 - protein, 240 aa, Homo sapiens
PTAHCRRLGAAEARGARSWRLPVPRLCRPHSRGAKGGRPASGPLPSLSLRCCERRPLRRRPATGAMSANEDQEMELEALRSIYEGDESFRELSPVSFQYRIGENGDPKAFLIEISWTETYPQTPPILSMNAFFNNTISSAVKQSILAKLQEAVEANLGTAMTYTLFEYAKDNKEQFMENHNPINSATSISNIISIETPNTAPSSKKKDKKEQLSKAQKRNWQTKQITKENFLEAGTGLML

SEQ ID NO: 4586 - protein, 89 aa, Homo sapiens
  MISC_FEATURE (4): Xaa equals any of the naturally occurring L-amino acids
  MISC_FEATURE (5): Xaa equals any of the naturally occurring L-amino acids
DAWXXKKEKEKEKKRKGTSDMTACMKSNRVTPVKLKSRAVDILSNQQEVSRNQAVQLLLSAIVSSQKMHDDGVVGEGQFSILFKSKLPE

SEQ ID NO: 4587 - protein, 115 aa, Homo sapiens
  MISC_FEATURE (33): Xaa equals any of the naturally occurring L-amino acids
PTRPMVSSIQASMDRHLRDQSTEQSPSDLPQRXTEVVSSSAKSGSLQTGLPESFPLTGGTENLNTETTDGCVADALGAAFATRSKAQRGNSVEELEEMDSQDAEMTNTTEPMDHS

SEQ ID NO: 4588 - protein, 116 aa, Homo sapiens
  MISC_FEATURE (107): Xaa equals any of the naturally occurring L-amino acids
  MISC_FEATURE (108): Xaa equals any of the naturally occurring L-amino acids
LKNHQKTHTSEKSYKCNECRKAFSYCSGLIQCQVIHTIEKPYEYGKCGKAFRQRTDLKKHQKMHTEEKPYECNECGKAFSQSTYLTKHQKIHSEEKSNIHTECGETXXQNSSFLQQ

SEQ ID NO: 4589 - protein, 598 aa, Homo sapiens
  MISC_FEATURE (9): Xaa equals any of the naturally occurring L-amino acids
  MISC_FEATURE (144): Xaa equals any of the naturally occurring L-amino acids
ATSRQPSYXRTWCRRCCLPLALNPVPAAMAPGQLALFSVSDKTGLVEFARNLTALGLNLVASGGTAKALRDAGLAVRDVSELTGFPEMLGGRVKTLHPAVHAGILARNIPEDNADMARLDFNLIRVVACNLYPFVKTVASPGVXVEEAVEQIDIGGVTLLRAAAKNHARVTVVCEPEDYVVVSTEMQSSESKDTSLETRRQLALKAFTHTAQYDEAISDYFRKQYSKGVSQMPLRYGMNPHQTPAQLYTLQPKLPITVLNGAPGFINLCDALNAWQLVKELKEALGIPAAASFKHVSPAGAAVGIPLSEDEAKVCMVYDLYKTLTPISAAYARARGADRMSSFGDFVALSDVCDVPTAKIISREVSDGIIAPGYEEEALTILSKKKNGNYCVLQMDQSYKPDENEVRTLFGLHLSQKRNNGVVDKSLFSNVVTKNKDLPESALRDLIVATIAVKYTQSNSVCYAKNGQVIGIGAGQQSRIHCTRLAGDKANYWWLRHHPQVLSMKFKTGVKRAEISNAIDQYVTGTIGEDEDLIKWKALFEEVPELLTEAEKKEWVEKLTEVSISSDAFFPFRDNVDRAKRSGVAYIAAPPVLLLTKL

SEQ ID NO: 4590 - protein, 48 aa, Homo sapiens
CISKGEKRIGIFLFNIQFIESSTLIFLNPRSSGSYHFKRNYHQFCVSK

SEQ ID NO: 4591 - protein, 50 aa, Homo sapiens
HVFLPCSLPGRMEFYITTFLCKNNGRVELVVILAFHLALVSSIGLEIIGR

SEQ ID NO: 4592 - protein, 45 aa, Homo sapiens
GLMEIEITCKDITVFMSYILVLEIVECMIDNIFLIFIFSSNTSTV

SEQ ID NO: 4593 - protein, 125 aa, Homo sapiens
NDSNTALLHHETNPGQDPIPSHQPTSLLAAGQDVASITFHCLSPWEAAQLRLGTRPPLLGPTGKSVAATAWLTFLSSLGSGTAPPCPWLGRGEKKLSYAFPLPLVYRTSLPSQQERRPPGVSPGQ

SEQ ID NO: 4594 - protein, 342 aa, Homo sapiens
  MISC_FEATURE (9): Xaa equals any of the naturally occurring L-amino acids
  MISC_FEATURE (18): Xaa equals any of the naturally occurring L-amino acids
  MISC_FEATURE (25): Xaa equals any of the naturally occurring L-amino acids
  MISC_FEATURE (27): Xaa equals any of the naturally occurring L-amino acids
  MISC_FEATURE (45): Xaa equals any of the naturally occurring L-amino acids
  MISC_FEATURE (47): Xaa equals any of the naturally occurring L-amino acids
  MISC_FEATURE (52): Xaa equals any of the naturally occurring L-amino acids
  MISC_FEATURE (53): Xaa equals any of the naturally occurring L-amino acids
  MISC_FEATURE (55): Xaa equals any of the naturally occurring L-amino acids
  MISC_FEATURE (59): Xaa equals any of the naturally occurring L-amino acids
  MISC_FEATURE (60): Xaa equals any of the naturally occurring L-amino acids
  MISC_FEATURE (61): Xaa equals any of the naturally occurring L-amino acids
  MISC_FEATURE (279): Xaa equals any of the naturally occurring L-amino acids
ITWPTTGPXALNLQAHWXGPGSARXAXHHLEYRCAPRPPAVCWHXVXRGAKXXAXAQSXXXDTCSVQNGEDDGRNQARLGHRGTLALGSLLAQGFNVRLSGQDVGRGTFSQRHAMVVCQETDDTYIPLNHMDPNQKGFLEVSNSPLSEEAVLGFEYGMSIESPKLLPLWEAQFGDFFNGAQIIFDTFISGGEAKWLLQSGIVILLPHGYDGAGPDHSSCRIERFLQMCDSAEEGVDGDTVNMFVVHPTTPAQYFHLLRRQMVRNFRKPLIVASPKMLLXLPAAVSTLQEMAPGTTFNPVIGDSSVDPKKVKTLVFCSGKHFYSLVNKENLWGPRSMTLPSSE

SEQ ID NO: 4595 - protein, 59 aa, Homo sapiens
NLYKLKLNHELQKKSILPKLDVTTLTSLKYEVDCLKDSAYILVCTFRNIFLGKSTQHFL

SEQ ID NO: 4596 - protein, 98 aa, Homo sapiens
  MISC_FEATURE (40): Xaa equals any of the naturally occurring L-amino acids
  MISC_FEATURE (66): Xaa equals any of the naturally occurring L-amino acids
  MISC_FEATURE (90): Xaa equals any of the naturally occurring L-amino acids
VHLKAVKMVLADLGRKITSALRSLSNATIINEEVCKILYXIYMIVLLSLALGRWLIHNPRIYMYFXVDLILVGKSPKGLTVGGVYWGITXNSNYFNLP

SEQ ID NO: 4597 - protein, 72 aa, Homo sapiens
  MISC_FEATURE (40): Xaa equals any of the naturally occurring L-amino acids
  MISC_FEATURE (42): Xaa equals any of the naturally occurring L-amino acids
  MISC_FEATURE (56): Xaa equals any of the naturally occurring L-amino acids
  MISC_FEATURE (58): Xaa equals any of the naturally occurring L-amino acids
GKLGMLGQEGKVLVNPLWSNIMKVNYNSIYLSLMPQSEIXYXLGGHGCAPIQYTFXGXNLFSDHFMESLKYL

SEQ ID NO: 4598 - protein, 385 aa, Homo sapiens
  MISC_FEATURE (221): Xaa equals any of the naturally occurring L-amino acids
WIPRAAGFGTRPLPGAAGGAAGCTQRRSRELAAAAMSHQTGIQASEDVKEIFARARNGKYRLLKISIENEQLVIGSYSQPSDSWDKDYDSFVLPLLEDKQPCYILFRLDSQNAQGYEWIFIAWSPDHSHVRQKMLYAATRATLKKEFGGGHIKDEVFGTVKEDVSLHGYKKYLLSQSSPAPLTAAEEELRQIKINEVQTDVGVDTKHQTLQGVAFPISREXFQALEKLNNRQLNYVQLEIDIKNEIIILANTTNTELKDLPKRIPKDSARYHFFLYKHSHEGDYLESIVFIYSMPGYTCSIRERMLYSSCKSRLLEIVERQLQMDVIRKIEIDNGDELTADFLYEEVHPKQHAHKQSFAKPKGPAGKRGIRRLIRGPAETEATTD

SEQ ID NO: 4599 - protein, 270 aa, Homo sapiens
  MISC_FEATURE (45): Xaa equals any of the naturally occurring L-amino acids
SVTLEMESKLAAEKKQTEQLSLELEVARLQLQGLDLSSRSLLGIXTEDAIQGRNESCDISKEHTSETTERTPKHDVHQICDKDAQQDLNLDIEKITETGAVKPTGECSGEQSPDTNYEPPGEDKTQGSSECISELSFSGPNALVPMDFLGNQENIQNLQLRVKETSNENLRLLHVIEDRDRKVESLLNEMKELDSKLHLQEVQLMTKIEACIELEKIVGELKKENSDLSEKLEYFSCDHQELLQRVETSEGLNSDLEMHADKSSREDIGR

SEQ ID NO: 4600 - protein, 35 aa, Homo sapiens
  MISC_FEATURE (14): Xaa equals any of the naturally occurring L-amino acids
SSVPPKKKLAEKDXKKLFGVCSCAVHFFRFNVLCR

SEQ ID NO: 4601 - protein, 173 aa, Homo sapiens
SPARPLIRSDKMKETIMNQEKLAKLQAQVRIGGKGTARRKKKVVHRTATADDKKLQFSLKKLGVNNISGIEEVNMFTNQGTVIHFNNPKVQASLAANTFTITGHAETKQLTEMLPSILNQLGADSLTSLRRLAEALPKQSVDGKAPLATGEDDDDEVPDLVENFDEASKNEAN

SEQ ID NO: 4602 - protein, 66 aa, Homo sapiens
LCCPFHIKELLTTKAAPAFPICLSIWLAGKERTCMLVKEEVGWKKWGGTTVKSRVKPSWPKVSCRL

SEQ ID NO: 4603 - protein, 319 aa, Homo sapiens
ETMAKNPPENCEDCHILNAEAFKSKKICKSLKICGLVFGILALTLIVLFWGSKHFWPEVPKKAYDMEHTFYSNGEKKKIYMEIDPVTRTEIFRSGNGTDETLEVHDFKNGYTGIYFVGLQKCFIKTQIKVIPEFSEPEEEIDENEEITTTFFEQSVIWVPAEKPIENRDFLKNSKILEICDNVTMYWINPTLISVSELQDFEEEGEDLHFPANEKKGIEQNEQWVVPQVKVEKTRHARQASEEELPINDYTENGIEFDPMLDERGYCCIYCRRGNRYCRRVCEPLLGYYPYPYCYQGGRVICRVIMPCNWWVARMLGRV

SEQ ID NO: 4604 - protein, 86 aa, Homo sapiens
YCFAFSIETENFASQSLLFPWYCKKKKKEKEKKKENQPIIACTELKIVINRACWEKKENNCCLFFLYKREFMTKFSCEECDTCLYF

SEQ ID NO: 4605 - protein, 147 aa, Homo sapiens
FPLVLVSHQRTVMYASFVTEKFLCFQSTMRCMILFSSHFPQAPVNQGKCATDRLGEGLVVAQLEIVSKSKPPAHPEESLLWNVKCNHFFRYKTFPNNVIGFLYGKIERSCHPPAYAFISFVDLSDHLLFAQSLLNSKTVPMNGTPVM

SEQ ID NO: 4606 - protein, 59 aa, Homo sapiens
  MISC_FEATURE (3): Xaa equals any of the naturally occurring L-amino acids
TPXQFGGYAKEADYVAQATRLRAALEGTATYRGDIYFCTGYDPPMKPYGRRNEIWLLKT

SEQ ID NO: 4607 - protein, 358 aa, Homo sapiens
  MISC_FEATURE (352): Xaa equals any of the naturally occurring L-amino acids
FAVIRFESIIHEFDPWFNYRSTHHLASHGFYEFLNWFDERAWYPLGRIVGGTVYPGLMITAGLIHWILNTLNITVHIRDVCVFLAPTFSGLTSISTFLLTRELWNQGAGLLAACFIAIVPGYISRSVAGSFDNEGIAIFALQFTYYLWVKSVKTGSVFWTMCCCLSYFYMVSAWGGYVFIINLIPLHVFVLLLMQRYSKRVYIAYSTFYIVGLILSMQIPFVGFQPIRTSEHMAAAGVFALLQAYAFLQYLRDRLTKQEFQTLFFLGVSLAAGAVFLSVIYLTYTGYIAPWSGRFYSLWDTGYAKIHIPIIASVSEHQPTTWVSFFFDLHILVCTFPAGLWFCIKNINDERXFGKRGF

SEQ ID NO: 4608 - protein, 161 aa, Homo sapiens
  MISC_FEATURE (4): Xaa equals any of the naturally occurring L-amino acids
  MISC_FEATURE (87): Xaa equals any of the naturally occurring L-amino acids
ISEXSFFQNMLNLYNFSAKVMADQLRKPPSRDQWSMTPQTVNAYYLPTKNEIVFPAGILQAPFYARNHPKALNFGGIGVVMGHELTXAFDDQGREYDKEGNLRPWWQNESLAAFRNHTACMEEQYNQYQVNGERLNGRQTLGENIADNGGLKLPTMLTKHG

SEQ ID NO: 4609 - protein, 59 aa, Homo sapiens
  MISC_FEATURE (25): Xaa equals any of the naturally occurring L-amino acids
AQVVVLVMSLTTLWTLDKLLLCVCXLICKMKIISVSYRYSLNRDNYTYFKVVKYTITTR

SEQ ID NO: 4610 - protein, 44 aa, Homo sapiens
DQPGQHSKTPSLQKNLKISQVWWHAPVVPATRDAEVRGSLEPGR

SEQ ID NO: 4611 - protein, 397 aa, Homo sapiens
  MISC_FEATURE (271): Xaa equals any of the naturally occurring L-amino acids
  MISC_FEATURE (392): Xaa equals any of the naturally occurring L-amino acids
  MISC_FEATURE (395): Xaa equals any of the naturally occurring L-amino acids
  MISC_FEATURE (396): Xaa equals any of the naturally occurring L-amino acids
SHGPAAGPRSALQHNKMANQVNGNAVQLKEEEEPMDTSSVTHTEHYKTLIEAGLPQKVAERLDEIFQTGLVAYVDLDERAIDALREFNEEGALSVLQQFKESDLSHVQNKSAFLCGVMKTYRQREKQGSKVQESTKGPDEAKIKALLERTGYTLDVTTGQRKYGGPPPDSVYSGVQPGIGTEVFVGKIPRDLYEDELVPLFEKAGPIWDLRLMMDPLSGQNRGYAFITFCGKEAAQEAVKLCDSYEIRPGKHLGVCISVANNRLFVGSIPXNKTKENILEEFSKVTEGLVDVILYHQPDDKKKNRGFCFLEYEDHKSAAQARRRLMSGKVKVWGNVVTVEWADPVEEPDPEVMAKVKVLFVRNLATTVTEEILEKSFSEFGKLERVKKLKVXAAXXN

SEQ ID NO: 4612 - protein, 355 aa, Homo sapiens
  MISC_FEATURE (2): Xaa equals any of the naturally occurring L-amino acids
  MISC_FEATURE (66): Xaa equals any of the naturally occurring L-amino acids
  MISC_FEATURE (131): Xaa equals any of the naturally occurring L-amino acids
  MISC_FEATURE (253): Xaa equals any of the naturally occurring L-amino acids
KXHLLYRPLEQQHGVIPDRDAEFCLFDRVVNVRENFSVPVGLRGTIIGIKGANREADVLFEVLFDXEFPGGLTIRCSPGRGYRLPTSALVNLSHGSRSETGNQKLTAIVKPQPAVHQHSSSSSVSSGHLGXLNHSPQSLFVPTQVPTKDDDEFCNIWQSLQGSGKMQYFEPTIQEKGAVLPQEISQVNQHHKSGFNDNSVKYQQRKHDPHRKFKEECKSPKAECWSQKMSNKQPNSGIENFLASLNISKENEXQSSHHGEPPSEEHLSPQSFAMKGTRMLKEILKIDGSNTVDHKNEIKQIANEIPVSSNRRDEYGLPSQPKQNKKLASYMNKPHSANEYHNVQSMDNMCWPAPS

SEQ ID NO: 4613 - protein, 385 aa, Homo sapiens
  MISC_FEATURE (42): Xaa equals any of the naturally occurring L-amino acids
HRRYSVASQVPSGCTLEDHTRFLFGCQRPPHPPLSWEKDGGXVRQDLAQLMNSSGSHKDLAGKYRQILEKAIQLSGAEQLEALKAFVEAMVNENVSLVISRQLLTDFCTHLPNLPDSTAKEIYHFTLEKIQPRVISFEEQVASIRQHLASIYEKEEDWRNAAQVLVGIPLETGQKQYNVDYKLETYLKIARLYLEDDDPVQAEAYINRASLLQNESTNEQLQIHYKVCYARVLDYRRKFIEAAQRYNELSYKTIVHESERLEALKHALHCTILASAGQQRSRMLATLFKDERCQQLAAYGILEKMYLDRIIRGNQLQEFAAMLMPHQKATTADGSSILDRAVIEHNLLSASKLYNNITFEELGALLEIPAAKAEKIASQMITEDV

SEQ ID NO: 4614 - protein, 120 aa, Homo sapiens
AHGQIEGKALTHDHTAEKWQRQDLNLEPLAPHTSNLNHSPYNTTYVVKMCGGHAINVGPFTVAGRGRNLQFLRVLLLRCPPVLGHSCSLPCPAWSHPPSANRSLGRVLWALIRPWQGRSS

SEQ ID NO: 4615 - protein, 390 aa, Homo sapiens
  MISC_FEATURE (52): Xaa equals any of the naturally occurring L-amino acids
TSVAAAAARGRAGCPLTAASAARFKMAACSHSFSAERLLTFIVFSARFDRLXPAALSGIFYQAEMHRTTRIKITELNPHLMCVLCGGYFIDATTIIECLHSFCKTCIVRYLETSKYCPICDVQVHKTRPLLNIRSDKTLQDIVYKLVPGLFKNEMKRRRDFYAAHPSADAANGSNEDRGEVADEDKRIITDDEIISLSIEFFDQNRLDRKVNKDKEKSKEEVNDKRYLRCPAAMTVMHLRKFLRSKMDIPNTFQIDVMYEEEPLKDYYTLMDIAYIYTWRRNGPLPLKYRVRPTCKRMKISHQRDGLTNAGELESDSGSDKANSPAGGIPSTSSCLPSPSTPVQSPHPQFPHISSTMNGTSNSPSGNHQSSFANRPRKSSVNGSSATSSG

SEQ ID NO: 4616 - protein, 197 aa, Homo sapiens
LTGLSISSTPPAVSSVLSTGVPTVPLLPPQVNQSLTSVPPMNPATTLPGLMPLPAGLPNLPNLNLNLPAPHIMPGVGLPELVNPGLPPLPSMPPRNLPGIAPLPLPSEFLPSFPLVPESSSAASSGELLSSLPPTSNAPSDPATTTAKADAASSLTVDVTPPTAKAPTTVEDRVGDSTPVSEKPVSAAVDANASESP

SEQ ID NO: 4617 - protein, 96 aa, Homo sapiens
LMFYVLFWTLSSCKNFYKNCFLHPCGAYSSEPSPQSQCLCFLFYFCSIRFLLLLCLKSSLGSYQGFSFCVAFAAWIKHWLTVLMCEEKKFSKAGEL

SEQ ID NO: 4618 - protein, 298 aa, Homo sapiens
  MISC_FEATURE (26): Xaa equals any of the naturally occurring L-amino acids
  MISC_FEATURE (79): Xaa equals any of the naturally occurring L-amino acids
  MISC_FEATURE (89): Xaa equals any of the naturally occurring L-amino acids
PCAWRAARGGPCAAPLGLRERGRVSXRLLGPAAARALLLGLPGRTLEAASGRSWLAAARDRPAEPLFGRGEGGSQASGXAGAAAEAPGXQWGPASTPSLYENPWTIPNMLSMTRIGLAPVLGYLIIEEDFNIALGVFALAGLTDLLDGFIARNWANQRSALGSALDPLADKILISILYVSLTYADLIPVPLTYMIISRDVMLIAAVFYVRYRTLPTPRTLAKYFNPCYATARLKPTFISKVNTAVQLILVAASLAAPVFNYADSIYLQILWCFTAFTTAASAYSYYHYGRKTVQVIKD

SEQ ID NO: 4619 - protein, 279 aa, Homo sapiens
EGPAEGNMAAKVFESIGKFGLALAVAGGVVNSALYNVDAGHRAVIFDRFRGVQDIVVGEGTHFLIPWVQKPIIFDCRSRPRNVPVITGSKDLQNVNITLRILFRPVASQLPRIFTSIGEDYDERVLPSITTEILKSVVARFDAGELITQRELVSRQVSDDLTERAATFGLILDDVSLTHLTFGKEFTEAVEAKQVAQQEAERARFVVEKAEQQKKAAIISAEGDSKAAELIANSLATAGDGLIELRKLEAAEDIAYQLSRSRNITYLPAGQSVLLQLPQ

SEQ ID NO: 4620 - protein, 406 aa, Homo sapiens
VTACAAPAAWLPILVADIWSSYNMADIDNKEQSELDQDLDDVEEVEEEETGEETKLKARQLTVQMMQNPQILAALQERLDGLVETPTGYIESLPRVVKRRVNALKNLQVKCAQIEAKFYEEVHDLERKYAVLYQPLFDKRFEIINAIYEPTEEECEWKPDEEDEISEELKEKAKIEDEKKDEEKEDPKGIPEFWLTVFKNVDLLSDMVQEHDEPILKHLKDIKVKFSDAGQPMSFVLEFHFEPNEYFTNEVLTKTYRMRSEPDDSDPFSFDGPEIMGCTGCQIDWKKGKNVTLKTIKKKQKHKGRGTVRTVTKTVSNDSFFNFFAPPEVPESGDLDDDAEAILAADFEIGHFLRERIIPRSVLYFTGEAIEDDDDDYDEEGEEADEGYQLFEEVKSCSKLFQRWLQ

SEQ ID NO: 4621 - protein, 126 aa, Homo sapiens
GVVKSLLFTRCNVLVPYKQGWGGEGRAKTNIEILKQQQSEWILFFVIVGGLKNSPHVIIVNTLLCGHCNIWGVGQGGKVTIVHMSLASVQSSVQNVMLFCKKRFMIFKINLVNLFLVVIFFLRQSF

SEQ ID NO: 4622 - protein, 94 aa, Homo sapiens
  MISC_FEATURE (55): Xaa equals any of the naturally occurring L-amino acids
QELRSPSRSPSPPPKSPPWTTGGSLCEQLAFRKPLSVFKQKVEGATKQAAVRASXCRPLPCSSSSFASASSVMFCLEFYLDFFSGYFSVFQPLL

SEQ ID NO: 4623 - protein, 69 aa, Homo sapiens
  MISC_FEATURE (37): Xaa equals any of the naturally occurring L-amino acids
  MISC_FEATURE (59): Xaa equals any of the naturally occurring L-amino acids
  MISC_FEATURE (63): Xaa equals any of the naturally occurring L-amino acids
KKSLRCEYRIDIERLYMSKTHLSSSHRPLQSGHVGQXGTGAGDAPPGQNAPFVALPDTXYLLXKRETGS

SEQ ID NO: 4624 - protein, 165 aa, Homo sapiens
DPRTMNLAISIALLLTVLQVSRGQKVTSLTACLVDQSLRLDCRHENTSSSPIQYEFSLTRETKKHVLFGTVGVPEHTYRSRTNFTSKYNMKVLYLSAFTSKDEGTYTCALHHSGHSPPISSQNVTVLRDKLVKCEGISLLAQNTSWLLLLLLSLSLLQATDFMSL

SEQ ID NO: 4625 - protein, 85 aa, Homo sapiens
  MISC_FEATURE (76): Xaa equals any of the naturally occurring L-amino acids
SLCFIDGKYHKQIKIEENATGFSYESLFREYLNETVTEVWIEDPYIRHTHQGIDQVQQSRGLQEIEESLRSHGSAXGRSILFFNT

SEQ ID NO: 4626 - protein, 366 aa, Homo sapiens
PGSTHASGKIQNKWLRPSPRSHRTPESGRVLSLFRLPPPGMALSGSTPAPCWEEDECLDYYGMLSLHRMFEVVGGQLTECELELLAFLLDEAPGAAGGLARARSGLELLLELERRGQCDESNLRLLGQLLRVLARHDLLPHLARKRRRPVSPERYSYGTSSSSKRTEGSCRRRRQSSSSANSQQGQWETGSPPTKRQRRSRGRPSGGARRRRRGAPAAPQQQSEPARPSSEGKVTCDIRLRVRAEYCEHGPALEQGVASRRPQALARQLDVFGQATAVLRSRDLGSVVCDIKFSELSYLDAFWGDYLSGALLQALRGVFLTEALREAVGREAVRLLVSVDEADYEAGRRRLLLMEEEGGRRPTEAS

SEQ ID NO: 4627 - protein, 482 aa, Homo sapiens
REQKLELHRGGGRSRTSGSPGLQEFGTSMVLQTTKGLRLLFDGDAHLLMSIPSPFRGRLCGLCGNFNGNWSDDFVLPNGSAASSVETFGAAWRVPGSSKGCGEGCGPQGCPVCLAEETAPYESNEACGQLRNPQGPFATCQAVLSPSEYFRQCVYDLCAQKGDKAFLCRSLAAYTAACQAAGVAVKPWRTDSFCPLHCPAHSHYSICTRTCQGSCAALSGLTGCTTRCFEGCECDDRFLLSQGVCIPVQDCGCTHNGRYLPVNSSLLTSDCSERCSCSSSSGLTCQAAGCPPGRVCEVKAEARNCWATRGLCVLSVGANLTTFDGARGATTSPGVYELSSRCPGLQNTIPWYRVVAEVQICHGKTEAVGQVHIFFQDGMVTLTPNKGVWVNGLRVDLPAEKLASVSVSRTPDGSLLVRQKAGVQVWLGANGKVAVIVSNDHAGKLCGACGNFDGDQTNDWHDSQEKPAMEKWRAQDFSPCYG

SEQ ID NO: 4628 - protein, 552 aa, Homo sapiens
TVGSDRDTLAKRLPAAASGGTSICSGLRSAFTVIRKKYPTDGSEIVLLTDGEDNTISGCFNEVKQSGAIIHTVALGPSAAQELEELSKMTGGLQTYASDQVQNNGLIDAFGALSSGNGAVSQRSIQLESKGLTLQNSQWMNGTVIVDSTVGKDTLFLITWTTQPPQILLWDPSGQKQGGFVVDKNTKMAYLQIPGIAKVGTWKYSLQASSQTLTLTVTSRASNATLPPITVTSKTNKDTSKFPSPLVVYANIRQGASPILRASVTALIESVNGKTVTLELLDNGAGADATKDDGVYSRYFTTYDTNGRYSVKVRALGGVNAARRRVIPQQSGALYIPGWIENDEIQWNPPRPEINKDDVQHKQVCFSRTSSGGSFVASDVPNAPIPDLFPPGQITDLKAEIHGGSLINLTWTAPGDDYDHGTAHKYIIRISTSILDLRDKFNESLQVNTTALIPKEANSEEVFLFKPETITFENGTDLFIAIQAVDKVDLKSEISNIARVSLFIPPQTPPETPSPDETSAPCPNIHINSTIPGIHILKIMWKWIGELQLSIA

SEQ ID NO: 4629 - protein, 501 aa, Homo sapiens
  MISC_FEATURE (179): Xaa equals any of the naturally occurring L-amino acids
GTSGGGAGAMAVLLETTLGDVVIDLYTEERPRACLNFLKLCKIKYYNYCLIHNVQRDFIIQTGDPTGTGRGGESIFGQLYGDQASFFEAEKVPRIKHKKKGTVSMVNNGSDQHGSQFLITTGENLDYLDGVHTVFGEVTEGMDIIKKINETFVDKDFVPYQDIRINHTVILDDPFDDPXDLLIPDRSPEPTREQLDSGRIGADEEIDDFKGRSAEEVEEIKAEKEAKTQAILLEMVGDLPDADIKPPENVLFVCKLNPVTTDEDLEIIFSRFGPIRSCEVIRDWKTGESLCYAFIEFEKEEDCEKAFFKMDNVLIDDRRIHVDFSQSVAKVKWKGKGGKYTKSDFKEYEKEQDKPPNLVLKDKVKPKQDTKYDLILDEQAEDSKSSHSHTSKKHKKKTHHCSEEKEDEDYMPIKNTNQDIYREMGFGHYEEEESCWEKQKSEKRDRTQNRSRSRSRERDGHYSNSHKSKYQTDLYERERSKKRDRSRSPKKSKDKEKSKYR

SEQ ID NO: 4630 - protein, 63 aa, Homo sapiens
NFLLFTNSDEIQFFRRLSFLEQATSLPLECPITYSSTFSFCSRCLLKRSGAVGGYAHLSSSVQ

SEQ ID NO: 4631 - protein, 50 aa, Homo sapiens
SQHFGRPRWTDHLRSGVRDQPGQHGQTWSLLKIQKLAGVARCRAVWGRHG

SEQ ID NO: 4632 - protein, 81 aa, Homo sapiens
GTRWPCGKHKRVLIFPSYMTTVIDYVKPSDLKKDMNETFKEKFPHIKLTLSKIRSLKREMRNLRRRTVALRSPRWPWPRLL

SEQ ID NO: 4633 - protein, 139 aa, Homo sapiens
SQHFLSLPLWFEGYGLLQYISSFKSCHCFVGPQLIGPQNKPCCFAHTLAFFCTFHSGWAWPKQAQAKDLPSCMYFQYPETVFGDIMPRVNKPDLGTALSRGFTHEINKTYLSHLKLGSQKTHFWFIISFYAHLTLIIYP

SEQ ID NO: 4634 - protein, 90 aa, Homo sapiens
GTRRHPAPSAGCASGAEVRDKMVPPVQVSPLIKLGRYSALFLGVAYGATRYNYLKPRAEEERRIAAEEKKKQDELKRIARELAEDDSILK

SEQ ID NO: 4635 - protein, 328 aa, Homo sapiens
QATGGPELASSVLSPLLNKDTIDFLNYTVNGDERQLWMSLGGTWMKARAEWPKEQFIPPYVPRFRNGWEPPMLNFMGATMEQDLYQLAESVANVAEHQRKQEIKRLSTEHSSVSEYHPADGYAFSSNIYTRGSHLDQGEAAVAFKPTSNRHIDRNYEPLKTQPKKYAKSKYDFVARNNSELSVLKDDILEILDDRKQWWKVRNASGDSGFVPNNILDIVRPPESGLGRADPPYTHTIQKQRMEYGPRPADTPPAPSPPPTPAPVPVPLPPSTPAPVPVSKVPANITRQNSSSSDSGGSIVRDSQRHKQLPVDRRNLRWRKCKMNSSTD

SEQ ID NO: 4636 - protein, 578 aa, Homo sapiens
  MISC_FEATURE (12): Xaa equals any of the naturally occurring L-amino acids
  MISC_FEATURE (36): Xaa equals any of the naturally occurring L-amino acids
  MISC_FEATURE (74): Xaa equals any of the naturally occurring L-amino acids
  MISC_FEATURE (81): Xaa equals any of the naturally occurring L-amino acids
  MISC_FEATURE (89): Xaa equals any of the naturally occurring L-amino acids
GVGDGQAPMPGXTEEPRPPEQQDQEGGEAAKAAPEXPQQRPPEAVAAAPAGTTSSRVLRGGRDRGRAAAARRRXSCVPPEXGRVSPPAXEQPQRQASRRPRAAAQAAKSPSPVQGKKSPRLLCIEKVTTDKDPKEEKEEEDDSALPQEVSIAASRPSRGWRSSRTSVSRHRDTENTRSSRSKTGSLQLICKSEPNTDQLDYDVGEEHQSPGGISSEEEEEEEEEMLISEEEIPFKDDPRDETYKPHLERETPKPRRKSGKVKEEKEKKEIKVEVEVEVKEEENEIREDEEPPRKRGRRRKDDKSPRLPKRRKKPPIQYVRCEMEGCGTVLAHPRYLQHHIKYQHLLKKKYVCPHPSCGRLFRLQKQLLRHAKHHTDQRDYICEYCARAFKSSHNLAVHRMIHTGEKPLQCEICGFTCRQKASLNWHMKKHDADSFYQFSCNICGKKFEKKDSVVAHKAKSHPEVLIAEALAANAGALITSTDILGTNPESLTQPSDGQGLPLLPEPLGNSTSGECLLLEAEGMSKSYCSGTERVSLMADGKIFVGSGSSGGTEGLVMNSDILGATTEVLIEDSDSAGP

SEQ ID NO: 4637 - protein, 263 aa, Homo sapiens
KIMASPDWGYDDKNGPEQWSKLYPIANGNNQSPVDIKTSETKHDTSLKPISVSYNPATAKEIINVGHSFHVNFEDNDNRSVLKGGPFSDSYRLFQFHFHWGSTNEHGSEHTVDGVKYSAELHVAHWNSAKYSSLAEAASKADGLAVIGVLMKVGEANPKLQKVLDALQAIKTKGKRAPFTNFDPSTLLPSSLDFWTYPGSLTHPPLYESVTWIICKESISVSSEQLAQFRSLLSNVEGDNAVPMQHNNRPTQPLKGRTVRASF

SEQ ID NO: 4638 - protein, 301 aa, Homo sapiens
  MISC_FEATURE (156): Xaa equals any of the naturally occurring L-amino acids
  MISC_FEATURE (185): Xaa equals any of the naturally occurring L-amino acids
ADAWGRTAELTVTAALTREFLEPKLFSTEDKQAAETMGSPSACPYRVCIPWQGLLLTASLLTFWNLPNSAQTNIDVVPFNVAEGKEVLLVVHNESQNLYGYNWYKGERVHANYRIIGYVKNISQENAPGPAHNGRETIYPNGTLLIQNVTHNDAGXYTLHVIKENLVNEEVTRQFYVFSEPPKPXITSNNFNPVENKDIVVLTCQPETQNTTYLWWVNNQSLLVSPRLLLSTDNRTLVLLSATKNDIGPYECEIQNPVGASRSDPVTLNVRYESVQASSPDLSAGTAVSIMIGVLAGMALI

SEQ ID NO: 4639 - protein, 256 aa, Homo sapiens
PAGAGCRAGERAGQAKALVPARCGPQSAAMGASARLLRAVIMGAPGSGKGTVSSRITTHFELKHLSSGDLLRDNMLRGTEIGVLAKAFIDQGKLIPDDVMTRLALHELKNLTQYSWLLDGFPRTLPQAEALDRAYQIDTVINLNVPFEVIKQRLTARWIHPASGRVYNIEFNPPKTVGIDDLTGEPLIQREDDKPETVIKRLKAYEDQTKPVLEYYQKKGVLETFSGTETNKIWPYVYAFLQTKVPQRSQKASVTP

SEQ ID NO: 4640 - protein, 102 aa, Homo sapiens
DWGLARSRPGCKCCGGRKSRPHRRGSAVMPKYYEDKPQAARCAGLKEDLGACLLQSDCVVQEGKSPRQCLKEGYCNSLKYAFFECKRSVLDNRARFRGRKGY

SEQ ID NO: 4641 - protein, 466 aa, Homo sapiens
EHQEIMNNFGNEEFDCHFLDEGFTAKDILDQKINEVSSSDDKDAFYVADLGDILKKHLRWLKALPRVTPFYAVKCNDSKAIVKTLAATGTGFDCASKTEIQLVQSLGVPPERIIYANPCKQVSQIKYAANNGVQMMTFDSEVELMKVARAHPKAKLVLRIATDDSKAVCRLSVKFGATLRTSRLLLERAKELNIDVVGVSFHVGSGCTDPETFVQAISDARCVFDMGAEVGFSMYLLDIGGGFPGSEDVKLKFEEITGVINPALDKYFPSDSGVRIIAEPGRYYVASAFTLAVNIIAKKIVLKEQTGSDDEDESSEQTFMYYVNDGVYGSFNCILYDHAHVKPLLQKRPKPDEKYYSSSIWGPTCDGLDRIVERCDLPEMHVGDWMLFENMGAYTVAAASTFNGFQRPTIYYVMSGPAWQLMQQFQNPDFPPEVEEQDASTLPVSCAWESGMKRHRAACASASINV

SEQ ID NO: 4642 - protein, 178 aa, Homo sapiens
NSARGHCWLRLRSGPWISSKMAARSVSGITRRVFMWTVSGTPCREFWSRFRKEKEPVVVETVEEKKEPILVCPPLRSRAYTPPEDLQSRLESYVKEVFGSSLPSNWQDISLEDSRLKFNLLAHLADDLGHVVPNSRLHQMCRVRDVLDFYNVPIQDRSKFDELSASNLPPNLKITWSY

SEQ ID NO: 4643 - protein, 273 aa, Homo sapiens
RPAPAGARPPLIPDPAVGAMAEAVLRVARRQLSQRGGSGAPILLRQMFEPVSCTFTYLLGDRESREAVLIDPVLETAPRDAQLIKELGLRLLYAVNTHCHADHITGSGLLRSLLPGCQSVISRLSGAQADLHIEDGDSIRFGRFALETRASPGHTPGCVTFVLNDHSMAFTGDALLIRGCGRTDFQQGCAKTLYHSVHEKIFTLPGDCLIYPAHDYHGFTVSTVEEERTLNPRLTLSCEEFVKIMGNLNLPKPQQIDFAVPANMRCGVQTPTA

SEQ ID NO: 4644 - protein, 311 aa, Homo sapiens
  MISC_FEATURE (16): Xaa equals any of the naturally occurring L-amino acids
VTSEGVRVRSSRGRAXGVWRFERDEDGTGAGCGQWTRFCREPKMAVNVYSTSVTSDNLSRHDMLAWINESLQLNLTKIEQLCSGAAYCQFMDMLFPGSIALKKVKFQAKLEHEYIQNFKILQAGFKRMGVDKIIPVDKLVKGKFQDNFEFVQWFKKFFDANYDGKDYDPVAARQGQETAVAPSLVAPALNKPKKPLTSSSAAPQRPISTQRTAAAPKAGPGVVRKNPGVGNGDDEAAELMQQVNVLKLTVEDLEKERDFYFGKLRNIELICQENEGENDPVLQRIVDILYATDEGFVIPDEGGPQEEQEEY

SEQ ID NO: 4645 - protein, 367 aa, Homo sapiens
  MISC_FEATURE (5): Xaa equals any of the naturally occurring L-amino acids
NAMRXSGDAFDIQRCYCNYTTDVVASVAFGTPVDSWQAPEDPFVKHCKRFFEFCIPRPILVLLLSFPSIMVPLARILPNKNRDELNGFFNKLIRNVIALRDQQAAEERRRDFLQMVLDARHSASPMGVQDFDIVRDVFSSTGCKPNPSRQHQPSPMARPLTVDEIVGQAFIFLIAGYEIITNTLSFATYLLATNPDCQEKLLREVDVFKEKHMAPEFCSLEEGLPYLDMVIAETLRMYPPAFRFTREAAQDCEVLGQRIPAGAVLEMAVGALHHDPEHWPSPETFNPERFTAEARQQHRPFTYLPFGAGPRSCLGVRLGLLEVKLTLLHVLHKFRFQACPETQVPLQLESKSALGPKNGVYIKIVSR

SEQ ID NO: 4646 - protein, 198 aa, Homo sapiens
  MISC_FEATURE (12): Xaa equals any of the naturally occurring L-amino acids
VVCQSRRRRRRXRRRRSTVIRPPRRGVGGLRGTFFFFRLTAGQLRSMSTPARRRLMRDFKRLQEDPPVGVSGAPSENNIMQWNAVIFGPEGTPFEDGTFKLVIEFSEEYPNKPPTVRFLSKMFHPNVYADGSICLDILQNRWSPTYDVSSILTSIQSLLDEPNPNSPANSQAAQLYQENKREYEKRVSAIVEQSWNDS

SEQ ID NO: 4647 - protein, 69 aa, Homo sapiens
  MISC_FEATURE (29): Xaa equals any of the naturally occurring L-amino acids
  MISC_FEATURE (39): Xaa equals any of the naturally occurring L-amino acids
LFFMVSNMYDQCSHCFKMYRVNINTSYAXKKKKKGGRSXGSKLTYACMRRHSSSIVSPKFNSLAVVLQR

SEQ ID NO: 4648 - protein, 77 aa, Homo sapiens
LYCFSSVLEKKINPAITFWNCLDFSAVQAISNIVLCRECHCSFECIHVWVLIIVYFLWGWKRKTIQAEKSILKDAFL

SEQ ID NO: 4649 - protein, 617 aa, Homo sapiens
GTRECPLCLVRLPPERAPRLLSCPHRSCRDCLRHYLRLEISESRVPISCPECSERLNPHDIRLLLADPPLMHKYEEFMLRRYLASDPDCRWCPAPDCGYAVIAYGCASCPKLTCEREGCQTEFCYHCKQIWHPNQTCDMARQQRAQTLRVRTKHTSGLSYGQESGPDDIKPCPRCSAYIIKMNDGSCNHMTCAVCGCEFCWLCMKEISDLHYLSPSGCTFWGKKPWSRKKKILWQLGTLIGAPVGISLIAGIAIPAMVIGIPVYVGRKIHSRYEGRKTSKHKRNLAITGGVTLSVIASPVIAAVSVGIGVPIMLAYVYGVVPISLCRGGGCGVSTANGKGVKIEFDEDDGPITVADAWRALKNPSIGESSIEGLTSVLSTSGSPTDGLSVMQGPYSETASFAALSGGTLSGGILSSGKGKYSRLEVQADVQKEIFPKDTASLGAISDNASTRAMAGSIISSYNPQDRECNNMEIQVDIEAKPSHYQLVSGSSTEDSLHVHAQMAENEEEGSGGGGSEEDPPCRHQSCEQKDCLASKPWDISLAQPESIRSDLESSDAQSDDVPDITSDECGSPRSHTAACPSTPRAQGAPSPSAHMNLSALAEGQTVLKPEGGEARV

SEQ ID NO: 4650 - protein, 155 aa, Homo sapiens
RWRGSMSGSMATAEASGSDGKGQEVETSVTYYRLEEVAKRNSLKELWLVIHGRVYDVTRFLNEHPGGEEVLLEQAGVDASESFEDVGHSSDAREMLKQYYIGDIHPSDLKPESGSKDPSKNDTCKSCWAYWILPIIGAVLLGFLYRYYTSESKSS

SEQ ID NO: 4651 - protein, 46 aa, Homo sapiens
SQTPHYSSLELLIKENWKYICPCLNFIALICVISLLTGRGTSFFPY

SEQ ID NO: 4652 - protein, 348 aa, Homo sapiens
  MISC_FEATURE (99): Xaa equals any of the naturally occurring L-amino acids
  MISC_FEATURE (335): Xaa equals any of the naturally occurring L-amino acids
VEWNRLFAGLLEEQRQRSEDSMYTAIPQSGSPFPGSVQDPGLHVWRVEKLKPVPVAQENQGVFFSGDSYLVLHNGPEEVSHLHLNTLLGERPVQHREVXGNESDLFMSYFPRGLKYQEGGVESAFHKTSTGAPAAIKKLYQVKGKKNIRATERALNWDSFNTGDCFILDLGQNIFAWCGGKSNILERNKARDLALAIRDSERQGKAQVEIVTDGEEPAEMIQVLGPKPALKEGNPEEDLTADKANAQAAALYKVSDATGQMNLTKVADSSPFALELLISDDCFVLDNGLCGKIYIWKGRKANEKERQAALQVAEGFISRMQYAPNTQVEILPQGXESPIFKQFFKDWK

SEQ ID NO: 4653 - protein, 389 aa, Homo sapiens
  MISC_FEATURE (376): Xaa equals any of the naturally occurring L-amino acids
FQGKIDAAYFETSKYLLDVLNKKYSLLDHMQAMRRYLLLGQGDFIRHLMDLLKPELVRPATTLYQHNLTGILETAVRATNAQFDSPEILRRLDVRLLEVSPGDTGWDVFSLDYHVDGPIATVFTRECMSHYLRVFNFLWRAKRMEYILTDIRKGHMCNAKLLRNMPEFSGVLHQCHILASEMVHFIHQMQYYITFEVLECSWDELWNKVQQAQDLDHIIAAHEVFLDTIISRCLLDSDSRALLNQLRAVFDQIIELQNAQDAIYRAALEELQRRLQFEEKKKQREIEGQWGVTAAEEEEENKRIGEFKESIPKMCSQLRILTHFYQGIVQQFLVLLTTSSDESLRFLSFRLDFNEHYKAREPRLRCVSGYQGAAQXPHVKLAVLPGSCG

SEQ ID NO: 4654 - protein, 40 aa, Homo sapiens
FCPSRLCFLPFLCSRAAISRDPFYEMLAARKKKVSSTKRH

SEQ ID NO: 4655 - protein, 353 aa, Homo sapiens
RKQCQDSKDSNHLPKMSLSAFTLFLALIGGTSGQYYDYDFPLSIYGQSSPNCAPECNCPESYPSAMYCDELKLKSVPMVPPGIKYLYLRNNQIDHIDEKAFENVTDLQWLILDHNLLENSKIKGRVFSKLKQLKKLHINHNNLTESVGPLPKSLEDLQLTHNKITKLGSFEGLVNLTFIHLQHNRLKEDAVSAAFKGLKSLEYLDLSFNQIARLPSGLPVSLLTLYLDNNKISNIPDEYFKRFNALQYLRLSHNELADSGIPGNSFNVSSLVELDLSYNKLKNIPTVNENLENYYLEVNQLEKFDIKSFCKILGPLSYSKIKHLRLDGNRISETSLPPDMYECLRVANEVTLN

SEQ ID NO: 4656 - protein, 54 aa, Homo sapiens
  MISC_FEATURE (21): Xaa equals any of the naturally occurring L-amino acids
  MISC_FEATURE (43): Xaa equals any of the naturally occurring L-amino acids
EEQKGEINGKTKNTQICGFGXNETRFIYLKKCWCSNTKHYFHXEKITYLLPSVL

SEQ ID NO: 4657 - protein, 38 aa, Homo sapiens
NMYSGRLQWLTPVIPALWQAEMGGSFEVRSLRPAWPTW

SEQ ID NO: 4658 - protein, 515 aa, Homo sapiens
GEWPKSLRIPEGPIDQGPAIGRVRVLEEQLVKAKEQIENYKKQTRNGLGKDHEILRRRIENGAKELWFFLQSELKKLKNLEGNELQRHADEFLLDLGHHERSIMTDLYYLSQTDGAGDWREKEAKDLTELVQRRITYLQNPKDCSKAKKLVCNINKGCGYGCQLHHVVYCFMIAYGTQRTLILESQNWRYATGGWETVFRPVSETCTDRSGISTGHWSGEVKDKNVQVVELPIVDSLHPRPPYLPLAVPEDLADRLVRVHGDPAVWWVSQFVKYLIRPQPWLEKEIEEATKKLGFKHPVIGVHVRRTDKVGTEAAFHPIEEYMVHVEEHFQLLARRMQVDKKRVYLATDDPSLLKEAKTKYPNYEFISDNSISWSAGLHNRYTENSLRGVILDIHFLSQADFLVCTFSSQVCRVAYEIMQTLHPDASANFHSLDDIYYFGGQNAHNQIAIYAHQPRTADEIPMEPGDIIGVAGNHWDGYSKGVNRKLGRTGLYPSYKVREKIETVKYPTYPEAEK

SEQ ID NO: 4659 - protein, 47 aa, Homo sapiens
AAGVPVFDFSVNMLFVHISTWWRPYSLFHLPNNGKNIKVNQCALGIQ

SEQ ID NO: 4660 - protein, 38 aa, Homo sapiens
CIVIIYDRSSHFFLLKKITLSPVGNGILWAFKRKFYET

SEQ ID NO: 4661 - protein, 171 aa, Homo sapiens
GTSYGLPRYRWLTHAWNFFQREFKCCGVVYFTDWLEMTEMDWPPDSCCVREFPGCSKQAHQEDLSDLYQEGCGKKMYSFLRGTKQLQVLRFLGISIGVTQILAMILTITLLWALYYDRREPGTDQMMSLKNDNSQHLSCPSVELLKPSLSRIFEHTSMANSFNTHFEMEEL

SEQ ID NO: 4662 - protein, 200 aa, Homo sapiens
SLGELPTDPSSDEPVFHISHIDRVYTLRTDNINERTTWVQKIKAASEQYIDTEKKKREKAYQARSQKTSGIGRLMVHVIEATELKACKPNGKSNPYCEISMGSQSYTTRTIQDTLNPKWNFNCQFFIKDLYQDVLCLTLFDRDQFSPDDFLGRTEIPVAKIRTEQESKGPMTRRLLLHEVPTGEVWVRFDLQLFEQKTLL

SEQ ID NO: 4663 - protein, 91 aa, Homo sapiens
VSPGGQQGLHFSEGLEGLVELLGQRSRSRENIRPSDLSSALRALPESSSRGLQSLRKPSQRAAPTSQAVCTSPCYALLCNILQQSAVHGVC

SEQ ID NO: 4664 - protein, 44 aa, Homo sapiens
SQHFARPRRVDHLRSGVRDQPDQHGETPSLLKIQKLAWHGGACL

SEQ ID NO: 4665 - protein, 76 aa, Homo sapiens
TLRVRTGSYSSLCAFLMLQRIYHLMEENICKLAPYQAPSTYSTHLNFECRIFKLQPHILRSRKNLMGINLHPLALP

SEQ ID NO: 4666 - protein, 284 aa, Homo sapiens
AHASTHASGSVSPCRQLHFPLFLFPFPSRPRAPPSLVGWSRSPCAFSLLGSCVRACPAMNEEYDVIVLGTGLTECILSGIMSVNGKKVLHMDRNPYYGGESASITPLEDLYKRFKIPGSPPESMGRGRDWNVDLIPKFLMANGQLVKMLLYTEVTRYLDFKVTEGSFVYKGGKIYKVPSTEAEALASSLMGLFEKRRFRKFLVYVANFDEKDPRTFEGIDPKKTTMRDVYKKFDLGQDVIDFTGHALALYRTDDYLDQPCYETINRIKLYYCGKTTVLIKDLHS

SEQ ID NO: 4667 - protein, 125 aa, Homo sapiens
DGVLLLPRLEWSAWCDLGSLQTPPPGFKRFSWPSLLSSWDYRCVPPCPANFCVFSRDGVSPCWPAGLELLTSGYMPTSTSQSAGITGMSHCAQPGIDNLYSDNLLWLFNIPQGALKSKHSRVCSF

SEQ ID NO: 4668 - protein, 85 aa, Homo sapiens
  MISC_FEATURE (6): Xaa equals any of the naturally occurring L-amino acids
WRGVGXARKKENSPLGKKEEEHWILTFWILTLGCKTYLPLSRLPSPSTLNVLLSFSVSAPSSPFPLPPPHTLHPLCPGPSEGHCR

SEQ ID NO: 4669 - protein, 43 aa, Homo sapiens
VDPRVRPRVRPRVRPRVRKKKKKKKKKKKKKKKKKKKKKKKGG

SEQ ID NO: 4670 - protein, 86 aa, Homo sapiens
DITAKLGIGEMAETDPKTVQDLTSVVQTLLQQMQDKFQTMSDQIIGRIDDMSSRIDDLEKNIADLMTQAGVEELESENKIPATQKS

SEQ ID NO: 4671 - protein, 111 aa, Homo sapiens
  MISC_FEATURE (50): Xaa equals any of the naturally occurring L-amino acids
  MISC_FEATURE (58): Xaa equals any of the naturally occurring L-amino acids
  MISC_FEATURE (59): Xaa equals any of the naturally occurring L-amino acids
RREGCRRPRGSRAGGAAAAAMQEIIASVDHIKFDLEIAVEQQLGAQPLPXQTQPPAKXXTPQVIGVMQSQNSSAGNRGPRPLEQVTCYKCGEKGHYANRCTKGHLAFLSGQ

SEQ ID NO: 4672 - protein, 69 aa, Homo sapiens
SHFVCCVKQKALMKKQKVMYVYEKINCTISFQYVLLYILVLFTFSSLLRGCELYSFQLVTHIREEIREY

SEQ ID NO: 4673 - protein, 212 aa, Homo sapiens
  MISC_FEATURE (172): Xaa equals any of the naturally occurring L-amino acids
  MISC_FEATURE (205): Xaa equals any of the naturally occurring L-amino acids
GAVAAARAIRLTHLAPVPQDQSGAGREGEEARARRARVRIGAGRSRDLGSGRGGCERAANRAGGGRAHHGGETRDQLTVYLGKRDFVDHLDKVDPVDGVVLVDPDYLKDRKVFVTLTCAFRYGREDLDVLGLSFRKDLFIATYQAFPPVPNPPRPPTRLQDRLLRKLGQHAXPFFFTIPQNLPCSVTLQPGPEDTGKACGVDFEXEPSVLNH

SEQ ID NO: 4674 - protein, 137 aa, Homo sapiens
AANKKNEARLRIVKTLEDIDLGPTEKCVRVNSVSSGLAEEDLETLLQSRVLPSSLMLPKVESPEEIQWFADKFSFHLKGRKLEQPMNLIPFVETAMGLLNFKAVCEETLKVGPQVGLFLDAVVFGRRRLSSQHRCNK

SEQ ID NO: 4675 - protein, 197 aa, Homo sapiens
  MISC_FEATURE (168): Xaa equals any of the naturally occurring L-amino acids
  MISC_FEATURE (172): Xaa equals any of the naturally occurring L-amino acids
VICMWQGCAVERPVGRMTSQTPLPQSPRPRRPTMSTVVELNVGGEFHTTTLGTLRKFPGSKLAEMFSSLAKASTDAEGRFFIDRPSTYFRPILDYLRTGQVPTQHIPEVYREAQFYEIKPLVKLLEDMPQIFGEQVSRKQFLLQVPGYSENLELMVRLARAEAITARXSSVXVCLVETEEQDAYYSEVLCFSCRIRR

SEQ ID NO: 4676 - protein, 293 aa, Homo sapiens
  MISC_FEATURE (38): Xaa equals any of the naturally occurring L-amino acids
QSKMGAYHTIELEPNRQFTLAKKQWDSVVLERIEQACXPAWSADVAAVVMQEGLAHICLVTPSMTLTRAKVEVNIPRKRKGNCSQHDRALERFYEQVVQAIQRHIHFDVVKCILVASPGFVREQFCDYMFQQAVKTDNKLLLENRSKFLQVHASSGHKYSLKEALCDPTVASRLSDTKAAGEVKALDDFYKMLQHEPDRAFYGLKQVEKANEAMAIDTLLISDELFRHQDVATRSRYVRLVDSVKENAGTVRIFSSLHVSGEQLSQLTGVAAILRFPVPELSDQEGDSSSEED

SEQ ID NO: 4677 - protein, 55 aa, Homo sapiens
  MISC_FEATURE (12): Xaa equals any of the naturally occurring L-amino acids
  MISC_FEATURE (31): Xaa equals any of the naturally occurring L-amino acids
PASTAWVPPPGXDPGPRSLAPGWDPAPGSYXRGSQLRRPAQPDSLKAQRAGSRPP

SEQ ID NO: 4678 - protein, 136 aa, Homo sapiens
  MISC_FEATURE (6): Xaa equals any of the naturally occurring L-amino acids
VDPRVXPRSGGEKPGGLGAPAGIGSRLGCERFSRSREILQAITMSTDTGVSLPSYEEDQGSKLIRKAKEAPFVPVGIAGFAAIVAYGLYKLKSRGNTKMSIHLIHMRVAAQGFVVGAMTVGMGYSMYREFWAKPKP

SEQ ID NO: 4679 - protein, 122 aa, Homo sapiens
  MISC_FEATURE (76): Xaa equals any of the naturally occurring L-amino acids
TASWSPAPVPSSLERLFSPDGTFPSRRFLGLWLFFSCARLIGHLLASISVVLLPHFLFCCFSVLSKYLLCSWLPFXRQVFSFPLALLLIWLLPTKACSVRISWFSTCQNLLQPQFLGLNLYV

SEQ ID NO: 4680 - protein, 439 aa, Homo sapiens
GGRGQEPQMRAFLACMRSDTPAMLNPANVPTHLMVLCCVLRYMVQWPGARILRRQELDAFLAQALSPKLYEPDQLQELKIENLDPRGIQLSALFMSGVDMALFANDACGQPIPWEHCCPWMYFDGKLFQSKLLKASREKTPLIDLCDGQADQAAKVEKMRQSVLEGLSFSRQSHTLPFPPPPALPFYPASAYPRHFGPVPPSQGRGRGFAGVCGFGGPYGETVATGPYRAFRVAAASGHCGAFSGSDSSRTSKSQGGVQPIPSQGGKLEIAGTVVGHWAGSRRGRGGRGPFPLQVVSVGGPARGRPRGVISTPVIRTFGRGGRYYGRGYKNQAAIQGRPPYAASAEEVAKELKSKSGESKSSAMSSDGSLAENGVMAEEKPAPQMNGSTGDARAPSHSESALNNDSKTCNTNPHLNALSTDSACRREAALEAAVLNKEE

SEQ ID NO: 4681 - protein, 102 aa, Homo sapiens
NRKVCRKIAAHGLCRKESLQNLLHSSRKLSLQVLNFVHSFQEGASILDIHTEPSFSSLLSQSSYADMGVPLPAKNLIFKDGVLSEWSGRSPSSLLIANLHLQ

SEQ ID NO: 4682 - protein, 631 aa, Homo sapiens
  MISC_FEATURE (17): Xaa equals any of the naturally occurring L-amino acids
  MISC_FEATURE (18): Xaa equals any of the naturally occurring L-amino acids
  MISC_FEATURE (36): Xaa equals any of the naturally occurring L-amino acids
  MISC_FEATURE (37): Xaa equals any of the naturally occurring L-amino acids
  MISC_FEATURE (52): Xaa equals any of the naturally occurring L-amino acids
  MISC_FEATURE (63): Xaa equals any of the naturally occurring L-amino acids
  MISC_FEATURE (96): Xaa equals any of the naturally occurring L-amino acids
  MISC_FEATURE (341): Xaa equals any of the naturally occurring L-amino acids
  MISC_FEATURE (357): Xaa equals any of the naturally occurring L-amino acids
KDEEEEPPSMTQLLRRXXLSCHRPGMWSVHCRSKEXXDMMGRNQTAVREEMXLLANYLDSMYXMLNIRIVLVGLEIWTNGNLINIVGGAGDVLGNXVQWREKFLITRRRHDSAQLVLKKGFGGTAGMAFVGTVCSRSHAGGINVFGQITVETFASIVAHELGHNLGMNHDDGRDCSCGAKSCIMNSGASGSRNFSSCSAEDFEKLTLNKGGNCLLNIPKPDEAYSAPSCGNKLVDAGEECDCGTPKECELDPCCEGSTCKLKSFAECAYGDCCKDCRFLPGGTLCRGKTSECDVPEYCNGSSQFCQPDVFIQNGYPCQNNKAYCYNGMCQYYDAQCQVIFXSKAKAAPKDCFIEVNXKGDRFGNCGFSGNEYKKCATGNALCGKLQCENVQEIPVFGIVPAIIQTPSRGTKCWGVDFQLGSDVPDPGMVNEGTKCGAGKICRNFQCVDASVLNYDCDVQKKCHGHGVCNSNKNCHCENGWAPPNCETKGYGGSVDSGPTYNEMNTALRDGLLVFFFLIVPLIVCAIFIFIKRDQLWRSYFRKKRSQTYESDGKNQANPSRQPGSVPRHVSPVTPPREVPIYANRFAVPTYAAKQPQQFPSRPPPPQPKVSSQGNLIPARPAPAPPLYSSLT

SEQ ID NO: 4683 - protein, 98 aa, Homo sapiens [sequence omitted]

SEQ ID NO: 4684 - protein, 35 aa, Homo sapiens
NKSWSSTAVAAALELVDPPGCRNSARGVMNRNFQM

SEQ ID NO: 4685 - protein, 487 aa, Homo sapiens
FSEVQIALNEAKLSEEKVKSECHRVQEENARLKKKKEQLQQEIEDWSKLHAELSEQIKSFEKSQKDLEVALTHKDDNINALTNCITQLNLLECESESEGQNKGGNDSDELANGEVGGDRNEKMKNQIKQMMDVSRTQTAISVVEEDLKLLQLKLRASVSTKCNLEDQVKKLEDDRNSLQAAKAGLEDECKTLRQKVEILNELYQQKEMALQKKLSQEEYERQEREHRLSAADEKAVSAAEEVKTYKRRIEEMEDELQKTERSFKNQIATHEKKAHENWLKARAAERAIAEEKREAANLRHKLLELTQKMAMLQEEPVIVKPMPGKPNTQNPPRRGPLSQNGSFGPSPVSGGECSPPLTVEPPVRPLSATLNRRDMPRSEFGSVDGPLPHPRWSAEASGKPSPSDPGSGTATMMNSSSRGSSPTRVLDEGKVNMAPKGPPPFPGVPLMSTPMGGPVPPPIRYGPPPQLCGPFGPRHFLHPLALVCVHH

SEQ ID NO: 4686 - protein, 74 aa, Homo sapiens
  MISC_FEATURE (23): Xaa equals any of the naturally occurring L-amino acids
AFDEAIAELDTLNEESYKDSTLXMQLLRDNLTVSTTSTGFIVSFLFTYLIIHCYLQEGICTIKCSYSFKLLNLL

SEQ ID NO: 4687 - protein, 414 aa, Homo sapiens
  MISC_FEATURE (391): Xaa equals any of the naturally occurring L-amino acids
VIGEFRDCISSREFLQPSSKASLESTSDLGASGKHGGNVSLDVLPVKGPQGSPLLSRAARPPDQLASEEPWTVLPEHLILVAPSPCDMAKTGRFQIVNNSVRLLRFELCWPAHCLTVTPQHGCVAPESKLQILVSPNSSLSTKQSMFPWSGLIYIHCDDGQKKIVKVQIREDLTQVELLTRLTSKPFGILSPVSEPSVSHLVKPMTKPPSTKVEIRNKSITFPTTEPGETSESCLELENHGTTDVKWHLSSLAPPYVKGVDESGDVFRATYAAFRCSPISGLLESHGIQKVSITFLPRGRGDYAQFWDVECHPLKEPHMKHTLRFQLSGQSIEAENEPENACLSTDSLIKIDHLVKPRRQAVSEASARIPDRQLDVTARGVYAPEDVYRSXRLVWGNHGHLKAICEIILLLHTH

SEQ ID NO: 4688 - protein, 85 aa, Homo sapiens
LYIFFGKKYLKTSAYKDSQKCQRFSRKFILYISKMIYQCYLPKEIILFFPFGEILSSNMRIRSLDSISTYTIKLNLEPELGCSVP

SEQ ID NO: 4689 - protein, 112 aa, Homo sapiens
RAPCVSLSSQVHSGLLLHPLLRGCPAGRGPLLSQLQSSPGHLQAFVGLSQTWREPGAAGSPFHLSSSFTPGGGSALVVSPLQGAHLHVFFWGEYVAKLTNLQTPEIAAWSRA

SEQ ID NO: 4690 - protein, 561 aa, Homo sapiens
  MISC_FEATURE (112): Xaa equals any of the naturally occurring L-amino acids
  MISC_FEATURE (169): Xaa equals any of the naturally occurring L-amino acids
  MISC_FEATURE (171): Xaa equals any of the naturally occurring L-amino acids
NCHFKLSSHYLDGYTSPGFKMLEAYNLTEKNFASVQGVSLESGSFPSYSAYRIQKNAFVNQPTADLHQNGLPPSYTIILLFRLLPETPSDPFAIWQITDRDYKPQVGVIADXSSKTLSFFNKDTRGEVQTVTFDTEEVKTLFYGSFHKVHIVVTSKSVKIYIDCYEIIXKXIKEAGNITTDGYEILGKLLKGERKSAAFQIQSFDIVCSPVWTSRDRCCDIPSRRDEGKCPAFPNSCTCTQDSVGPPGPPGPAGGPGAKGPRGERGISGAIGPPGPRGDIGPPGPQGPPGPQGPNGLSIPGEQGRQGMKGDAGEPGLPGRTGTPGLPGPPGPMGPPGDRGFTGKDGAMGPRGPPGPPGSPGSPGVTGPSGKPGKPGDHGRPGPSGLKGEKGDRGDIASQNMMRAVARQVCEQLISGQMNRFNQMLNQIPNDYQSSRNQPGPPGPPGPPGSAGARGEPGPGGRPGFPGTPGMQGPPGERGLPGEKGERGTGSSGPRGLPGPPGPQGESRTGPPGSTGSRGPPGPPGRPGNSGIRGPPGPPGYCDSSQCASIPYNGQSYPGSG

SEQ ID NO: 4691 - protein, 38 aa, Homo sapiens
  MISC_FEATURE (31): Xaa equals any of the naturally occurring L-amino acids
TSPTTHLSLVPNSCSPGDPLVLERPPPRWSXSFVPLVR

SEQ ID NO: 4692 - protein, 309 aa, Homo sapiens
PAIAMARGKAKEEGSWKKFIWNSEKKEFLGRTGGSWFKILLFYVIFYGCLAGIFIGTIQVMLLTISEFKPTYQDRVAPPGLTQIPQIQKTEISFRPNDPKSYEAYVLNIVRFLEKYKDSAQRDDMIFEDCGDVPSEPKERGDFNHERGERKVCRFKLEWLGNCSGLNDETYGYKEGKPCIIIKLNRVLGFKPKPPKNESLETYPVMKYNPNVLPVQCTGKRDEDKDKVGNVEYFGLGNSPGFPLQYYPYYGKLLQPKYLQPLLAVQFTNLTMDTEIRIECKAYGENIGYSEKDRFQGRFDVKIEVKSDS

SEQ ID NO: 4693 - protein, 177 aa, Homo sapiens
  MISC_FEATURE (58): Xaa equals any of the naturally occurring L-amino acids
CFGFVFPEAAIWSLSTGMSQTGPPMSMAAPARNARVSLPGLRVDMPAPCQPPVAWPGXPEPVCPPQGWRSLWAPGGFPPGDSHGAPCSRVVTVSPEMTETRHSPGPQRGGASRQTLGMELWCGLSCMVASAFCQHFWMDIGTIISILIHGDFKTTIKLIQSPLTLTDVGIPLLEREL

SEQ ID NO: 4694 - protein, 439 aa, Homo sapiens
ARDEMGHNFGMFHDDYSCKCPSTICVMDKALSFYIPTDFSSCSRLSYDKFFEDKLSNCLFNAPLPTDIISTPICGNQLVEMGEDCDCGTSEECTNICCDAKTCKIKATFQCALGECCEKCQFKKAGMVCRPAKDECDLPEMCNGKSGNCPDDRFQVNGFPCHHGKGHCLMGTCPTLQEQCTELWGPGTEVADKSCYNRNEGGSKYGYCRRVDDTLIPCKANDTMCGKLFCQGGSDNLPWKGRIVTFLTCKTFDPEDTSQEIGMVANGTKCGDNKVCINAECVDIEKAYKSTNCSSKCKGHAVCDHELQCQCEEGWIPPDCDDSSVVFHFSIVVGVLFPMAVIFVVVAMVIRHQSSREKQKKDQRPLSTTGTRPHKQKRKPQMVKAVQPQEMSQMKPHVYDLPVEGNEPPASFHKDTNALPPTVFKDNPMSTPKDSNPKA

SEQ ID NO: 4695 - protein, 60 aa, Homo sapiens
  MISC_FEATURE (3): Xaa equals any of the naturally occurring L-amino acids
  MISC_FEATURE (7): Xaa equals any of the naturally occurring L-amino acids
AGXPAGXGPEFPGRPTRPDDCNSPCYRREIIGSCLLTLCVALWSWIFLRFKKNHSFGTFN

SEQ ID NO: 4696 - protein, 48 aa, Homo sapiens
GVVYSYFFFLLVILTNMIPLLESLSLPHPQKCLLFMTVTNYSGQIASF

SEQ ID NO: 4697 - protein, 351 aa, Homo sapiens
  MISC_FEATURE (30): Xaa equals any of the naturally occurring L-amino acids
GGSGEFWRKRRVLLELYRPCFSGPRKVASXSAAASTLSEPPRRTQESRTRTRALGLPTLPMEKLAASTEPQGPRPVLGRESVQVPDDQDFRSFRSECEAEVGWNLTYSRAGVSVWVQAVEMDRTLHKIKCRMECCDVPAETLYDVLHDIEYRKKWDSNVIETFDIARLTVNADVGYYSWRCPKPLKNRDVITLRSWLPMGADYIIMNYSVKHPKYPPRKDLVRAVSIQTGYLIQSTGPKSCVITYLAQVDPKGSLPKWVVNKSSQFLAPKAMKKMYKACLKYPEWKQKHLPHFKPWLHPEQSPLPSLALSELSVQHADSLENIDESAVAESREERMGGAGGEGSDDDTSLT

SEQ ID NO: 4698 - protein, 54 aa, Homo sapiens
MGVYNFYVSCFQQLCLGWSLAGGDRISEWHIISILHMSKLRHRELDNLPRLHRL

SEQ ID NO: 4699 - protein, 65 aa, Homo sapiens
EQYLDLMLSECPALLPSAWMSECFYARGDSSQLRVCFFQRSSQVSFAKLGHLAQVFLESGVHVTD

SEQ ID NO: 4700 - protein, 31 aa, Homo sapiens
LLLISYYCKALSPASGSLCVIELKIIAVYNT

SEQ ID NO: 4701 - protein, 127 aa, Homo sapiens
KVQTLFGTTRSFHLAKTADPGARAQGSPGCGEEWLWHLPILWVLQALLEVFGLFGLWSFSPGTEVEMGRRPGQCSWKLTLHFSAPVFQFKSAFSSAETTELSGKCVVALATGEVWGQLVIRKGMEDV

SEQ ID NO: 4702 - protein, 329 aa, Homo sapiens
SYVHKSLSWKPLLSFISPSIPITFLRNVTWVMVNLCRHKDPPPPMETIQEILPALCVLIHHTDVNILVDTVWALSYLTDAGNEQIQMVIDSGIVPHLVPLLSHQEVKVQTAALRAVGNIVTGTDEQTQVVLNCDALSHFPALLTHPKEKINKEAVWFLSNITAGNQQQVQAVIDANLVPMIIHLLDKGDFGTQKEAAWAISNLTISGRKDQVAYLIQQNVIPPFCNLLTVKDAQVVQVVLDGLSNILKMAEDEAETIGNLIEECGGLEKIEQLQNHENEDIYKLAYEIIDQFFSSDDIDEDPSLVPEAIQGGTFGFNSSANVPTEGFQF

SEQ ID NO: 4703 - protein, 57 aa, Homo sapiens
  MISC_FEATURE (26): Xaa equals any of the naturally occurring L-amino acids
MLSVSLVFISASSSLLGYIVVLFPVXHLSLVFHYGKFIKKLAPLLSSSNAHKEMEDI

SEQ ID NO: 4704 - protein, 69 aa, Homo sapiens
GKGSKPLKMCFVIRSALQTKYARCPFEASELSLQGFKATFQQEKALRARRFIKEGKALVSLLRKVGFLA

SEQ ID NO: 4705 - protein, 461 aa, Homo sapiens
  MISC_FEATURE (312): Xaa equals any of the naturally occurring L-amino acids
  MISC_FEATURE (406): Xaa equals any of the naturally occurring L-amino acids
GSPRLLGAAALALGGALGLYHTARWHLRAQDLHAERSAAQLSLSSRLQLTLYQYKTCPFCSKVRAFLDFHALPYQVVEVNPVRRAEIKFSSYRKVPILVAQEGESSQQLNDSSVIISALKTYLVSGQPLEEIITYYPAMKAVNEQGKEVTEFGNKYWLMLNEKEAQQVYGGKEARTEEMKWRQWADDWLVHLISPNVYRTPTEALASFDYIVREGKFGAVEGAVAKYMGAAAMYLISKRLKSRHRLQDNVREDLYEAADKWVAAVGKDRPFMGGQKPNLADLAVYGVLRVMEGLDAFDDLMQHTHIQPWYLXVERAITEAPQRTECPPRRAEGRQAEDASCPRPGPLGPAPGDTGWGQDHSAPCPRTPTSPLASNTGHLLGLRDVRDEFQPCHCPGATPPCPCLPXCRPSSWTLSGCPMATSCGWGPSTGQQDGLFSVESHPWVPLVPTLPKPPGTGTCLQ

SEQ ID NO: 4706 - protein, 274 aa, Homo sapiens
TSRQNKTENLLESRMMDPCSVGVQLRTTNECHKTYYTRHTGFKTLQELSSNDMLLLQLRTGMTLSGNNTICFHHVKIYIDRFEDLQKSCCDPFNIHKKLAKKNLHVIDLDDATFLSAKFGRQLVPGWKLCPKCTQIINGSVDVDTEDRQKRKPESDGRTAKALRSLQFTNPGRQTEFAPETGKREKRRLTKNATAGSDRQVIPAKSKVYDSQGLLIFSGMDLCDCLDEDCLGCFYACPACGSTKCGAECRCDRKWLYEQIEIEGGEIIHNKHAG

SEQ ID NO: 4707 - protein, 122 aa, Homo sapiens
  MISC_FEATURE (19): Xaa equals any of the naturally occurring L-amino acids
  MISC_FEATURE (24): Xaa equals any of the naturally occurring L-amino acids
  MISC_FEATURE (51): Xaa equals any of the naturally occurring L-amino acids
  MISC_FEATURE (86): Xaa equals any of the naturally occurring L-amino acids
  MISC_FEATURE (113): Xaa equals any of the naturally occurring L-amino acids
LGDETGSSMTHLIEYDRHXKSRLXPLQHLYLLPADHSRNAAERFPGAWFQXPTVDSEASAFAGGLPVIFWSWAGLVGFPFVWPVSXCLNPLSFIKSKTKEKKKKKKKKFGGGXRYPIGPLGG

SEQ ID NO: 4708 - protein, 64 aa, Homo sapiens
  MISC_FEATURE (13): Xaa equals any of the naturally occurring L-amino acids
  MISC_FEATURE (14): Xaa equals any of the naturally occurring L-amino acids
  MISC_FEATURE (21): Xaa equals any of the naturally occurring L-amino acids
NSGSHNIVASRSXXIFDQDDXNGLTWVFIVYQILHTKEWKYSFTKFLRKIFLPIYHNYRMDICF

SEQ ID NO: 4709 - protein, 105 aa, Homo sapiens
  MISC_FEATURE (79): Xaa equals any of the naturally occurring L-amino acids
  MISC_FEATURE (82): Xaa equals any of the naturally occurring L-amino acids
  MISC_FEATURE (83): Xaa equals any of the naturally occurring L-amino acids
GARLGALQAAPQPGTPTPLRSPQASGPHPSEAQGSPVHAGFSPGPMSFLAGLGLAVGLALLLYCYPPDPKGLPGTRRVXGFXXVIIDRHVSRYLLAFLADDLGGL

SEQ ID NO: 4710 - protein, 232 aa, Homo sapiens
  MISC_FEATURE (32): Xaa equals any of the naturally occurring L-amino acids
  MISC_FEATURE (149): Xaa equals any of the naturally occurring L-amino acids
GAIGTSSPALLECQEGVGPARPSLLVPPPPRXRRLDLARTLPAERTDSQSLYIVYIALPGRTPRPALAFAFLMPACCNRPSPRPSPAHLTASSVLRRQRHVLAASAASPCQWSGLRVAHSLRQVVSLCPRCTGSCPFSGACASSLPSPXSCPHSHSGSWGTWSQGRPCSSTEVAGLALWPTDFLSCLLDASELQTQGSHGFSFTPTGFSSNRKVGVGSCRDGAGRGAMGGLF

SEQ ID NO: 4711 - protein, 665 aa, Homo sapiens
  MISC_FEATURE (17): Xaa equals any of the naturally occurring L-amino acids
  MISC_FEATURE (107): Xaa equals any of the naturally occurring L-amino acids
  MISC_FEATURE (111): Xaa equals any of the naturally occurring L-amino acids
  MISC_FEATURE (116): Xaa equals any of the naturally occurring L-amino acids
DVHHRAECRADRHRREXLYDMFVNFPDQPVVWREISIITSALRNDSQDKQTQFLRSLFETLPGRVQCEMLLKVTEQCFNTLERSEMLLLLLRRFPETVVQHGVGLGXALLXAETIXEQESPVNCFRKLFVCDVLPLIINNHDVRLPANLLYKYLNKAAEFYINYVTRSTQIENQHQGAQDTSDLMSPSKRSSQKYIIEGLTEKSSQIVDPWERLFKILNVVGMRCEWQMDKGRRSYGDILHRMKDLCRYMNNFDSEAHAKYKNQVVYSTMLVFFKNAFQYVNSIQPSLFQGPNAPSQVPLVLLEDVSNVYGDVEIDRNKHIHKKRKLAEGREKTMSSDDEDCSAKGRNRHIVVNKAELANSTEVLESFKLARESWELLYSLEFLDKEFTRICLAWKTDTWLWLRIFLTDMIIYQGQYKKAIASLHHLAALQGSISQPQITGQGTLEHQRALIQLATCHFALGEYRMTCEKVLDLMCYMVLPIQDGGKSQEEPSKVKPKFRKGSDLKLLPCTSKAIMPYCLHLMLACFKLRAFTDNRDDMALGHVIVLLQQEWPRGENLFLKAVNKICQQGNFQYENFFNYVTNIDMLEEFAYLRTQEGGKIHLELLPNQGMLIKHHTVTRGITKGVKEDFRLAMERQVSRCGENLMVVLHRFCINEKILLLQTLT

SEQ ID NO: 4712 - protein, 85 aa, Homo sapiens
VKSEDLNEVTPKLSQSHVFLTLGISNSIYTAFFKCNFQRCLLPHPLLLSIIIDFWRLTKQAIPKFSPRKVSWIKWFLRTLRVYIL

SEQ ID NO: 4713 - protein, 99 aa, Homo sapiens
  MISC_FEATURE (81): Xaa equals any of the naturally occurring L-amino acids
CNLYSWRNKIFIWDYFLQPFNKHLLYATKRQARRWALQTQWLVAVWTWSLLAWNPSLPNMQSPHLKASLCPFSDALFRNAXPLYSEIRRHKTSSKSLLW

SEQ ID NO: 4714 - protein, 215 aa, Homo sapiens
  MISC_FEATURE (7): Xaa equals any of the naturally occurring L-amino acids
LGAVGAXLRGLRGCRGARGAGGKAHLGWPWRAGGDMEDGVLKEGFLVKRGHIVHNWKARWFILRQNTLVYYKLEGGRRVTPPKGRILLDGCTITCPCLEYENRPLLIKLKTQTSTEYFLEACSREERDAWAFEITGAIHAGQPGKVQQLHSLRNSFKLPPHISLHRIVDKMHDSNTGIRSSPNMEQGSTYKKTFLGSSWWTGSSPTASRAAVWRR

SEQ ID NO: 4715 - protein, 112 aa, Homo sapiens
  MISC_FEATURE (9): Xaa equals any of the naturally occurring L-amino acids
  MISC_FEATURE (69): Xaa equals any of the naturally occurring L-amino acids
  MISC_FEATURE (103): Xaa equals any of the naturally occurring L-amino acids
DLPPLLVFXAVKTLSTVTYFLSQAASHLVPCADSSTVARIQYESRGDRRMVGAAGFSTYPSHQGPDALXPAPSAHPCAQLEGCMARSPLFRWVETLMIPAPPXRAPATEQAL

SEQ ID NO: 4716 - protein, 63 aa, Homo sapiens
  MISC_FEATURE (18): Xaa equals any of the naturally occurring L-amino acids
QSRHQLAWLLGMAIGGSXCGPLLANCMQPPTLRMFAWAENAETLWPDLTVSTWQWALWTQHFS

SEQ ID NO: 4717 - protein, 578 aa, Homo sapiens
PTASAGARWSHKTASVLQSVSLEVTRATAGMVLAELYVSDREGSDATGDGTKEKPFKTGLKALMTVGKEPFPTIYVDSQKENERWNVISKSQLKNIKKMWHREQMKSESREKKEAEDSLRREKNLEEAKKITIKNDPSLPEPKCVKIGALEGYRGQRVKVFGWVHRLRRQGKNLMFLVLRDGTGYLQCVLADELCQCYNGVLLSTESSVAVYGMLNLTPKGKQAPGGHELSCDFWELIGLAPAGGADNLINEESDVDVQLNNRHMMIRGENMSKILKARSMVTRCFRDHFFDRGYYEVTPPTLVQTQVEGGATLFKLDYFGEEAFLTQSSQLYLETCLPALGDVFCIAQSYRAEQSRTRRHLAEYTHVEAECPFLTFDDLLNRLEDLVCDVVDRILKSPAGSIVHELNPNFQPPKRPFKRMNYSDAIVWLKEHDVKKEDGTFYEFGEDIPEAPERLMTDTINEPILLCRFPVEIKSFYMQRCPEDSRLTESVDVLMPNVGEIVGGSMRIFDSEEILAGYKREGIDPTPYYWYTDQRKYGTCPHGGYGLGLERFLTWILNRYHIRDVCLYPRFVQRCTP

SEQ ID NO: 4718 - protein, 153 aa, Homo sapiens
  MISC_FEATURE (105): Xaa equals any of the naturally occurring L-amino acids
  MISC_FEATURE (106): Xaa equals any of the naturally occurring L-amino acids
  MISC_FEATURE (122): Xaa equals any of the naturally occurring L-amino acids
  MISC_FEATURE (134): Xaa equals any of the naturally occurring L-amino acids
PLNGLLGGLNGAAAPNPASLSQAGGAPTLQLPGCLNSLTEQQRHLLQQQEQQLQQLQQLLASPQLTPEHQTVVYQMIQQIQQKRELQRLQMAGGSQLPMASLLAXXSTPLLSAGTPGLLPTXSAPPLLPAGALXAPSLGNNTSLMAAAAAAQQ

SEQ ID NO: 4719 - protein, 77 aa, Homo sapiens
TCYILPKTAPLECRAPLRSPSPLGRLQVLPRSPLHVHTHNSGKEVLGLQVQRSRSGTGPACSQAGSGAVQGGNWCIF

SEQ ID NO: 4720 - protein, 172 aa, Homo sapiens
  MISC_FEATURE (70): Xaa equals any of the naturally occurring L-amino acids
  MISC_FEATURE (79): Xaa equals any of the naturally occurring L-amino acids
  MISC_FEATURE (133): Xaa equals any of the naturally occurring L-amino acids
  MISC_FEATURE (166): Xaa equals any of the naturally occurring L-amino acids
LEPLGLESGRGLPSQPLSFLPRPQELLQTQDFSKFQALKPKLLDTVDDMLANDIARLMVMVRQEESLMPXQVVKGGAFXGTMNGPFGHGYGEGAGEGIDDVEWVVGKDKPTYDEIFYTLSPVNGKITGANAKXEMVKVQASQHRAKGKIWKLADWTRTGLLDDKEXALGNHL

SEQ ID NO: 4721 - protein, 193 aa, Homo sapiens
LQARLLSAKGEIWMASTSYDYCRVPMEDGDKRCKLLLGIGILVLLIIVILGVPLIIFTIKANSEACRDGLRAVMECRNVTHLLQQELTEAQKGFQDVEAQAATCNHTVMALMASLDAEKAQGQKKVEELEGEITTLNHKLQDASAEVERLRRENQVLSVRIADKKYYPSSQDSSSAAAPQLLIVLLGLSALLQ

SEQ ID NO: 4722 - protein, 69 aa, Homo sapiens
LEGALTRTEHWSNNLATFPWKRSARSQIRRDAPAGKGGGCKTRAVSLGRKAVVSPQGVQLCGTHTYRSK

SEQ ID NO: 4723 - protein, 205 aa, Homo sapiens
  MISC_FEATURE (122): Xaa equals any of the naturally occurring L-amino acids
VKTPPRVLTLSERPLDFLDLERPPTTPQNEEIRAVGRLKRERSMSENAVRQNGQLVRNDSLVTPSPQQARVCPPHMLPEDGANLSSARGILSLIQSSTRRAYQQILDVLDENRRPVLRGGSXAATSNPHHDNVRYGISNIDTTIEGTSDDLTVVDAASLRRQIIKLNRRLQLLEEENKERAKREMVMYSITVAFWLLNSWLWFRR

SEQ ID NO: 4724 - protein, 408 aa, Homo sapiens
IPLPFGKPQPQSRRRPLRPPSASSASRPARGSLRRAMATSPQKSPSVPKSPTPKSPPSRKKDDSFLGKLGGTLARRKKAKEVSELQEEGMNAINLPLSPIPFELDPEDTMLEENEVRTMVDPNSRSTPKLQELMKVLIDWINDVLVGERIIVKDLAEDLYDGQVLQKLFEKLESEKLNVAEVTQSEIAQKQKLQTVLEKINETLKLPPRSIKWNVDSVHAKSLVAILHLLVALSQYFRAPIRLPDHVSIQVVVVQKREGILQSRQIQEEITGNTEALSGRHERDAFDTLFDHAPDKLNVVKKTLITFVNKHLNKLNLEVTELETQFADGVYLVLLMGLLEGYFVPLHSFFLTPDSFEQKVLNVSFAFELMQDGGLEKPKPRPEDIVNCDLKSTLRVLYNLFTKYRNVE

SEQ ID NO: 4725 - protein, 314 aa, Homo sapiens
DPYSQSATAFNEMIQENGYNFDRSSSTFSGIKELARRFALTFGLDQLKTREAIAMLHKDGIEFAFKEPNPQGESHPPLNLAFLDILSEFSSKLLRQDKRTVYVYLEKFMTFQMSLRREDVWLPLMSYRNSLLAGGDDDTMSVISGISSRGSTVRSKKSKPSTGKRKVVEGMQLSLTEESSSSDSMWLSREQTLHTPVMMQTPQLTSTIMREPKRLRPEDSFMSVYPMQTEHHQTPLDYNRRGTSLMEDDEEPIVEDVMMSSEGRIEDLNEGMDFDTMDIDLPPSKNRRERTELKPDFFDPASIMDESVLGVSMF

SEQ ID NO: 4726 - protein, 287 aa, Homo sapiens
  MISC_FEATURE (180): Xaa equals any of the naturally occurring L-amino acids
RPCPEEAEIGIAMGSGTAVAKTASEMVLADDNFSTIVAAVEEGRAIYNNMKQFIRYLISSNVGEVVCIFLTAALGLPEALIPVQLLWVNLVTDGLPATALGFNPPDLDIMDRPPRSPKEPLISGWLFFRYMAIGGYVGAATVGAAAWWFLYAEDGPHVNYSQLTHFMQCTEDNTHFEGIXCEVFEAPEPMTMALSVLVTIEMCNALNSLSENQSLLRMPPWVNIWLLGSICLSMSLHFLILYVDPLPMIFKLRALDLTQWLMVLKISLPVIGLDEILKFVARNYLEG

SEQ ID NO: 4727 - protein, 47 aa, Homo sapiens
QRPCGLQGPKYLLSGLLLKKFSQAWWWAPVIPATRESEAGESLEPGR

SEQ ID NO: 4728 - protein, 436 aa, Homo sapiens
  MISC_FEATURE (2): Xaa equals any of the naturally occurring L-amino acids
  MISC_FEATURE (382): Xaa equals any of the naturally occurring L-amino acids
AXDPSRVMDQHKLTRDQWEDRIQVWHAEHRGMLKDNAMLEYLKIAQDLEMYGINYFEIKNKKGTDLWLGVDALGLNIYEKDDKLTPKIGFPWSEIRNISFNDKKFVIKPIDKKAPDFVFYAPRLRINKRILQLCMGNHELYMRRRKPDTIEVQQMKAQAREEKHQKQLERQQLETEKKRRETVEREKEQMMREKEELMLRLQDYEEKTKKAERELSEQIQRALQLEEERKRAQEEAERLEADRMAALRAKEELERQAVDQIKSQEQLAAELAEYTAKIALLEEARRRKEDEVEEWQHRAKEAQDDLVKTKEELHLVMTAPPPPPPPVYEPVSYHVQESLQDEGAEPTGYSAELSSEGIRDDRNEEKRITEAEKNERVQRQLXTLSSELSQARDENKRTHNDIIHNENMRQGRDKYKTLRQIRQGNTKQRIDEFEAL

SEQ ID NO: 4729 - protein, 173 aa, Homo sapiens
LQVVQADIASIDSDAVVHPTNTDFYIGGEVGNTLEKKGGKEFVEAVLELRKKNGPLEVAGAAVSAGHGLPAKFVIHCNSPVWGADKCEELLEKTVKNCLALADDKKLKSIAFPSIGSGRNGFPKQTAAQLILKAISSYFVSTMSSSIKTVYFVLFDSESIGIYVQEMAKLDAN

SEQ ID NO: 4730 - protein, 84 aa, Homo sapiens
  MISC_FEATURE (65): Xaa equals any of the naturally occurring L-amino acids
  MISC_FEATURE (70): Xaa equals any of the naturally occurring L-amino acids
  MISC_FEATURE (72): Xaa equals any of the naturally occurring L-amino acids
RGDPFPLVGFGSCVSSLCKTLHQGYPGHEGVPPVPVYFCTRTSNKTGRCLGNCHGVRERDAFYSXGVDDXTXVINCICWEKVEY

SEQ ID NO: 4731 - protein, 49 aa, Homo sapiens
RGGGCSEPRSRHCTPAWGTRVRLSLKKKKKEKKIRDIVHIPLLCLHRCP

SEQ ID NO: 4732 - protein, 267 aa, Homo sapiens
  MISC_FEATURE (88): Xaa equals any of the naturally occurring L-amino acids
  MISC_FEATURE (90): Xaa equals any of the naturally occurring L-amino acids
  MISC_FEATURE (95): Xaa equals any of the naturally occurring L-amino acids
  MISC_FEATURE (140): Xaa equals any of the naturally occurring L-amino acids
  MISC_FEATURE (162): Xaa equals any of the naturally occurring L-amino acids
  MISC_FEATURE (165): Xaa equals any of the naturally occurring L-amino acids
  MISC_FEATURE (173): Xaa equals any of the naturally occurring L-amino acids
NNLNSVLAERLEKWLQLMLMWHPRQRGTDPTYGPNGCFKALDDILNLKLVHILNMVTGTIHTYPVTEDESLQSLKARIQQDTGIPEEXQXLLQEXGLALIPDKPATQCISDGKLNEGHTLDMDLVFLFDNSKITYETQIXPRPQPESVSCILQEPKRNLAFXQLXKVWGQVWXSIQTLKEDCNRLQQGQRAAMMNLLRNNSCLSKMKNSMASMSQQLKAKLDFFKTSIQIDLEKYSEQTEFGITSDKLLLAWREMEQAVELCGRENE

SEQ ID NO: 4733 - protein, 101 aa, Homo sapiens
HFLTCGREKLPNFFFLLLNCNIVEDFFFLFSLIGAFCTGFVCVCVCVCARACVLICFLIHSYPLCLSYHCLPGYLKQVHTFEKKKKCCLKNVFSCCSKYFA

SEQ ID NO: 4734 - protein, 163 aa, Homo sapiens
  MISC_FEATURE (49): Xaa equals any of the naturally occurring L-amino acids
RSPDSSQVLGARDADSSSGCFSRCSWALASDGALRGCFPGARFCSTTSXEGNTTFTGSAAAPGPSASRQGPKPGPPAATVARQTSRVSPAPPCSLRPGLRHESAPSGIGDVTARGALRGLGCTVRVTAACAGNHGCSQMLALRNSKWETASRRGVLTGRLGIK

SEQ ID NO: 4735 - protein, 91 aa, Homo sapiens
ESLWAFCLSLLERLACCSLLYPEVCLWDFSPVAVETRRPTLFETQMLLSLASPSLSSPNEPTFCTSTRMPGRLGPQRLLFQNLWKPRLNVP

SEQ ID NO: 4736 - protein, 72 aa, Homo sapiens
ISSHLVSKLLLTMVVLLEQSFQAPLRTIFNSDTKGKTGCYFCFVVQLVLYSHMLYILNSPVLFRLVNRTISM

SEQ ID NO: 4737 - protein, 251 aa, Homo sapiens
GGLAWRALRTSGTLLRVERLLLEDYCPEEKMFGFHKPKMYRSIEGCCICRAKSSSSRFTDSKRYEKDFQSCFGLHETRSGDICNACVLLVKRWKKLPAGSKKNWNHVVDARAGPSLKTTLKPKKVKTLSGNRIKSNQISKLQKEFKRHNSDAHSTTSSASPAQSPCYSNQSDDGSDTEMASGSNRTPVFSFLDLTYWKRQKICCGIIYKGRFGEVLIDTHLFKPCCSNKKAAAEKPEEQGPEPLPISTQEW

SEQ ID NO: 4738 - protein, 45 aa, Homo sapiens
CCDACFQDPYGVAVGGTVGHCLCTGLAVIGGRMIAQKISVRTGKS

SEQ ID NO: 4739 - protein, 134 aa, Homo sapiens
  MISC_FEATURE (101): Xaa equals any of the naturally occurring L-amino acids
  MISC_FEATURE (102): Xaa equals any of the naturally occurring L-amino acids
  MISC_FEATURE (103): Xaa equals any of the naturally occurring L-amino acids
LPAGMSAKMLGGVFKIDWICRRELPFTKSAHLTNPWNEHKPVKIGRDGQEIELECGTQLCLLFPPDESIDLYQVIHKMRHKRRMHSQPRSRGRPSRENQSXXXEGVDQKIMIFITAERNQGLTIPLSFTRDQGI

SEQ ID NO: 4740 - protein, 193 aa, Homo sapiens
LVPPKSWTIQVGLVSLLDNPAPSHLVEKIVYHSKYKPKRLGNDIALMKLAGPLTFNEMIQPVCLPNSEENFPDGKVCWTSGWGATEDGAGDASPVLNHAAVPLISNKICNHRDVYGGIISPSMLCAGYLTGGVDSCQGDSGGPLVCQERRLWKLVGATSFGIGCAEVNKPGVYTRVTSFLDWIHEQMERDLKT

SEQ ID NO: 4741 - protein, 426 aa, Homo sapiens
CHRQRRCLLPSDCEKTITGPRNCHANRLPCIYLVDSGGAYLPRQADVFPDRDHFGRTFYNQAIMSSKNIAQIAVVMGSCTAGGAYVPAMADENIIVRKQGTIFLAGPPLVKAATGEEVSAEDLGGADLHCRKSGVSDHWALDDHHALHLTRKVVRNLNYQKKLDVTIEPSEEPLFPADELYGIVGANLKRSFDVREVIARIVDGSRFTEFKAFYGDTLVTGFARIFGYPVGIVGNNGVLFSESAKKGTHFVQLCCQRNIPLLFLQNITGFMVGREYEAEGIAKDGAKMVAAVACAQVPKITLIIGGSYGAGNYGMCGRAYSPRFLYIWPNARISVMGGEQAANVLATITKDQRAREGKQFSSADEAALKEPIIKKFEEEGNPYYSSARVWDDGIIDPADTRLVLGLSFSAALNAPIEKTDFGIFRM

SEQ ID NO: 4742 - protein, 651 aa, Homo sapiens
YFTNETDDIANLEASVLENPSHVQLWLKLAYKYLNQNEGECSESLDSALNVLARALENNKDNPEIWCHYLRLFSKRGTKDEVQEMCETAVEYAPDYQSFWTFLHLESTFEEKDYVCERMLEFLMGAAKQETSNILSFQLLEALLFRVQLHIFTGRCQSALAILQNALKSANDGIVAEYLKTSDRCLAWLAYIHLIEFNILPSKFYDPSNDNPSRIVNTESFVMPWQAVQDVKTNPDMLLAVFEDAVKACTDESLAVEERIEACLPLYTNMIALHQLLERYEAAMELCKSLLESCPINCQLLEALVALYLQTNQHDKARAVWLTAFEKNPQNAEVFYHMCKFFILQNRGDNLLPFLRKFIASFFKPGFEKYNNLDLFRYLLNIPGPIDIPSRLCKGNFDDDMFNHQVPYLWLIYCLCHPLQSSIKETVEAYEAALGVAMRCDIVQKIWMDYLVFANNRAAGSRNKVQEFKFFTDLVNRCLVTVPARYPIPFSSADYWSNYEFHNRVIFFYLSCVPKTQHSKTLERFCSVMPANSGLALRLLQHEWEESNVQILKLQAKMFTYNIPTCLATWKIAIAAEIVLKGQREVHRLYQRALQKLPLCASLWKDQLLFEASEGGKTDNLRKLVSKCQEIGVSLNELLNLNSNKTESKNH

SEQ ID NO: 4743 - protein, 120 aa, Homo sapiens
  MISC_FEATURE (9): Xaa equals any of the naturally occurring L-amino acids
  MISC_FEATURE (11): Xaa equals any of the naturally occurring L-amino acids
  MISC_FEATURE (14): Xaa equals any of the naturally occurring L-amino acids
  MISC_FEATURE (16): Xaa equals any of the naturally occurring L-amino acids
  MISC_FEATURE (17): Xaa equals any of the naturally occurring L-amino acids
  MISC_FEATURE (20): Xaa equals any of the naturally occurring L-amino acids
  MISC_FEATURE (23): Xaa equals any of the naturally occurring L-amino acids
  MISC_FEATURE (25): Xaa equals any of the naturally occurring L-amino acids
RAPSFKKLXGXPPXGXXREXSGXRXRPQSARAAMALLLSVLRVLLGGFFALVGLAKLSEEISAPVSERMNALFVQFAEVFPLKVFGYQPDPLKLPNSCGLSGTAGWVAAGHGPTDAARDQ

SEQ ID NO: 4744 - protein, 244 aa, Homo sapiens
  MISC_FEATURE (144): Xaa equals any of the naturally occurring L-amino acids
  MISC_FEATURE (232): Xaa equals any of the naturally occurring L-amino acids
STFDKGYGKYFAAGEKYHTSSVFHKAQRARWKNRRSWRLSGVHWSPIFCRISALKVGADLSHVFCASAAAPVIKAYSPELIVHPVLDSPNAVHEVEKWLPRLHALVVGPGLGRDDALLRNVQGILEVSKARDIPVVIDADGLWXVAQQPALIHGYRKAVLTPNHVEFSRLYDAVLRGPMDSDDSHGSVLRLSQALGNVTVVQKGERDILSNGQQVLVCSQEGSSAGVEGKGXSCRAPWASWYTG

SEQ ID NO: 4745 - protein, 107 aa, Homo sapiens
RNKSQMQRYNFHYLKYIVHFYRTCDYSRMIRMVLAYGELLLLTVSAEILFQWTNIVAWQQMPTFCGIAANLQETLVGFSFCFLCFFPLLLNQQGWKEGREVMNYSFQ

SEQ ID NO: 4746 - protein, 78 aa, Homo sapiens
VVSCGVFFKKFDLAFIFSILFPIKSMQIICPKLSSSSDSAFVLCQSHFHLLPWFHRSFVSWASRKIKLYLFCICEMFK

SEQ ID NO: 4747 - protein, 171 aa, Homo sapiens
  MISC_FEATURE (164): Xaa equals any of the naturally occurring L-amino acids
GHSEWVSCVRFSPNSSNPIIVSCGWDKLVKVWNLANCKLKTNHIGHTGYLNTVTVSPDGSLCASGGKDGQAMLWDLNEGKHLYTLDGGDIINALCFSPNRYWLCAATGPSIKIWDLEGKIIVDELKQEVISTSSKAEPPQCTSLAWSADGQTLFAGYTDNLVRXGSDHWTR

SEQ ID NO: 4748 - protein, 159 aa, Homo sapiens
TPRDLVCLGLSSIVGVWYLLRKHWIANNLFGLAFSLNGVELLHLNNVSTGCILLGGLFIYDVFWVFGTNVMVTVAKSFEAPIKLVFPQDLLEKGLEANNFAMLGLGDVVIPGIFIALLLRFDISLKKNTHTYFYTSFAAYIFGLGLTIFIMHIFKHAQL

SEQ ID NO: 4749 - protein, 70 aa, Homo sapiens
  MISC_FEATURE (12): Xaa equals any of the naturally occurring L-amino acids
YKYREEVSMNLXIVLSNPLECQSLKDFALLHQITSFSQIPISVITGANLKVLYSFTTLQICNAAYNAEEH

SEQ ID NO: 4750 - protein, 94 aa, Homo sapiens
  MISC_FEATURE (3): Xaa equals any of the naturally occurring L-amino acids
TKXKSGELAVTSTGGHGREGSLLEGLPWRLEWGLPGRPAFHPCLPHPCHRLCTPLDGGSKPGTVPVLVRVIIMININYDAKNCWANFEDLNLLQ

SEQ ID NO: 4751 - protein, 128 aa, Homo sapiens
PSSLRKESESREVDASYLLERPSSVSVVVTAPSAMSFSATILFSPPSGSEARCCCCACKSETNGGNTGSQGGNPPPSTPITVTGHGLAVQSSEQLLHVIYQRVDKAVGLAEAALGLARANNELLKRLQ

SEQ ID NO: 4752 - protein, 74 aa, Homo sapiens
  MISC_FEATURE (62): Xaa equals any of the naturally occurring L-amino acids
RKFSLTHSYQASIIQIPKPIIDTTTTTTTTTHHANVFGKHCAKILNKILASQIQQHIKKFIXNNGVGFVPRMQG

SEQ ID NO: 4753 - protein, 149 aa, Homo sapiens
  MISC_FEATURE (85): Xaa equals any of the naturally occurring L-amino acids
  MISC_FEATURE (136): Xaa equals any of the naturally occurring L-amino acids
  MISC_FEATURE (145): Xaa equals any of the naturally occurring L-amino acids
SWSRERAPAPLWEDREMPVLKQLGPAQPKKRPDRGALSISAPLGDFRHTLHVGRGGDAFGDTSFLSRHGGGPPPSPGRPPRGPRXPRRRRRPQSAAPRLRPAVPSPGSGASCWTRCWRMDAARRSGCASHANPPGXAPAVRHATXYTMA

SEQ ID NO: 4754 - protein, 167 aa, Homo sapiens
  MISC_FEATURE (162): Xaa equals any of the naturally occurring L-amino acids
  MISC_FEATURE (166): Xaa equals any of the naturally occurring L-amino acids
RRPRSRLRVTSVSDQNDRVVECQLQTHNSKMVTFRFDLDGDSPEEIAAAMVYNEFILPSERDGFLRRIREIIQRVETLLKRDTGPMEAAEDTLSPQEEPAPLPALPVPLPDPSNEELQSSTSLEHRSWTAFSTSFILSSWELLCLLGNPFSPGTPIFPRVPXFPIXF

SEQ ID NO: 4755 - protein, 279 aa, Homo sapiens
  MISC_FEATURE (247): Xaa equals any of the naturally occurring L-amino acids
AQDQWSELFMDALGPFNFVLVSSVRMQGVILLLFAKYYHLPFLRDVQTDCTRTGLGGYWGNKGGVSVRLAAFGHMLCFLNCHLPAHMDKAEQRKDNFQTILSLQQFQGPGAQGILDHDLVFWFGDLNFRIESYDLHFVKFAIDSDQLHQLWEKDQLNMAKNTWPILKGFQEGPLNFAPTFKFDVGTNKYDTSAKKRKPAWTDRILWKVKAPGGGPSPSGRKSHRLQVTQHSYRSHMEYTVSDHKPVXAQFLLQFAFQGRHATGAAGGGQMSGCGPSRRW

SEQ ID NO: 4756 - protein, 108 aa, Homo sapiens
  MISC_FEATURE (24): Xaa equals any of the naturally occurring L-amino acids
PMALAKTAILVRLSYFLFIDTSTXTAFLSSVDLHTHCSYQLMLPEAIAIVCSPKHKDTGIFRLTNAGMLEVSACKKKGFHPHTKEPRLFSICKHVLVKDIKIIVLDLR

SEQ ID NO: 4757 - protein, 84 aa, Homo sapiens
KEMVILWTMETSSEYADFPLLTLPSLWLLLPDKGQGHLKTLPPVGFGVTGASACSHIFQKGSALRTSLYLGFLIPLAVLTSRET

SEQ ID NO: 4758 - protein, 65 aa, Homo sapiens
  MISC_FEATURE (12): Xaa equals any of the naturally occurring L-amino acids
  MISC_FEATURE (30): Xaa equals any of the naturally occurring L-amino acids
  MISC_FEATURE (36): Xaa equals any of the naturally occurring L-amino acids
MFKLYSSLARMXNTCALKANRERVHNILQXLKHNLXHHLPLANIPSQLFSREEPFKLWSSIYYFH

SEQ ID NO: 4759 - protein, 27 aa, Homo sapiens
  MISC_FEATURE (7): Xaa equals any of the naturally occurring L-amino acids
  MISC_FEATURE (23): Xaa equals any of the naturally occurring L-amino acids
RNAKVGXGVVAHACGPGCLGGWXGRIA

SEQ ID NO: 4760 - protein, 118 aa, Homo sapiens
  MISC_FEATURE (21): Xaa equals any of the naturally occurring L-amino acids
  MISC_FEATURE (113): Xaa equals any of the naturally occurring L-amino acids
SSYSKISLRNSSKVTESASVXQSQDVSGSEDTFPNKRPRLEDKTVFDNFFIKKEQIKSSGNDPKYSTTTAQNSSSSSSQSKMVNCPVCQNEVLESQINEHLDWCLEGDSIKVXSEESL

SEQ ID NO: 4761 - protein, 172 aa, Homo sapiens
  MISC_FEATURE (55): Xaa equals any of the naturally occurring L-amino acids
  MISC_FEATURE (116): Xaa equals any of the naturally occurring L-amino acids
PTRPPQANRGVVRWEYFRLRPLRFRAPALRLQKSQSSDLLERERESVLRREQEVXEERRNALFPEVFSPTPDENSDQNSRSSSQASGITGSYSVSESPFFSPIHLHSNVAWTVEDXVDSAPPGQRKKEQWYAGINPSDGINSEVLEAIRVTRHKNAMAERWESRIYASEEDD

SEQ ID NO: 4762 - protein, 119 aa, Homo sapiens
  MISC_FEATURE (95): Xaa equals any of the naturally occurring L-amino acids
  MISC_FEATURE (100): Xaa equals any of the naturally occurring L-amino acids
EWECWLLLQYWSLYTVLHTRFFSGYMSFLSKLCGSHEETSNQGKGEGLRHKTYLYKISFKNSNLGHVKFFYIFSCLNLSSFFMLCSARKCGEMDXGGCGXDRWLGSTCLCLFPFMCSCV

SEQ ID NO: 4763 - protein, 193 aa, Homo sapiens
  MISC_FEATURE (1): Xaa equals any of the naturally occurring L-amino acids
XGRAWVMAAPGALLVMGVSGSGKSTVGALLASELGWKFYDADDYHPEENRRKMGKGIPLNDQDRIPWLCNLHDILLRDVASGQRVVLACSALKKTYRDILTQGKDGVALKCEESGKEAKQAEMQLLVVHLSGSFEVISGRLLKREGHFMPPELLQSQFETLEPPAAPENFIQISVDKNVSEIIATIMETLKMK

SEQ ID NO: 4764 - protein, 194 aa, Homo sapiens
  MISC_FEATURE (182): Xaa equals any of the naturally occurring L-amino acids
QDHGAWLRGGDVWLDSCRFADNGIGLTLASGGTFPYDDGSKQEIKNSLFVGESGNVGTEMMDNRIWGPGGLDHSGRTLPIGQNFPIRGIQLYDGPINIQNCTFRKFVALEGRHTSALAFRLNNAWQSCPHNNVTGIAFEDVPITSRVFFGEPGPWFNQLDMDGDKTSVFHDVDGSVSEYPGXYLRRMTTGWSGT

SEQ ID NO: 4765 - protein, 500 aa, Homo sapiens
IRHEKDRGPRRSVSFPRALSGNMAGVEEVAASGSHLNGDLDPDDREEGAASTAEEAAKKKRRKKKKSKGPSAAGEQEPDKESGASVDEVARQLERSALEDKERDEDDEDGDGDGDGATGKKKKKKKKKRGPKVQTDPPSVPICDLYPNGVFPKGQECEYPPTQDGRTAAWRTTSEEKKALDQASEEIWNDFREAAEAHRQVRKYVMSWIKPGMTMIEICEKLEDCSRKLIKENGLNAGLAFPTGCSLNNCAAHYTPNAGDTTVLQYDDICKIDFGTHISGRIIDCAFTVTFNPKYDTLLKAVKDATNTGIKCAGIDVRLCDVGEAIQEVMESYEVEIDGKTYQVKPIRNLNGHSIGQYRIHAGKTVPIVKGGEATRMEEGEVYAIETFGSTGKGVVHDDMECSHYMKNFDVGHVPIRLPRTKHLLNVINENFGTLAFCRRWLDRLGESKYLMALKNLCDLGIVDPYPPLCDIKGSYTAQFEHTILLRPTCKEVVSRGDDY

SEQ ID NO: 4766 - protein, 76 aa, Homo sapiens
ALAIAEKSQEFLEADNRQLPNGVYTTAEQRPNAYIPEADATLPLPKPYGALAPFKPSEPGANMRHIRKPVIKPVEI

SEQ ID NO: 4767 - protein, 113 aa, Homo sapiens
  MISC_FEATURE (25): Xaa equals any of the naturally occurring L-amino acids
  MISC_FEATURE (55): Xaa equals any of the naturally occurring L-amino acids
  MISC_FEATURE (65): Xaa equals any of the naturally occurring L-amino acids
  MISC_FEATURE (72): Xaa equals any of the naturally occurring L-amino acids
MAYTIPVIIVGGCWFAWRHQSSDEXIDYFAVSLRIIGVLALILTSCGLAAINADXIWYFASGGVXGSLLSTXLQPLLHSSGGTIALLCVWAAGLTLFTGWSWVTLLKNSAAGF

SEQ ID NO: 4768 - protein, 111 aa, Homo sapiens
TICVVRGATAISAELGGISTTFLSAEAFPPTLMLFNSVLRQPQLGVLRNGWSSQYPLQSLLTGYQCSGNDEHTSYGETGVPVPPFGCTFSSAPNMEHVLAVANEEGFCSIV

SEQ ID NO: 4769 - protein, 157 aa, Homo sapiens
  MISC_FEATURE (117): Xaa equals any of the naturally occurring L-amino acids
  MISC_FEATURE (133): Xaa equals any of the naturally occurring L-amino acids
  MISC_FEATURE (144): Xaa equals any of the naturally occurring L-amino acids
AGERDQGRRRGESREGWSFGESLWKMAPVVTGKFGERPPPKRLTREAMRNYLKERGDQTVLILHAKVAQKSYGNEKRFFCPPPCVYLMGSGWKKKKEQMERDGCSEQESQPCAFIGXGNSDQEMQQLNLGRKXLLHSQTLYISXSASEDFHVVCKVF

SEQ ID NO: 4770 - protein, 60 aa, Homo sapiens
LRMCEKLTEPDACCYFTAMSLFLSTLKIFFLFNVVYFGLRNNCSVENNPLSEKKVATTSF

SEQ ID NO: 4771 - protein, 460 aa, Homo sapiens
  MISC_FEATURE (303): Xaa equals any of the naturally occurring L-amino acids
  MISC_FEATURE (305): Xaa equals any of the naturally occurring L-amino acids
  MISC_FEATURE (436): Xaa equals any of the naturally occurring L-amino acids
  MISC_FEATURE (442): Xaa equals any of the naturally occurring L-amino acids
  MISC_FEATURE (444): Xaa equals any of the naturally occurring L-amino acids
  MISC_FEATURE (447): Xaa equals any of the naturally occurring L-amino acids
  MISC_FEATURE (448): Xaa equals any of the naturally occurring L-amino acids
LDAPLDTFNGNRFALRLTAIFLQPLGKLVVRALHGPWNTDSPDNLEEVKFLLHMWVALFYSNQNKIIRSSRKVVEHSNPAKYVSINSTLESCELREIEESLGLEKCSADSLLETNEISRAHAAEVSFRDPNCLLPFIKTPLTQGLELCVQNEQKKTFARECDPDTQEDQNFICSYNNEVTGEEAKQESLETSNLVLSGIGSTQTNGPSVPSEEEIVQPLDSTRVASYSGTVTQATFTRTYDGPGSQPVICQSSVYGTLENKVDILDAAVQTKTGTLQDLIQHGSPINNECHPSLERKDDNMGXAXINPEPITLTFEKNAHVPIQTEGVNTADEPTTFKKELIKQVSPAASLRHPVSTSENARTQGLRDIPSLVVAGQKGTKYLCASSVGGETLDKAVCSLQKETPLPVSLPSDKTMVMEALSLAKSSSHLSPSEEXRCTQDXLXQTXXLLGLSLERLLRT

SEQ ID NO: 4772 - protein, 72 aa, Homo sapiens
ASDPTLVLAPQQWLPLTLSRRWLGGGYLWVAGKGVGRFRMVGGTEVPEVKRPLVLTGLTRAWTLGAVLCELA

SEQ ID NO: 4773 - protein, 135 aa, Homo sapiens
WEPTFFGFSGEHNSKHPLGSHMYRNGTQLGHSHGLPRPGMCGAKWGQGPDPRGEGGPQTPRDVSIPRPAFWRHLPGAVLSQQAWGESLVYAGNRVQGPSVPPSALTWAMHPLSPKHKQALLQYGARTGVPSVLWL

SEQ ID NO: 4774 - protein, 106 aa, Homo sapiens
  MISC_FEATURE (105): Xaa equals any of the naturally occurring L-amino acids
HKCFQCFILANGFLKVIKPFQRNWSDKTFFLVCLNKAISEALLSKMTFLSFFKTNLLLLETFCTIKQSRRLKKKKKKKKKKRAAALEDPSLRTRACDVIALLLRXP

SEQ ID NO: 4775 - protein, 287 aa, Homo sapiens
  MISC_FEATURE (13): Xaa equals any of the naturally occurring L-amino acids
  MISC_FEATURE (139): Xaa equals any of the naturally occurring L-amino acids
  MISC_FEATURE (286): Xaa equals any of the naturally occurring L-amino acids
IRHEVCRVLPAPXLIGAMDWKTLQALLSGVNKYSTAFGRIWLSVVFVFRVLVYVVAAERVWGDEQKDFDCNTKQPGCTNVCYDNYFPISNIRLWALQLIFVTCPSLLVILHVAYREERERRHRQKHGDQCAKLYDNAGXKHGGLWWTYLFSLIFKLIIEFLFLYLLHTLWHGFNMPRLVQCANVAPCPNIVDCYIARPTEKKIFTYFMVGASAVCIVLTICELCYLICHRVLRGLHKDKPRGGCSPSSSASRASTCRCHHKLVEAGEVDPDPGNNKLQASAPNLTXI

SEQ ID NO: 4776 - protein, 90 aa, Homo sapiens
CTPFLYTECGLLSEIGSFMVLEPPLYSCLKFPIVTENIGCKAPQSPQVPSVSLNVLVPSRKASASAPFPPVPSPRIMNGYCTVKTVVSFH

SEQ ID NO: 4777 - protein, 121 aa, Homo sapiens
  MISC_FEATURE (1): Xaa equals any of the naturally occurring L-amino acids
XSGQKPGVLILPSVSVLGSGFCRHPLTSAELLGLLPAHHIAYLQCQSLTVTLSALVSLAEPRCPCSRGQKACTWAKGPKVHWTVGKTPDHHLRTLSQNGKFTRTPFLSLCESPRERHCTDI

SEQ ID NO: 4778 - protein, 60 aa, Homo sapiens
  MISC_FEATURE (31): Xaa equals any of the naturally occurring L-amino acids
  MISC_FEATURE (50): Xaa equals any of the naturally occurring L-amino acids
  MISC_FEATURE (54): Xaa equals any of the naturally occurring L-amino acids
FRDHPCKFPKDFFNMVLLIQSGQLNLKSTPXKPSGVDNKAHKLRQFSFLXPFRXGTTTGS

SEQ ID NO: 4779 - protein, 78 aa, Homo sapiens
VCNKIVESCMIKSLLCSEIHSDFLVSPYIICILVFFLTLLPLLPNRDLNLSLFSSSRPGLVPDSSKNLDSKAYFIVCL

SEQ ID NO: 4780 - protein, 36 aa, Homo sapiens
QARIHLTKGNKSWSSTAVAAALELVDPPGCRNSARD

SEQ ID NO: 4781 - protein, 87 aa, Homo sapiens
  MISC_FEATURE (65): Xaa equals any of the naturally occurring L-amino acids
GISFTLTHFAPLPFCYKYYHGMKQKACYLPFHDHFADTVSATSKPSNSMNSRTDLNVVCVQGSYXNFLNLKCHQKTFCSLLLLFFFF

SEQ ID NO: 4782 - protein, 60 aa, Homo sapiens
  MISC_FEATURE (50): Xaa equals any of the naturally occurring L-amino acids
VWLALSVVGSVYTPPFSSLGVFFRNPKATLRAVLTFLSTVDYPCLLGGLXMGQRWRSPSG

SEQ ID NO: 4783 - protein, 62 aa, Homo sapiens
KKKSFSEGEKIVWVWPLHILANYVAIFMASVIKTLLLGSRAVVLDSLHSAHLLKSHESSLES

SEQ ID NO: 4784 - protein, 87 aa, Homo sapiens
TAQGIGCTKLVLKLLLGSPGAHVSHLLPIHISAHLAEAFPDLTSDNVHVMNTPKWLGLLHLSRWILPQHWGFLWAVHHGYISGFQDC

SEQ ID NO: 4785 - protein, 70 aa, Homo sapiens
AKCMLKHVFTSVKSFVDLLEMKGFYLDTVSYTSLTIIFVIVVFCKQKCLWASCRLKIVGKNGLSSGPFKQ

SEQ ID NO: 4786 - protein, 128 aa, Homo sapiens
  MISC_FEATURE (96): Xaa equals any of the naturally occurring L-amino acids
  MISC_FEATURE (105): Xaa equals any of the naturally occurring L-amino acids
  MISC_FEATURE (113): Xaa equals any of the naturally occurring L-amino acids
LNQMILTYYEGEEVNAGRIGLTLVVAGMVGSILCGLWLDYTKTYNFFMTGYLPLGFEFAVEITYPESEGTSSGLLNASAQIFGILFTLAQGKLTSXYGPKAGNIXLCVWMFIXIILTALIKSDLRDTT

SEQ ID NO: 4787 - protein, 98 aa, Homo sapiens
  MISC_FEATURE (17): Xaa equals any of the naturally occurring L-amino acids
  MISC_FEATURE (55): Xaa equals any of the naturally occurring L-amino acids
  MISC_FEATURE (82): Xaa equals any of the naturally occurring L-amino acids
TNDYKVSVGLWFRGPSXSFLFPLALMREMPSSVWIFLGALWRNGVCVLTEESQKXETIFIYCHHKYSPPFKMPVYTAIWETXVLEEAGAEGVKTSSVG

SEQ ID NO: 4788 - protein, 99 aa, Homo sapiens
  MISC_FEATURE (20): Xaa equals any of the naturally occurring L-amino acids
  MISC_FEATURE (51): Xaa equals any of the naturally occurring L-amino acids
  MISC_FEATURE (55): Xaa equals any of the naturally occurring L-amino acids
  MISC_FEATURE (83): Xaa equals any of the naturally occurring L-amino acids
KGLFLHIYIIYVYIYNIYMXIYIIYIYYIYNIYIKYIYICSPLSASLSQGXSVGXCLGPASLLTSSSPLGTLSPYILILDHVXNCFWVNVDIIVIIIIN

SEQ ID NO: 4789 - protein, 81 aa, Homo sapiens
  MISC_FEATURE (31): Xaa equals any of the naturally occurring L-amino acids
  MISC_FEATURE (45): Xaa equals any of the naturally occurring L-amino acids
GFKIGRKCSSGKMCAVQKTHKFFRKQLGPVXVDQIESPRILGSSXLMNGFWLILPVLQFLLLCEMGNTLSASLRCHGNKQN

SEQ ID NO: 4790 - protein, 95 aa, Homo sapiens
STLRPAAGKEWEQWLSAIRSGSMGQWLDFCPRPEECAVLASVSPPVALVQEPTVGCSLPGPLLLWILPTPSCSWGRPFSQRSLNKPKNPQKKKKK

SEQ ID NO: 4791 - protein, 51 aa, Homo sapiens
FICTTFFRVAARTNLCALKCYLLLSVPKYREIMLQISLLLNIMLPDAFSRH

SEQ ID NO: 4792 - protein, 455 aa, Homo sapiens
SDLLFLNYRQLFGEEDADQEVSPDRADPEAAWEPTEAEARARASNEDGDIKRISTKEWAKSTGYDPVKLFTKLFKDDIRYLLTMDKLWRKRKPPVPLDWAEVQSQGEETNASDQQNEPQLGLKDQQVLDVKSYARLFSKSIETLRVHLAEKGDGAELIWDKDDPSAMDFVTSAANLRMHIFSMNMKSRFDIKSMAGNIIPAIATTNAVIAGLIVLEGLKILSGKIDQCRTIFLNKQPNPRKKLLVPCALDPPNPNCYVCASKPEVTVRLNVHKVTVLTLQDKIVKEKFAMVAPDVQIEDGKGTILISSEEGETEANNHKKLSEFGIRNGSRLQADDFLQDYTLLINILHSEDLGKDVEFEVVGDAPEKVGPKQAEDAAKSITNGSDDGAQPSTSTAQEQDDVLIVDSDEEDSSNNADVSEEERSRKRKLDEKENLSAKRSRIEQKEELDDVIALD

SEQ ID NO: 4793 - protein, 78 aa, Homo sapiens
KHRYLVLTGCAWLTQVHLPHGKSSSKPLHDLWGAGSQFVACDLPQPQKIRDHEAPPPPGSGNLIHIARALPVRLWMLT

SEQ ID NO: 4794 - protein, 102 aa, Homo sapiens
PSSPRHISPRMNAVLSAHVCVEAAKVGELWSCPDPFGIAGPSSHWRAGVQLTLGKETSCLRVISCECKAWGSGSLGGKEPVRGLFPLIELPRRASAMPETQT

SEQ ID NO: 4795 - protein, 87 aa, Homo sapiens
EIPLLCFASESSHPHPQNCGAWWALTSTPLLFSFITFDLLKTSERMSVKFFSPSSSLSSLKGRDCANTKQYSFVSANASVDIPIGIK

SEQ ID NO: 4796 - protein, 64 aa, Homo sapiens
  MISC_FEATURE (5): Xaa equals any of the naturally occurring L-amino acids
  MISC_FEATURE (57): Xaa equals any of the naturally occurring L-amino acids
HKEFXRVSGKKKKKKKKKGGRSRGSKLTYACMRRHSSSIVSPKFNSLAVVLQRRDWXNPGVTQL

SEQ ID NO: 4797 - protein, 56 aa, Homo sapiens
DTVLKKIKNCKKMKKKVLSIICIIGIHMSLHKMFNLKEIPLILYVLLSVVCFSFSY

SEQ ID NO: 4798 - protein, 274 aa, Homo sapiens
  MISC_FEATURE (15): Xaa equals any of the naturally occurring L-amino acids
  MISC_FEATURE (16): Xaa equals any of the naturally occurring L-amino acids
  MISC_FEATURE (64): Xaa equals any of the naturally occurring L-amino acids
TCHCLPPPPARAMTXXVPRLSVPAALALGSAALGAAFATGLFLGRRCPPWRGRREQCLLPPEDXRLWQYLLSRSMREHPALRSLRLLTLEQPQGDSMMTCEQAQLLANLARLIQAKKALDLGTFTGYSALALALALPADGRVVTCEVDAQPPELGRPLWRQAEAEHKIDLRLKPALETLDELLAAGEAGTFDVAVVDADKENCSAYYERCLQLLRPGGILAVLRVLWRGKVLQPPKGDVAAECVRNLNERIRRDVRVYISLLPLGDGLTLAFKI

SEQ ID NO: 4799 - protein, 177 aa, Homo sapiens
  MISC_FEATURE (143): Xaa equals any of the naturally occurring L-amino acids
YYRESWYACRYRSGIPGSTHASGSRFQASSQLRAGSWRPRPLPPVVPAVPDGSAMAQPPPDVEGDDCLPAYRHLFCPDLLRDKVAFITGGGSGIGFRIAEIFMRHGCHTVIASRSLPRVLTAARKLAGATGRRCLPLSMDVRXPPAVMAAVDQALKEFGRIDILINCAAGNFLCPAG

SEQ ID NO: 4800 - protein, 66 aa, Homo sapiens
  MISC_FEATURE (1): Xaa equals any of the naturally occurring L-amino acids
XHLHPLPFQSFASPPHLAIKLHEDFSSSGSAWNLSYILPFPTCSLECPFHKYAPTAGSIFFSFRHL

SEQ ID NO: 4801 - protein, 68 aa, Homo sapiens
  MISC_FEATURE (4): Xaa equals any of the naturally occurring L-amino acids
  MISC_FEATURE (17): Xaa equals any of the naturally occurring L-amino acids
  MISC_FEATURE (61): Xaa equals any of the naturally occurring L-amino acids
AISXVRTSNSPILSYVXSNKLHHLLTGFFISVIIVFISRYSICLKNICMILHGFNSPDEYXAFNHPST

SEQ ID NO: 4802 - protein, 84 aa, Homo sapiens
  MISC_FEATURE (2): Xaa equals any of the naturally occurring L-amino acids
  MISC_FEATURE (17): Xaa equals any of the naturally occurring L-amino acids
  MISC_FEATURE (27): Xaa equals any of the naturally occurring L-amino acids
  MISC_FEATURE (61): Xaa equals any of the naturally occurring L-amino acids
  MISC_FEATURE (62): Xaa equals any of the naturally occurring L-amino acids
TXFFLMKCIVFPLALKXHIWCQAVLLXLTGEWQLCLLSASPAVPAVSGTCIMTRLHFPPIXXQRFWEEECDCMARSLQPQSAAC

SEQ ID NO: 4803 - protein, 88 aa, Homo sapiens
  MISC_FEATURE (41): Xaa equals any of the naturally occurring L-amino acids
  MISC_FEATURE (45): Xaa equals any of the naturally occurring L-amino acids
  MISC_FEATURE (54): Xaa equals any of the naturally occurring L-amino acids
  MISC_FEATURE (65): Xaa equals any of the naturally occurring L-amino acids
  MISC_FEATURE (74): Xaa equals any of the naturally occurring L-amino acids
GSVLHHPHATPTTHRCTATVTGASCLRMGLRVINFFKGYIXIAYXIQIKGPEFXANCTYLFANLXHHRKPKDSXCGQSFTLQSLKYFF

SEQ ID NO: 4804 - protein, 26 aa, Homo sapiens
RSSLFHQAGVQWHDLSSLQSPPPQFK

SEQ ID NO: 4805 - protein, 404 aa, Homo sapiens
  MISC_FEATURE (310): Xaa equals any of the naturally occurring L-amino acids
IDRELSPEGPGKEKELPGQTLHWGPEATEAAGRGLQPLKLDYRALAAVPSAGSVQRVPSGAAGGKMAESPCSPSGQQPPSPPSPDELPANVKQAYRAFAAVPTSHPPEDAPAQPPTPGPAASPEQLSFRERQKYFELEVRVPQAEGPPKRVSLVGADDLRKMQEEEARKLQQKRAQMLREAAEAGAEARLALDGETLGEEEQEDEQPPWASPSPTSRQSPASPPPLGGGAPVRTAKAERRHQERLRVQSPEPPAPERALSPAELRALEAEKRALWRAARMKSLEQDALRAQMVLSRSQEGRGTRGPLERXAEAPSPAPTPSPTPVEDLGPQTSTSPGRLSPDFAEELRSLEPSPSPGPQEEDGEVALVLLGRPSPGAVGPEDVALCSSRRPVRPGRRGLGPVPS

SEQ ID NO: 4806 - protein, 79 aa, Homo sapiens
  MISC_FEATURE (2): Xaa equals any of the naturally occurring L-amino acids
GXKSWSSTAVAAALELVDPPGCRNSARVCLFRLKFFLKCLVIPGFLLIIKEKNADSLDPGRASLPDCRLASGIHGFPKC

SEQ ID NO: 4807 - protein, 97 aa, Homo sapiens
PPPSLSFSSSVFLLSSFFPSPSSIATFSPTRTQAYKRRFLMLLCLLTPLFSCFQQVFLPPVPQLLLLLRRSDLPLMVIPAPLRPTSAKKEKVKQQQQ

SEQ ID NO: 4808 - protein, 90 aa, Homo sapiens
  MISC_FEATURE (6): Xaa equals any of the naturally occurring L-amino acids
ASYYMXLHFPQWFVHSSALGLVLAPPFSSPGTDPTFPCIYCRLLNMIMTRLAFSFITCLCPNLKEVCLILPEKNCNSRHAGFVGPAKLRQ

SEQ ID NO: 4809 - protein, 52 aa, Homo sapiens
HCYHSHAKHWLHTCSLFVINIKRLDLKPSINERPFIWHSWNKTLHRYQPLHS

SEQ ID NO: 4810 - protein, 90 aa, Homo sapiens
FVGLTLPFSFSLECLLGYALVGLMSFLGLGGVCVWLVWGTFRGSSCTFPLLSVCSSLHLLFVCVHFFSEQSFSLATLSSLTVFLFSSSLR

SEQ ID NO: 4811 - protein, 78 aa, Homo sapiens
LKLKRRQGSIQAEPVLVQTKNLTGTMEGSSSPLLTFYVMERLELIKVLPFFYSPEYQRQLKSATNDLPVSCFIFVIDF

SEQ ID NO: 4812 - protein, 46 aa, Homo sapiens
VPATTPGQYLYFLWRRGFAMLARLVSNYWAQVIHPPQPPKVLRLQA

SEQ ID NO: 4813 - protein, 86 aa, Homo sapiens
WVPLLFAFSFSENVCVLPLFWLHLQNISFVPMYMCKHAIACVVGVLYFVWEKNYQNEEENFPYLCTRFLCFFFEFSGVDINLIPSW

SEQ ID NO: 4814 - protein, 71 aa, Homo sapiens
LWQNLFWHNHICSLYKISFLCFRKNVSYYSESCDSDSSWFGAQKFLNMSLLLVKHRICFLQKFIFNEEYLS

SEQ ID NO: 4815 - protein, 106 aa, Homo sapiens
  MISC_FEATURE (77): Xaa equals any of the naturally occurring L-amino acids
  MISC_FEATURE (105): Xaa equals any of the naturally occurring L-amino acids
  MISC_FEATURE (106): Xaa equals any of the naturally occurring L-amino acids
ALHTCWYLLANCAALTCHLSLCPNTTTVATVPTTIPTVTLVIAYSATNSPCGSTSMLGLLALPSMSTYMAASAYTTXLLTFTLVGTLNLAIVRLLSSNRLTCNNXX

SEQ ID NO: 4816 - protein, 62 aa, Homo sapiens
  MISC_FEATURE (57): Xaa equals any of the naturally occurring L-amino acids
WDCRHPPSCPAKFCTFVEMEFHHVGQAGLELLTSGDLPTLASQSAGITGVSHHAWTXCCCCF

SEQ ID NO: 4817 - protein, 75 aa, Homo sapiens
  MISC_FEATURE (52): Xaa equals any of the naturally occurring L-amino acids
  MISC_FEATURE (58): Xaa equals any of the naturally occurring L-amino acids
MKEDLFSLRSVCGVSCPGLLSEVWPQGLREVARTPQGGPHHRGCCPTGSSPXSGTLPXSLWEGEMATGLENRHPV

SEQ ID NO: 4818 - protein, 187 aa, Homo sapiens
  MISC_FEATURE (157): Xaa equals any of the naturally occurring L-amino acids
  MISC_FEATURE (167): Xaa equals any of the naturally occurring L-amino acids
  MISC_FEATURE (174): Xaa equals any of the naturally occurring L-amino acids
GLVGPLLVCRAGALGADGKQKGVDKEFFLLFTVLDENKSWYSNANQAAAMLDFRLLSEDIEGFQDSNRMHAINGFLFSNLPRLDMCKGDTVAWHLLGLGTETDVHGVMFQGNTVQLQGMRKGAAMLFPHTFVMAIMQPDNLGTFEIYCQAGKPSRTXMKAIYNGSNXLGTKPPXATLPTCKNLLFHG

SEQ ID NO: 4819 - protein, 127 aa, Homo sapiens
  MISC_FEATURE (127): Xaa equals any of the naturally occurring L-amino acids
AIPLTNDGVPSESSAGRLLCVGRLGLGRGLSPNLGPAEQEQNHYLAQLFGLYGENGTLTAGGLARLLHSLGLGRVQGLRLGQHGPLTGRAASPAADNSTHRPQNPELSVDVWAGMPLGPSGWGDLEX

SEQ ID NO: 4820 - protein, 216 aa, Homo sapiens
  MISC_FEATURE (91): Xaa equals any of the naturally occurring L-amino acids
  MISC_FEATURE (197): Xaa equals any of the naturally occurring L-amino acids
  MISC_FEATURE (215): Xaa equals any of the naturally occurring L-amino acids
ASMDPDSDQPLNSLDVKPLRKPRIPIIIALLSLASIIIVVVLIKVILDKYYFLCGQPLHFIPRKQLCDGELDCPLGEDEEHCVKSFPEGPXVAVRLSKDRSTLQVLDSATGNWFSACFDNFTEALAETACRQMGYSSKPTFRAVEIGPDQDLDVVEITENSQELRMRNSSGPCLSGSLVSLHCLACGKSLKTPRVVXGEEASVDSWPWQVSIQYXK

SEQ ID NO: 4821 - protein, 139 aa, Homo sapiens
SSNTFRLQVQTQESKAQKELERQLIMQSEMRERQMAMQIAWSREFLKYFGTFFGLAAISLTAGAIKKKKPAFLVPIVPLSFILTYQYDLGYGTLLERMKGEAEDILETEKSKLQLPRGMITFESIEKARKEQSRFFIDK

SEQ ID NO: 4822 - protein, 121 aa, Homo sapiens
GRFAPSPPPALPGNPLKMRPPVLREPGAPASAPAQPLPGADPGWDFGGPSLSPLRENRPGRCGEGPRAILAGGAGRRTRARRPSPARTSSRQSSGKGSLFFSLGKIKSPRENKAGKGAPFL

SEQ ID NO: 4823 - protein, 364 aa, Homo sapiens
  MISC_FEATURE (4): Xaa equals any of the naturally occurring L-amino acids
  MISC_FEATURE (5): Xaa equals any of the naturally occurring L-amino acids
  MISC_FEATURE (10): Xaa equals any of the naturally occurring L-amino acids
  MISC_FEATURE (250): Xaa equals any of the naturally occurring L-amino acids
DGGXXTQWAXEFPFDVDALFPERITVLDQHLRPPARRPGTTTPARVDLQQQIMTIIDELGKASAKAQNLSAPITSASRMQSNRHVVYILKDSSARPAGKGAIIGFIKVGYKKLFVLDDREAHNEVEPLCILDFYIHESVQRHGHGRELFQYMLQKERVEPHQLAIDRPSQKLLKFLNKHYNLETTVPQVNNFVIFEGFFAHQHRPPAPSLRATRHSRAAAVDPTPAAPARKLPPKRAEGDIKPYSSSDRXFLKVAVEPPWPLNRAPRRATPPAHPPPRSSSLGNSPERGPLRPFVPEQELLRSLRLCPPHPTARLLLAADPGGSPAQRRRTSSLPRSEESRYLTAYPSPCPGGDLGVGQGNPFS

SEQ ID NO: 4824 - protein, 145 aa, Homo sapiens
NTAKFTNCTCCIVKPHAVSEGLLGKILMAIRDAGFEISAMQMFNMDRVNVEEFYEVYKGVVTEYHDMVTEMYSGPCVAMEIQQNNATKTFREFCGPADPEIARHLRPGTLRAIFGKTKIQNAVHCTDLPEDGLLEVQYFFKILDN

SEQ ID NO: 4825 - protein, 404 aa, Homo sapiens
  MISC_FEATURE (14): Xaa equals any of the naturally occurring L-amino acids
QNVIMFVGLQGSGXTTTCSKLAYYYQRKGWKTCLICADTFRAGAFDQLKQNATKARIPFYGSYTEMDPVIIASEGVEKFKNENFEIIIVDTSGRHKQEDSLFEEMLQVANAIQPDNIVYVMDASIGQACEAQAKAFKDKVDVASVIVTKLDGHAKGGGALSAVAATKSPIIFIGTGEHIDDFEPFKTQPFISKLLGMGDIEGLIDKVNELKLDDNEALIEKLKHGQFTLRDMYEQFQNIMKMGPFSQILGMIPGFGTDFMSKGNEQESMARLKKLMTIMDSMNDQELDSTDGAKVFSKQPGRIQRVARGSGVSTRDVQELLTQYTKFAQMVKKMGGIKGLFKGGDMSKNVSQSQMAKLNQQMAKMMDPRVLHHMGGMAGLQSMMRQFQQGAAGNMKGMMGFNNM

SEQ ID NO: 4826 - protein, 66 aa, Homo sapiens
SLISLYFSFFVCEYYPYTTTPKTSELFALFFHTTWGREPWEYAHGIIIHSVVWKKKMLTSALEGSY

SEQ ID NO: 4827 - protein, 90 aa, Homo sapiens
HASADAWADAWEKSCEEIDLDKHKSIQRKKTEVEIETVHVSTEKLKNRKEKKSRDVVSKKEERKRTKKKKEQGQERTEEEMLWDQSILGF

SEQ ID NO: 4828 - protein, 154 aa, Homo sapiens
  MISC_FEATURE (13): Xaa equals any of the naturally occurring L-amino acids
  MISC_FEATURE (117): Xaa equals any of the naturally occurring L-amino acids
  MISC_FEATURE (126): Xaa equals any of the naturally occurring L-amino acids
  MISC_FEATURE (139): Xaa equals any of the naturally occurring L-amino acids
GGFLHPQPERRPXGPAPRKPPVARPRSGLGSPGKRFGRAHGDCVSGAQLCGCPSMDDYMVLRMIGEGSFGRALLVQHESSNQMFAMKEIRLPKSFSNTQNSRKEAVLLAKMKHPNIXAFKESFEAXGHLYIVMEYCDGXDLMQKIKQQKRKVIS

SEQ ID NO: 4829 - protein, 63 aa, Homo sapiens
RLHRYPEAMASKGLQDLKQQVEGTAQEAAMDQLAKTTQETIDKTANQASDTFSGIGKKFGLLK

SEQ ID NO: 4830 - protein, 261 aa, Homo sapiens
  MISC_FEATURE (146): Xaa equals any of the naturally occurring L-amino acids
  MISC_FEATURE (226): Xaa equals any of the naturally occurring L-amino acids
VKKDTLTEEETQFYIAETVLAIDSIHQLGFIHRDIKPDNLLLDSKGHVKLSDFGLCTGLKKAHRTEFYRNLNHSLPSDFTFQNMNSKRKAETWKRNRRQLAFSTVGTPDYIAPEVFMQTGYNKLCDWWSLGVIMYEMLIGYPPFCXETPQETYKKVMNWKETLTFPPEVPISEKAKDLILRFCCEWEHRIGAPGVEEIKSNSFFEGVDWEHIRERPAAISIEIKSXDDTSNFDEFPESDILKPTDAFLGDTPPHPKGSPAT

SEQ ID NO: 4831 - protein, 178 aa, Homo sapiens
FRALHRGAALDLSPLHRSPHPSRQAIFCWMSFSAYQTAFICLGLLVQQIIFFLGTTALAFLVLMPVLHGRNLLLFRSLESSWPFWLTLALAVILQNMAAHWVFLETHDGHPQLTNRRVLYAATFLLFPLNVLVGAMVATWRVLLSALYNAIHLGQMDLSLLPPRAALSTPATTRTETS

SEQ ID NO: 4832 - protein, 178 aa, Homo sapiens
  MISC_FEATURE (28): Xaa equals any of the naturally occurring L-amino acids
  MISC_FEATURE (36): Xaa equals any of the naturally occurring L-amino acids
TPAGTGPEFPGRPTRPPIFPVDNAIDNXKEIQVALXILMAAYAMAEAFMSTGVGASLILIALKVGITAKTVAVIGAIVTSILSIATGTSWGTFAACAPIFLWLNHIVGGNILLTTAAIAGGACFGDNIGLISDTTIVSSGIQKVEVVRRIRHQGVWSALVLLSGIIVFAIVGFTWIYP

SEQ ID NO: 4833 - protein, 40 aa, Homo sapiens
LCCFKYLGDCFIISSTKKTFNFAIETVELCHAFIRSSALC

SEQ ID NO: 4834 - protein, 69 aa, Homo sapiens
  MISC_FEATURE (48): Xaa equals any of the naturally occurring L-amino acids
  MISC_FEATURE (69): Xaa equals any of the naturally occurring L-amino acids
TQLRECLFRAWSCYLYLKSSHPVPCFRAGLQFHCSFLKLLCPQLTLFXNVVFHWTGLLFLVSHAFGFYX

SEQ ID NO: 4835 - protein, 306 aa, Homo sapiens
  MISC_FEATURE (20): Xaa equals any of the naturally occurring L-amino acids
  MISC_FEATURE (39): Xaa equals any of the naturally occurring L-amino acids
VSRPAGKDMMRKLEKHMTAXKGPMIVLVLDEMDQLDSKXQDVLYTLFEWPWLSNSHLVLIGIANTLDLTDRILPRLQAREKCKPQLLNFPPYTRNQIVTILQDRLNQVSRDQVLDNAAVQFCARKVSAVSGDVRKALDVCRRAIEIVESDVKSQTILKPLSECKSPSEPLIPKRVGLIHISQVISEVDGNRMTLSQEGAQDSFPLQQKILVCSLMLLIRQLKIKEVTLGKLYEAYSKVCRKQQVAAVDQSECLSLSGLLEARGILGLKRNKETRLTKVFFKIEEKEIEHALKDKALIGNILATGLP

SEQ ID NO: 4836 - protein, 127 aa, Homo sapiens
  MISC_FEATURE (22): Xaa equals any of the naturally occurring L-amino acids
  MISC_FEATURE (25): Xaa equals any of the naturally occurring L-amino acids
AAAGPGACWASPPRRLHAPTAXSTXSFQARQLLEKEFSNLISLGTDRRLDEDSAKSFSRSPSWRKMFREKDLRGVTPDSAEMLPPNFRSAAAGALGSPGLPLRKLQPEGQTSGSSRADGVSVRTYSC

SEQ ID NO: 4837 - protein, 78 aa, Homo sapiens
  MISC_FEATURE (76): Xaa equals any of the naturally occurring L-amino acids
EAANMILVDDDFSAIMNAVEEGKGIFYNIKNFVRFQLSTSISALSLITLSTVFNLPSPLNAMQILWINIIMDGPPXQR

SEQ ID NO: 4838 - protein, 61 aa, Homo sapiens
NIVCSDFIKDIFKSPIYSRIFSYDVIYEKDVCTNRCCNTTVVGFYCLVINVYNISKGNYVL

SEQ ID NO: 4839 - protein, 142 aa, Homo sapiens
  MISC_FEATURE (24): Xaa equals any of the naturally occurring L-amino acids
ALWGDASGQSCLLIFILRASALEXLPHAFSVDHSGPPVGVACQARTPPGGQSRNLRGAETPFISGCHRPEQHWAGCPLLTGWQHKDNMSRGRRRRGAQAAGHSPAAPEALISDHQAMTFLCALQKAFNCDQAVCSDTLSGDF

SEQ ID NO: 4840 - protein, 163 aa, Homo sapiens
  MISC_FEATURE (20): Xaa equals any of the naturally occurring L-amino acids
  MISC_FEATURE (61): Xaa equals any of the naturally occurring L-amino acids
  MISC_FEATURE (65): Xaa equals any of the naturally occurring L-amino acids
  MISC_FEATURE (79): Xaa equals any of the naturally occurring L-amino acids
  MISC_FEATURE (100): Xaa equals any of the naturally occurring L-amino acids
  MISC_FEATURE (113): Xaa equals any of the naturally occurring L-amino acids
  MISC_FEATURE (114): Xaa equals any of the naturally occurring L-amino acids
GPRHADFPCSAVVRKCLAAXGRRRGRQTYSRFQTLELEKEFLFNPYLTRKRRIEVSHALAXTERXVKIWFQNRRMNGKXKTTRQISRFPAGGEGRGNEKXSPRAGGRQSRRPXXLTSTFKIYHRLLKLIITICCGHHLFSLLERTLPVFQATFMSLLLRFSVL

SEQ ID NO: 4841 - protein, 183 aa, Homo sapiens
  MISC_FEATURE (11): Xaa equals any of the naturally occurring L-amino acids
  MISC_FEATURE (12): Xaa equals any of the naturally occurring L-amino acids
  MISC_FEATURE (19): Xaa equals any of the naturally occurring L-amino acids
  MISC_FEATURE (30): Xaa equals any of the naturally occurring L-amino acids
ELKRLTIGKNXXRLTGNRXGIPGSTHASEXEVEEEGDVDSDEEEEEDEESSSEGLEAEDWAQGVVEAGGSFGAYGAQEEAQCPTLHFLEGGEDSDSDSEEEDDEEEDDEDEDDDDDEEDGDEVPVPSFGEAMAYFAMVKRYLTSFPIDDRVQSHILHLEHDLVHVTRKNHARQAGVRGLGHQS

SEQ ID NO: 4842 - protein, 313 aa, Homo sapiens
GRFQKCLAVGMSHNAIRFGRMPQAEKEKLLAEISSDIDQLNPESADLRALAKHLYDSYIKSFPLTKAKARAILTGKTTDKSPFVIYDMNSLMMGEDKIKFKHITPLQEQSKEVAIRIFQGCQFRSVEAVQEITEYAKSIPGFVNLDLNDQVTLLKYGVHEIIYTMLASLMNKDGVLISEGQGFMTREFLKSLRKPFGDFMEPKFEFAVKFNALELDDSDLAIFIAVIILSGDRPGLLNVKPIEDIQDNLLQALELQLKLNHPESSQLFAKLLQKMTDLRQIVTEHVQLLQVIKKTETDMSLHPLLQEIYKDLY

SEQ ID NO: 4843 - protein, 187 aa, Homo sapiens
  MISC_FEATURE (10): Xaa equals any of the naturally occurring L-amino acids
KSGILVNNVXMSYEYPEYFLDVPDLDNVIKKMININILSVCKMTQLVLPGMVERSKGAILNISSGSGMLPVPLLTIYSATKTFVDFFSQCLHEEYRSKGVFVQSVLPYFVATKLAKIRKPTLDKPSPETFVKSAIKTVGLQSRTNGYLIHALMGSIISNLPSWIYLKIVMNMNKSTRAHYLKKTKKN

SEQ ID NO: 4844 - protein, 99 aa, Homo sapiens
SIEFSGHLFFPLPLLRPSPPLIIIQVVVKIVLLSDPFLVWLFIPSEQVNVGATALVSTVSLTVNEPPGVSSKKRKGVTGTTALFHFINCLFMLPAQVST

SEQ ID NO: 4845 - protein, 301 aa, Homo sapiens
LRVFLCVFFYFAWLFEHYWTLVLEGKTFQLYSHNLIALFEHAKKPGLAAHIQTHRFPDRILPRKFALTTKIPDTKGCHKCCIVRNPYTGHKYLCGALQSGIVLLQWYEPMQKFMLIKHFDFPLPSPLNVFEMLVIPEQEYPMVCVAISKGTESNQVVQFETINLNSASSWFTEIGAGSQQLDSIHVTQLERDTVLVCLDKFVKIVNLQGKLKSSKKLASELSFDFRIESVVCLQDSVLAFWKHGMQGKSFKSDEVTQEISDETRVFRLLGSDRVVVLESRPTENPTAHSNLYILAGHENSY

SEQ ID NO: 4846 - protein, 355 aa, Homo sapiens
  MISC_FEATURE (342): Xaa equals any of the naturally occurring L-amino acids
  MISC_FEATURE (348): Xaa equals any of the naturally occurring L-amino acids
  MISC_FEATURE (351): Xaa equals any of the naturally occurring L-amino acids
  MISC_FEATURE (352): Xaa equals any of the naturally occurring L-amino acids
FPGSGNMAKDAGLIEANGELKVFIDQNLSPGKGVVSLVAVHPSTVNPLGKQLLPKTFGQSNVNIAQQVVIGTPQRPAASNTLVVGSPHTPSTHFASQNQPSDSSPWSAGKRNRKGEKNGKGLRHFSMKVCEKVQRKGTTSYNEVADELVAEFSAADNHILPNESAYDQKNIRRRVYDALNVLMAMNIISKEKKEIKWIGLPTNSAQECQNLEVERQRRLERIKQKQSQLQELILQQIAFKNLVQRNRHAEQQASRPPPPNSVIHLPFIIVNTSKKTVIDCSISNDKFEYLFNFDNTFEIHDDIEVLKRMGMACGLESGSCSAEDLKMARSLVPKALEPYVTXMAQGTXGGXXLCQ

SEQ ID NO: 4847 - protein, 263 aa, Homo sapiens
WITYQGFLSQWTLTTYLDVQRCLEYLGYLGYSILTEQESQASAVTVTRDKKIDLQKKQTQRNVFRCNVIGVKNCGKSGVLQALLGRNLMRQKKIREDHKSYYAINTVYVYGQEKYLLLHDISESEFLTEAEIICDVVCLVYDVSNPKSFEYCARIFKQHFMDSRIPCLIVAAKSDLHEVKQEYSISPTDFCRKHKMPPPQAFTCNTADAPSKDIFVKLTTMAMYPHVTQADLKSSTFWLRASFGATVFAVLGFAMYKALLKQR

SEQ ID NO: 4848 - protein, 285 aa, Homo sapiens
GRMNWTGLYTLLSGVNRHSTAIGRVWLSVIFIFRIMVLVVAAESVWGDEKSSFICNTLQPGCNSVCYDQFFPISHVRLWSLQLILVSTPALLVAMHVAHQQHIEKKMLRLEGHGDPLHLEEVKRHKVHISGTLWWTYVISVVFRLLFEAVFMYVFYLLYPGYAMVRLVKCDVYPCPNTVDCFVSRPTEKTVFTVFMLAASGICIILNVAEVVYLIIRACARRAQRRSNPPSRKGSGFGHRLSPEYKQNEINKLLSEQDGSLKDILRRSPGTGAGLAEKSDRCSAC

SEQ ID NO: 4849 - protein, 45 aa, Homo sapiens
GQDGETPSLLKIQRISWAWWRAPVIPATREAEARESLEPRRWRLQ

SEQ ID NO: 4850 - protein, 280 aa, Homo sapiens
RAESVPAHPCGFPAPLPPTRMMESKMIAAIHSSSADATSSSNYHSFVTASSTSVDDALPLPLPVPQPKHASQKTVYSSFARPDVTTEPFGPDNCLHFNMTPNCQYRPQSVPPHHNKLEQHQVYGARSEPPASMGLRYNTYVAPGRNASGHHSKPCSRVEYVSSLSSSVRNTCYPEDIPPYPTIRRVQSLHAPPSSMIRSVPISRTEVPPDDEPAYCPRPLYQYKPYQSSQARSDYHVTQLQPYFENGRVHYRYSPYSSSSSSYYSPDGALCDVDAYGQSS

SEQ ID NO: 4851 - protein, 80 aa, Homo sapiens
  MISC_FEATURE (39): Xaa equals any of the naturally occurring L-amino acids
AMKNNNIKPYGLILKFIILIQKLPHTKVTELPYVSHIVXEHKTLTTPLIVSTLFCKYSEYFGFILSRIFVFNFANEIFNN

SEQ ID NO: 4852 - protein, 85 aa, Homo sapiens
  MISC_FEATURE (83): Xaa equals any of the naturally occurring L-amino acids
PAKGKKKCSPHSCKGLQLATANRKIKMIEPFGNQYIVARPVYSTNAFEENHKKTGRHHKTFLDHLKVCCNCSPQKARELSSLXFP

SEQ ID NO: 4853 - protein, 82 aa, Homo sapiens
  MISC_FEATURE (29): Xaa equals any of the naturally occurring L-amino acids
LSACFAYHRDISMAVPPCRVAYQTDVDCXISWQHQSMGCLTFWYLSSDHPYPMFSFKHYPASLFIIRNSGPSVWWHLESFVP

SEQ ID NO: 4854 - protein, 430 aa, Homo sapiens
  MISC_FEATURE (397): Xaa equals any of the naturally occurring L-amino acids
  MISC_FEATURE (417): Xaa equals any of the naturally occurring L-amino acids
  MISC_FEATURE (429): Xaa equals any of the naturally occurring L-amino acids
EPLIELSNPGASGSLFFVTSDDEFIIKTVQHKEAEFLQKLLPGYYMNLNQNPRTLLPKFYGLYCMQSGGINIRIVVMNNVLPRSMRMHFTYDLKGSTYKRRASRKEREKSNPTFKDLDFLQDMHEGLYFDTETYNALMKTLQRDCRVLESFKIMDYSLLLGIHFLDHSLKEKEEETPQNVPDAKRTGMQKVLYSTAMESIQGPGKSGDGIITENPDTMGGIPAKSHRGEKLLLFMGIIDILQSYRLMKKLEHSWKALVYDGDTVSVHRPSFYADRFLKFMNSRVFKKIQALKASPSKKRCNSIAALKATSQEIVSSISQEWKDEKRDLLTEGQSFSSLDEEALGSRHRPDLVPSTPSLFEAASLATTISSSSLYVNEHYPHDRPTLYFKQQRVTFQXQHFTLGRGDLLLGPLGPNIXGSCRVTLFLWFXR

SEQ ID NO: 4855 - protein, 63 aa, Homo sapiens
KIVSFFFFYRKLSLCNSVSFRFLSCFCKLWERLTMQMCQRHTVGCNINNFKCKFLWINYFYIL

SEQ ID NO: 4856 - protein, 128 aa, Homo sapiens
ACPRPRTPDPSHPFQRPRARPWTELLVLCRETIQPKLWEAQSIEWAEAAGAEPGRVLGVHPSLRRQVPQGPTHLKPACTVEVVEVDTPRGFSKARLAAPCSGKLNYSRFRSSVDSHQSGGVLKEFYVD

SEQ ID NO: 4857 - protein, 175 aa, Homo sapiens
HELTDAASIAAARGEMSEVRPLSRDILMETLLYEQLLEPPTMEVLGMTDSEEDLDPMEDFDSLECMEGSDALALRLACIGDEMDVSLRAPRLAQLSEVAMHSLGLAFIYDQTEDIRDVLRSFMDGFTTLKENIMRFWRSPNPGSWVSCEQVLLALLLLLALLLPLLSGGLHLLLK

SEQ ID NO: 4858 - protein, 179 aa, Homo sapiens
STLRIPGPCFPSEKTHNHDPQPGDPNSRPSSPKPAQPALKMQVLYEFEARNPRELTVVQGEKLEVLDHSKRWWLVKNEAGRSGYIPSNILEPLQPGTPGTQGQSPSRVPMLRLSSRPEEVTDWLQAENFSTATVRTLGSLTGSQLLRIRPGELQMLCPQEAPRILSRLEAVRRMLGISP

SEQ ID NO: 4859 - protein, 111 aa, Homo sapiens
LRRSGLSRDATLTCLVPSAAFGCAGKLRRQWPRDPACLRRPRLDAKELQHPGDKMPTGKQLADIGYKTFSTSMMLLTVYGGYLCSVRVYHYFQWRRAQRQAAEEQKTSGIM

SEQ ID NO: 4860 - protein, 114 aa, Homo sapiens
  MISC_FEATURE (63): Xaa equals any of the naturally occurring L-amino acids
PMGRRLWRLLLSPQLPAGGTVSPFPQGTWLSGGNAHFPGLDCQLFLAGEEPCLSAPEPTVRGXSRLQPLAQSQQPAKHTEGDCHLPLPAAEPQRSDGSYTGQGFLLGITSHRNQ

SEQ ID NO: 4861 - protein, 319 aa, Homo sapiens
RAYKPSRVLRELQLDKDSVWHGCGEVLKAKYKGKSYRATVEIVKTADRVTEFCRQTCIKLECCPNLFGPRMVLDKCSENCSVLTKTKYTHYYGKKKNKRIGRPPGGHSNLACALKKASKRRKRRKNVFVHKKKRSSASVDNTPAGSPQGSGGEDEDDPDEGDDDSLSEGSTSEQQDELQEESEMSEKKSCSSSPTQSEISTSLPPDRQRRKRELRTFSFSDDENKPPSPKEIRIEVAERLHLDSNPLKWSVADVVRFIRSTDCAPLARIFLDQEIDGQALLLLTLPTVQECMDLKLGPAIKLCHHIERIKFAFYEQFAN

SEQ ID NO: 4862 - protein, 99 aa, Homo sapiens
LPPHHPPHLFSGRVGIAAGGDFGSLATPARTAGQPLCGDAWCPICRPSEECTAFTFYCVRVHPDCSIQKSFFFPHRQSGNDSFPDCFCLVPGNLESIPQ

SEQ ID NO: 4863 - protein, 59 aa, Homo sapiens
DPSILETNAPLKSNIYTAVNICKVSMFNSLRILRIMDLLAKIPLKQLSHISNFYLGKQV

SEQ ID NO: 4864 - protein, 91 aa, Homo sapiens
  MISC_FEATURE (60): Xaa equals any of the naturally occurring L-amino acids
DKAKGPLLAGHPCPIFSPGPFPCGHREVWPEYPTPAPLHPELGATSEVSSLSEHAFPCSXRGMSRLSDAGAERPGRKGVQPVVCKALVGTC

SEQ ID NO: 4865 - protein, 84 aa, Homo sapiens
RRFCSNNRDQRVNQIWFSCYNCMIQRQFNHPKFPWPPQSRPAIRFLLQVGVNLHFESCGSFGDLVLFYFALLIKELVEKKKKKT

SEQ ID NO: 4866 - protein, 105 aa, Homo sapiens
VNSRRGGKRSCRGGKNKPVPTTETPNHLSPVDGPAKTSTQQDYRGRNPKCWCGRSKTWGEFLDLELRAMGLDMTGTNSCHMFMVRCHTFSAVLFHQYLPGKQRMC

SEQ ID NO: 4867 - protein, 165 aa, Homo sapiens
  MISC_FEATURE (77): Xaa equals any of the naturally occurring L-amino acids
  MISC_FEATURE (144): Xaa equals any of the naturally occurring L-amino acids
  MISC_FEATURE (145): Xaa equals any of the naturally occurring L-amino acids
  MISC_FEATURE (157): Xaa equals any of the naturally occurring L-amino acids
RFTASSSSGMVPKLPAGKMNNRDLKPQPDIVLLPLPTAYELDSTKLKSPLITSPMFRNVPTANPTEPGIRRVPGASXVIRESSSTTGMVVGIVAAAALCILILLYAMYKYRNRDEGSYQVDETRNYISNSAQSNGTLMKGESSXXRRAGHKKPEKTXGQGKYLTW

SEQ ID NO: 4868 - protein, 48 aa, Homo sapiens
  MISC_FEATURE (15): Xaa equals any of the naturally occurring L-amino acids
  MISC_FEATURE (32): Xaa equals any of the naturally occurring L-amino acids
  MISC_FEATURE (35): Xaa equals any of the naturally occurring L-amino acids
  MISC_FEATURE (37): Xaa equals any of the naturally occurring L-amino acids
  MISC_FEATURE (41): Xaa equals any of the naturally occurring L-amino acids
SLAKHLNHLSILSWXIIIKAQNNLLLENMCFXNEXKXIKKXKKGAAGL

SEQ ID NO: 4869 - protein, 86 aa, Homo sapiens
EGMGHTSPRADPAGGSPGAGSCRPGAGPCHPGRARDMAGPGHPGAGLGRPGRHREGRDGRPRPSAVPATPMHRSSSLPHPKAVAGA

SEQ ID NO: 4870 - protein, 144 aa, Homo sapiens
  MISC_FEATURE (4): Xaa equals any of the naturally occurring L-amino acids
HRAXSEAEMQWRLQVNRLQELIDQLECKAPRLEPLREEDLAKGPDLHILMAQRQVQVAEEGLQDFHRALRCYVDFTGAQSHCLHVSAQKMLDGASFTLYEFWQDEASWRRHQQSPGSKAFQRILIDHCGPRTPSPLCSSQPPGG

SEQ ID NO: 4871 - protein, 595 aa, Homo sapiens
  MISC_FEATURE (392): Xaa equals any of the naturally occurring L-amino acids
  MISC_FEATURE (393): Xaa equals any of the naturally occurring L-amino acids
  MISC_FEATURE (571): Xaa equals any of the naturally occurring L-amino acids
LIQNVTQNDTGFYTLHVIKSDLVNEEATGQFRVYPELPKPSISSNNSKPVEDKDAVAFTCEPETQDATYLWWVNNQSLPVSPRLQLSNGNRTLTLFNVTRNDTASYKCETQNPVSARRSDSVILNVLYGPDAPTISPLNTSYRSGENLNLSCHAASNPPAQYSWFVNGTFQQSTQELFIPNITVNNSGSYTCQAHNSDTGLNRTTVTTITVYAEPPKPFITSNNSNPVEDEDAVALTCEPEIQNTTYLWWVNNQSLPVSPRLQLSNDNRTLTLLSVTRNDVGPYECGIQNELSVDHSDPVILNVLYGPDDPTISPSYTYYRPGVNLSLSCHAASNPPAQYSWLIDGNIQQHTQELFISNITEKNSGLYTCQANNSASGHSRTTVKTITVSAXXPKPSISSNNSKPVEDKDAVAFTCEPEAQNTTYLWWVNGQSLPVSPRLQLSNGNRTLTLFNVTRNDARAYVCGIQNSVSANRSDPVTLDVLYGPDTPIISPPDSSYLSGANLNLSCHSASNPSPQYSWRINGIPQQHTQVLFIAKITPNNNGTYACFVSNLATGRNNSIVKSITVSASXTSPGLSAGATVGIMIGVLVGVALI

SEQ ID NO: 4872 - protein, 134 aa, Homo sapiens
  MISC_FEATURE (26): Xaa equals any of the naturally occurring L-amino acids
  MISC_FEATURE (27): Xaa equals any of the naturally occurring L-amino acids
  MISC_FEATURE (94): Xaa equals any of the naturally occurring L-amino acids
  MISC_FEATURE (95): Xaa equals any of the naturally occurring L-amino acids
PVRNSRVDPRVRALKEVFKEYLIELXXLQHFQGNMMDFLAFKERLYGPLQAYLRQNDLDIEEEEEEHFEVINDEVKVVARKHGQPGTPVAIATXXPPRTSAAFPAQQQPLQVLSDGSTVQLPRLSSLGFEDSMC

SEQ ID NO: 4873 - protein, 209 aa, Homo sapiens
LVPRPRPRQLCAVIHSLLRPGAPFPARRRARQLGVQRPRNHEQVSRSSEAPGTPAHAMADSERLSAPGCWAACTNFSRTRKGILLFAEIILCLVILICFSASTPGYSSLSVIEMILAAIFFVVYMCDLHTKIPFINWPWSDFFRTLIAAILYLITSIVVLVERGNHSKIVAGVLGLIATCLFGYDAYVTFPVRQPRHTAAPTDPADGPV

SEQ ID NO: 4874 - protein, 129 aa, Homo sapiens
VCVRVRGRNRSARSLPLEQCLPQYFCRGKDRNSLLGFLQSPCTCQSFSYQCKGNPELRFELSHHLHGQISPLPKGSFRLWVYLFLHASSWQCPVEAYLPICVCIHSLKTTRQKKKKKTRGGARYPIRAI

SEQ ID NO: 4875 - protein, 316 aa, Homo sapiens
CMDFGVLVPTAYMFWGLLSCSLPTFCVMSVPGRWPPARWRLSILAVSIMPCVCLASLLQILWTRSSSPAHHLASPFLCVQIWQCGGVLETHPCSHVGHVFPKQAPYSRNKALANSVRAAEVWMDEFKELYYHRNPRARLEPFGDVTERKQLRDKLQCKDFKWFLETVYPELHVPEDRPGFFGMLQNKGLTDYCFDYNPPDENQIVGHQVILYLCHGMGQNQFFEYTSQKEIRYNTHQPEGCIAVEAGMDTLIMHLCEETAPENQKFILQEDGSLFHEQSKKCVQAARKESSDSFVPLLRDCTNSDHQKWFFKERML

SEQ ID NO: 4876 - protein, 220 aa, Homo sapiens
  MISC_FEATURE (41): Xaa equals any of the naturally occurring L-amino acids
KARRRGTMAAAADERSPEDGEDEEEEEQLVLVELSGIIDSXFLSKCENKCKVLGIDTERPILQVDSCVFAGEYEDTLGTCVIFEENVEHADTEGNNKTVLKYKCHTMKKLSMTRTLLTEKKEGEENIGGVEWLQIKDNDFSYRPNMICNFLHENEDEEVVASAPDKSLELEEEEIQMNDSSNLSCEQEKPMHLEIEDSGPLIDIPSETEGSVFMETQMLP

SEQ ID NO: 4877 - protein, 88 aa, Homo sapiens
KTLFTYSFHGYNTLADFLLALGAMILITFCKVTNVIHSTLCGSHLFRLMCFGERKKFLAEYYFELSRTLSHQRQFFSVQFPIPDNLLK

SEQ ID NO: 4878 - protein, 64 aa, Homo sapiens
SLICYVQSLKATTHFFLKVDAFSAVLESVFCFWQESCKLCILKQMQKVVLCKTFVFCLSQINIL

SEQ ID NO: 4879 - protein, 66 aa, Homo sapiens
  MISC_FEATURE (28): Xaa equals any of the naturally occurring L-amino acids
  MISC_FEATURE (49): Xaa equals any of the naturally occurring L-amino acids
MCRLCICVNIYTPRCHSKCLEITVHTCXLPSSLELLSCNMALKNYPISXVLCLGNMVNWRILTHSV

SEQ ID NO: 4880 - protein, 81 aa, Homo sapiens
RHLLIHGLYRNEAGCNTNLESPSWRTIKLFKDHPWPGTVVHTCNPSTLGGLGRQTELRSLRPAWATWQKPTSTKSTKISRA

SEQ ID NO: 4881 - protein, 141 aa, Homo sapiens
  MISC_FEATURE (20): Xaa equals any of the naturally occurring L-amino acids
  MISC_FEATURE (29): Xaa equals any of the naturally occurring L-amino acids
  MISC_FEATURE (34): Xaa equals any of the naturally occurring L-amino acids
  MISC_FEATURE (39): Xaa equals any of the naturally occurring L-amino acids
AGQRHSPWPLIALLVRADGXPRSVVPAWXTEAPXATLEXRFTPHAEMDLGQLSSQDVGQASFKYFQSAEEAKRAIEAVLSADPRSVYRRKLCQDRLFYFTVDIAHVTCWFGDGFAEVLRIKPASEPVHMTGPVGSLVSLGS

SEQ ID NO: 4882 - protein, 241 aa, Homo sapiens
  MISC_FEATURE (8): Xaa equals any of the naturally occurring L-amino acids
VSVGGLIXNLIGICAFSHAHSHAHGASQGSCHSSDHSHSHHMHGHSDHGHGHSHGSAGGGMNANMRGVFLHVLADTLGSIGVIVSTVLIEQFGWFIADPLCSLFIAILIFLSVVPLIKDACQVLLLRLPPEYEKELHIALEKIQKIEGLISYRDPHFWRHSASIVAGTIHIQVTSDVLEQRIVQQVTGILKDAGVNNLTIQVEKEAYFQHMSGLSTGFHDVLAMTKQMESMKYCKDGTYIM

SEQ ID NO: 4883 - protein, 375 aa, Homo sapiens
  MISC_FEATURE (176): Xaa equals any of the naturally occurring L-amino acids
SFGERAPSTRSGDPLVAVLPTRTRVPQASRCPAGSSCPTPGARPPASPGPLPRPSSRRARSMAPPQVLAFGLLLAAATATFAAAQEECVCENYKLAVNCFVNNNRQCQCTSVGAQNTVICSKLAAKCLVMKAEMNGSKLGRRAKPEGALQNNDGLYDPDCDESGLFKAKQCNGTSXCWCVNTAGVRRTDKDTEITCSERVRTYWIIIELKHKAREKPYDSKSLRTALQKEITTRYQLDPKFITSILYENNVITIDLVQNSSQKTQNDVDIADVAYYFEKDVKGESLFHSKKMDLTVNGEQLDLDPGQTLIYYVDEKAPEFSMQGLKAGVIAVIVVVVIAVVAGIVVLVISRKKRMAKYEKAEIKEMGEMHRELNA

SEQ ID NO: 4884 - protein, 106 aa, Homo sapiens
INQQLALYIWKSCRHSMPAYESSLEWGCTLQRHRGRAAKTMRVYFFHQCDLNVRHRVKGDYFGAVKFNEYPAGFWTCHWLLAPLFCPILLYGMGASSSNACTLIVS

SEQ ID NO: 4885 - protein, 91 aa, Homo sapiens
QSAMSSRPLESPPPYRPDEFKPNHYAPSNDIYGGEMHVRPMLSQPAYSFYPEDEILHFYKWTSPPGVIRILSMLIIVMCIAIFACVASRLP

SEQ ID NO: 4886 - protein, 88 aa, Homo sapiens
YRKLFFPQLFEQHSSFENSCRSQFFVTVVQILCFLSLMKSSIEAIFHTMCYICVRRCVNIKSHTHIYTHVKIYIYIYACEVESLPFPI

SEQ ID NO: 4887 - protein, 88 aa, Homo sapiens
  MISC_FEATURE (25): Xaa equals any of the naturally occurring L-amino acids
  MISC_FEATURE (28): Xaa equals any of the naturally occurring L-amino acids
  MISC_FEATURE (79): Xaa equals any of the naturally occurring L-amino acids
KCWYYYFHYRAFGPLIMLRWADPSXFCXRVILGRVFSSTVKVRQSGSVTGDWDIWNKLRWDTHSEERLHGILWGTNYCXITSDVNMAH

SEQ ID NO: 4888 - protein, 86 aa, Homo sapiens
GTKLDGHQTQGFVKIRPPIPLTGSVRCVKLLSPVHHASMSPQDWDLSLPGSLSLGADMEPSLRDQVDAEAHPVRAPLLAPFTLKLI

SEQ ID NO: 4889 - protein, 106 aa, Homo sapiens
  MISC_FEATURE (47): Xaa equals any of the naturally occurring L-amino acids
FCSWFSLQALAKPCPRSPQTLRAHDQKEKESQVGEEQGPQLHSPPLXPEGPPWAAWNPLKLPPPQHSSGAVPGSACSPWAGSVPAAPPSVCYLIYWNLHSQALAHR

SEQ ID NO: 4890 - protein, 74 aa, Homo sapiens
NVACNTVLPAKFSTFCNLFYFFGCKAFLLSIVILYMFCPSCIVMFQSIIQLWLLKSYSCEDLPLFLLDCFSVLY

SEQ ID NO: 4891 - protein, 201 aa, Homo sapiens
CNLAKGVISISFLKEEEQEDEEEIDVVSVEKRQAPGKRSESGSPSAGGHSKPPHSPLVLKRCHVSTHQHNYAAPPSTRKDYPAAKRVKLDSVRVLRQISNNRKCTSPRSSDTEENVKRRTHNVLERQRRNELKRSFFALRDQIPELENNEKAPKVVILKKATAYILSVQAEEQKLISEEDLLRKRREQLKHKLEQLRNSCA

SEQ ID NO: 4892 - protein, 60 aa, Homo sapiens
KGIVRMSLSSGSTTAVSYLGPVLSQGGWLVKVMCDLRRLSCHLPHVNRKGGILPPPEYTG

SEQ ID NO: 4893 - protein, 737 aa, Homo sapiens
  MISC_FEATURE (555): Xaa equals any of the naturally occurring L-amino acids
  MISC_FEATURE (602): Xaa equals any of the naturally occurring L-amino acids
PPRGLDPGSCCCCRCCCPLRPQPPTGPGAADPVNPEKLLVITVATAETEGYLRFLRSAEFFNYTVRTLGLGEEWRGGDVARTVGGGQKVRWLKKEMEKYADREDMIIMFVDSYDVILAGSPTELLKKFVQSGSRLLFSAESFCWPEWGLAEQYPEVGTGKRFLNSGGFIGFATTIHQIVRQWKYKDDDDDQLFYTRLYLDPGLREKLSLNLDHKSRIFQNLNGALDEVVLKFDRNRVRIRNVAYDTLPIVVHGNGPTKLQLNYLGNYVPNGWTPEGGCGFCNQDRRTLPGGQPPPRVFLAVFVEQPTPFLPRFLQRLLLLDYPPDRVTLFLHNNEVFHEPHIADSWPQLQDHFSAVKLVGPEEALSPGEARDMAMDLCRQDPECEFYFSLDADAVLTNLQTLRILIEENRKVIAPMLSRHGKLWSNFWGALSPDEYYARSEDYVELVQRKRVGVWNVPYISQAYVIRGDTLRMELPQRDVFSGSDTDPDMAFCKSFRDKGIFLHLSNQHEFGRLLATSRYDTEHLHPDLWQIFDNPVDWKEQYIHENYSRALEGXGIVEQPCPDVYWFPLLSEQMCDELVAEMEHYGQWSGGRHEDSRLAGXYENVPTVDIHMKQVGYEDQWLQLLRTYVGPMTESLFPGYHTKARAVMNFVVRYRPDEQPSLRPHHDSSTFTLNVALNHKGLDYEGGGCRFLRYDCVISSPRKGWALLHPGRLTHYHEGLPTTWGTRYIMVSFVDP

SEQ ID NO: 4894 - protein, 73 aa, Homo sapiens
ETTKEYHEGIYAPVLAIICLRRNLLNKSFYPLTFTFIRPYKRSNGDLKFFSHKSYLFSISAKSRILSSKPKLT

SEQ ID NO: 4895 - protein, 76 aa, Homo sapiens
  MISC_FEATURE (10): Xaa equals any of the naturally occurring L-amino acids
  MISC_FEATURE (26): Xaa equals any of the naturally occurring L-amino acids
RKKPIYINVXRDPIERLVSYYYFLRXGDDYRPGLRRRKQGDKKTFDECVAEGGSDCAPEKLWLQIPFFCGHSSECW

SEQ ID NO: 4896 - protein, 94 aa, Homo sapiens
TPAGTGPEFPGRPTRPKEEGGKPQMNSEGEIPSLPSGSQSAKPVSQPRKSTQPDVCASPQEKPLRTLFHQPEEEIEDGGLFIPMEDKTMKKVRK

SEQ ID NO: 4897 - protein, 35 aa, Homo sapiens
  MISC_FEATURE (7): Xaa equals any of the naturally occurring L-amino acids
  MISC_FEATURE (9): Xaa equals any of the naturally occurring L-amino acids
  MISC_FEATURE (25): Xaa equals any of the naturally occurring L-amino acids
ILNEKKXLXKKGGRSRGSKLTYACXRRHSSSIVSP

SEQ ID NO: 4898 - protein, 102 aa, Homo sapiens
  MISC_FEATURE (52): Xaa equals any of the naturally occurring L-amino acids
  MISC_FEATURE (63): Xaa equals any of the naturally occurring L-amino acids
REQKLELHRGGGRSRTSGSPGLQEFGTSGTRYPQGHSDTTVAISTSTVLLCXLSAVSLLACYXKSRQTPPLASVEMEAMEALPVTWGTSSRDEDLENCSHHL

SEQ ID NO: 4899 - protein, 69 aa, Homo sapiens
LSQSQLNRHLNCICKILSLLPYSLTKCNRRCPHKGMDIGLGKDFRNHLRILPTTNSILQVSISSILVIH

SEQ ID NO: 4900 - protein, 75 aa, Homo sapiens
FVSEGDFPSYTLGLEDFEYLGPFSCEHGLFPHSSYLLTRGILGRDLRSSFSCFPEQSLKFTVNKLFDHEKKKKST

SEQ ID NO: 4901 - protein, 76 aa, Homo sapiens
  MISC_FEATURE (19): Xaa equals any of the naturally occurring L-amino acids
  MISC_FEATURE (22): Xaa equals any of the naturally occurring L-amino acids
  MISC_FEATURE (41): Xaa equals any of the naturally occurring L-amino acids
  MISC_FEATURE (75): Xaa equals any of the naturally occurring L-amino acids
GAALLIWGVSRLSALTLLXHPXTDKVRLQRRVTPMCYSFFXTSFTGDNAHTVQFTHLKCTIQWVLVYSWGLCNPXP

SEQ ID NO: 4902 - protein, 106 aa, Homo sapiens
  MISC_FEATURE (37): Xaa equals any of the naturally occurring L-amino acids
EEGLRNKKAKEPFEEASCLLGAGVCAGVVLRGRKEPXSPEDPPGGAGLKFRWVPGGSALRSTDGLRSQCAARTSRSGGRVLPTPALGSEKAALVLFLGMSAEGAPG

SEQ ID NO: 4903 - protein, 190 aa, Homo sapiens
  MISC_FEATURE (33): Xaa equals any of the naturally occurring L-amino acids
  MISC_FEATURE (42): Xaa equals any of the naturally occurring L-amino acids
RHRQQQKAHCPHPLTLNFLSLFKILASDCSAAXNFLVPSWGXWGGVYRLFSASALLSQGFEPLRFSGQTRKNENTAWGAPTSRRLCQLTSGHGAAAGAHGGQGQLHILPSPSHFTVAPNPARRERVSAPQTTGSLLTKNGETRFHLSAEEPQAGLSERDGAGGRLWIASQIKLCSLNVASRQEKAWGLNS

SEQ ID NO: 4904 - protein, 64 aa, Homo sapiens
GDKNVLKFIVMMLAISISRLNAVMVANSINIFNVVMVANSMKNPNCTISMSESMLCECLHKGFI

SEQ ID NO: 4905 - protein, 104 aa, Homo sapiens
TVPRPRPDFSHAPPSTSALGCLGRERRRGAWRGTPGQNDSGMSRERKEAPWDAGGRVLGPGLQPRTGATAGPSPDRPRAGGQARVRCAARPRSLTTVPTHRGGP

SEQ ID NO: 4906 - protein, 71 aa, Homo sapiens
LLIPMPLCDPILNTARAVFQQHSSNLVSSPLLHASVAFPVTWHGTRPQLPYIPANSYPTFLCSHSFLFLPH

SEQ ID NO: 4907 - protein, 102 aa, Homo sapiens
GCGGFQCVEWKGNCRIVSAPHSEGLLPVPPRPGASTASPHSTQMPRSSELVYEKSPTFSPKTSLLSLHKKKRKGTKEKHSVFLFLKKVSPFLKSSNETLSGN

SEQ ID NO: 4908 - protein, 53 aa, Homo sapiens
  MISC_FEATURE (4): Xaa equals any of the naturally occurring L-amino acids
PQQXTSQEVENSKQEKYQNNYTQTSENQRQKENLQRSQRKSNLTYSKTGQELN

SEQ ID NO: 4909 - protein, 46 aa, Homo sapiens
GNNCRSIEVTAKIFYSNWVNPVNHVRNSSPRVSMLLLYFCKHNPLT

SEQ ID NO: 4910 - protein, 78 aa, Homo sapiens
  MISC_FEATURE (17): Xaa equals any of the naturally occurring L-amino acids
LLFNLPIELLGFKKYFXNDFLGLESTFNTFKLVFLLEIFRISSLIGNLYRSLVRFVAKMCHRWTQISHSGAISYHSGG

SEQ ID NO: 4911 - protein, 48 aa, Homo sapiens
  MISC_FEATURE (3): Xaa equals any of the naturally occurring L-amino acids
  MISC_FEATURE (6): Xaa equals any of the naturally occurring L-amino acids
CLXYFXMDIEVKMSFICIYLGKEDMLLKQGQMYMADSQCTSPGYPGPM

SEQ ID NO: 4912 - protein, 44 aa, Homo sapiens
  MISC_FEATURE (19): Xaa equals any of the naturally occurring L-amino acids
  MISC_FEATURE (30): Xaa equals any of the naturally occurring L-amino acids
  MISC_FEATURE (31): Xaa equals any of the naturally occurring L-amino acids
RKHKAIRLISGELHTEGEXKFLSPWSTPSXXSERVPFMSNTASH

SEQ ID NO: 4913 - protein, 42 aa, Homo sapiens
SYHSVSGFLVVYTFTIMAKCFKIIQLFKETYYAKDTLEMLCI

SEQ ID NO: 4914 - protein, 103 aa, Homo sapiens
LVRLQVPVRNSRVDPRVRSVPLWLLSHLKNDPSGPFPPPCPLPHTSRFPVRQQVQRLQDLALLSLLEPLKEKAGFELFAFESWRHKRYLGYRSRRRERTPRSN

SEQ ID NO: 4915 - protein, 78 aa, Homo sapiens
FYFSSKSLFHTCKILGRRFLKLCQELLPISKNSLLCSKTTISLRDCLKGERATREIIHSAHRNYCSSGLPATVFRCWV

SEQ ID NO: 4916 - protein, 219 aa, Homo sapiens
  MISC_FEATURE (40): Xaa equals any of the naturally occurring L-amino acids
KVDKQLFPPSYQEKCSGSYATPSSENVQLRQNLGTKKNLXHVNKILKAKKLQRQARTGNNFVKRRPGRPRKCPLQAVVSMQAFQAAQFVNPELNRDEEGAALHLSPDTVTDVIEAVVQSVNLNPEHKKGLKRKGWLLEEQTRKKQKPLPEEEEQENNKSFNEAPVEIPSPSETPAKPSEPESTLQPVLSLIPREKKPPRPPKKKYQKAGLYSDVYKTTE

SEQ ID NO: 4917 - protein, 102 aa, Homo sapiens
SHCTVNSKKIEELFWHLKTITQFSREVTDKRDHTDCFVVLVLSYSLMQIRTFTSICVGPTLPGQIQLQSPCRYEFSRNEPMFSARINWSYTIYKNEYCILYL

SEQ ID NO: 4918 - protein, 58 aa, Homo sapiens
  MISC_FEATURE (2): Xaa equals any of the naturally occurring L-amino acids
GXLVRLQVPVRNSRVDPRVRGSPLLCALSSVMRREPFAVCSVQCHETGALCCVLCPVS

SEQ ID NO: 4919 - protein, 200 aa, Homo sapiens
  MISC_FEATURE (67): Xaa equals any of the naturally occurring L-amino acids
  MISC_FEATURE (112): Xaa equals any of the naturally occurring L-amino acids
  MISC_FEATURE (148): Xaa equals any of the naturally occurring L-amino acids
  MISC_FEATURE (177): Xaa equals any of the naturally occurring L-amino acids
  MISC_FEATURE (183): Xaa equals any of the naturally occurring L-amino acids
  MISC_FEATURE (195): Xaa equals any of the naturally occurring L-amino acids
ARPSLRTCYPRGNITMSEAPRAETFVFLDLEATGLPSVEPEIAELSLFAVHRSSLENPEHDESGALXLPRVLDKLTLCMCPERPFTAKASEITGLSSEGLARCRKAGFDGAXVRTLQAFLSRQAGPICLVAHNGFDYDFPLLCAELRXLGARLPRDTVCLDTLPALRGLDRAHKPRXPGPGPXRVTSLGKLFPPXLSGKT

SEQ ID NO: 4920 - protein, 66 aa, Homo sapiens
PRVSLPFRERAEVLTLVACCHLSLASALVHPHSTLRSHSHHQRLNPKALQDLKVPSEASEIKYCSN

SEQ ID NO: 4921 - protein, 41 aa, Homo sapiens
  MISC_FEATURE (13): Xaa equals any of the naturally occurring L-amino acids
  MISC_FEATURE (26): Xaa equals any of the naturally occurring L-amino acids
  MISC_FEATURE (27): Xaa equals any of the naturally occurring L-amino acids
KQKHIYFKKYTSXYEIFSFECMLKWXXSRISYNTGYLETRY

SEQ ID NO: 4922 - protein, 255 aa, Homo sapiens
  MISC_FEATURE (65): Xaa equals any of the naturally occurring L-amino acids
REKSTFECSECGKAFSYLSNLNQHQKTHTQEKAYECKECGKAFIRSSSLAKHERIHTGEKPYQCXECGKTFSYGSSLIQHRKIHTGERPYKCNECGRAFNQNIHLTQHKRIHTGAKPYECAECGKAFRHCSSLAQHQKTHTEEKPYQCNKCEKTFSQSSHLTQHQRIHTGEKPYKCNECDKAFSRSTHLTEHQNTHTGEKPYNCNECRKTFSQSTYLIQHQRIHSGEKPFGCNDCGKSFRYRSALNKHQRLHPGI

SEQ ID NO: 4923 - protein, 118 aa, Homo sapiens
  MISC_FEATURE (97): Xaa equals any of the naturally occurring L-amino acids
LLEAQAGEGGRVSRRAPLSLTQRSCVFLVKPSHARGPIASSPPSLPTNIPSPDPNSPPHYPALDLGNVFLYFNIAQGKNTYILRDLGWGKQKPCGVXKTKAYFYKCLMFSPPGCSETP

SEQ ID NO: 4924 - protein, 186 aa, Homo sapiens
  MISC_FEATURE (26): Xaa equals any of the naturally occurring L-amino acids
  MISC_FEATURE (135): Xaa equals any of the naturally occurring L-amino acids
  MISC_FEATURE (151): Xaa equals any of the naturally occurring L-amino acids
  MISC_FEATURE (177): Xaa equals any of the naturally occurring L-amino acids
RISQCLGRGEVQECVLRLNHIILQRXWAARHIVNRINAFKPTADRPFVLGLPTGGTPMTTYKALVEMHKAGQVSFKHVVTFNMDEYVGLPKEHPESYYSFMHRNFFDHVDIPAENINLLNGNAPDIDAECRQYEXKIRSYGKIHLFMGGVXNDGHIAFNEPASSLASRTRIKTLTHXHSRRKLSFL

SEQ ID NO: 4925 - protein, 141 aa, Homo sapiens
GILFIYLDGAFDLCVTSVSKGGFEREETATFALLYRLRNILFERNRRVMDVISRSQLYLDDLFSDYYDKPLSMTDISLKEGTHIRVNLLNHNIPKGPCILCGMGNFKRETVYGCFQCSVDGQKYVRLHAVPCFDIWHKRMK

SEQ ID NO: 4926 - protein, 50 aa, Homo sapiens
NSARVCILSRDRVSPCWLGWCLSLDLVIHPPQPPRVLGLQVRATAPGWFS

SEQ ID NO: 4927 - protein, 212 aa, Homo sapiens
  MISC_FEATURE (96): Xaa equals any of the naturally occurring L-amino acids
  MISC_FEATURE (106): Xaa equals any of the naturally occurring L-amino acids
  MISC_FEATURE (165): Xaa equals any of the naturally occurring L-amino acids
  MISC_FEATURE (169): Xaa equals any of the naturally occurring L-amino acids
EYCNTVQLDSGIDYRKRELPAAGKLYYLTSEADVEAVMDKLFDELAQKQNDLTRPRILKVQGRELRLNKACGTVADCTFEELCERPLGASDYLELXKNFDTIFLRXIPQFTLANRTQGRRFITLIDNFYDLKVRIICSASTPISSLFLHQHHDSELEQSRILMDXLGLXQDSAEGLSMFTGEEEIFAFQRTISRLTEMQTEQYWNEGDRTKK

SEQ ID NO: 4928 - protein, 99 aa, Homo sapiens
  MISC_FEATURE (91): Xaa equals any of the naturally occurring L-amino acids
MQNIERIFMILPNCKHSSQSLIALECFLDEQVTSCKPTSEVRKMFSHVSCSCQIFKNPPSFNHPVGKMCYKTLPPGVFWEECLKKKKKTAXRKYFQILY

SEQ ID NO: 4929 - protein, 224 aa, Homo sapiens
  MISC_FEATURE (140): Xaa equals any of the naturally occurring L-amino acids
  MISC_FEATURE (142): Xaa equals any of the naturally occurring L-amino acids
  MISC_FEATURE (206): Xaa equals any of the naturally occurring L-amino acids
  MISC_FEATURE (224): Xaa equals any of the naturally occurring L-amino acids
YLDAEKMGQKASQQLALKDSKEVPVVCEVVSEAIVHAAQKLKEYLGFEYPPSKLCPAANTLNEIFLIHFITFCQEKGVDEWLTTTKMTKHQAFLFGADWIWTFWGSDKQIKLQLAVQTLQMSSPPPVESKPCDLSNPESXVXESSWKKSRFDKLEEFCNLIGEDCLGLFIIFGMPGKPKDIRGVVLDSVKSQMVRSHLPGGKAVAXFVLETEDCVFIKELLKIX

SEQ ID NO: 4930 - protein, 82 aa, Homo sapiens
  MISC_FEATURE (76): Xaa equals any of the naturally occurring L-amino acids
TWKLFYQITVLHHPPVCLVSLINGRGISKLSFLTPFEYSVFAIIDVAPHNSPTFILKNQNLKNCSSCQSVMTHLRXILFLDV

SEQ ID NO: 4931 - protein, 41 aa, Homo sapiens
KSSLCCSHFNSCHMFCKQFFEFIIFQSCLYYILPHKNFKFV

SEQ ID NO: 4932 - protein, 58 aa, Homo sapiens
EYFQNPSLSKLFCGKSSIYFINVMCLILDLFWEKLFKLGPFKLILSSLEGRSYLANES

SEQ ID NO: 4933 - protein, 93 aa, Homo sapiens
FFEQAMVDSGSYRNSIDHTVVLREKLPIRSNIFPLMLETVDGHPLINGPITKETSPVQVQIGNHVEELQFDIIHAPRYPLIIGIHWLETHDQT

SEQ ID NO: 4934 - protein, 43 aa, Homo sapiens
KADTGAIKNPGDGGCSELRSRHCPPAWATRVKLCLKKQTNKCI

SEQ ID NO: 4935 - protein, 110 aa, Homo sapiens
WHPLSESQSSLRHCYKRTLRKIWPYEPSQPQAKRMTMCVSAAHGQFVSHCFGKPCVPNQGRVFQGKVNFPKFIKIELGKPSILNLFQSSGHHSYFFCHVKEKFQACILSC

SEQ ID NO: 4936 - protein, 92 aa, Homo sapiens
SPLRKSSGMFSIAVSFPPKITWLGSYWSSGNLIPHRNWRKGNASREEQLYFCLSNKPTNRFWYELWRHKENECMYSKCTSFFTLSWQKMQHF

SEQ ID NO: 4937 - protein, 273 aa, Homo sapiens
  MISC_FEATURE (1): Xaa equals any of the naturally occurring L-amino acids
  MISC_FEATURE (64): Xaa equals any of the naturally occurring L-amino acids
XLEHIPNFSLDDMVKLVEVPNDGGPLGIHVVPFSARGGRTLGLLVKRLEKGGKAEHENLFRENXCIVRINDGDLRNRRFEQAQHMFRQAMRTPIIWFHVVPAANKEQYEQLSQSEKNNYYSSRFSPDSQYIDNRSVNSAGLHTVQRAPRLNHPPEQIDSHSRLPHSAHPSGKPPSAPASAPQNVFSTTVSSGYNTKKIGKRLNIQLKKGTEGLGFSITSRDVTIGGSAPIYVKNILPRGAAIQDGRLKAGDRLIEVNGVGLVGKSQEEVVSLL

SEQ ID NO: 4938 - protein, 160 aa, Homo sapiens
  MISC_FEATURE (3): Xaa equals any of the naturally occurring L-amino acids
DRXMKEEVKGIPVRVALRCRPLVPKEISEGCQMCLSFVPGEPQVVVGTDKSFTYDFVFDPSTEQEEVFNTAVAPLIKGVFKGYNATVLAYGQTGSGKTYSMGGAYTAEQENEPTVGVIPRVIQLLFKEIDKKSDFEFTLKVSYLEIYNEEILDLLCPSRE

SEQ ID NO: 4939 - protein, 303 aa, Homo sapiens
  MISC_FEATURE (209): Xaa equals any of the naturally occurring L-amino acids
  MISC_FEATURE (212): Xaa equals any of the naturally occurring L-amino acids
PRLLRLPRSVVVMDSPWDELALAFSRTSMFPFFDIAHYLVSVMAVKRQPGAAALAWKNPISSWFTAMLHCFGGGILSCLLLAEPPLKFLANHTNILLASSIWYITFFCPHDLVSQGYSYLPVQLLASGMKEVTRTWKIVGGVTHANSYYKNGWIVMIAIGWARGAGGTIITNFERLVKGDWKPEGDEWLKMSYPAKVTLLGSVIFTFQXTQXLAISKHNLMFLYTIFIVATKITMMTTQTSTMTFAPFEDTLSWMLFGWQQPFSSCEKKSEAKSPSNGVGSLASKPVDVASDNVKKKHTKKNE

SEQ ID NO: 4940 - protein, 82 aa, Homo sapiens
VMVAETSSLYFGAKTKRQHKRKSILIEYFVEQRRLDKNCKPTDSANKERNVLAIRHVSSESKSNNCRLQKKKVFKNFIKTGH

SEQ ID NO: 4941 - protein, 121 aa, Homo sapiens
  MISC_FEATURE (74): Xaa equals any of the naturally occurring L-amino acids
EGLRDGRLSRIPFLSTRALLEPLSKQWQGTERSQQESGRGLIITKKTHYARNRLCAPVPDTWQKCSSVTHVCEXIAGSTPSAWPAGASAADPMLSGQWGAAPGRLFWGRLSYPWIVYTLLC

SEQ ID NO: 4942 - protein, 62 aa, Homo sapiens
DKSENVKLINPLLVSKQTTCLRKLLNFHVLLPDSSLIKRKKKNPAQAWWLTPWHLEGPRWEP

SEQ ID NO: 4943 - protein, 282 aa, Homo sapiens
NYSLLRERVEMVGILPLCCSGCVPSLCCSSYVPSVAPTAAHSVRVPHSAGHCGQRVLACSLPQVFLKPWIFVEHFSSWLSLELFSFLRYLGTLLCACGHRLREGLLLPCLLGVGSWLLFNNWTGGSWFSLHLQQVSLSQGSHVAAFLPEAIGPGVPVPVSGESTSAQQSHAGWQLSAEADACPSVLYSEVLEWNKNINTYTSFHDFCLILGIFLFCFVLAVIGLPYIKPGLSLSVALLCKASYYSLVWFSRTVRSTPGAVCFLRLPQHKVPYHCQPSSPDPK

SEQ ID NO: 4944 - protein, 54 aa, Homo sapiens
  MISC_FEATURE (41): Xaa equals any of the naturally occurring L-amino acids
  MISC_FEATURE (49): Xaa equals any of the naturally occurring L-amino acids
  MISC_FEATURE (53): Xaa equals any of the naturally occurring L-amino acids
CHLNSIHWPSFYNRRDWENPGVTQLNRLAAHPPFAAGVIAXKPAPIALXNSCXA

SEQ ID NO: 4945 - protein, 292 aa, Homo sapiens
  MISC_FEATURE (25): Xaa equals any of the naturally occurring L-amino acids
  MISC_FEATURE (201): Xaa equals any of the naturally occurring L-amino acids
  MISC_FEATURE (242): Xaa equals any of the naturally occurring L-amino acids
IQRLSLVRSLCESEEQRLLEQVHGXEERAHQSILTQRVHWAEALQKLDTIRTGLVGMLTHLDDLQLIQKEQEIFERTEEAEGILDPQESEMLNFNEKCTRSPLLTQLWATAVLGSLSGTEDIRIDERTVSPFLQLSDDRKTLTFSTKKSKACADGPERFDHWPNALAATSFQNGLHAWMVNVQNSCAYKVGVASGHLPRKXSGSDCRLGHNAFSWVFSRYDQEFRFSHNGQHEPLGLLRGPXQLGVVLDLQVQELLFYEPASGTVLCAHHVSFPGPLFPVFAVADQTISIVR

SEQ ID NO: 4946 - protein, 53 aa, Homo sapiens
  MISC_FEATURE (37): Xaa equals any of the naturally occurring L-amino acids
  MISC_FEATURE (39): Xaa equals any of the naturally occurring L-amino acids
NAYQTASHASRKIFCERKSPIDVATLLLSYFKKLLQXPXPSATTTLLSQQPSR

SEQ ID NO: 4947 - protein, 267 aa, Homo sapiens
  MISC_FEATURE (234): Xaa equals any of the naturally occurring L-amino acids
  MISC_FEATURE (235): Xaa equals any of the naturally occurring L-amino acids
  MISC_FEATURE (245): Xaa equals any of the naturally occurring L-amino acids
  MISC_FEATURE (248): Xaa equals any of the naturally occurring L-amino acids
  MISC_FEATURE (261): Xaa equals any of the naturally occurring L-amino acids
  MISC_FEATURE (263): Xaa equals any of the naturally occurring L-amino acids
HVRETHVAGEVGERKVGVNTLWGSFEISNVRLARVMLTQFAEGRLEDQLDKYDHWADRFEDLPLYFMTFHGQQSIRTVIDTMQHAVYVYDICHVIIDNLQFMMGHEQLSTDRIAAQDYIIGVFRKFATDNNCHVTLVIHPRKEDDDKELQTASIFGSAKASQEADNVLILQDRKLVTGPGKRYLQVSKNRFDGDVGVFPLEFNKNSLTFSIPPKNKARLKKIKDDTGPVAKKPXXGKKGATTQNXEIXSGQAPTPDQQTPXSXQSEG

SEQ ID NO: 4948 - protein, 447 aa, Homo sapiens
  MISC_FEATURE (365): Xaa equals any of the naturally occurring L-amino acids
GRASQAPSSGLPAGGANGESPGGGAPFPGSSGSSALLQAEVLDLDEDEDDLEVFSKDASLMDMNSFSPMMPTSPLSMINQIKFEDEPDLKDLFITVDEPESHVTTIETFITYRIITKTSRGEFDSSEFEVRRRYQDFLWLKGKLEEAHPTLIIPPLPEKFIVKGMVERFNDDFIETRRKALHKFLNRIADHPTLTFNEDFKIFLTAQAWELSSHKKQGPGLLSRMGQTVRAVASSMRGVKNRPEEFMEMNNFIELFSQKINLIDKISQRIYKEEREYFDEMKEYGPIHILWSASEEDLVDTLKDVASCIDRCCKATEKRMSGLSEALLPVVHEYVLYSEMLMGVMKRRDQIQAELDSKVEVLTYXKADTDLLPEEIGKLEDKVECANNALKADWERWKQNMQNDIKLAFTDMAEENIHYYEQCLATWESFLTSQTNLHLEEASEDKP

SEQ ID NO: 4949 - protein, 323 aa, Homo sapiens
  MISC_FEATURE (122): Xaa equals any of the naturally occurring L-amino acids
  MISC_FEATURE (219): Xaa equals any of the naturally occurring L-amino acids
  MISC_FEATURE (234): Xaa equals any of the naturally occurring L-amino acids
AAAAQGLVRAGRRELMAEEESDQEAERLGEELVAIVESPLGPVGLRAAGDGRGGAGSGNCGGGVGISSRDYCRRFCQVVEDYAGRWQVPLPQLQVLQTALCCFTTASASFPDECEHVQYVLXSLAVSFFELLLFFGRDEFYEEPLKDILGSFQECQNHLRRYGNVNLELVTRIIRDGGPWEDPVLQAVLKAQPASQEIVNKYLSSENPLFFELRARYLXACERIPEAMALIKSXINHPEISKDLYFHQALFTCLFMSPVEDQLFREVLFETIFAYYHFNPTKKKPKKKSSPLLLLNSFYSNAKDLRITLSGCVFFWHHNLRSC

SEQ ID NO: 4950 - protein, 35 aa, Homo sapiens
  MISC_FEATURE (1): Xaa equals any of the naturally occurring L-amino acids
  MISC_FEATURE (9): Xaa equals any of the naturally occurring L-amino acids
  MISC_FEATURE (16): Xaa equals any of the naturally occurring L-amino acids
  MISC_FEATURE (33): Xaa equals any of the naturally occurring L-amino acids
  MISC_FEATURE (34): Xaa equals any of the naturally occurring L-amino acids
XNLLFVGFXKSFACIXYKTTTVYMLLPLADELXXK

SEQ ID NO: 4951 - protein, 58 aa, Homo sapiens
  MISC_FEATURE (13): Xaa equals any of the naturally occurring L-amino acids
MNGPVLDPDKEEXTMEALGMIETRGLVALIEASDAMVKAARVKLVGVKQIGGGLCTAM

SEQ ID NO: 4952 - protein, 48 aa, Homo sapiens
PLKCFYFGNFVMLSTFVSAQFSRLRINLLFLNSTADFSFKFHRLSTYI

SEQ ID NO: 4953 - protein, 80 aa, Homo sapiens
WQNGRLIFSIIIGEHIIFWNHAILHTVKPLIFQGNSFRIWYWHAVSYLSRIFGLSERYQFKISGSVRIFDPSQCQYLMNH

SEQ ID NO: 4954 - protein, 42 aa, Homo sapiens
KSSRKLLLKKTGYLNIEIYVCCEFKEPVIVSFTKPSVFNGCK

SEQ ID NO: 4955 - protein, 77 aa, Homo sapiens
RNVNLCCFLCTIAAVVSLLEINIPYYDVYEYRFPFLPSLPPSPTFLFFFSLSASLFLLPSSLPLSLLFLKSLIVNKL

SEQ ID NO: 4956 - protein, 112 aa, Homo sapiens
NSFCYFHIRVQTYKGACSLKVHNYSYSVCLYCYRMLCFGALSSADPRSSVEIHCLGHSLIRMLAGDFVSDVASLFSVHRLRVTTVACRVHPVGAAQLSESKNLPTYSNVFAL

SEQ ID NO: 4957 - protein, 67 aa, Homo sapiens
LASESVVQLVCTGLKAGEWVIHHHKGCPFFAVTADACGRRAQGSHYHFSLLTPRKLSTFLDTLFKVL

SEQ ID NO: 4958 - protein, 277 aa, Homo sapiens
VILDGLLTWGQFKQHYNRHFGFLGDFIGQVQSRKCIEDVIHFAWEEKLFLLADEVYQDNVYSPDCRFHSFKKVLYEMGPEYSSNVELASFHSTSKGYMGECGYRGGYMEVINLHPEIKGQLVKLLSVRLCPPVSGQAAMDIVVNPPVAGEESFEQFSREKESVLGNLAKKAKLTEDLFNQVPGIHCNPLQGAMYAFPRIFIPAKAVEAAQAHQMAPDMFYCMKLLEETGICVVPGSGFGQREGTYHFRMTILPPVEKLKTVLQKVKDFHINFLEKYA

SEQ ID NO: 4959 - protein, 73 aa, Homo sapiens
ENPSFTRRPDSFYTSFIMLDCNKFQILEWAYLTDLTILMISIRITYSKVKSGKTLLVFILISLYSFLNMEIQW

SEQ ID NO: 4960 - protein, 33 aa, Homo sapiens
SPAKWLMPEIPALCEAKAGGSPEARSSRVAWAA

SEQ ID NO: 4961 - protein, 75 aa, Homo sapiens
GRAVLEIDWVGLEPEFIFLICIPGDSCESDAFGNHCTKSYLWVLQTASPEASLGLRIFSSNVLVRSLSILWGWLW

SEQ ID NO: 4962 - protein, 30 aa, Homo sapiens
IFSIFTVLVYFFPVTVCMNTNVVFNPPFQF

SEQ ID NO: 4963 - protein, 82 aa, Homo sapiens
  MISC_FEATURE (24): Xaa equals any of the naturally occurring L-amino acids
  MISC_FEATURE (43): Xaa equals any of the naturally occurring L-amino acids
  MISC_FEATURE (57): Xaa equals any of the naturally occurring L-amino acids
GALDCGSPASSTPYFTGLELPGDXKLDAPYNFNHPFSINNLMXEQTPAPPKLDVGFXGYGAEGGEPGVYYQGLYSRSLLNAS

SEQ ID NO: 4964 - protein, 120 aa, Homo sapiens
  MISC_FEATURE (102): Xaa equals any of the naturally occurring L-amino acids
  MISC_FEATURE (118): Xaa equals any of the naturally occurring L-amino acids
DTTHYRESWYACRYRSGIPGSTHASDCFVFSRVLYKWNYIVCTFLYSLASFTQIIILRFFSVVACINNSFIFCSNIPLYGYTKIYHSFADEHLGYLQFYLQXKLLRILVYESLYGHIXSF

SEQ ID NO: 4965 - protein, 44 aa, Homo sapiens
  MISC_FEATURE (32): Xaa equals any of the naturally occurring L-amino acids
  MISC_FEATURE (36): Xaa equals any of the naturally occurring L-amino acids
  MISC_FEATURE (39): Xaa equals any of the naturally occurring L-amino acids
  MISC_FEATURE (42): Xaa equals any of the naturally occurring L-amino acids
FINGKPEVKKDLLEAQTNIAFLQSELDALKSXYADXSLXTEXDL

SEQ ID NO: 4966 - protein, 68 aa, Homo sapiens
DSGAAFSFGGLAFIVENAMGSFQNGYLSNLSIFQNSYFFPAHGQTREFSSVLRHENLVGHLKVKSVNV

SEQ ID NO: 4967 - protein, 111 aa, Homo sapiens
  MISC_FEATURE (72): Xaa equals any of the naturally occurring L-amino acids
  MISC_FEATURE (100): Xaa equals any of the naturally occurring L-amino acids
PPAAASHLGNIENQGNGLKAGRSVCQQGPNYVRWTRGTHLQGGKSRGRTSGDWPKVLPCLQDETRLLSPAFXAPATRLLLTDPSLPLSASIQVAVPALCXALSCLCILHKL

SEQ ID NO: 4968 - protein, 62 aa, Homo sapiens
  MISC_FEATURE (4): Xaa equals any of the naturally occurring L-amino acids
  MISC_FEATURE (28): Xaa equals any of the naturally occurring L-amino acids
  MISC_FEATURE (34): Xaa equals any of the naturally occurring L-amino acids
PQRXVKSFCHYLHKCVKHRFQQSAWHIXGCSMVXFIIITQIPQWQETSFYIMENIYIKSHLL

SEQ ID NO: 4969 - protein, 44 aa, Homo sapiens
AIHSLQQFDKIYFCEQKLRHLHFLPMWSLQTWETIHEYLYCMVI

SEQ ID NO: 4970 - protein, 55 aa, Homo sapiens
  MISC_FEATURE (4): Xaa equals any of the naturally occurring L-amino acids
HIFXFFFFCYTKSRFLLNLCNNYITIQYKYCTSSIKICSLYDRIHLKTLVILPRL

SEQ ID NO: 4971 - protein, 70 aa, Homo sapiens
SNQGDHQVKLKHKIIVGGFLVKDVNVGFPTHHGVSTHHCMLGTAVSLGHELKEHTNFWSVPAASRPSFCY

SEQ ID NO: 4972 - protein, 94 aa, Homo sapiens
  MISC_FEATURE (59): Xaa equals any of the naturally occurring L-amino acids
VQPQHACTQALIKTACCSPLPRVVCWRAVGVRTDTRTFHLPGALASSISFSTVLKQDRXSERPVICPKCCRRRLNVLESLLSHLHYDKSIVPNR

SEQ ID NO: 4973 - protein, 51 aa, Homo sapiens
  MISC_FEATURE (45): Xaa equals any of the naturally occurring L-amino acids
LAHIKIVEPHTLNLANLVTAGLHYPVLFFTRLTLPCSWCCVDLCXKHNRNI

SEQ ID NO: 4974 - protein, 41 aa, Homo sapiens
  MISC_FEATURE (37): Xaa equals any of the naturally occurring L-amino acids
WSVQPHSDITMRSWISIPWGGPVRHLLHPWNWIILEXKPGT

SEQ ID NO: 4975 - protein, 51 aa, Homo sapiens
GRRQSSGSSSPAAYGTLPCLDPSIRKTYPSTTGKSANLNPKMAMISVCETS

SEQ ID NO: 4976 - protein, 160 aa, Homo sapiens
IFLVFCKLSVIFSSLLRKMATQMVAAQLASMVWNNPSQQQFMQFGGSSGSQLPQIQTDVVLPSCKKKAPAETPVKERLFIVFNPHPLPLDVLEDIFCRFGNLIEVYLVSGKNVGYAKYADRISANDAIATLHGKILNGVRLKVMLADSPREESNKRQRTY

SEQ ID NO: 4977 - protein, 57 aa, Homo sapiens
KSETPSQEKKKKKVYSNRQIRGLRDPPLLLLPEVCRTVYRYLLDRCPLSYFICTVIL

SEQ ID NO: 4978 - protein, 68 aa, Homo sapiens
MSKGTPLNTKTFSSWQTYLARSWRRVRFQTMLPFCPCQYVLTDCDSAVNTHTHTQTHTQAPSVYDQDK

SEQ ID NO: 4979 - protein, 49 aa, Homo sapiens
PVSKKKKKKKKKKKKKKKSPGVPNSVFPEEEDLSYLLKQRSPFPVVSLL

SEQ ID NO: 4980 - protein, 199 aa, Homo sapiens
ARTKKIPFLGVCLGMQLAVIEFARNCLNLKDADSTEFRPNAPVPLVIDMPEHNPGNLGGTMRLGIRRTVFKTENSILRKLYGDVPFIEERHRHRFEVNPNLIKQFEQNDLSFVGQDVDGDRMEIIELANHPYFVGVQFHPEFSSRPMKPSPPYLGLLLAATGNLNAYLQQGCKLSSSDRYSDASDDSFSEPRIAELEIS

SEQ ID NO: 4981 - protein, 73 aa, Homo sapiens
  MISC_FEATURE (54): Xaa equals any of the naturally occurring L-amino acids
  MISC_FEATURE (63): Xaa equals any of the naturally occurring L-amino acids
ASPGLGGAQSSVLHNGFFHGSPGELLYTQKIQPLPALSPFSLLLPFPMPRSRQXLTFRTSIAXLILRPLFKGG

SEQ ID NO: 4982 - protein, 301 aa, Homo sapiens
KSPQCHCLDLLEKYGQGGNCTEGRMVFSYHNSFLIADRNEAWILETAGKYWAAEKVQEGVRNISNQLSITTKIAREHPDMRNYAKRKGWWDGKKEFDFAAAYSYLDTAKMMTSSGRYCEGYKLLNKHKGNITFETMMEILRDKPSGINMEGEFLTTASMVSILPQDSSLPCIHFFTGTPDPERSVFKPFIFVPHISQLLDTSSPTFELEDLVKKKSHFKPDRRHPLYQKHQQALEVVNNNEEKAKIMLDNMRKLEKELFREMESILQNKHLDVEKIVNLFPQCTKDEIQIYQSNLSVKVSS

SEQ ID NO: 4983 - protein, 66 aa, Homo sapiens
ELQGNEMLGDLQSFLGAVRAVMLDVKSVTWKANWKPWMKVYHAQNTKKDKSRRHRASVGFPEEETA

SEQ ID NO: 4984 - protein, 68 aa, Homo sapiens
CLTSLFILDLNFSFLPSPFTSIRRLHHHFFGPLTLLSFPFSFSFFNRMSSILSLHSPPDAVDSAMLWI

SEQ ID NO: 4985 - protein, 129 aa, Homo sapiens
  MISC_FEATURE (82): Xaa equals any of the naturally occurring L-amino acids
  MISC_FEATURE (90): Xaa equals any of the naturally occurring L-amino acids
  MISC_FEATURE (124): Xaa equals any of the naturally occurring L-amino acids
CFSPFLQMFVSSSGLPPSPVPSPRRFSSRRSQSPVKCIRPSVLGPLKRKGEMETESQPKRLFQGTTNMLSPDAAQLSDLSSXSDILDGSXSSSGLSSDPLAKGSATAESPVACSNSCSSFILMXDLSPK

SEQ ID NO: 4986 - protein, 54 aa, Homo sapiens
  MISC_FEATURE (37): Xaa equals any of the naturally occurring L-amino acids
  MISC_FEATURE (42): Xaa equals any of the naturally occurring L-amino acids
  MISC_FEATURE (54): Xaa equals any of the naturally occurring L-amino acids
ERVQVNANDVLATFSQKILHWNTDCNIKLLCVYCFYXCIHRXVFYRYIRSMALX

SEQ ID NO: 4987 - protein, 78 aa, Homo sapiens
  MISC_FEATURE (77): Xaa equals any of the naturally occurring L-amino acids
VIAVQEPGVPSRDPCLEAQERPAASMPWDARRPGGGADGGPEASGAARSRAQKQCRKSSFAFYQAVRDLLPVWLLGXY

SEQ ID NO: 4988 - protein, 141 aa, Homo sapiens
  MISC_FEATURE (15): Xaa equals any of the naturally occurring L-amino acids
REQPAGHTPLPVPAXQPVDYFILILQGRVEVEIGKEGLKFENGAFTYYGVSALTVPSSVHQSPVSSLQPIRHDLQPDPGDGTHSSAYCPDYTVRRSLICSSSRLRDCSTSMHSWLPEPRTCHSPLRTPTCSYSRQPDQAPW

SEQ ID NO: 4989 - protein, 79 aa, Homo sapiens
KDLDNQTIIVGNFNTPLTVLDRSLRQKTNKEMLDLNSALNQLKLIDKYRTLHPKGMLIHCWWKCKLVQALRKAVWRFLK

SEQ ID NO: 4990 - protein, 56 aa, Homo sapiens
DPKCLGPKYFGFFQILEYLHYTLMSISFEHHVGVLKASDFGAFHILDFQIRDAQPV

SEQ ID NO: 4991 - protein, 79 aa, Homo sapiens
  MISC_FEATURE (2): Xaa equals any of the naturally occurring L-amino acids
GXYQANIAELTHANNRVDQNEAEVKKLRLRVEELKQGLNQKEDELDDSLNQIRKLQRSLDEEKERNENLETELRHLQNW

SEQ ID NO: 4992 - protein, 104 aa, Homo sapiens
  MISC_FEATURE (100): Xaa equals any of the naturally occurring L-amino acids
  MISC_FEATURE (102): Xaa equals any of the naturally occurring L-amino acids
GPHPGGGPWGGDREVALKNTAVLILHSMGPHPGGGGGSHCICWLRAPACASRAPGLLCLLSVPISIKGLPLGGQKKKKKKKKKKKKKKKKKKKKKKKKKXGXPF

SEQ ID NO: 4993 - protein, 65 aa, Homo sapiens
RKKQIALNAVYPKTRFPGCPSTLYRPPFWLLTQCIFCYIKMGPRLHLLRNYKLLGVQGCVSYILP

SEQ ID NO: 4994 - protein, 96 aa, Homo sapiens
  MISC_FEATURE (95): Xaa equals any of the naturally occurring L-amino acids
GVKESGVTNVVAGATLKLCSVPWKKEEEEEAKLEGKAPGVSSWNLRWEETLKVIWSSIFQSMFHELVFQKWFPGLVSGSSMRVAVVYFVHRCILXD

SEQ ID NO: 4995 - protein, 77 aa, Homo sapiens
AAGSNASQAEHSVSRDSCVEQIRVHAQVPRLEWLCQNPFKGFSFSLLGQNILSHLGRFRMGRANLNKRFFLYPEIEG

SEQ ID NO: 4996 - protein, 287 aa, Homo sapiens
  MISC_FEATURE (189): Xaa equals any of the naturally occurring L-amino acids
  MISC_FEATURE (193): Xaa equals any of the naturally occurring L-amino acids
  MISC_FEATURE (201): Xaa equals any of the naturally occurring L-amino acids
LLAPTRRHSPGSPAFAPSSRATAMCPRAARAPATLLLALGAVLWPAAGAWELTILHTNDVHSRLEQTSEDSSKCVNASRCMGGVARLFTKVQQIRRAEPNVLLLDAGDQYQGTIWFTVYKGAEVAHFMNALRYDAMALGNHEFDNGVEGLIEPLLKEAKFPILSANIKAKGPLASQISGLYLPYKVLPXGDEXVGIVGYTXKETPFLSNPGTNLVFEDEITALQPEVDKLKTLNVNKIIALGHSGFEMDKLIAQKVRGVDVVVGGHSNTFLYTGNCFKRIAWARMSR

SEQ ID NO: 4997 - protein, 81 aa, Homo sapiens
YASLQCYWSKCMSISQRLYPCSLTLGNLKALILLLSPHKEVLLSGGRADVGHPTENFRNHVRDDASHERLRASFRFGNILK

SEQ ID NO: 4998 - protein, 119 aa, Homo sapiens
  MISC_FEATURE (66): Xaa equals any of the naturally occurring L-amino acids
  MISC_FEATURE (103): Xaa equals any of the naturally occurring L-amino acids
  MISC_FEATURE (110): Xaa equals any of the naturally occurring L-amino acids
LASSRGQRTDILPTFGGPREAPGAKVLALVPGTQEMPSPVGLLRALPLPWPQFLACTLRRLAGPRXSTGPSQKPPPLCSVPCRVPANDGGGGPGKPSSALWTXSACYSEXGLETSSSRS

SEQ ID NO: 4999 - protein, 39 aa, Homo sapiens
GNKSWSSTAVAAALELVDPPGCRNSARGATVPGLPWLFS

SEQ ID NO: 5000 - protein, 97 aa, Homo sapiens
AFYCRPSPEKGARVFPEPRCQGPRTPFTADPLQRLGRGLWRTWFLLTVLPLGPPSQTQTIQDPLSVRPNGNSEAVIFPPLPLHSLVFCPLLCSSLPP

SEQ ID NO: 5001 - protein, 80 aa, Homo sapiens
  MISC_FEATURE (74): Xaa equals any of the naturally occurring L-amino acids
MEKLVLDHDGKGVLELLPFGITDRTDFLSLIRNIYNLFSKSATRRLHLHDKTLVSTTPYLNPDSPKFLDNNLTXSIHANQ

SEQ ID NO: 5002 - protein, 137 aa, Homo sapiens
LFPTHPKPRTRLFSLSSGRMRRAGLGEGVPPGNYGNYGYANSGYSACEEENERLTESLRSKVTAIKSLSIEIGHEVKTQNKLLAEMDSQFDSTTGFLGKTMGKLKILSRGSQTKLLCYMMLFSLFVFFIIYWIIKLR

SEQ ID NO: 5003 - protein, 112 aa, Homo sapiens
STLLLLPLPVRPAFGEKVRLELRRAANPTVPFRCLVLPLQPRTLTFKRVTAGRQGRGSRTLSECLAVPWPVRASWLTFQLAELWDTSFLVSCARSYGKRELQLRFSSSQTVK

SEQ ID NO: 5004 - protein, 65 aa, Homo sapiens
HVALWLKFFNLEMTQTHRRCSNTTYSANLGKGTSQLARFPHYLPCIHAAHVFFIRMLVKFWLLYI

SEQ ID NO: 5005 - protein, 35 aa, Homo sapiens
  MISC_FEATURE (3): Xaa equals any of the naturally occurring L-amino acids
LKXCVCMQTYVNTHIHIGYDDDNYLLQIRCLLYVY

SEQ ID NO: 5006 - protein, 39 aa, Homo sapiens
KIISTFILFTNKLPFKKIKPHYLNIKLPNNIVLKCTILT

SEQ ID NO: 5007 - protein, 157 aa, Homo sapiens
AAACGLETREDGRGRGLLVFYGPSTPTTTHSSWRPRATVGLLGILRLRLVETPGDGGALGHSETALGGAPYWPDWISQPATQPQATRKKPDLGNSSSSFFFFFLIALGNFPNLGPSSFSKLRSHGLSPASPVCTRRRFIFSPLVSFYCLLRPSSCSH

SEQ ID NO: 5008 - protein, 44 aa, Homo sapiens
  MISC_FEATURE (38): Xaa equals any of the naturally occurring L-amino acids
  MISC_FEATURE (40): Xaa equals any of the naturally occurring L-amino acids
NYRSKLFVDNFRVKFDNLGYLPNFKIEVRISVTQPWEXWXSHIR

SEQ ID NO: 5009 - protein, 44 aa, Homo sapiens
TEDLFGFKHLLRQYLLGKPNIANGQFDFNFSKDTLLSRRLKCLH

SEQ ID NO: 5010 - protein, 38 aa, Homo sapiens
  MISC_FEATURE (2): Xaa equals any of the naturally occurring L-amino acids
EXVLKPFISFYFAICKCLLSSLHEVAVTFFTFKLPFYF

SEQ ID NO: 5011 - protein, 34 aa, Homo sapiens
PLLSLHVSIEGSGIPGWQLMDKRHYAKIQFWISY

SEQ ID NO: 5012 - protein, 119 aa, Homo sapiens
  MISC_FEATURE (1): Xaa equals any of the naturally occurring L-amino acids
  MISC_FEATURE (6): Xaa equals any of the naturally occurring L-amino acids
  MISC_FEATURE (7): Xaa equals any of the naturally occurring L-amino acids
XLGYTXXKGTKAGVTAVAAALELVDPPGCRNWHEPKGTQCGMTKYLLSESTAFTYLPVFKIFVKSYKKLQFDQIWVYAVCYPQRHFESSCDAFNNVLSLLIPLSNLIWYSQNSYSLRGN

SEQ ID NO: 5013 - protein, 73 aa, Homo sapiens
  MISC_FEATURE (34): Xaa equals any of the naturally occurring L-amino acids
  MISC_FEATURE (60): Xaa equals any of the naturally occurring L-amino acids
  MISC_FEATURE (64): Xaa equals any of the naturally occurring L-amino acids
VCIYFFSKETAYIFHVSMFLRPWVTVGIALMGAXQAWGLVLALDLEQGTSPAGLQFSPLXNERXELSDLKSFQ

SEQ ID NO: 5014 - protein, 100 aa, Homo sapiens
IANSSLGLALSVDFSMLRRKPTRLELKLDDIEEFENIRKDLETRKKQKEDVEVVGGSDGEGAIGLSSDPKSREQMINDRIGYKPQPKPNNRSSQFGSLEF

SEQ ID NO: 5015 - protein, 281 aa, Homo sapiens
  MISC_FEATURE (251): Xaa equals any of the naturally occurring L-amino acids
  MISC_FEATURE (263): Xaa equals any of the naturally occurring L-amino acids
  MISC_FEATURE (277): Xaa equals any of the naturally occurring L-amino acids
  MISC_FEATURE (278): Xaa equals any of the naturally occurring L-amino acids
VLLLQKDSLLTAAQLKAKGELSFEQDQLVAGGQLGELHNGTQYREVRQFCSGSGHHLVRFYFLTRVYSEYLEDVLEELTYGPAPDLVIINSCLWDLSRYGRCSMESYRENLERVFVRMDQVLPDSCLLVWNMAMPLGERITGGFLLPELQPLAGSLRRDVVEGNFYSATLAGDHCFDVLDLHFHFRHAVQHRHRDGVHWDQHAHRHLSHLLLTHVADAWGVELPKRGYPPGEPYHKWGGSDALGPSEDRAXKQNGTQPLKGSXGPLKDSCGFCMHLXXPLR

SEQ ID NO: 5016 - protein, 45 aa, Homo sapiens
  MISC_FEATURE (27): Xaa equals any of the naturally occurring L-amino acids
  MISC_FEATURE (31): Xaa equals any of the naturally occurring L-amino acids
  MISC_FEATURE (37): Xaa equals any of the naturally occurring L-amino acids
  MISC_FEATURE (45): Xaa equals any of the naturally occurring L-amino acids
RYYLIIIKIRGHSFEPSLTFQFKLGPXPSKXLGFRHXPLVLAGLX

SEQ ID NO: 5017 - protein, 95 aa, Homo sapiens
NMYGTSCLILHVTSLLYIDEVLVTLSSNTLPLLFRECLRDFLYWFYYSDYGLDLSILLLPPGFLIIHPSKLIFCEAFVSQIKTLLEPKVVADGYL

SEQ ID NO: 5018 - protein, 82 aa, Homo sapiens
LPKQILDRHCIYWYGSGLYGVVCTHLGLFSLNPAPNESGGRVHSISFNVVMHHKLNIRMKMKLDFDVSLKPFPCPIHSPPPP

SEQ ID NO: 5019 - protein, 83 aa, Homo sapiens
SLSSPAVKMLIMILTLKIRPHKEQGNSRGGTQLGESRPGQGKETHKPNRAALGKVLISWCCFLSHMPIPQAVPLSWLCRMSSS

SEQ ID NO: 5020 - protein, 76 aa, Homo sapiens
YPSVTSGTFRRKPNSSVWCTRSSDVFPPPNVLVKQTYTSSEATFGQASRLGKCCTLCIKCASHPSPLGKFLCILQA

SEQ ID NO: 5021 - protein, 95 aa, Homo sapiens
  MISC_FEATURE (69): Xaa equals any of the naturally occurring L-amino acids
PIIPMFTQNIREGFRSLGGTRLFRWLYEKFRYPFAPMYGGFPVKLRTYLGDPIPYDPQITAEELAEKTXNAVQALIDKHQRIPGNIMSALLERFH

SEQ ID NO: 5022 - protein, 90 aa, Homo sapiens
AARALSLSLSPEVDFPVPPGRGRSVESVQSQPQEPVSVPQTLTSTLEHIVGQLDVLTQTVSILEQRLTLTEDKLKQCLENQQLIMQRATP

SEQ ID NO: 5023 - protein, 178 aa, Homo sapiens
HELRRRMLEAADFAARKHRQQRRKDPEGTPYINHPIGVARILTHEAGITDIVVLQAALLHDTVEDTDTTLDEVELHFGAQVRRLVEEVTDDKTLPKLERKRLQVEQAPHSSPGAKLVKLADKLYNLRDLNRCTPEGWSEHRVQEYFEWAAQVVKGLQGTNRQLEEALKHLFKQRGLTI

SEQ ID NO: 5024 - protein, 62 aa, Homo sapiens
  MISC_FEATURE (7): Xaa equals any of the naturally occurring L-amino acids
  MISC_FEATURE (15): Xaa equals any of the naturally occurring L-amino acids
TIFAVMXSFNVSFQXGPIKVFLYLVNKDHSCGLVRGCIHRLWEAVVCVCVSISIFYVYNSAY

SEQ ID NO: 5025 - protein, 90 aa, Homo sapiens
STALGAGGAFSVPLLSLLSASLVLPAHFHNVLLGCIGIVCCLDPWPRLSLPVRETKLTTKGFCQIAFIYRICPFMCLCVYGLNGFLTSKK

SEQ ID NO: 5026 - protein, 51 aa, Homo sapiens
  MISC_FEATURE (10): Xaa equals any of the naturally occurring L-amino acids
  MISC_FEATURE (14): Xaa equals any of the naturally occurring L-amino acids
  MISC_FEATURE (36): Xaa equals any of the naturally occurring L-amino acids
VYRVLKPLKXNANXAKSLLLTTIPQIGSTEWSETLXNLKNMAQFSVLLPRH

SEQ ID NO: 5027 - protein, 333 aa, Homo sapiens
  MISC_FEATURE (144): Xaa equals any of the naturally occurring L-amino acids
GRRAQRSTPRSLARVSQRGPTRYADAPTPIRPSQDSTMTLNNVTMRQGTVGMQPQQQRWSIPADGRHLMVQKEPHQYSHRNRHSATPEDHCRRSWSSDSTDSVISSESGNTYYRVVLIGEQGVGKSTLANIFAGVHDSMDSDCXVLGEDTYERTLMVDGESATIILLDMWENKGENEWLHDHCMQVGDAYLIVYSITDRASFEKASELRIQLRRARQTEDIPIILVGNKSDLVRCREVSVSEGRACAVVFDCKFIETSAAVQHNVKELFEGIVRQVRLRRDSKEKNERRLAYQKRKESMPRKARRFWGKIVAKNNKNMAFKLKSKSCHDLSVL

SEQ ID NO: 5028 - protein, 101 aa, Homo sapiens
EPLWENLFLPPLGKQKNFSVFGEYFRNSNERHCFSCWLTGLKGAFVLLGQGERGDPRKVSLPEDGQPPGLQLQVHITRTAWQPGPPGAHSRQPLPRGLILQ

SEQ ID NO: 5029 - protein, 52 aa, Homo sapiens
RYLISLSCNLYLQTGVSNPINLIADIVRKNEMTSVKTQNYTYKVSRQNMLLL

SEQ ID NO: 5030 - protein, 51 aa, Homo sapiens
PVDSCAVSPGVAKEAASGSWGLVARSQQECLLYFVRDAEQISNSVAVMLAS

SEQ ID NO: 5031 - protein, 79 aa, Homo sapiens
TSSTINCSLGTFYAQNCAPSSEQQVFNGPCDEKGPIKAAGMGHSPTPHGPGHCHSCCPASPGLWLHGRSHFCKKFTFLK

SEQ ID NO: 5032 - protein, 79 aa, Homo sapiens
NLKPPLEPPFCRVFGKRKKGLCLRLWGRGDYVTSVQTAGNLKTVLSLFLYIVFIYKKKRLRMHAKLLFSVSHRPRWNVK

SEQ ID NO: 5033 - protein, 141 aa, Homo sapiens
LLQVDFHNMQSGGGVKTDDTSTLNSLCGYAWVYVWEEKQRCRLSSFFSSSASIPGLLPSHTLDLVQNVGVVLDEALGWGRERELCVKCLLEMHCGVFSCMGNHLCQAFPHFPYLSHLVSCLCFQLCVILFASCTKLIFSKV

SEQ ID NO: 5034 - protein, 30 aa, Homo sapiens
GTRVSDLATISLGSCQNLIFSLKTPICSHS

SEQ ID NO: 5035 - protein, 241 aa, Homo sapiens
IFGMSKLRMVLLEDSGSADFRRHFVNLSPFTITVVLLLSACFVTSSLGGTDKELRLVDGENKCSGRVEVKVQEEWGTVCNNGWSMEAVSVICNQLGCPTAIKAPGWANSSAGSGRIWMDHVSCRGNESALWDCKHDGWGKHSNCTHCEPRNATPWKPHTLLSPSVLIPVLLTVSPSWLFLESLSFPHFHFLPLYCHLWPGFALLVQHPQLQHLCLSAPSTRQKLTLENIRHSESRVLGSDG

SEQ ID NO: 5036 - protein, 52 aa, Homo sapiens
  MISC_FEATURE (43): Xaa equals any of the naturally occurring L-amino acids
  MISC_FEATURE (46): Xaa equals any of the naturally occurring L-amino acids
IRQCVKHWHTNAAKGAEGRQWGGAGTQQGALPRDTLVIFSTEXHPXAFLQHL

SEQ ID NO: 5037 - protein, 196 aa, Homo sapiens
  MISC_FEATURE (51): Xaa equals any of the naturally occurring L-amino acids
GGSEDQLEDPALSGKAWECEMGRRGWDLGGWGQALSPSLLAFQSLGRNLSXLPPLSLAHRHPACISQEEVEGTSLFPRNPLYPHPVLCSSPRLLGLRLLTSRRLRLVCVCLFAHLWLIPREPGHLLPDAHPCQSFLHSPSGRWDVRQPTLENPENREQGFALHNSTPQILSPGHRRPTGQDPKIWGKEVLRTLRYP

SEQ ID NO: 5038 - protein, 76 aa, Homo sapiens
  MISC_FEATURE (25): Xaa equals any of the naturally occurring L-amino acids
MFLDGGLPSSKLLPICTSVLGQGKXKARSCKSHSSGSQFHPQFKELSRQRQRLYSTHVQLKAGEAKPGQRKGKGCV

SEQ ID NO: 5039 - protein, 130 aa, Homo sapiens
  MISC_FEATURE (34): Xaa equals any of the naturally occurring L-amino acids
  MISC_FEATURE (87): Xaa equals any of the naturally occurring L-amino acids
PEIAPNGQSLVKQLHERQLDLPYLPLKRPKWTNXSSQLLGYFTLALYTSAPSKLKGDLNYLRLEWGPDFQQHEAGLIGADEVPILTXSSAELAQQQIAMLNGCTWLPVSWARKKGGLHTVVDSTTLSRPL

SEQ ID NO: 5040 - protein, 132 aa, Homo sapiens
LVHPPRNFLDAVRARWCYLELKKLHASVKLLTMAKNKLRGPKSRNVFHIASQKNFKAKNKAKPVTTNLKKINIMNEEKVNRVNKAFVNVQKELAHFAKSISLEPLQKELIPQQRHESKPVNVDEATRLMALL

SEQ ID NO: 5041 - protein, 68 aa, Homo sapiens
RECVCTFSLYKGQGVGQIHHRLIYIFCCDFFQLYNKCQLIVHGTIYFSTQFIVLSRERFIYFHYLALS

SEQ ID NO: 5042 - protein, 142 aa, Homo sapiens
  MISC_FEATURE (7): Xaa equals any of the naturally occurring L-amino acids
  MISC_FEATURE (124): Xaa equals any of the naturally occurring L-amino acids
PTRPASXGCGLPLSLLRAVTPVPAAIRPGAPDESMRGRARGVVFPRTPGGLPRPVLCTSSPTKGETEAPRGVGRAGWTSGPAAGAVVRPLCRGGPLGFRVSSGKRLAGLVGCAAILETDDSSPXDGFAGSAPASAPIFPAAP

SEQ ID NO: 5043 - protein, 255 aa, Homo sapiens
  MISC_FEATURE (242): Xaa equals any of the naturally occurring L-amino acids
  MISC_FEATURE (248): Xaa equals any of the naturally occurring L-amino acids
  MISC_FEATURE (249): Xaa equals any of the naturally occurring L-amino acids
RVMSAVLLLALLGFILPLPGVQALLCQFGTVQHVWKVSDLPRQWTPKNTSCDSGLGCQDTLMLIESGPQVSLVLSKGCTEAKDQEPRVTEHRMGPGLSLISYTFVCRQEDFCNNLVNSLPLWAPQPPADPGSLRCPVCLSMEGCLEGTTEEICPKGTTHCYDGLLRLRGGGIFSNLRVQGCMPQPGCNLLNGTQEIGPVGMTENCNRKDFLTCHRGTTIMTHGNLAQEPTDWTTSNYRDVRXGAGVSXXAAAPRC

SEQ ID NO: 5044 - protein, 78 aa, Homo sapiens
  MISC_FEATURE (14): Xaa equals any of the naturally occurring L-amino acids
  MISC_FEATURE (28): Xaa equals any of the naturally occurring L-amino acids
HEGRRKKWMLESCXMSLWIAQKYQLWLXPHLAFVSMKKPGTISTTISDHHQPQILGNLLEFFLNVLNSCWVPGRFQRK

SEQ ID NO: 5045 - protein, 38 aa, Homo sapiens
  MISC_FEATURE (17): Xaa equals any of the naturally occurring L-amino acids
  MISC_FEATURE (31): Xaa equals any of the naturally occurring L-amino acids
  MISC_FEATURE (32): Xaa equals any of the naturally occurring L-amino acids
FGASSLSSCRPITIVPXGKKWSPAPSPVALXXTGNPFG

SEQ ID NO: 5046 - protein, 43 aa, Homo sapiens
SRPFEEIYEWDIKQFSVLQVFFFFSKLFAVSNCNQYLLLSICL

SEQ ID NO: 5047 - protein, 89 aa, Homo sapiens
  MISC_FEATURE (64): Xaa equals any of the naturally occurring L-amino acids
AGFSVIATFAYFFPYFPCLLMLNSMNLLSDAVLDCPCCISIISLFSFSLYYYNCSFYMKARKLXLEEHLSATCQFCVSVLYVCVNFPLK

SEQ ID NO: 5048 - protein, 176 aa, Homo sapiens
GPRQGDHLRSGVSTKNTKIRQVWWWAPLRRLRQENHLNPGGRGCSEPDHAAALQPGRSPCVLLGAGAVTYPLSFSLAISVVSYEAEIGKGYMQVSQWTWPMLQAPSSQVQQCYHLLLLGGQTRHPHHEGAAGTMNYVNNPSLYYRKGCSHMRIQSTQAPWPCSPLQPQGSGSPIWR

SEQ ID NO: 5049 - protein, 274 aa, Homo sapiens
RGCGSCGYKPSAGPAWRPRPPPAVSPLRHPEPAKVLSFSSCPLPALGRTGPSRAARAQSLTMASLFKKKTVDDVIKEQNRELRGTQRAIIRDRAALEKQEKQLELEIKKMAKIGNKEACKVLAKQLVHLRKQKTRTFAVSSKVTSMSTQTKVMNSQMKMAGAMSTTAKTMQAVNKKMDPQKTLQTMQNFQKENMKMEMTEEMINDTLDDIFDGSDDEEESQDIVNQVLDEIGIEISGKMAKAPSAARSLPSASTSKATISDEEIERQLKALGVD

SEQ ID NO: 5050 - protein, 23 aa, Homo sapiens
TLKIEVPHDPAIPLLDIYPRNKK

SEQ ID NO: 5051 - protein, 73 aa, Homo sapiens
  MISC_FEATURE (26): Xaa equals any of the naturally occurring L-amino acids
ARFIKLIFFILVVKSSLIAFCQLDFXVCVIFKGRMTGQISNKKCIELENIVVPSYPWDIRSKTPSERLKPWIV

SEQ ID NO: 5052 - protein, 37 aa, Homo sapiens
  MISC_FEATURE (33): Xaa equals any of the naturally occurring L-amino acids
ADVESPELISNFLPFPFPSPSLPFPFSPLPSPXFPSP

SEQ ID NO: 5053 - protein, 87 aa, Homo sapiens
EGRLRQGRVREHCRGEEGIHFLVISFHSKRVSQNRWPGTGELGRARREISACVRKDGRAGLEPLLDYLQSFCSTLKVNQCLQTFPDT

SEQ ID NO: 5054 - protein, 124 aa, Homo sapiens
INTIIFIWKFYRRAISVYVITPDFLKLLLVDNRQVLSSVPLRVVPGLPAVELTGGILQFCDPRMRPRRSVRSAGGGAWEAVFVMNSGVFCPLKCIFVHPIRLKERKSISNECKLFLRKKCIRLL

SEQ ID NO: 5055 - protein, 139 aa, Homo sapiens
  MISC_FEATURE (121): Xaa equals any of the naturally occurring L-amino acids
  MISC_FEATURE (139): Xaa equals any of the naturally occurring L-amino acids
DQGGEWKHGRIILPSYDMEYQIVFEGVIGKGRSGEIAIDDIRISTDVPLENCMEPISAFAGGTLLPGTEPTVDTVPMQPIPAYWYYVMAAGGAVLVLVSVALALVLHYHRFRYAAKKTDHXITYKTFHYTNGAPLAVEX

SEQ ID NO: 5056 - protein, 201 aa, Homo sapiens
ALIMSFIFEWIYNGFSSVLQFLGLYKKSGKLVFLGLDNAGKTTLLHMLKDDRLGQHVPTLHPTSEELTIAGMTFTTFDLGGHEQARRVWKNYLPAINGIVFLVDCADHSRLVESKVELNALMTDETISNVPILILGNKIDRTDAISEEKLREIFGLYGQTTGKGNVTLKELNARPMEVFMCSVLKRQGYGEGFRWLSQYID

SEQ ID NO: 5057 - protein, 304 aa, Homo sapiens
  MISC_FEATURE (206): Xaa equals any of the naturally occurring L-amino acids
KEGILFVTYPDGRPTGDAFVLFACEEYAQNALRKHKDLLGKRYIELFRSTAAEVQQVLNRFSSAPLIPLPTPPIIPVLPQQFVPPTNVRDCIRLRGLPYAATIEDILDFLGEFATDIRTHGVHMVLNHQGRPSGDAFIQMKSADRAFMAAQKCHKKNMKDRYVEVFQCSAEEMNFVLMGGTLNRNGLSPPPCLSPPSYTFPAPAAXIPTEAAIYQPSVILNPRALQPSTAYYPAGTQLFMNYTAYYPSPPGSPNSLGYFPTAANLSGVPPQPGTVVRMQGLAYNTGVKEILNFFQGYQCLKDVW

SEQ ID NO: 5058 - protein, 254 aa, Homo sapiens
WCIFDYMAVYRMCCPYTRRASKSSRPMYGAVTSFLHSLIIQNEPRFAMFGPGLEELNTSLVLSLMSSEELCPTAGLPQRQIDGIGSGVNFQLNNQHKFNILILYSTTRKERDRAREEHTSAVNKMFSRHNEGDDQQGSRYSVIPQIQKVCEVVDGFIYVANAEAHKRHEWQDEFSHIMAMTDPAFGSSGRPLLVLSCISQGDVKRMPCFYLAHELHLNLLNHPWLVQDTEAETLTGFLNGIEWILEEVESKRAR

SEQ ID NO: 5059 - protein, 45 aa, Homo sapiens
FLIVHKPLTKESEISPSVKRKQAMKCYICRLKSKLVCFLKNLNQD

SEQ ID NO: 5060 - protein, 94 aa, Homo sapiens
  MISC_FEATURE (64): Xaa equals any of the naturally occurring L-amino acids
SCVSAVDTNIKCLVHLKSLSLPYMGETQSPSLCWKYHQTDCKCAAVADILVWWCAAISALHLPXWLPYSCVPIFASMLGVPHLLHFPACNQELT

SEQ ID NO: 5061 - protein, 200 aa, Homo sapiens
  MISC_FEATURE (198): Xaa equals any of the naturally occurring L-amino acids
  MISC_FEATURE (200): Xaa equals any of the naturally occurring L-amino acids
VGPGAAWRRPHSGIMAQVAMSTLPVEDEESSESRMVVTFLMSALESMCKELAKSKAEVACIAVYETDVFVVGTERGRAFVNTRKDFQKDFVKYCVEEEEKAAEMHKMKSTTQANRMSVDAVEIETLRKTVEDYFCFCYGKALGKSTVVPVPYEKMLRDQSAVVVQGLPEGVAFKHPENYDLATLKWILENKAGISFIXKX

SEQ ID NO: 5062 - protein, 179 aa, Homo sapiens
  MISC_FEATURE (112): Xaa equals any of the naturally occurring L-amino acids
  MISC_FEATURE (143): Xaa equals any of the naturally occurring L-amino acids
  MISC_FEATURE (155): Xaa equals any of the naturally occurring L-amino acids
  MISC_FEATURE (160): Xaa equals any of the naturally occurring L-amino acids
REIERKRQREEERRKWKEEEKRKRKDIEKLKKIDRIPERDKLKDEPKIKLLKKPEKGDEKELDKREKAKKLDKENLSDERASGQSCTLPKRSDSELKDEKPKRPEDESGRDXREREREYERDQERILRERERLKRQEEERRRXRSAMRKRRLLRXKKKKXKKRKTHFGIKERRLKVQNQ

SEQ ID NO: 5063 - protein, 73 aa, Homo sapiens
  MISC_FEATURE (56): Xaa equals any of the naturally occurring L-amino acids
QDGLNSLVLDLDFPALRKNKNIDNFLNRYEKIVKKIRGLQMKAEDYDVVKVIGRGXFGEVQLVVTRHRRRFML

SEQ ID NO: 5064 - protein, 60 aa, Homo sapiens
  MISC_FEATURE (13): Xaa equals any of the naturally occurring L-amino acids
PCAIIFFHHFSGXLEGGGDPGDLSTLFSQKAGWFFSLFSCDSYLESGLNVNILVLVVQLR

SEQ ID NO: 5065 - protein, 72 aa, Homo sapiens
  MISC_FEATURE (23): Xaa equals any of the naturally occurring L-amino acids
  MISC_FEATURE (24): Xaa equals any of the naturally occurring L-amino acids
  MISC_FEATURE (25): Xaa equals any of the naturally occurring L-amino acids
  MISC_FEATURE (27): Xaa equals any of the naturally occurring L-amino acids
  MISC_FEATURE (60): Xaa equals any of the naturally occurring L-amino acids
  MISC_FEATURE (61): Xaa equals any of the naturally occurring L-amino acids
  MISC_FEATURE (68): Xaa equals any of the naturally occurring L-amino acids
  MISC_FEATURE (70): Xaa equals any of the naturally occurring L-amino acids
GRVEKSLMTLKISAWLLTKIGNXXXGXRFGKRRERIMKFDFYIEMKGPFQIWKSFGLNNXXIFDLENXGXKP

SEQ ID NO: 5066 - protein, 49 aa, Homo sapiens
  MISC_FEATURE (47): Xaa equals any of the naturally occurring L-amino acids
LKCFETVVDGYEELLFLLPCRTPESKMIHQQLYWSHPRKVSQGSCYXVC

SEQ ID NO: 5067 - protein, 104 aa, Homo sapiens
RIQEYFLLGWALNKAKNCRNQSRKSPAHLWPLPSSRPPPCRKNLAFGLSLSHRGHLLFPSDIQPYRRSLDSDPSVQAGWKGPSTLPGRSETNCFRESDGLPKTC

SEQ ID NO: 5068 - protein, 67 aa, Homo sapiens
  MISC_FEATURE (37): Xaa equals any of the naturally occurring L-amino acids
PTRPRTRGLKMPLTFILLPSGKGNLVFSITSTKILLXSTHYPIPKPFSHFKTFVTEVPNPSQFHNLH

SEQ ID NO: 5069 - protein, 66 aa, Homo sapiens
  MISC_FEATURE (13): Xaa equals any of the naturally occurring L-amino acids
  MISC_FEATURE (52): Xaa equals any of the naturally occurring L-amino acids
  MISC_FEATURE (61): Xaa equals any of the naturally occurring L-amino acids
TKLHFQGQGLGNXLIVKSCNTSVQVNISGPCFPSQCMHELFFMHHWGAQSWXNLPVGILGXTWACL

SEQ ID NO: 5070 - protein, 47 aa, Homo sapiens
KCKCAGRKGTDDSVTLQLQKLRVGDYLDIAITPLNQVPPPSGHMRSY

SEQ ID NO: 5071 - protein, 113 aa, Homo sapiens
  MISC_FEATURE (33): Xaa equals any of the naturally occurring L-amino acids
FGTSGTSCCLGWTWFCLLRPLFALSFHFLQRAXRMAHKQIYYSDKYFDEHYEYRHVMLPRELSKQVPKTHLMSEEEWRRLGVQQSLGWVHYMIHEPEPHILLFRRPLPKDQQK

SEQ ID NO: 5072 - protein, 287 aa, Homo sapiens
SGSAFLRCPPPPVRRSEKPNWDYHAEIQAFGHRLQENFSLDLLKTAFVNSCYIKSEEAKRQQLGIEKEAVLLNLKSNQELSEQGTSFSQTCLTQFLEDEYPDMPTEGIKNLVDFLTGEEVVCHVARNLAVEQLTLSEEFPVPPAVLQQTFFAVIGALLQSSGPERTALFIRDFLITQMTGKELFEMWKIINPMGLLVEELKKRNVSAPESRLTRQSGGTTALPLYFVGLYCDKKLIAEGPGETVLVAEEEAARVALRKLYGFTENRRPWNYSKPKETLRAEKSITAS

SEQ ID NO: 5073 - protein, 61 aa, Homo sapiens
ILTEFLEMIVNCLQIIEKCIYLCVCVCQKCNCFIIFFPYLYILFNTWFISTVHCFLCPKLT

SEQ ID NO: 5074 - protein, 130 aa, Homo sapiens
  MISC_FEATURE (112): Xaa equals any of the naturally occurring L-amino acids
  MISC_FEATURE (122): Xaa equals any of the naturally occurring L-amino acids
  MISC_FEATURE (123): Xaa equals any of the naturally occurring L-amino acids
EDPFTILTKEIFFFTVELVCENKELCSSPRWRNAIQKSNFSKVTSFFMSCHHFKGLAPLPHVYTQGNCRPISCLGLTLMPFASSFPEVKVPVMYSHRNIFQLFMSFTTKKKXQSGMGVQLLXXFLVRIFY

SEQ ID NO: 5075 - protein, 342 aa, Homo sapiens
  MISC_FEATURE (19): Xaa equals any of the naturally occurring L-amino acids
IRHEGLGRMKPNTLVLGFXKDWLQADMRDVDMYINLFHDAFDIQYGVVVIRLKEGLDISHLQGQEELLSSQEKSPGTKDVVVSVEYSKKSDLDTSKPLSEKPITHKVEEEDGKTATQPLLKKESKGPIVPLNVADQKLLEASTQFQKKQGKNTIDVWWLFDDGGLTLLIPYLLTTKKKWKDCKIRVFIGGKINRIDHDRRAMATLLSKFRIDFSDIMVLGDINTKPKKENIIAFEEIIEPYRLHEDDKEQDIADKMKEDEPWRITDNELELYKTKTYRQIRLNELLKEHSSTANIIVMSLPVARKGAVSSALYMAWLEALSKDLPPILLVRGNHQSVLTFYS

SEQ ID NO: 5076 - protein, 65 aa, Homo sapiens
QHRDKMQQSKNQVVSSTNGELNTDDPTAGRSNAPITAPTEVEVMDETKCCCFFKRRKRKTIQRHK

SEQ ID NO: 5077 - protein, 78 aa, Homo sapiens
  MISC_FEATURE (52): Xaa equals any of the naturally occurring L-amino acids
  MISC_FEATURE (63): Xaa equals any of the naturally occurring L-amino acids
  MISC_FEATURE (64): Xaa equals any of the naturally occurring L-amino acids
IRHEELDKLLSSFKSLLEEKEQAEIQIKEESKTAVEMLQNQLKELNEAVAAXCGDQEIMKATXXSLDPPIEERASSEK

SEQ ID NO: 5078 - protein, 192 aa, Homo sapiens
ECRLEGSMEVHGKPKASPSCSSPTRDSSGVPVSKELLTAGSDGRGGIWDRLLINSQPKSRKTSTLQTVRIERSPLLDQVQTFLPQMARANEKLRKEMAAAPPGRFNIENIDGPHSKVIQMDVALFEMNQSDSKEVDSSEESSQDSSENSSESEDEDDSIPSEVTIDNIKLPNSEGGKGKIEVLDSPASKKKK

SEQ ID NO: 5079 - protein, 39 aa, Homo sapiens
  MISC_FEATURE (20): Xaa equals any of the naturally occurring L-amino acids
LTSVNSSPTRLMTTFILHEXIVFVSTVFYYFRASLRHTI

SEQ ID NO: 5080 - protein, 146 aa, Homo sapiens
  MISC_FEATURE (7): Xaa equals any of the naturally occurring L-amino acids
  MISC_FEATURE (22): Xaa equals any of the naturally occurring L-amino acids
  MISC_FEATURE (121): Xaa equals any of the naturally occurring L-amino acids
  MISC_FEATURE (123): Xaa equals any of the naturally occurring L-amino acids
  MISC_FEATURE (125): Xaa equals any of the naturally occurring L-amino acids
  MISC_FEATURE (142): Xaa equals any of the naturally occurring L-amino acids
GSGAEAXDKKPRDLFGPPGPPXAEVTAETLLHEFQELLKEATERRFSGLLDPLLPQGAGLRLVGEAFHCRLQGPRRVDKRTLVELHGFQAPAAQGAFLRGSGLSLASGRFTAPVSGIFQFXAXLXVGAGWGSAVCCDGAGAXLSGG

SEQ ID NO: 5081 - protein, 126 aa, Homo sapiens
ERSHLQPGAVGITESPILGLGSAMTTEIGWWKLTFLRKKKSTPKVLYEIPDTYAQTEGDAEPPRPDAGGPNSDFNTRLEKIVDKSTKGKHVKVSNSGRFKEKKKVRATLAENPNLFDDHEEGRSSK

SEQ ID NO: 5082 - protein, 205 aa, Homo sapiens
  MISC_FEATURE (54): Xaa equals any of the naturally occurring L-amino acids
  MISC_FEATURE (190): Xaa equals any of the naturally occurring L-amino acids
YCSLKTPLSENDMPSQCNSELVRGPLAAPGGGERYSRSAGMYMQSGSDFNCGVXRGCGLAPSLSKRDEGSSPSLALNTYPSYLSQLDSWGDPKAAYRLEQPVGRPLSSCSYPPSVKEENVCCMYSAEKRAKSGPEAALYSHPLPESCLGEHEVPVPSYYRASRATPRWTRRPTVLGPTTSKPLSSSGPVXTRAPNIWNRLSWGAK

SEQ ID NO: 5083 - protein, 84 aa, Homo sapiens
  MISC_FEATURE (61): Xaa equals any of the naturally occurring L-amino acids
  MISC_FEATURE (64): Xaa equals any of the naturally occurring L-amino acids
  MISC_FEATURE (67): Xaa equals any of the naturally occurring L-amino acids
  MISC_FEATURE (78): Xaa equals any of the naturally occurring L-amino acids
  MISC_FEATURE (82): Xaa equals any of the naturally occurring L-amino acids
VSSNPDKSRCLGVRHIQDIGLWLQNRNLGGLQLVLGRLLLLRLLLIILLLLLLLLLLNRQXNQXVHXVHHQSPGPCGXEVLXTN

SEQ ID NO: 5084 - protein, 61 aa, Homo sapiens
GRAKERKVNKKKQQQQQPPQPPMAHDITATPAGPSLGGLCPSNTSLLATSSPMPVKEEFLP

SEQ ID NO: 5085 - protein, 57 aa, Homo sapiens
FHHVAQAGLDLPTSSDLPAPTSQSAGITGLSHRARPVLFVFVERWGFAMLPRLISNS

SEQ ID NO: 5086 - protein, 218 aa, Homo sapiens
  MISC_FEATURE (59): Xaa equals any of the naturally occurring L-amino acids
  MISC_FEATURE (68): Xaa equals any of the naturally occurring L-amino acids
EVLPGPGSTRVWPGPSVSPRPQGGALSTQKGPKAGHGGAEEFGRCKQPHARGGGDCFSXRPHASTFHXACPLLMCSSQCLCEPTSAQSYPSSACGDPAPAALLLPRPQTAWWRVLHLGQAGVHPAKDKAASTCPRIQMVHWPREESDQKWSPLCGEAPTPPRETVPRCGSPPSLVGHSWPGPPILRSFPGCGFDLRSGSGLASGVWPGPACCSLLGGP

SEQ ID NO: 5087 - protein, 59 aa, Homo sapiens
GSSTIKAYLINNYFCKQVGLTYSSSFCLDMNLRSSCLKTFTLLFSDTFPSYFFFFFGCC

SEQ ID NO: 5088 - protein, 154 aa, Homo sapiens
  MISC_FEATURE (11): Xaa equals any of the naturally occurring L-amino acids
  MISC_FEATURE (17): Xaa equals any of the naturally occurring L-amino acids
  MISC_FEATURE (18): Xaa equals any of the naturally occurring L-amino acids
  MISC_FEATURE (23): Xaa equals any of the naturally occurring L-amino acids
  MISC_FEATURE (25): Xaa equals any of the naturally occurring L-amino acids
  MISC_FEATURE (26): Xaa equals any of the naturally occurring L-amino acids
  MISC_FEATURE (28): Xaa equals any of the naturally occurring L-amino acids
  MISC_FEATURE (75): Xaa equals any of the naturally occurring L-amino acids
FILELQMQSIXEKKMKXXRNIAXHXXNXPSLITFLCKNCSVLACSGEDIHVIEKMHHVNMTPEFKELYIVRENKXLQKKCADYQINGEIICKCGQAWGTMMVHKGLDLPCLKIRNFVVVFKNNSTKKQYKKWVELPITFPNLDYSECCLFSDED

SEQ ID NO: 5089 - protein, 254 aa, Homo sapiens
  MISC_FEATURE (1): Xaa equals any of the naturally occurring L-amino acids
XIEINPHVKGTKAGAPPRCGRSRTSGSPGLQEFGTSSSTPARPSSHHSACFLGPEIMPLGLLWLGLALLGALHAQAQDSTSDLIPAPPLSKVPLQQNFQDNQFQGKWYVVGLAGNAILREDKDPQKMYATIYELKEDKSYNVTSVLFRKKKCDYWIRTFVPGCQPGEFTLGNIKSYPGLTSYLVRVVSTNYNQHAMVFFKKVSQNREYFKITLYGRTKELTSELKENFIRFSKSLGLPENHIVFPVPIDQCIDG

SEQ ID NO: 5090 - protein, 58 aa, Homo sapiens
QAADKYVDDMGQLRAPFACHLPPLLWMVSPLARLPGTDHVAIKANVNKYHETVVCIVF

SEQ ID NO: 5091 - protein, 76 aa, Homo sapiens
SLAFQGASIALHHDLALVLLRDLPTAGSVPSSVIVLHSDTIIAGLNIAINMSVPQAERGFLILREQKVFWLKRLKT

SEQ ID NO: 5092 - protein, 66 aa, Homo sapiens
KYLRAIIVGHLRSSVNSELANLSLCVSTLIFFFSWVSEASKFFQKWSITKLSETQYLMYCTRLPNS

SEQ ID NO: 5093 - protein, 361 aa, Homo sapiens
  MISC_FEATURE (1): Xaa equals any of the naturally occurring L-amino acids
  MISC_FEATURE (24): Xaa equals any of the naturally occurring L-amino acids
  MISC_FEATURE (344): Xaa equals any of the naturally occurring L-amino acids
  MISC_FEATURE (350): Xaa equals any of the naturally occurring L-amino acids
  MISC_FEATURE (356): Xaa equals any of the naturally occurring L-amino acids
  MISC_FEATURE (359): Xaa equals any of the naturally occurring L-amino acids
XLHRGDDRSRTSGSPGLQEFGRGXAGVGGRPRRRRRKGAASRARLPFSLSIMDPSLLRERELFKKRALSTPVVEKRSASSESSSSSSKKKKTKVEHGGSSGSKQNSDHSNGSFNLKALSGSSGYKFGVLAKIVNYMKTRHQRGDTHPLTLDEILDETQHLDIGLKQKQWLMTEALVNNPKIEVIDGKYAFKPKYNVRDKKALLRLLDQHDQRGLGGILLEDIEEALPNSQKAVKALGDQILFVNRPDKKKILFFNDKSCQFSVDEEFQKLWRSVTVDSMDEEKIEEYLKRQGISSMQESGPKKVAPIQRRKKPASQKKRRFKTHNEHLAGVLKDYSDITSSNRXQFCLGXELQIHXQEXSC

SEQ ID NO: 5094 - protein, 69 aa, Homo sapiens
IRNTCIWWKPWISTSSNYSSLYSLLCKLVYNLQADLKIFLYLIAAAFILGSAVTFNYLNLLPEGMSLTF

SEQ ID NO: 5095 - protein, 100 aa, Homo sapiens
  MISC_FEATURE (93): Xaa equals any of the naturally occurring L-amino acids
  MISC_FEATURE (94): Xaa equals any of the naturally occurring L-amino acids
  MISC_FEATURE (98): Xaa equals any of the naturally occurring L-amino acids
LWFRWFQFSDISSSRKADSLCHSHLATAAGGSGDKDLSIGPAHGGNTKEPGADAFFRAVTTPEHATLETILRHNQLILEAIQQKIECKLFTSXXEHLXKL

SEQ ID NO: 5096 - protein, 21 aa, Homo sapiens
IPATREAEAGESLEPGRWRLQ

SEQ ID NO: 5097 - protein, 44 aa, Homo sapiens
DLEEIILYYFLSVFFNAFTSGVGMLDFIFLKTNKIWKALPLNVT

SEQ ID NO: 5098 - protein, 239 aa, Homo sapiens
  MISC_FEATURE (75): Xaa equals any of the naturally occurring L-amino acids
SLENDKMRLEKDLSFKDTQLKEYEELLASVRANNHQQQQGLQDSSSKCQALEENNLSLRHTLSDMEYRLKELEYXKRNLEQENQNLRMQVSETCTGPMLQAKMDEIGNHYTEMVKNLRMEKDREICRLRSQLNQYHKDVSKREGSCSDFQFKLHELTSLLEEKDSLIKRQSEELSKLRQEIYSSHNQPSTGGRTTITTKKYRTQYPILGLLYDDYEYIPPGSETQTIVIEKTEDKYTCP

SEQ ID NO: 5099 - protein, 124 aa, Homo sapiens
  MISC_FEATURE (8): Xaa equals any of the naturally occurring L-amino acids
PTRRPRVXGAEFRKIPTSMKAKRSHQAIIMSTSLRVSPSIHGYHFDTASRKKAVGNIFENTDQESLERLFRNSGDKKAEERAKIIFAIDQDVEEKTRALMALKKRTKDKLFQFLKLRKYSIKVH

SEQ ID NO: 5100 - protein, 216 aa, Homo sapiens
GHMELAMDNSYAFNQRSTCNGIPSEKKNNFLVSEDHGQKILSVLQNFREQNVFYDFKIIMKDEIIPCHRCVLAACSDFFRAMFEVNMKERDDGSVTITNLSSKAVKAFLDYAYTGKTKITDDNVEMFFQLSSFLQVSFLSKACSDFLIKSINLVNCLQLLSISDSYGSTSLFDHALHFVQHHFSLLFKSSDFLEMNFGVLQKCLESDELNVPEEEK

SEQ ID NO: 5101 - protein, 535 aa, Homo sapiens
SCRIRHERLTSAVSLQLRAPGAARPASGLPDRLWPAPSPSPGAHRAAAGAEQPPSRPSAGPARSGRMNDFGIKNMDQVAPVANSYRGTLKRQPAFDTFDGSLFAVFPSLNEEQTLQEVPTGLDSISHDSANCELPLLTPCSKAVMSQALKATFSGFKKEQRRLGIPKNPWLWSEQQVCQWLLWATNEFSLVNVNLQRFGMNGQMLCNLGKERFLELAPDFVGDILWEHLEQMIKENQEKTEDQYEENSHLTSVPHWINSNTLGFGTEQAPYGMQTQNYPKGGLLDSMCPASTPSVLSSEQEFQMFPKSRLSSVSVTYCSVSQDFPGSNLNLLTNNSGTPKDHDSPENGADSFESSDSLLQSWNSQSSLLDVQRVPSFESFEDDCSQSLCLNKPTMSFKDYIQERSDPVEQGKPVIPAAVLAGFTGSGPIQLWQFLLELLSDKSCQSFISWTGDGWEFKLADPDEVARRWGKRKNKPKMNYEKLSRGLRYYYDKNIIHKTSGKRYVYRFVCDLQNLLGFTPEELHAILGVQPDTED

SEQ ID NO: 5102 - protein, 452 aa, Homo sapiens
DPRVRPRRPQSLSPVLSLSPDSMSFTTRSTFSTNYRSLGSVQAPSYGARPVSSAASVYAGAGGSGSRISVSRSTSFRGGMGSGGLATGIAGGLAGMGGIQNEKETMQSLNDRLASYLDRVRSLETENRRLESKIREHLEKKGPQVRDWSHYFKIIEDLRAQIFANTVDNARIVLQIDNARLAADDFRVKYETELAMRQSVENDIHGLRKVIDDTNITRLQLETEIEALKEELLFMKKNHEEEVKGLQAQIASSGLTVEVDAPKSQDLAKIMADIRAQYDELARKNREELDKYWSQQIEESTTVVTTQSAEVGAAETTLTELRRTVQSLEIDLDSMRNLKASLENSLREVEARYALQMEQLNGILLHLESELAQTRAEGQRQAQEYEALLNIKVKLEAEIATYRRLLEDGEDFNLGDALDSSNSMQTIQKTTTRRIVDGKVVSETNDTKVLRH

SEQ ID NO: 5103 - protein, 110 aa, Homo sapiens
LSIFSSSPIMVDNDSSGTSDKDHSEILDGISNIKLNSEEVTQSQLDSCTSHDGHQQLSEVSSKRECPASGQSEPRNGGTNEESNSSGNTNTDPPAEDSQKSSGANQAKTD

SEQ ID NO: 5104 - protein, 66 aa, Homo sapiens
TGPEFPGRPTRPGRSRKILTHKNFGLESFPGVVPIKTDLERKPAQHGTCFLNSLESVWCMSLLIYS

SEQ ID NO: 5105 - protein, 241 aa, Homo sapiens
SFSEMAGVSACIKYSMFTFNFLFWLCGILILALAIWVRVSNDSQAIFGSEDVGSSSYVAVDILIAVGAIIMILGFLGCCGAIKESRCMLLLFFIGLLLILLLQVATGILGAVFKSKSDRIVNETLYENTKLLSATGESEKQFQEAIIVFQEEFKCCGLVNGAADWGNNFQHYPELCACLDKQRPCQSYNGKQVYKETCISFIKDFLAKNLIIVIGISFGLAVIEILGLVFSMVLYCQIGNK

SEQ ID NO: 5106 - protein, 81 aa, Homo sapiens
GGFFSISFKRCMSEFPLHTKNWSLEPHYSLSQVLVPYTPECQMVGADWKKEKSSSRCVGSHPPHIASPSSEQWAWGRKLFQ

SEQ ID NO: 5107 - protein, 103 aa, Homo sapiens
RPQRLGRLGFPLPPRTPKDTPNPRPAGPALARPKYYLAQASARGTPKLPMYPAPEGLHSQEVPMYPNTGRHPAPPSQTRKKVNLTTTYSPKTTYFVLAGLPAT

SEQ ID NO: 5108 - protein, 143 aa, Homo sapiens
  MISC_FEATURE (32): Xaa equals any of the naturally occurring L-amino acids
  MISC_FEATURE (34): Xaa equals any of the naturally occurring L-amino acids
  MISC_FEATURE (41): Xaa equals any of the naturally occurring L-amino acids
  MISC_FEATURE (42): Xaa equals any of the naturally occurring L-amino acids
  MISC_FEATURE (44): Xaa equals any of the naturally occurring L-amino acids
  MISC_FEATURE (67): Xaa equals any of the naturally occurring L-amino acids
IGTSSFANHPPAARLFPANKEREEIQTLKQQXAXLREDLKXXEXKWSSTHSRLRSQIQMLVRENTDXREEIKVMERFRLDAWKRAEAIESSLEVEKKDKLANTSVRFQNSQISSGTQVEKYKKNYLPMQGKRLHDLFIKHFRM

SEQ ID NO: 5109 - protein, 121 aa, Homo sapiens
  MISC_FEATURE (42): Xaa equals any of the naturally occurring L-amino acids
TMITPSSKLTLTKGNKSWSSTAVAAALELVDPPGCRNSARGXGNEYIHFSVIKLLKVNFNVLIVFLMCAAEMAMSLLNLHLQLKGSFRRKYKLAFILQTIVFYFIILICFVTHKKETIPEL

SEQ ID NO: 5110 - protein, 42 aa, Homo sapiens
  MISC_FEATURE (2): Xaa equals any of the naturally occurring L-amino acids
  MISC_FEATURE (5): Xaa equals any of the naturally occurring L-amino acids
QXELXLKKKKKIICKINSGIVVLFKEMFCKLSSHYIIFIVLS

SEQ ID NO: 5111 - protein, 48 aa, Homo sapiens
  MISC_FEATURE (7): Xaa equals any of the naturally occurring L-amino acids
KYHSSHXNIPFNLLFLKGYCKYESIYKVNCYFFCSEKYTLKIVIVNNV

SEQ ID NO: 5112 - protein, 45 aa, Homo sapiens
ERNWMFQKLLHLLQMSQIQLLPFENVGEMSLKNMFVCKNVSVCNS

SEQ ID NO: 5113 - protein, 57 aa, Homo sapiens
VWGPPVPSWAAEGGAFYPRFLSLLKSLEQTVAALHPLLFKKNFFSRKKMLSVCWGKF

SEQ ID NO: 5114 - protein, 56 aa, Homo sapiens
  MISC_FEATURE (26): Xaa equals any of the naturally occurring L-amino acids
GKLVRLQVPVRNSRVDPRVRSLDSNXLSINFSPQTTVNFYFLSAEIFHRWKLMFQF

SEQ ID NO: 5115 - protein, 370 aa, Homo sapiens
KGRSSESTTPLNVSRETLQQHKLLKVIRKKLVRKTLDMIKKIADDKYNDTFWKEFGTNIKLGVIEDHSNRTRLAKLLRFQSSHHPTDITSLDQYVERMKEKQDKIYFMAGSSRKEAESSPFVERLLKKGYEVIYLTEPVDEYCIQALPEFDGKRFQNVAKEGVKFDESEKTKESREAVEKEFEPLLNWMKDKALKDKIEKAVVSQRLTESPCALVASQYGWSGNMERIMKAQAYQTGKDISTNYYASQKKTFEINPRHPLIRDMLRRIKEDEDDKTVLDLAVVLFETATLRSGYLLPDTKAYGDRIERMLRLSLNIDPDAKVEEEPEEEPEETAEDTTEDTEQDEDEEMDVGTDEEEETAKESTAEKDEL

SEQ ID NO: 5116 - protein, 64 aa, Homo sapiens
IIIIKKINAMQLGMANVNAYLYQRLTLSSGLSLVDYPWQTLNEQREATMLKDKSPLSSYYRNNV

SEQ ID NO: 5117 - protein, 64 aa, Homo sapiens
  MISC_FEATURE (1): Xaa equals any of the naturally occurring L-amino acids
  MISC_FEATURE (58): Xaa equals any of the naturally occurring L-amino acids
XQATAINTDVNGCICFAVVTGLGRFGICERIDSFSKLFHKVKKLHFKGNRSYSSLKSXSNCSFI

SEQ ID NO: 5118 - protein, 98 aa, Homo sapiens
  MISC_FEATURE (9): Xaa equals any of the naturally occurring L-amino acids
  MISC_FEATURE (35): Xaa equals any of the naturally occurring L-amino acids
  MISC_FEATURE (37): Xaa equals any of the naturally occurring L-amino acids
  MISC_FEATURE (93): Xaa equals any of the naturally occurring L-amino acids
VEPRHSSAXNLHSLSISHSPSLFPLWPHWHPGTFXPXGLCTYCSNSLECPHSHTKSLASFTALLKSHLLSEAFPDHPATNSPSLCNIAGFFLXAFIIS

SEQ ID NO: 5119 - protein, 15 aa, Homo sapiens
VETGFIMLCRLLSNS

SEQ ID NO: 5120 - protein, 144 aa, Homo sapiens
  MISC_FEATURE (96): Xaa equals any of the naturally occurring L-amino acids
  MISC_FEATURE (124): Xaa equals any of the naturally occurring L-amino acids
  MISC_FEATURE (130): Xaa equals any of the naturally occurring L-amino acids
  MISC_FEATURE (132): Xaa equals any of the naturally occurring L-amino acids
EKPFSSFTSMKSSDVFSSKGMTRWGEFDDLYRISELDRTQIPMSEKRNSQEDYLSYHSNTLKPHAKDEPDSPVLYRTMSEAALVRKRMKPLMMDRXERQKNRASINGHFYNHETSIFIPAFESXTKVRVXSXMRTEEVIKQLLQ

SEQ ID NO: 5121 - protein, 112 aa, Homo sapiens
RFFIIVPKTNTLQVVLERHHFCGMFWLGEGVTVPTPPTSYASALRRWLFIQTWTYSLPRADEMLNFLWGHSLIVPAAATGASLEAACAKTTQLSLGSHPRAFFASRSGDLLQ

SEQ ID NO: 5122 - protein, 92 aa, Homo sapiens
EIYWETDYNHSGTIDAHEMRTALRKAGFTLNSQVQQTIALRYACSKLGINFDSFVACMIRLETLFKLFSLLDEDKDGMVQLSLAEWLCCVLV

SEQ ID NO: 5123 - protein, 27 aa, Homo sapiens
  MISC_FEATURE (25): Xaa equals any of the naturally occurring L-amino acids
NPVSTKNTKISWTWWWAPVVPATQXGE

SEQ ID NO: 5124 - protein, 333 aa, Homo sapiens
RPRVRENLPLWQHISFQALPPELREQTVHEVTTVGTAECRKWLSRSRTLGELESLNTVLSALLAVCNSAGEALDTGKQTAIIEVVSQLWAFLNIKQVADQPYVQQTFSLLLPLLGFFIQTLDPKLILQAVTLQTSLLKLELPDYVRLAMLDFVSSLGKLFIPEAIQDRILPNLSCMFALLLADRSWLLEQHTLEAFTQFAEGTNHEEIVPQCLSSEETKNKVVSFLEKTGFVDETEAAKVERVKQEKGIFWEPFANVTVEEAKRSSLQPYAKRARQEFPWEEEYRSALHTIAGALEATESLLQKGPAPAWLSMEMEALQERMDKLKRYIHTLG

SEQ ID NO: 5125 - protein, 48 aa, Homo sapiens
EQQLRRGGRVGGQPYVWSTQRPAIPISVLLSISSEDLSENRAGMRSQT

SEQ ID NO: 5126 - protein, 40 aa, Homo sapiens
NPISTKNAKISHVWCYAPVVPATLEAEAGESLEPRRRRLW

SEQ ID NO: 5127 - protein, 32 aa, Homo sapiens
NHLICKLEWALENHTVFLSHFTGKITDVSICD

SEQ ID NO: 5128 - protein, 16 aa, Homo sapiens
NFIALSSYIIKEDKPQ

SEQ ID NO: 5129 - protein, 53 aa, Homo sapiens
  MISC_FEATURE (13): Xaa equals any of the naturally occurring L-amino acids
PLPHADLQQVAQXEPNNAYDEEDCVEMVASGGWNDVACHTTMYFMCEFDKENM

SEQ ID NO: 5130 - protein, 61 aa, Homo sapiens
SLDIHKERRYSDEGDHNSVVLMILDYNLFLFIFHSFFKNMDCILSTTISQIPKIVLTFSDY

SEQ ID NO: 5131 - protein, 189 aa, Homo sapiens
  MISC_FEATURE (33): Xaa equals any of the naturally occurring L-amino acids
  MISC_FEATURE (97): Xaa equals any of the naturally occurring L-amino acids
  MISC_FEATURE (167): Xaa equals any of the naturally occurring L-amino acids
  MISC_FEATURE (178): Xaa equals any of the naturally occurring L-amino acids
QNNTVLVEGCFCPEGTMNYAPGFDVCVKTCGCXGPDNVPREFGEHFEFDCKNCVCLEGGSGIICQPKRCSQKPVTHCVEDGTYLATEVNPADTCCNXTVCKCQHQPVQREALRVPAGNSKWKSKMVPGKCCPFYWCEVQGGVCSRGMLSTSPVLPVYSSKWPGLACXKGQGGTTTTLXQRSLAWQPTGG

SEQ ID NO: 5132 - protein, 225 aa, Homo sapiens
EASSPTFSKEPMKVQDSVLIKADNTIEGDNNEQNYIKDVKLEDHLLAGSCLKQSSKNIFTERAEDQIKISTRKQKSVKEISSYTPKDCTSRNGPERGCDRGIIVSTRLLTDSSTDALEKVSTSNEDFSLKDDALAKTSKRKTKVQKDEICAKLSHVIKKQHRKSTLVDNTINLDENLTVSNIESFYSRKDTGVQKGDGFIHNLSLDPSGVLDDKNGEQKSQNNVL

SEQ ID NO: 5133 - protein, 38 aa, Homo sapiens
  MISC_FEATURE (22): Xaa equals any of the naturally occurring L-amino acids
  MISC_FEATURE (27): Xaa equals any of the naturally occurring L-amino acids
EQKGSREWGSKNGSRVRMRSQXKWCFXGGHKEGRVIDF

SEQ ID NO: 5134 - protein, 71 aa, Homo sapiens
CQTIWRSIRGLTGHIIRQPHFSSSSMRKWMISLFHMSLGERLPVPLKLCILLETEASRWLWQLAKAKMLCA

SEQ ID NO: 5135 - protein, 184 aa, Homo sapiens
  MISC_FEATURE (44): Xaa equals any of the naturally occurring L-amino acids
  MISC_FEATURE (181): Xaa equals any of the naturally occurring L-amino acids
  MISC_FEATURE (184): Xaa equals any of the naturally occurring L-amino acids
RRVQQEIDDVIGQVRRPEMGDQAHMPYTTAVIHEVQRFGDIVPXGVTHMTSRDIEVQGFRIPKGTTLITNLSSVLKDEAVWEKPFRFHPEHFLDAQGHFVKPEAFLPFSAGRRACLGEPLARMELFLFFTSLLQHFSFSVPTGQPRPSHHGVFAFLVSPSPYELCAVPRRMGYLVPSLLPXQRX

SEQ ID NO: 5136 - protein, 84 aa, Homo sapiens
AQVSFSPWMASAAPGRPHLVLYCESLATQVRSGPGPRMASVARKYAKEEVNPIAGLEDSDQTTRGLLNKGRRCPCLMGLAWGGG

SEQ ID NO: 5137 - protein, 124 aa, Homo sapiens
  MISC_FEATURE (10): Xaa equals any of the naturally occurring L-amino acids
  MISC_FEATURE (22): Xaa equals any of the naturally occurring L-amino acids
RPPTTTKFAXARQMAGKQAVSXSGKWLDGIRKWYYNAAGFNKLGLMRDDTIYEDEDVKEAIRRLPENLYNDRMFRIKRALDLNLKHQILPKEQWTKYEEENFYLEPYLKEVIRERKEREEWAKK

SEQ ID NO: 5138 - protein, 62 aa, Homo sapiens
YQLQAGRESLQHGPKMLSLQTGEGQVGSHSSESLYYTIESYVFSRFGVEAIHIYEESQAQEQ

SEQ ID NO: 5139 - protein, 49 aa, Homo sapiens
  MISC_FEATURE (23): Xaa equals any of the naturally occurring L-amino acids
FKWVPQNLVVILLGIFVQYIALXSSPTFSPLRKHLHFLSSPNWENMQIL

SEQ ID NO: 5140 - protein, 61 aa, Homo sapiens
  MISC_FEATURE (17): Xaa equals any of the naturally occurring L-amino acids
  MISC_FEATURE (19): Xaa equals any of the naturally occurring L-amino acids
FFFFFFFFFFFFFNKCXVXFITNINIIFLLFILYASFYTFTHTKNIKNISNYSILVEFSLK

SEQ ID NO: 5141 - protein, 58 aa, Homo sapiens
IYVKHKPLIFLKKSRLLFFHIISEPFSSFACPLLQNHTDFVLHFIHHLLKCPLKCNGI

SEQ ID NO: 5142 - protein, 62 aa, Homo sapiens
  MISC_FEATURE (25): Xaa equals any of the naturally occurring L-amino acids
NAKSQMYLSMNFDACTHLYNSNHYXDVEHDHHTRGPPAPSQLILISTPESNHSSDFFHHRLV

SEQ ID NO: 5143 - protein, 70 aa, Homo sapiens
RKPLWCLNDKYADATLLCLMYGALGQLFNIKQLRTCFRKCCSFALHAKVLGKKLTICKNIDAQAHKEFIL

SEQ ID NO: 5144 - protein, 96 aa, Homo sapiens
KLPNFYQLEGHPWVFVRSYLMSLCLGDSAGWSLGPGGPSPGVCRWTRSPTGDINLRVASLETGTWAALFPSPLLRGLGRCCFHAASTITLGFLDGK

SEQ ID NO: 5145 - protein, 59 aa, Homo sapiens
HDLGSLQPLPPGFKRFSCLSLPSSWDYRRPPSRPGNFFVLLVETVIHYVGQASHELLTS

SEQ ID NO: 5146 - protein, 70 aa, Homo sapiens
  MISC_FEATURE (10): Xaa equals any of the naturally occurring L-amino acids
  MISC_FEATURE (11): Xaa equals any of the naturally occurring L-amino acids
GFIQRSNFLXXQKIHTEEKLYECSQYGRDFNSTTNVKNNQRVHQEGLSLSKAPIHLGERSVDKGEHTGNL

SEQ ID NO: 5147 - protein, 78 aa, Homo sapiens
PVSFYLPLPFWMKMLIVGHFLARTALVPLTHKTRLLSFIDTSIKKRFKDRARWLTPVIPALWEAEAGGSPEVGSSRPA

SEQ ID NO: 5148 - protein, 59 aa, Homo sapiens
IPRLLCSTGQTSWSICVGETWEKAKTMCECYDYLFDIAVSMKKVGLDPSQLPVGENGIV

SEQ ID NO: 5149 - protein, 56 aa, Homo sapiens
DFFSLYFHPTNHLESGIKGINQEKTEGQETEPNKGDPSQGAWESAGLDAPPSSASY

SEQ ID NO: 5150 - protein, 75 aa, Homo sapiens
  MISC_FEATURE (70): Xaa equals any of the naturally occurring L-amino acids
TGLETLGSQHLYFLVRKWAWRCWEIKRGVGEDPVSVSSCVVDVNLAVNVAGCVSCLLSNCWLPRHSVLLXFSEFH

SEQ ID NO: 5151 - protein, 33 aa, Homo sapiens
HASSLGDRVRLFLKIKTKNKFLLEVGWRWGARI

SEQ ID NO: 5152 - protein, 42 aa, Homo sapiens
  MISC_FEATURE (42): Xaa equals any of the naturally occurring L-amino acids
MYSKVWLPFRSLGGAVLNSFSNRATFYFLIELLFNFYFLIGX

SEQ ID NO: 5153 - protein, 118 aa, Homo sapiens
AGPELPPLQVQMHRCSCPSVSSQGCKRRTHPSRKQPEPGTGCAKEHCYQVEERGLPCTQDVESLLRSEQKIKNKSLLKGLIGQVCFSLEQCFALENCKIYVMTQYICVRTYMIGIKCL

SEQ ID NO: 5154 - protein, 70 aa, Homo sapiens
SQKGRVIIKEESDQESKIDRESRLLEKWENYRTDSARRRQAGEERPSQSSTCANRKCVRGFLELTGAGDH

SEQ ID NO: 5155 - protein, 43 aa, Homo sapiens
  MISC_FEATURE (20): Xaa equals any of the naturally occurring L-amino acids
  MISC_FEATURE (29): Xaa equals any of the naturally occurring L-amino acids
  MISC_FEATURE (35): Xaa equals any of the naturally occurring L-amino acids
VMNIRIIALSAGSFTRQEFXNCPINICLXSCKKDXFIFCIFIT

SEQ ID NO: 5156 - protein, 54 aa, Homo sapiens
  MISC_FEATURE (51): Xaa equals any of the naturally occurring L-amino acids
FGSLKMLCGAKQIVCQMWPSSCQSCLYQDASLLTNSHIATGVETVLATKLXGFH

SEQ ID NO: 5157 - protein, 57 aa, Homo sapiens
  MISC_FEATURE (4): Xaa equals any of the naturally occurring L-amino acids
  MISC_FEATURE (8): Xaa equals any of the naturally occurring L-amino acids
  MISC_FEATURE (10): Xaa equals any of the naturally occurring L-amino acids
  MISC_FEATURE (19): Xaa equals any of the naturally occurring L-amino acids
  MISC_FEATURE (25): Xaa equals any of the naturally occurring L-amino acids
WYPXPPGXDXDGPKSHLGXRLYGKXGLSNYFQYSIVFHCPFVFHKLNDCLIFPKIYF

SEQ ID NO: 5158 - protein, 101 aa, Homo sapiens
  MISC_FEATURE (13): Xaa equals any of the naturally occurring L-amino acids
VFEPTSHATSHKXTYHLRTSSAKMPENIQSSWQMTQGSLALLTIFLANLDWKGHLQHCPGANTLFHCLCHIMMPALASWWVFGGILHEDCPIRGRYTYLAK

SEQ ID NO: 5159 - protein, 143 aa, Homo sapiens
  MISC_FEATURE (42): Xaa equals any of the naturally occurring L-amino acids
ARIRMAISPRSDATFSSQKSTPSESPRTKKFPLTEEEIFYMXCRAAYLTVFKSSLENIISKDQLYLALQHAGRNPSQKTINKYWTPQTAKLNFDDFCIILRKEKPTSKAELLKSFKQLDVNDDGCILHTDLYKFLTKRGEKMT

SEQ ID NO: 5160 - protein, 80 aa, Homo sapiens
  MISC_FEATURE (29): Xaa equals any of the naturally occurring L-amino acids
ALLCRSSSYIGPFKKLPAEIPGVICLEHXPLTSSTHLLAAPRHSSNLILNVISLKKPFLTQSKISTFGYSLSQHLDFFPS

SEQ ID NO: 5161 - protein, 29 aa, Homo sapiens
SFCLYKSTCSCANPSVDSWQHESLIPGYN

SEQ ID NO: 5162 - protein, 181 aa, Homo sapiens
  MISC_FEATURE (172): Xaa equals any of the naturally occurring L-amino acids
VSPSPPWTPPGADRPMESQGVPPGPYRATKLWNEVTTSFRAGMPLRKHRQHFKKYGNCFTAGEAVDWLYDLLRNNSNFGPEVTRQQTIQLLRKFLKNHVIEDIKGRWGSENVDDNNQLFRFPATSPLKTLPRRYPELRKNNIENFSKDKDSIFKLRNLSRRTPKRHGLHLSXENGEKINMK

SEQ ID NO: 5163 - protein, 42 aa, Homo sapiens
  MISC_FEATURE (42): Xaa equals any of the naturally occurring L-amino acids
NKYNMYIPDLLSILYKVAMTKGANKYYIIYLAFLLHEMMWVX

SEQ ID NO: 5164 - protein, 131 aa, Homo sapiens
  MISC_FEATURE (127): Xaa equals any of the naturally occurring L-amino acids
EVGFSLPSPGPVCPYPRPASCAQILFCLWKLLDHPRSAACPDPYPRASLSSWEAGQAPVRFRCALCLSLDSRADEPQHHHPATYKVGDLGLGSQAQTGGPHSPLGPLPTPVPSVPQSGGASRAISDXAGPR

SEQ ID NO: 5165 - protein, 65 aa, Homo sapiens
AKPLKLKHISYLKHLGNTTVKYLSNIQYMEFIPTFVCISICKLLLRRIESLDYFRIQLLQFSIVD

SEQ ID NO: 5166 - protein, 31 aa, Homo sapiens
VGGPQICRVCGDRPWYHFNVMTCEGCKGFFR

SEQ ID NO: 5167 - protein, 108 aa, Homo sapiens
  MISC_FEATURE (70): Xaa equals any of the naturally occurring L-amino acids
  MISC_FEATURE (100): Xaa equals any of the naturally occurring L-amino acids
  MISC_FEATURE (104): Xaa equals any of the naturally occurring L-amino acids
ADAWARSFLVDSLVLREAGEKKAPEGSPPPLFPYAVPPPHALHGLSPGACHARKAGLLCVCPLCVTASQXHGPPGPPRCLYSRLPSHPSARSTARAPGPXALCXVARG

SEQ ID NO: 5168 - protein, 438 aa, Homo sapiens
  MISC_FEATURE (299): Xaa equals any of the naturally occurring L-amino acids
  MISC_FEATURE (397): Xaa equals any of the naturally occurring L-amino acids
  MISC_FEATURE (413): Xaa equals any of the naturally occurring L-amino acids
  MISC_FEATURE (428): Xaa equals any of the naturally occurring L-amino acids
EAQAYTAYLSGMLRFEHQEWKAAIEAFNKCKTIYEKLASAFTEEQAVLYNQRVEEISPNIRYCAYNIGDQSAINELMQMRLRSGGTEGLLAEKLEALITQTRAKQAATMSEVEWRGRTVPVKIDKVRIFLLGLADNEAAIVQAESEETKERLFESMLSECRDAIQVVREELKPDQKQRDYILEGEPGKVSNLQYLHSYLTYIKLSTAIKRNENMAKGLQRALLQQQPEDDSKRSPRPQDLIRLYDIILQNLVELLQLPGLEEDKAFQKEIGLKTLVFKAYRCFFIAQSYVLVKKWSEAXVLYDRVLKYANEVNSDAGAFKNSLKDLPDVQELITQVRSEKCSLQAAAILDANDAHQTETSSSQVKDNKPLVERFETFCLGPFPCSPSKPTLWHFPPXFQPFPWQGFCSLDWAXKPCGLFPPLEGQVWXRKDQEWAHWV

SEQ ID NO: 5169 - protein, 275 aa, Homo sapiens
  MISC_FEATURE (154): Xaa equals any of the naturally occurring L-amino acids
  MISC_FEATURE (181): Xaa equals any of the naturally occurring L-amino acids
  MISC_FEATURE (184): Xaa equals any of the naturally occurring L-amino acids
  MISC_FEATURE (265): Xaa equals any of the naturally occurring L-amino acids
DPLVLERRSGDRDLEPDWLAQLRRQLEQKVAGDIGDPHPTRSDISGAGGTTTENTFYQDFSGCQGYSEAPGYRSALWLTPEQTCLLQPSPQQPFPLQPGSYPAGGGAGQTGTPRPFYSVPETHLPGTGSSVAVTEATGGTVWEEMLQTHLGPGXNTVSQETSQPPDGQEVISKPQTPLAAXPRXFLRVPPVQPRRMRRSPLMRLIKTLPEILPREASSEMGRSIQRAQGLAGSAGFDRSPPRTHPPLETRTPQTALTLRRPPEHXLPTRLAWAFH

SEQ ID NO: 5170 - protein, 146 aa, Homo sapiens
  MISC_FEATURE (43): Xaa equals any of the naturally occurring L-amino acids
  MISC_FEATURE (129): Xaa equals any of the naturally occurring L-amino acids
  MISC_FEATURE (132): Xaa equals any of the naturally occurring L-amino acids
  MISC_FEATURE (145): Xaa equals any of the naturally occurring L-amino acids
LDVNFGDTVQHTPPRAPRGQSGWKAEGPSTVESPRLRSDSLVXEVFPGLGQGPVSPEVPGCPPSPHSHVPHAGQALLSRDTAFMGRHRPLSQEPEVGGLAASQRRGKIPFPRAFGHWGRPWARQQDGFXTGXVSLQPRGGWFPWXN

SEQ ID NO: 5171 - protein, 163 aa, Homo sapiens
  MISC_FEATURE (58): Xaa equals any of the naturally occurring L-amino acids
VKIEPEDLDIIQVTVPDPSPTSEEMTDSMPGHLPSEDSGYGMEMLTDKGLSEDARPEXRPVEDSHGDVIRPLRKQVELLFNTRYAKAIGISEPVKVPYSKFLMHPEELFVVGLPEGISLRRPNCFGIAKLRKILEASNSIQFVIKRPELLTEESKSPSWIVNE

SEQ ID NO: 5172 - protein, 192 aa, Homo sapiens
  MISC_FEATURE (24): Xaa equals any of the naturally occurring L-amino acids
KPTCNELIKTIIIQHENIFPSPRXLEGPVYSRGGSMEDYCDSPHGETTSVEDSTQDVTAEHHTSDDECEPIEAIAKFDYVGRTARELSFKKGASLLLYQRASDDWWEGRHNGIDGLIPHQYIVVQDTEDGVVERSSPKSEIEVISEPPEEKVTARAGASCPSGGHVARYLSCKHQQAKEASRIWEASENFSE

SEQ ID NO: 5173 - protein, 319 aa, Homo sapiens
  MISC_FEATURE (46): Xaa equals any of the naturally occurring L-amino acids
  MISC_FEATURE (53): Xaa equals any of the naturally occurring L-amino acids
  MISC_FEATURE (69): Xaa equals any of the naturally occurring L-amino acids
ARARAEFGTSSTNLHLESELDALASLENHVKTEPADMNESCKQSGXSSLVNGXSPIRSLMHRSARIGGXGNNKDDDPNEDWCAVCQNGGDLLCCEKCPKVFHLTCHVPTLLSFPSGDWICTFCRDIGKPEVEYDCDNLQHSKKGKTAQGLSPVDQRKCERLLLYLYCHELSIEFQEPVPASIPNYYKIIKKPMDLSTVKKKLQKKHSQHYQIPDDFVADVRLIFKNCERFNEMMKVVQVYADTQEINLKADSEVAQAGKAVALYFEDKLTEIYSDRTFAPLPEFEQEEDDGEVTEDSDEDFIQPRRKRLKSDERPVHIK

SEQ ID NO: 5174 - protein, 187 aa, Homo sapiens
  MISC_FEATURE (11): Xaa equals any of the naturally occurring L-amino acids
  MISC_FEATURE (32): Xaa equals any of the naturally occurring L-amino acids
  MISC_FEATURE (43): Xaa equals any of the naturally occurring L-amino acids
REQKLELHRGXGRSRTSGSPGLQEFGTRTSGXGNRAANEEETXNKPKLNIQIKTLADDVRDRITSFRKSTVKKEKPLIQHPIDSQVAMSEFPAAQPLYDERSLNLSEKEVLDLFEKMMEDMNLNEEKKAPLRNKDFTTKREMVVQYISATAKSIVGSKVTGGLKNSKHECTLSSQEYVHELRSGIFR

SEQ ID NO: 5175 - protein, 266 aa, Homo sapiens
  MISC_FEATURE (208): Xaa equals any of the naturally occurring L-amino acids
  MISC_FEATURE (223): Xaa equals any of the naturally occurring L-amino acids
THTGEKSYVCSVCGRGFSLKANLLRHQRTHSGEKPFLCKVCGRGYTSKSYLTVHERTHTGEKPYECQECGRRFNDKSSYNKHLKAHSGEKPFVCKECGRGYTNKSYFVVHKRIHSGEKPYRCQECGRGFSNKSHLITHQRTHSGEKPFACRQCKQSFSVKGSLLRHQRTHSGEKPFVCKDCERSFSQKSTLVYHQRTHSGEKPFVCRXMWARIYSEVNPWETXDHTLRGEAFCVQGCGQALSKSQLHFHQRTHSEEKPYGCRECGR

SEQ ID NO: 5176 - protein, 128 aa, Homo sapiens
LFMSLLEDTLSKQKNPDVRNIVQQQFCGEYAYVTVCNQCGRESKLLSKFYELELNIQGHKQLTDCISEFLKEEKLEGDNRYFCENCQSKQNATRKIRLLSLPCTLNLQLMRFVFDRQTGHKKKLNTYI

SEQ ID NO: 5177 - protein, 128 aa, Homo sapiens
  MISC_FEATURE (104): Xaa equals any of the naturally occurring L-amino acids
  MISC_FEATURE (109): Xaa equals any of the naturally occurring L-amino acids
  MISC_FEATURE (117): Xaa equals any of the naturally occurring L-amino acids
AGGQRGGAESERQHLQQRVLGELCSRNTGGDAAGAQRENATRRTAGTLSLEASQALKEKAELQAQLAALSTKLQAQVECSHSSQQRQDSLSSEVDTLKQSCWDXERAMXDLAEHAGXKKCQLASFQQR

SEQ ID NO: 5178 - protein, 141 aa, Homo sapiens
  MISC_FEATURE (89): Xaa equals any of the naturally occurring L-amino acids
  MISC_FEATURE (110): Xaa equals any of the naturally occurring L-amino acids
  MISC_FEATURE (128): Xaa equals any of the naturally occurring L-amino acids
NLTNVMYVTNPSGMVPPLLYIKGFIPEKNHMNVMFAEKPSAIMHHSLNIKEYILEKSLLSKECGKAFRQNIHLASHLRIHTGEKPFECXECGKSFSISSQLATHQRIHTXEKPYECKVCSKAFTQKVXLHSSENPTGEETL

SEQ ID NO: 5179 - protein, 60 aa, Homo sapiens [sequence omitted]

SEQ ID NO: 5180 - protein, 154 aa, Homo sapiens
  MISC_FEATURE (24): Xaa equals any of the naturally occurring L-amino acids
QLTTVRRLLSEKATHVNTRDEDEXTPLHRAAYSGHLDIVQELIAQGADVHAVTVDGWTPLHSACKWNNTRVASFLLQHDADINAQTKGLLTPLHLAAGNRDSKDTLELLLMNRYVKPGLKNNLEETAFDIARRTSIYHYLFEIVEGCTNSSPQS

SEQ ID NO: 5181 - protein, 81 aa, Homo sapiens
  MISC_FEATURE (2): Xaa equals any of the naturally occurring L-amino acids
  MISC_FEATURE (5): Xaa equals any of the naturally occurring L-amino acids
  MISC_FEATURE (23): Xaa equals any of the naturally occurring L-amino acids
  MISC_FEATURE (25): Xaa equals any of the naturally occurring L-amino acids
TXGLXGTPAGTGPEFPGRPTRPXKXMEKDPSRLLLWAAEKNRVKKKITEGSVTVGKALGSSQKTCLYCYGHHTYLLIVRTK

SEQ ID NO: 5182 - protein, 52 aa, Homo sapiens
MCTRSLTALSEPRTPGPPGLTTTPAPPDKLGGKQRAAFKSGKRVGKPSPKAA

SEQ ID NO: 5183 - protein, 108 aa, Homo sapiens
  MISC_FEATURE (53): Xaa equals any of the naturally occurring L-amino acids
  MISC_FEATURE (97): Xaa equals any of the naturally occurring L-amino acids
  MISC_FEATURE (102): Xaa equals any of the naturally occurring L-amino acids
ACAPGSRRLLSAEQPFGHPLPLKICRLRLLSAGARPSRPGAGRALACHAARCXQPGRWGRAVHRARRARLGAGTEPPWEVPRQLRCSPWLQPSPAAXLAEQXRHWAPP

SEQ ID NO: 5184 - protein, 85 aa, Homo sapiens
PRFARILLMDLSVTPVRGHLSHPVPECSPHPHLWSREVFAPRICPELGHQPLQVWVLLQDCVELFLLKNFPGDDHSAWSLGWSLV

SEQ ID NO: 5185 - protein, 78 aa, Homo sapiens
SQVMGTERFIVLFLFLLYGSSQSFNSMAQVTQSRVLRACGLWQHHPQTDTAEEPGAVSCRCAWLGTEWKALGRIFIEV

SEQ ID NO: 5186 - protein, 132 aa, Homo sapiens
  MISC_FEATURE (9): Xaa equals any of the naturally occurring L-amino acids
  MISC_FEATURE (34): Xaa equals any of the naturally occurring L-amino acids
  MISC_FEATURE (40): Xaa equals any of the naturally occurring L-amino acids
  MISC_FEATURE (41): Xaa equals any of the naturally occurring L-amino acids
LSTKIYRSXSAMYSRTCQRNSKVFATVSSPAAIXDNSPAXXNVVETNPFKHLTHLSLKLLPGNDVEIKKFLAGCLKCSKEEKLSLMQSLDDATKQLDFTRKTLAEKKQELDKLRNEWASHTAALTNKHSQEL

SEQ ID NO: 5187 - protein, 77 aa, Homo sapiens
  MISC_FEATURE (60): Xaa equals any of the naturally occurring L-amino acids
PAQLLYELAKLAQVNVEFSARQLLIRTGRDGSYTTTGDNSRLCRKFQDLGSRTMHDTQSXIAGGRATVKRPKSIKMC

SEQ ID NO: 5188 - protein, 142 aa, Homo sapiens
  MISC_FEATURE (8): Xaa equals any of the naturally occurring L-amino acids
  MISC_FEATURE (11): Xaa equals any of the naturally occurring L-amino acids
FGTSRRRXAKXTLYCRVFLLDGTEVSVDLPKHAKGQDLFDQIVYHLDLVETDYFGLQFLDSAQVAHWLDHAKPIKKQMKIGPAYALHFRVKYYSSEPNNLREEFTRYLFVLQLRHDILSGKLKCPYETAVELAALCLQADFV

SEQ ID NO: 5189 - protein, 59 aa, Homo sapiens
  MISC_FEATURE (8): Xaa equals any of the naturally occurring L-amino acids
RRHLEIKXLIMLQYCIYFSLYTVFFFVSPETSFPFRFFSCSIKLIYISTYSNGVLVFVS

SEQ ID NO: 5190 - protein, 105 aa, Homo sapiens
  MISC_FEATURE (91): Xaa equals any of the naturally occurring L-amino acids
  MISC_FEATURE (102): Xaa equals any of the naturally occurring L-amino acids
  MISC_FEATURE (104): Xaa equals any of the naturally occurring L-amino acids
LPLRNKILMLSFDLRVGGLGPKADRLEELVEELEAAPCCPLLEVGSVLDLLVQLAGSGPPQVLPRKRDYFLNNKHVGRNVPYSGYDCDDLXVFEMDVQSLIXRXE

SEQ ID NO: 5191 - protein, 217 aa, Homo sapiens
  MISC_FEATURE (55): Xaa equals any of the naturally occurring L-amino acids
  MISC_FEATURE (68): Xaa equals any of the naturally occurring L-amino acids
  MISC_FEATURE (196): Xaa equals any of the naturally occurring L-amino acids
  MISC_FEATURE (214): Xaa equals any of the naturally occurring L-amino acids
VKINRKTAFGTTTLVLTDFSNKSSTLERKTKQNQILDEEFQNSPPASVCLNDIQXPSKKTTNDITQLXSIVNISPTISSESKLFSPAHKKPKTAHYSSPELKSCNPGYSNSELQINMTDGPRTLNPDSPRCSKHNRLCILRVVRKDGENKGRAVLCLSSYLGGRHNVGFFWNGADFVPFPFWQPGARRFPPWKTVXGRFGTLTLGKGFFFCCGXLWG

SEQ ID NO: 5192 - protein, 150 aa, Homo sapiens
NIPGSGHHAFCKPPWGAAELDMGRRDAQLLAALLVLGLCALAGSEKPSPCQCSRLSPHNRTNCGFPGITSDQCFDNGCCFDSSVTGVPWCFHPLPKQESDQCVMEVSDRRNCGYPGISPEECASRKCCFSNFIFEVPWCFFPKSVEDCHY

SEQ ID NO: 5193 - protein, 60 aa, Homo sapiens
NSMTKGLIQGEKGYMKTHSSLFYSLPWLEINRHIVLFIMGRKVGKDHLSAYGVLALAHGE

SEQ ID NO: 5194 - protein, 60 aa, Homo sapiens
LAIDSTGLKHTIKCIHDIVHTQKPPLIIEITCILFGNHLSLVLKYYIFCASMYFSIYKPM

SEQ ID NO: 5195 - protein, 52 aa, Homo sapiens
LQFIKLITRQNYIFKMSKGLNHEKNSSTLLPNYCFQDSQSMLYIHLYFSLYI

SEQ ID NO: 5196 - protein, 69 aa, Homo sapiens
  MISC_FEATURE (59): Xaa equals any of the naturally occurring L-amino acids
YCYSRTVLIVCILKRCDSGLIFISVILKGWVWFYRVFCILVGIHKYQMCCIIKITLTFXKKKKKKKKKK

SEQ ID NO: 5197 - protein, 123 aa, Homo sapiens
  MISC_FEATURE (86): Xaa equals any of the naturally occurring L-amino acids
  MISC_FEATURE (90): Xaa equals any of the naturally occurring L-amino acids
  MISC_FEATURE (91): Xaa equals any of the naturally occurring L-amino acids
  MISC_FEATURE (117): Xaa equals any of the naturally occurring L-amino acids
  MISC_FEATURE (121): Xaa equals any of the naturally occurring L-amino acids
HELTRNGGGGGAALGGEEGAATRPRAAPGPGLRMEPFRRRLYAGPQRRPTRADPRHPRFKEPSPGLGPWPLTRQGTALGGLVCRGXPAAXXHGYLAKKLHSPSDQFPPRAKNPELEXNSLXFL

SEQ ID NO: 5198 - protein, 67 aa, Homo sapiens
  MISC_FEATURE (57): Xaa equals any of the naturally occurring L-amino acids
KCYILLGYRGAGETAEERKNMWKTPRSSKFYPEFYLPCMFCLRHFSCDIRKAISKGXFFVAKIYFTL

SEQ ID NO: 5199 - protein, 57 aa, Homo sapiens
PLPNSPAYFYATFPFTLYSLAIFDSSHFLTPVFSQYNVHTFITLIPLYCILWFAFPH

SEQ ID NO: 5200 - protein, 35 aa, Homo sapiens
  MISC_FEATURE (32): Xaa equals any of the naturally occurring L-amino acids
LLVPNSCSPGDPLVLERPPPRWSSSFVPLVRXGVA

SEQ ID NO: 5201 - protein, 19 aa, Homo sapiens
LIKLTSKQMITIHNTKGRT

SEQ ID NO: 5202 - protein, 62 aa, Homo sapiens
  MISC_FEATURE (27): Xaa equals any of the naturally occurring L-amino acids
  MISC_FEATURE (50): Xaa equals any of the naturally occurring L-amino acids
IFLEGFHEISPSHISSVQYKMQKCLLXKTGDLITTTLGISQLPLGTQPPXVETCLDWHSGST

SEQ ID NO: 5203 - protein, 326 aa, Homo sapiens
  MISC_FEATURE (169): Xaa equals any of the naturally occurring L-amino acids
  MISC_FEATURE (173): Xaa equals any of the naturally occurring L-amino acids
  MISC_FEATURE (174): Xaa equals any of the naturally occurring L-amino acids
  MISC_FEATURE (228): Xaa equals any of the naturally occurring L-amino acids
  MISC_FEATURE (273): Xaa equals any of the naturally occurring L-amino acids
  MISC_FEATURE (281): Xaa equals any of the naturally occurring L-amino acids
LPQRCHGVLRRRKDWNVRLQAFFTSDTGLEYEAPKLYPAIPAARRRPIRVLSLFDGIATGYLVLKELGIKVGKYVASEVCEESIAVGTVKHEGNIKYVNDVRNITKKNIEEWGPFDLVIGGSPCNDLSNVNPARKGLYEGTGRLFFEFYHLLNYSRPKEGDDRPFFWMXENVXXMKVGDKRDISRFLECNPVMIDAIKVSAAHRARYFWGNLPGMNRPVIASKNDKLXLQDCLEYNRIAKLKKVQTITTKSNSIKQGKNQLFPVVMNGKEDVXWCTELERXFGFPVHYTDVSNMGRGARQKLLGRSWSVPVIRHLFAPLKDYFACE

SEQ ID NO: 5204 - protein, 78 aa, Homo sapiens
GHLPSLILSLQLLGQLSLPQRLFFCLSPFGISHLEGICKGHSVLEQGNVASSAQTSLSHLQLRLGMRGTDLALTPGRF

SEQ ID NO: 5205 - protein, 52 aa, Homo sapiens
  MISC_FEATURE (1): Xaa equals any of the naturally occurring L-amino acids
  MISC_FEATURE (2): Xaa equals any of the naturally occurring L-amino acids
  MISC_FEATURE (6): Xaa equals any of the naturally occurring L-amino acids
  MISC_FEATURE (11): Xaa equals any of the naturally occurring L-amino acids
XXPSLXEQSWXSTAVAAALELVDPPGCRNSARAELDIFFKNKIRCQPSKMFL

SEQ ID NO: 5206 - protein, 37 aa, Homo sapiens
  MISC_FEATURE (25): Xaa equals any of the naturally occurring L-amino acids
VIFLASGNDGGALTRVYCGMLLLKXRRELARRRGSRL

SEQ ID NO: 5207 - protein, 66 aa, Homo sapiens
DADHLLQNSYLEQFKLLVPVNKNTDQNALHVAYTVGSLHAVLDMFISTLNAMKCFINKKPLYIKLL

SEQ ID NO: 5208 - protein, 38 aa, Homo sapiens
CEACTGKAPRSGGIPEEMPELKDCGWGKRSPSKEAVCG

SEQ ID NO: 5209 - protein, 102 aa, Homo sapiens
DVEIVPVLGNYFPLPGYGKEDVIVNNIHHPVFNVLQQCSNLFFSFVPTAFVYIENLKISPSLLEVKMFPNLLNMPLFTICFFRLFLMHYRIKYDFVYFYYSM

SEQ ID NO: 5210 - protein, 78 aa, Homo sapiens
FLHHKLYLNVGAVSGCFLPHGETWSAVREKNEAMMKAKSRKSPDCVPVPGSSGLHVQVHLCPFHVLIVEFFCEILQIS

SEQ ID NO: 5211 - protein, 26 aa, Homo sapiens
  MISC_FEATURE (3): Xaa equals any of the naturally occurring L-amino acids
AHXSARHSCPGNVAARNWWVSNNILW

SEQ ID NO: 5212 - protein, 303 aa, Homo sapiens
  MISC_FEATURE (257): Xaa equals any of the naturally occurring L-amino acids
VNEIMILEGGGVMNLNPGNNLLHQPPAWTDSYSTCNVSSGFFGGQWHEIHPQYWTKYQVWEWLQHLLDTNQLDANCIPFQEFDINGEHLCSMSLQEFTRAAGTAGQLLYSNLQHLKWNGQCSSDLFQSTHNVIVKTEQTEPSIMNTWKDENYLYDTNYGSTVDLLDSKTFCRAQISMTTTSHLPVESPDMKKEQDPPAKCHTKKHNPRGTHLWEFIRDILLNPDKNPGLIKWEDRSEGVFRFLKSEAVAQLWGKKKXNSSMTYEKLSRAMRYYYKREILERVDGRRLVYKFGKNARGWRENEN

SEQ ID NO: 5213 - protein, 113 aa, Homo sapiens
  MISC_FEATURE (12): Xaa equals any of the naturally occurring L-amino acids
  MISC_FEATURE (13): Xaa equals any of the naturally occurring L-amino acids
  MISC_FEATURE (49): Xaa equals any of the naturally occurring L-amino acids
RTSILLKRACRXXSLPPTLSHLRLHLQLAPRSCGDGSPWQPPADLSGLXIEEVSKSLRFIGLSEDVISFFVTEKIDGNLLVQLTEEILSEDFKLSKLQVKKIMQFINGWRPKI

SEQ ID NO: 5214 - protein, 46 aa, Homo sapiens
KSPTMFLNSKCKLSARVDIHTACFHMWHFYVSCWVIVLDWTVKYYV

SEQ ID NO: 5215 - protein, 59 aa, Homo sapiens
  MISC_FEATURE (55): Xaa equals any of the naturally occurring L-amino acids
APTMAETKLQLFVKASEDGESVGHCPSYLDSAMQEKEFKYTCPHSAEILAAYRPXVHPR

SEQ ID NO: 5216 - protein, 44 aa, Homo sapiens
PQLAEKAILKTFPTAYLCEVNLLQQKSLDVEAAVRIQLFIITRY

SEQ ID NO: 5217 - protein, 49 aa, Homo sapiens
  MISC_FEATURE (28): Xaa equals any of the naturally occurring L-amino acids
  MISC_FEATURE (36): Xaa equals any of the naturally occurring L-amino acids
DSKLEGFEEKEVEVFCKRTLILLLEAVXRALRVENXSALKGRHEKQQHQ

SEQ ID NO: 5218 - protein, 67 aa, Homo sapiens
  MISC_FEATURE (20): Xaa equals any of the naturally occurring L-amino acids
KQKRVPVKWIKQTGKDEACXAGGAESQPASSVVILLNLYQSFQNRGGMDLPLCDARSQRWDSVIGLC

SEQ ID NO: 5219 - protein, 103 aa, Homo sapiens
REKHRWVSPRHSSLQRCLHRANPAFLKGAFPHLMCLSASFFRQEFKSIFKIDRFWCSFASFRGRLSPASGIHPHVGTRSAAGSHVYEMLVVFFFFSFILEVFL

SEQ ID NO: 5220 - protein, 92 aa, Homo sapiens
GRVYCLFKWHNFKGLRVQSLNLPREGAPKLSSPHTSGFLCGGGAGISKLWCERVGEMLEVGVLCSRPPILSQCPLPPSSPTPCPQFCGASRL

SEQ ID NO: 5221 - protein, 257 aa, Homo sapiens
  MISC_FEATURE (76): Xaa equals any of the naturally occurring L-amino acids
  MISC_FEATURE (127): Xaa equals any of the naturally occurring L-amino acids
  MISC_FEATURE (135): Xaa equals any of the naturally occurring L-amino acids
GAVGLGGQELQYGHGLSRLSTSAFRAYGQGTLYDSPLLQVSIHLGYGIYRPVSLGSHALFPFLSWLDQPLWDQHPXHTPPDCSSITRIALYFVQKGLAVPCCFHLCKPIVPLAAVCVRVHVCVFHLXIHCTRYLXSAHYVPGTVAEFLWVCLSMPLLLLWGPLSVLLFVPKLLPLCQSGCLRFCVSLCAFLSLSVLVSLQGPLFLSFLVSVLCPLCPLDSLGLCRPLVCPGSSAFLTSSCPPLHSLLLCSRFPRSHF

SEQ ID NO: 5222 - protein, 73 aa, Homo sapiens
ITCSDLITFDKFEKFVFQTEPVSINEENEGFEHNTQVRNQGIIALSYRDWEVKLCLLPLHSSDSAFTCSKPSA

SEQ ID NO: 5223 - protein, 41 aa, Homo sapiens
RLMTAFLRIANRGQRGGSQHFGRPRRVDHEVRSSRTAWPRW

SEQ ID NO: 5224 - protein, 79 aa, Homo sapiens [sequence omitted]

SEQ ID NO: 5225 - protein, 290 aa, Homo sapiens
  MISC_FEATURE (3): Xaa equals any of the naturally occurring L-amino acids
  MISC_FEATURE (5): Xaa equals any of the naturally occurring L-amino acids
  MISC_FEATURE (10): Xaa equals any of the naturally occurring L-amino acids
QSXYXNSGQXDAARGTRVGRVRLWKRAAAAHNMHSLATAAPVPTTLAQVDREKIYQWINELSSPETRENALLELSKKRESVPDLAPMLWHSFGTIAALLQEIVNIYPSINPPTLTAHQSNRVCNALALLQCVASHPETRSAFLAAHIPLFLYPFLHTVSKTRPFEYLRLTSLGVIGALVKTDEQEVINFLLTTEIIPLCLRIMESGSELSKTVATFILQKILLDDTGLAYICQTYERFSHVAMILGKMVLQLSKEPSARLLKHVVRCYLRLSDNPRFSDLTFCWSSFQRK

SEQ ID NO: 5226 - protein, 60 aa, Homo sapiens
ARFARSAHEGKMPKKKTGARKKAENRREREKQLRASRSTIDLAKHPCNASMVSAFFDISW

SEQ ID NO: 5227 - protein, 93 aa, Homo sapiens
ESIQHNNVLKPINLLSQQMKPGMKRQRSLYREILFLSLVSLGRENIDIEAFDNEYGIAYNSLSSEILERLQKIDAPPSASVEWCRKCFGAPLI

SEQ ID NO: 5228 - protein, 108 aa, Homo sapiens
  MISC_FEATURE (8): Xaa equals any of the naturally occurring L-amino acids
  MISC_FEATURE (101): Xaa equals any of the naturally occurring L-amino acids
NTKTNKQXKNQNALYRIACEVFSTESIFPFVSDFKLTYEGREMITFPVKSIDNLINLVTPPSVLNITKFVVIRLSAPVFIVELPLSLETFLLKNDGSIVFXYVPMKVG

SEQ ID NO: 5229 - protein, 139 aa, Homo sapiens
RTSPRFQFQGLTFLRRRWNVKGGRKEIKRPQVKMWKVTSSLRPRGTRRESPRGPRPSERVAKKKSAPAEEQLRGPCWDQSSKASAQDAGDHVQPPEGRDFTLKPKKRRGKKKLQKPVEIAEDATLEETLVKKKKKKDSK

SEQ ID NO: 5230 - protein, 125 aa, Homo sapiens
SRQNEKGGGHCSPLNSFFRSSSMSLSALACDFTPIQPWEWEEYEQITLGLTAPSNLLESNYLGQASECFVRKLVRRFPQLLPGPPGHCRKDLGDPQQRPIALLPSLPHQERNNVHRLEADSEVDL

SEQ ID NO: 5231 - protein, 99 aa, Homo sapiens
  MISC_FEATURE (11): Xaa equals any of the naturally occurring L-amino acids
  MISC_FEATURE (54): Xaa equals any of the naturally occurring L-amino acids
  MISC_FEATURE (56): Xaa equals any of the naturally occurring L-amino acids
  MISC_FEATURE (57): Xaa equals any of the naturally occurring L-amino acids
NYLPSLSYASXIGMLLVSMHTTTFHGFYCAQTLHAFRMIYLRRYIICHPDPKRXRXXDHSEPLIRKLLASVFDTSLTLYIHVIISCQILDSINCPLTAY

SEQ ID NO: 5232 - protein, 60 aa, Homo sapiens
  MISC_FEATURE (13): Xaa equals any of the naturally occurring L-amino acids
  MISC_FEATURE (17): Xaa equals any of the naturally occurring L-amino acids
  MISC_FEATURE (35): Xaa equals any of the naturally occurring L-amino acids
  MISC_FEATURE (37): Xaa equals any of the naturally occurring L-amino acids
  MISC_FEATURE (39): Xaa equals any of the naturally occurring L-amino acids
  MISC_FEATURE (45): Xaa equals any of the naturally occurring L-amino acids
  MISC_FEATURE (46): Xaa equals any of the naturally occurring L-amino acids
  MISC_FEATURE (50): Xaa equals any of the naturally occurring L-amino acids
KYLVEIPEFYEVXDKKXAQGLLKSTCIISPFQKTXTXVXGKIPVXXICYXFLLPHLANNF

SEQ ID NO: 5233 - protein, 212 aa, Homo sapiens
  MISC_FEATURE (3): Xaa equals any of the naturally occurring L-amino acids
  MISC_FEATURE (4): Xaa equals any of the naturally occurring L-amino acids
  MISC_FEATURE (9): Xaa equals any of the naturally occurring L-amino acids
  MISC_FEATURE (206): Xaa equals any of the naturally occurring L-amino acids
  MISC_FEATURE (208): Xaa equals any of the naturally occurring L-amino acids
  MISC_FEATURE (209): Xaa equals any of the naturally occurring L-amino acids
  MISC_FEATURE (211): Xaa equals any of the naturally occurring L-amino acids
LTXXNKSWXSTAVAAALELVDPPGCRNSARAAASMKRKSERRSSWAAAPPCSRRCSSTSPGVKKIRSSTQQDPRRRDPQDDVYLDITDRLCFAILYSRPKSASNVHYFSIDNELEYENFYADFGPLNLAMVYRYCCKINKKLKSITMLRKKIVHFTGSDQRKQANAAFLVGCYMVIYLGRTPEEAYRILIFGETSYIPFRDAAYGXCXXTXP

SEQ ID NO: 5234 - protein, 48 aa, Homo sapiens
KQRGNLKATLTHLQSSQILTFTRLAFCFWASPKQTASHPNRGRMEMFV

SEQ ID NO: 5235 - protein, 98 aa, Homo sapiens
  MISC_FEATURE (49): Xaa equals any of the naturally occurring L-amino acids
  MISC_FEATURE (65): Xaa equals any of the naturally occurring L-amino acids
WYFSKCVLVVITSNINLCCESFVSFSTVFQRKGKKSLNLKFIVKIKYLXAVTQAHGSQAEKGLGXLKNGVQVVHGRLLNSLGVGMGLAFSKPVHFPMS

SEQ ID NO: 5236 - protein, 56 aa, Homo sapiens
  MISC_FEATURE (51): Xaa equals any of the naturally occurring L-amino acids
CLAHRKCSDMLSNKKLMWWVQWLTPVIPALWEAEVSGLQGQEFQTSLANMXKPRLY

SEQ ID NO: 5237 - protein, 94 aa, Homo sapiens
  MISC_FEATURE (18): Xaa equals any of the naturally occurring L-amino acids
  MISC_FEATURE (52): Xaa equals any of the naturally occurring L-amino acids
  MISC_FEATURE (71): Xaa equals any of the naturally occurring L-amino acids
QSKPLNITHLHLQVWPQXFKWLLSLLHSTYPLLQLFHKYRLNIPYLKCLGLXVSDFRYVWILEYLYMYNEXLLELGPKSKQNSFMFHIYLIHIT

SEQ ID NO: 5238 - protein, 24 aa, Homo sapiens
KEPMQVWFLSRKNTGTEETKQDDD

SEQ ID NO: 5239 - protein, 133 aa, Homo sapiens
  MISC_FEATURE (11): Xaa equals any of the naturally occurring L-amino acids
  MISC_FEATURE (13): Xaa equals any of the naturally occurring L-amino acids
  MISC_FEATURE (22): Xaa equals any of the naturally occurring L-amino acids
  MISC_FEATURE (26): Xaa equals any of the naturally occurring L-amino acids
  MISC_FEATURE (108): Xaa equals any of the naturally occurring L-amino acids
  MISC_FEATURE (124): Xaa equals any of the naturally occurring L-amino acids
RARRGVSVKAXKXETAATMKDXALKXKVSTATVSRALMNPDKVSQATRNRVEKAAREVGYLPQPMGRNVKRNESRTILVIVPDICDPFFSEIIRGIEVTAANHGYLVXIGDCAHQNQQEKTFIXLIITKQIDW

SEQ ID NO: 5240 - protein, 261 aa, Homo sapiens
  MISC_FEATURE (230): Xaa equals any of the naturally occurring L-amino acids
  MISC_FEATURE (243): Xaa equals any of the naturally occurring L-amino acids
  MISC_FEATURE (246): Xaa equals any of the naturally occurring L-amino acids
  MISC_FEATURE (250): Xaa equals any of the naturally occurring L-amino acids
  MISC_FEATURE (257): Xaa equals any of the naturally occurring L-amino acids
SWKTGEDKSMSSLPGCIGLDAATATVESEEIAELQQAVVEELGISMEELRHFIDEELEKMDCVQQRKKQLAELETWVIQKESEVAHVDQLFDDASRAVTNCESLVKDFYSKLGLQYRDSSSEDESSRPTEIIEIPDEDDDVLSIDSGDAGSRTPKDQKLREAMAALRKSAQDVQKFMDAVNKKSSSQDLHKGTLSQMSGELSKDGDLIVSMRILGKKRTKTWHKGPLLPXRQLDQGSTQAPVXSAXQAQXRKENHLXTFIP

SEQ ID NO: 5241 - protein, 59 aa, Homo sapiens
INPALLRKGNLFRQSGKGVLRKLSFFIPSFLPTTVTGYRGLWTLKTNVWPLTGLICIFL

SEQ ID NO: 5242 - protein, 39 aa, Homo sapiens
TSSPWAAPPGSGGPEPPRPGLPRLGLGDLNLLTLGCPSW

SEQ ID NO: 5243 - protein, 71 aa, Homo sapiens
  MISC_FEATURE (30): Xaa equals any of the naturally occurring L-amino acids
KLCRLINEDVNEQVMQVLGPEDLQSIIYKXEEHEEFFPAFQAFTNDLLEILEIDDLDAIVPAVKKLKVLSY

SEQ ID NO: 5244 - protein, 81 aa, Homo sapiens
  MISC_FEATURE (58): Xaa equals any of the naturally occurring L-amino acids
ALVLSREQEKLFEKGKESIPYLIRTHRHARHGHGVHVHLSHVTTAAIHVHHTIHCRIXLVGKLAAGERSLSKQMVYYLWST

SEQ ID NO: 5245 - protein, 85 aa, Homo sapiens
ADKNEILFSEFNINYNNELPMYRKGTVLIWQKVDEVMTKEIKLPTEMEGKKMAVTRTRTKPVPLHCDIIGDAFWKEHPEILDEDS

SEQ ID NO: 5246 - protein, 53 aa, Homo sapiens
  MISC_FEATURE (30): Xaa equals any of the naturally occurring L-amino acids
LECWVVLSIIGVKCGAVAYTCNPSTLGKLXWGGSLEVQEFEATLGQHGGTPIF

SEQ ID NO: 5247 - protein, 60 aa, Homo sapiens
  MISC_FEATURE (3): Xaa equals any of the naturally occurring L-amino acids
  MISC_FEATURE (44): Xaa equals any of the naturally occurring L-amino acids
EKXSGVVWDRSATHSEMVQENQFFMLYFQSLYKFVFVSKIKKRXKMEGKIPGRQMNKRHE

SEQ ID NO: 5248 - protein, 59 aa, Homo sapiens
KRKKSFWGMLYHSNGSVTTYFVLSMSLIPSYETIWLDYPVYCVEIKVLICTFLVQYLSY

SEQ ID NO: 5249 - protein, 54 aa, Homo sapiens
YLHFHILVICLLHTWQNKTEIPSQKKKEKEKKIALYLFLVSTAMKILNTPNSVE

SEQ ID NO: 5250 - protein, 70 aa, Homo sapiens
CFFFIVFQSVSIHLKKKNRNNSRYFKQKGIWWKGLTIVMSGRLVEPKRRGCCPKIRKLPVPTPTAALLEA

SEQ ID NO: 5251 - protein, 119 aa, Homo sapiens
TGEAALWGLPAAGAGERHVDTWPLWLPPARSSAGPSPWGWASCSRSRTPSGLKVGEVWWWRWGGSEKCKRPVGLQQKEASGGWDGGQWGKALGSIGGSLAANSLDFGGQVRPASLAPAA

SEQ ID NO: 5252 - protein, 146 aa, Homo sapiens
  MISC_FEATURE (3): Xaa equals any of the naturally occurring L-amino acids
  MISC_FEATURE (105): Xaa equals any of the naturally occurring L-amino acids
  MISC_FEATURE (106): Xaa equals any of the naturally occurring L-amino acids
GPXKERRFGAVACGVAMELYVFGGVRSREDAQGSEMVTCKSEFYHDEFKRWIYLNDQNLCIPASSSFVYGAVPIGASIYVIGDLDTGTNYDYVREFKRSTGTWHXXKPLLPSDLRRTGCAALRIANCKLFRLQLQQGLFRIRVHSP

SEQ ID NO: 5253 - protein, 104 aa, Homo sapiens
DGPAKCRPLLLNKNILKPLFLLHGQEAARESARVPWSELASPCLLCPRAAWFLVQCSDTACPSPTSSQQHLLSLAAMAMTTPEKQLQGPSQILFCLHASAGCRY

SEQ ID NO: 5254 - protein, 461 aa, Homo sapiens
  MISC_FEATURE (60): Xaa equals any of the naturally occurring L-amino acids
  MISC_FEATURE (103): Xaa equals any of the naturally occurring L-amino acids
  MISC_FEATURE (135): Xaa equals any of the naturally occurring L-amino acids
  MISC_FEATURE (241): Xaa equals any of the naturally occurring L-amino acids
IETSNKNDMTIDILHADGERPNVLENLDNSKEKTVGSEAAKTEDTVLCSSDTDEECLIIXTECKNNSDGKTAVVGSNLSSRPASPNSSSGQASVGNQTNTACXPEESCVLKKPIKRVYKKFDPVGEILKMQDELXKPISRKVPELPLMNLENSKQPSVSEQLSGPSDSSSWPKSGWPSAFQKPKGRLPYELQDYVEDTSEYLAPQEGNFVYKLFSLQDLLLLVRCSVQRIETRPRSKKRKXIRRQFPVYVLPKVEYQACYGVEALTESELCRLWTESLLHSNSSFYVGHIDAFTSKLFLLEEITSEELKEKLSALKISNLFNILQHILKKLSSLQEGSYLLSHAAEDSSLLIYKASDGKVTRTAYNLYKTHCGLPGVPSSLSVPWVPLDPSLLLPYHIHHGRIPCTFPPKSLDTTTQQKIGGTRMPTRSHRNPVSMETKSSCLPAQQVETEGVAPHKRKIT

SEQ ID NO: 5255 - protein, 121 aa, Homo sapiens
LYSPFQFFLPLFLFLSCSPLSALQDFPATWVLVLKLPYTFTVFFLLPFFLIFISFLNFLSLSSLPFLLSFLFVHVISSPCLPPLTFLYFLSLPPYYSFLFLVLQFNYFKHITHKACHSLDF

SEQ ID NO: 5256 - protein, 79 aa, Homo sapiens
TLHTAHPSPVLTLCSYHSLAACHAVGLQICTHKFLRKSLHEHHLAIFCTDQTRDLNVFQHKRITSEWWSVRILAKVMVI

SEQ ID NO: 5257 - protein, 62 aa, Homo sapiens
LEETLFLQGTKQLYFSTDMHYFHCEFTFLLHVQMSLFVFFFCNINCNDVLPGIHENIIKTHF

SEQ ID NO: 5258 - protein, 78 aa, Homo sapiens
  MISC_FEATURE (23): Xaa equals any of the naturally occurring L-amino acids
  MISC_FEATURE (25): Xaa equals any of the naturally occurring L-amino acids
  MISC_FEATURE (31): Xaa equals any of the naturally occurring L-amino acids
PGEPKPTPRGKPGQTGGPPSWYXPXKLIALXGGGEKTPTHLVREVFCLYCGVRAEEKSLFFPLRLCFKEQGRGKFCGF

SEQ ID NO: 5259 - protein, 80 aa, Homo sapiens
  MISC_FEATURE (46): Xaa equals any of the naturally occurring L-amino acids
  MISC_FEATURE (73): Xaa equals any of the naturally occurring L-amino acids
  MISC_FEATURE (79): Xaa equals any of the naturally occurring L-amino acids
KLTKCPVRWLRPAIPALWEAEVGGSLEARSLRTAWPTWRNPVSTIXTKFNQAWWWAPVVPAYLGDLSHEESLXPSWVGXL

SEQ ID NO: 5260 - protein, 60 aa, Homo sapiens
PPGSNKPPASAYQVAETTGTYHRACLIFKIFYKDEVSLCCPGWSQTPNLKQSAHVGLPKC

SEQ ID NO: 5261 - protein, 69 aa, Homo sapiens
VYGNYLIILKRTHFSCKYVTSEFKKITLNTLIFAAFFSVYITCLLSEWEYMCASQHLLLKCVIFICQTG

SEQ ID NO: 5262 - protein, 54 aa, Homo sapiens
RHKDTFRIVKTLSIEKFLNETVSKKSFASRFLRGAIKKRTLPVVTAAAIAPLYC

SEQ ID NO: 5263 - protein, 99 aa, Homo sapiens
  MISC_FEATURE (66): Xaa equals any of the naturally occurring L-amino acids
  MISC_FEATURE (67): Xaa equals any of the naturally occurring L-amino acids
FHLQQLLERKPDNYMTLSRLIDLLRRCGKLEDVPRFFSMAEKRNSRAKLEPGFQYCKGLYLWYTGXXNDALRHFNKARKDRDWGQNALYNMIENLFESR

SEQ ID NO: 5264 - protein, 144 aa, Homo sapiens
  MISC_FEATURE (77): Xaa equals any of the naturally occurring L-amino acids
SVLWNAMIHPLCNMTLKGVVWYQGESNINYNTDLYNCTFPALIEDWRETFHRGSQGQTERFFPFGLVQLSSDLSKKXSDDGFPQIRWHQTADFGYVPNPKMPNTFMAVAMDLCDRDSPFGSIHPRDKQNCGLSAAFGGPCSGLW

SEQ ID NO: 5265 - protein, 56 aa, Homo sapiens
  MISC_FEATURE (35): Xaa equals any of the naturally occurring L-amino acids
  MISC_FEATURE (36): Xaa equals any of the naturally occurring L-amino acids
VLPLLPKVLGLRHHTQPKLKAIFSNSHQCGYCYKXXWFLGHIWYQNVYVYPYKYGM

SEQ ID NO: 5266 - protein, 434 aa, Homo sapiens
  MISC_FEATURE (347): Xaa equals any of the naturally occurring L-amino acids
NLNMEATGTDEVDKLKTKFISAWNNMKYSWVLKTKTYFSRNSPVLLLGKCYHFKYEDEDKTLPAESGCTIEDHVIAGNVEEFRKDFISRIWLTYREEFPQIEGSALTTDCGWGCTLRTGQMLLAQGLILHFLGRAWTWPDALNIENSDSESWTSHTVKKFTASFEASLSGEREFKTPTISLKETIGKYSDDHEMRNEVYHRKIISWFGDSPLALFGLHQLIEYGKKSGKKAGDWYGPAVVAHILRKAVEEARHPDLQGITIYVAQDCTVPVRLGGERTNTDYLEFVKGILSLEYCVGIIGGKPKQSYYFAGFQDDSLIYMDPHYCQSFVDVSIKDFPLETFHCPSPXKMSFRKMDPSCTIGFYCRNVQDFKRASEEITKMLKFSSKEKYPLFTFVNGHSRDYDFTSTTTNEEDLFSEDEKKQLKRFSTEEFVLL

SEQ ID NO: 5267 - protein, 68 aa, Homo sapiens
YISCIFYDFSIKHSGVLAFPGKGKLVCALVKYLNSNVPYSACIHFVKSFVVLLEQFSKADFMPYLIEI

SEQ ID NO: 5268 - protein, 76 aa, Homo sapiens
  MISC_FEATURE (16): Xaa equals any of the naturally occurring L-amino acids
IAGRGIMACQHSLCPXNLRPRMRSCQHNIHPFEQMESGTLTQPSVLNNTAIIATCSVVNVNPQSQLNYFRPNILFL

SEQ ID NO: 5269 - protein, 105 aa, Homo sapiens
  MISC_FEATURE (15): Xaa equals any of the naturally occurring L-amino acids
  MISC_FEATURE (83): Xaa equals any of the naturally occurring L-amino acids
  MISC_FEATURE (84): Xaa equals any of the naturally occurring L-amino acids
QGFGRPSVYHAAIVXFLEFFAWGLLTTPMLTVLHETFSQHTFLMNGLIQGVKGLLSFLSAPLIGALSDVWGRKPFLLGTVFFXXFPIPLMRISPCFLKKKTHQWT

SEQ ID NO: 5270 - protein, 57 aa, Homo sapiens
LRYSLIFYIAALFFLFCSISEISHVYTLNINIRNHAIISTMYLVVSYICITLLHFAN

SEQ ID NO: 5271 - protein, 25 aa, Homo sapiens
  MISC_FEATURE (15): Xaa equals any of the naturally occurring L-amino acids
LIYKYNYTKLQNIVXMKTKNLVPNI

SEQ ID NO: 5272 - protein, 97 aa, Homo sapiens
SDKALASDPCQNSINGCLEVDVHIYSEMFCHLRPMRRLCLEKIFPHWFPFSRALSGAEAVNALRPFYFAVHPDFFGQHPVERDDTWKSFQCPSDFSL

SEQ ID NO: 5273 - protein, 127 aa, Homo sapiens
  MISC_FEATURE (6): Xaa equals any of the naturally occurring L-amino acids
  MISC_FEATURE (18): Xaa equals any of the naturally occurring L-amino acids
  MISC_FEATURE (20): Xaa equals any of the naturally occurring L-amino acids
  MISC_FEATURE (24): Xaa equals any of the naturally occurring L-amino acids
  MISC_FEATURE (35): Xaa equals any of the naturally occurring L-amino acids
ASCRTXSRMAIFELVSKXRXLYLXQKILCELSGHXDLFVDVNKHLFDGEVCAINHFVKLLKDIIICFLNIRAKNVAQNPLKHHSERTDMKTLSRKHWSSVQDYKCSSFANTSSKFRHLLSNDGYPFK

SEQ ID NO: 5274 - protein, 44 aa, Homo sapiens
DSFILHLFIQLIFVEHLHVPDIIKCWVYGNEQNRQGPCPFRGDR

SEQ ID NO: 5275 - protein, 127 aa, Homo sapiens
  MISC_FEATURE (68): Xaa equals any of the naturally occurring L-amino acids
  MISC_FEATURE (81): Xaa equals any of the naturally occurring L-amino acids
  MISC_FEATURE (110): Xaa equals any of the naturally occurring L-amino acids
LKIDTNRIRTENGSILPSVVPQEHNTLPVSQAPSKPNLTSEHTSYGLILTKPYVRPLPPSYLDERYLXMPKRRKFLTDRVXACSDQDNVYKKSVKRLRCGKCLTTYCNAXALEAHLAQKKCQTLFGI

SEQ ID NO: 5276 - protein, 225 aa, Homo sapiens
  MISC_FEATURE (41): Xaa equals any of the naturally occurring L-amino acids
LPGPGACPEGVWTLNSAPTQGPTAAPGACHPGLLGRGQGLXLGLPSTPGTPTPTPHTSLGSPVSSDPVHMSPLEPRGGQGDGLALVLILAFCVAGAAALSVASLCWCRLQREIRLTQKADYATAKAPGSPAAPRISPGDQRLAQSAEMYHYQHQRQQMLCLERHKEPPKELDTASSDEENEDGDFTVYECPGLAPTGEMEVRNPLFDHAALSAPLPAPSSPPALP

SEQ ID NO: 5277 - protein, 104 aa, Homo sapiens
  MISC_FEATURE (1): Xaa equals any of the naturally occurring L-amino acids
  MISC_FEATURE (75): Xaa equals any of the naturally occurring L-amino acids
  MISC_FEATURE (79): Xaa equals any of the naturally occurring L-amino acids
  MISC_FEATURE (80): Xaa equals any of the naturally occurring L-amino acids
XFCVAGAAALSVASLCWCRLQREIRLTQKADYATAKAPGSPAAPRISPGDQRLAQSAEMYHYQHQRQQMLCLERXEVGXXPTSRLGHWHLEGMGRTQRSPPTQA

SEQ ID NO: 5278 - protein, 86 aa, Homo sapiens
EPHLSMCKRCIPRPVNGSLRKFCMQAVFSSRTNNWEISKKLHRSPAWCCSSLYFTLNSGWEEKGNKLWLFPSQKYCGTSTFQCFAF

SEQ ID NO: 5279 - protein, 78 aa, Homo sapiens
HCECCSDILYRHLTAQNFCFISCLTYQKGRKVGMISKVKKKKKKKTFYRKLINNHVILQFCYQNFPQEFSNISSAMWL

SEQ ID NO: 5280 - protein, 46 aa, Homo sapiens
  MISC_FEATURE (7): Xaa equals any of the naturally occurring L-amino acids
RPVRTYXAKLLAFGIPLDNVGFKPLETAVIGQTLGQGPAGLVGTPT

SEQ ID NO: 5281 - protein, 49 aa, Homo sapiens
KIFCRDKLSLCFPGWSRTSGLKRFFCLSLQNYWDYSMSHHAQLYSLLIY

SEQ ID NO: 5282 - protein, 68 aa, Homo sapiens
KEAVFPRKTHQPGLRKKMGPPSEGMWWWKHSTGPGFGASFPPPQPMLTLPGKAPGSPQGRRKKRGLCS

SEQ ID NO: 5283 - protein, 63 aa, Homo sapiens
  MISC_FEATURE (13): Xaa equals any of the naturally occurring L-amino acids
RTKRTHAGGRSRXVDPRAAEFGTARLGSLCKTSPFLEMMMPSKPGPGPDLQAHTWPVALRSPG

SEQ ID NO: 5284 - protein, 257 aa, Homo sapiens
  MISC_FEATURE (120): Xaa equals any of the naturally occurring L-amino acids
  MISC_FEATURE (139): Xaa equals any of the naturally occurring L-amino acids
  MISC_FEATURE (141): Xaa equals any of the naturally occurring L-amino acids
  MISC_FEATURE (256): Xaa equals any of the naturally occurring L-amino acids
CSINGTLYQPGAVVSSSLCETCRCELPGGPPSDAFVVSCETQICNTHCPVGFEYQEQSGQCCGTCVQVACVTNTSKSPAHLFYPGETWSDAGNHCVTHQCEKHQDGLVVVTTKKACPPLXCSLDEARMSKDGCCRFCPXPXPPYQNQSTCAVYHRSLIIQQQGCSSSEPVRLAYCRGNCGDSSSMYSLEGNTVEHRCQCCQELRTSLRNVTLHCTDGSSRAFSYTEVEECGCMGRRCPAPGDTQHSEEAEPEPSQXA

SEQ ID NO: 5285 - protein, 58 aa, Homo sapiens
NFKSIHFTHLFCLFTKLFLKRALCHQNMLDLIILRSLLSKYLVYIFSLANLCVYIHSI

SEQ ID NO: 5286 - protein, 205 aa, Homo sapiens
NSAEAVERNLVRVAEVWLDEYKELFYGHGDHLIDQGLDVGNLTQQRELRKKLKCKSFKWYLENVFPDLRAPIVRASGVLINVALGKCISIENTTVILEDCDGSKELQQFNYTWLRLIKCGEWCIAPIPDKGAVRLHPCDNRNKGLKWLHKSTSVFHPELVNHIVFENNQQLLCLEGNFSQKILKVAACDPVKPYQKWKFEKYYEA

SEQ ID NO: 5287 - protein, 188 aa, Homo sapiens
  MISC_FEATURE (170): Xaa equals any of the naturally occurring L-amino acids
  MISC_FEATURE (172): Xaa equals any of the naturally occurring L-amino acids
  MISC_FEATURE (177): Xaa equals any of the naturally occurring L-amino acids
  MISC_FEATURE (183): Xaa equals any of the naturally occurring L-amino acids
  MISC_FEATURE (188): Xaa equals any of the naturally occurring L-amino acids
PLAMDSQKEALQRIISTLANKNDEIQNFIDTLHHTLKGVQENSSNILSELDEEFDSLYSILDEVKESMINCIKQEQARKSQELQSQISQCNNALENSEELLEFATRSLDIKEPEEFSKAARQIKDRVTMASAFRLSLKPKVSDNMTHLMVDFSQERQMLQTLKFFASPQXSXIDPVXIVWVGXITSCX

SEQ ID NO: 5288 - protein, 53 aa, Homo sapiens
  MISC_FEATURE (27): Xaa equals any of the naturally occurring L-amino acids
FKAIDDLYVQIKEKHVWEKDCHFYVNXKVLSELYLKKRRFYKSKESLNTMNKG

SEQ ID NO: 5289 - protein, 59 aa, Homo sapiens
IIYIFLKPELKMLQATGYSFISGSLTVVSLGQAISLKEKLIMYVGCQDHCLESKCDFYF

SEQ ID NO: 5290 - protein, 84 aa, Homo sapiens
NLSVALCLCSPQRKVTRRGVQFPRPGPYRPPTGAPLCCYSFCQLEADGDQALEKARPEDGRFLSGGELCLTDLNIHSVLLCENK

SEQ ID NO: 5291 - protein, 114 aa, Homo sapiens
SKGILVFNLDRLRCQEKLQSQVSRQPPGWSLAPPPPPLPTFSNVLHAGSWGVWGKGLPASFRRLRFGGKINLGDHPGRGASVDRWEEKKTSYLGGGTSRFLILSFFVAPPHCPF

SEQ ID NO: 5292 - protein, 57 aa, Homo sapiens
  MISC_FEATURE (49): Xaa equals any of the naturally occurring L-amino acids
LKLNTERDFLSCKKFINAKQKENIYFLSLQEKQTKHYSFIAAILLTKQXVHNIKNLT

SEQ ID NO: 5293 - protein, 61 aa, Homo sapiens
LTKGNKSWSSTAVAAALELVDPPGCRNSARDFLCMCFFPDSYIIGYLPTTPYTYYFQNLSR

SEQ ID NO: 5294 - protein, 92 aa, Homo sapiens
  MISC_FEATURE (63): Xaa equals any of the naturally occurring L-amino acids
  MISC_FEATURE (74): Xaa equals any of the naturally occurring L-amino acids
  MISC_FEATURE (77): Xaa equals any of the naturally occurring L-amino acids
  MISC_FEATURE (78): Xaa equals any of the naturally occurring L-amino acids
  MISC_FEATURE (83): Xaa equals any of the naturally occurring L-amino acids
  MISC_FEATURE (86): Xaa equals any of the naturally occurring L-amino acids
  MISC_FEATURE (89): Xaa equals any of the naturally occurring L-amino acids
KTYKIQRSYRSCALYNVIIVTKGLSTWKFLNDLLNNSFKGEIKINCKLFRINKNFSKAEEFYXRGVRGNCIDFXLLXXEERKXKEXIKXFKS

SEQ ID NO: 5295 - protein, 557 aa, Homo sapiens
RACALVRSRRWGPNQPRLRGPQSRTKTEGGAASGLRRLHTERAPGPEGAMLWFQGAIPAAIATAKRSGAVFVVFVAGDDEQSTQMAASWEDDKVTEASSNSFVAIKIDTKSEACLQFSQIYPVVCVPSSFFIGDSGIPLEVIAGSVSADELVTRIHKVRQMHLLKSETSVANGSQSESSVSTPSASFEPNNTCENSQSRNAELCEIPPTSDTKSDTATGGESAGHATSSQEPSGCSDQRPAEDLNIRVERLTKKLEERREEKRKEEEQREIKKEIERRKTGKEMLDYKRKQEEELTKRMLEERNREKAEDRAARERIKQQIALDRAERAARFAKTKEEVEAAKAAALLAKQAEMEVKRESYARERSTVARIQFRLPDGSSFTNQFPSDAPLEEARQFAAQTVGNTYGNFSLATMFPRREFTKEDYKKKLLDLELAPSASVVLLPAGRPTASIVHSSSGDIWTLLGTVLYPFLAIWRLISNFLFSNPPPTQTSVRVTSSEPPNPASSSKSEKREPVRKRVLEKRGDDFKKEGKIYRLRTQDDGEDENNTWNGNSTQQM

SEQ ID NO: 5296 - protein, 43 aa, Homo sapiens
  MISC_FEATURE (25): Xaa equals any of the naturally occurring L-amino acids
  MISC_FEATURE (39): Xaa equals any of the naturally occurring L-amino acids
NDQNPESQWSNNKHTQIDCLINSFXLVFKSNTFFKSPLXKMII

SEQ ID NO: 5297 - protein, 143 aa, Homo sapiens
  MISC_FEATURE (4): Xaa equals any of the naturally occurring L-amino acids
  MISC_FEATURE (5): Xaa equals any of the naturally occurring L-amino acids
  MISC_FEATURE (8): Xaa equals any of the naturally occurring L-amino acids
  MISC_FEATURE (41): Xaa equals any of the naturally occurring L-amino acids
TGWXXCPXPGPGRRTMSRQKETLQSAFPSMCALCPSEPADXRGGKDTVLNEQNLQDTQSCLFATWPYACPVFSLKAFTHARAVTWNVLSITPAVMPSTELDGRPLHGSLKRSHPSNWVCHRHTGSCLPVLPVVIVMRIVVLHP

SEQ ID NO: 5298 - protein, 48 aa, Homo sapiens
SGQEPGFQQRELENEPRGAGAGGVGECQRAGMNWQVAWRGGLVPKPVL

SEQ ID NO: 5299 - protein, 232 aa, Homo sapiens
PASATTRTGPRPGPAPRCPLPAPGHSCTQAPPREHTAVHTREKQQLASLVGTMLAYSLTYRQERTPDGQYIYRLEPNVEELCRFPELPARKPLTYQTKQLIAREIEVEKMRRAEASARVENSPQVDGSPPGLEGLLGGIGEKGVHRPAPRNHEQRLEHIMRRAAREEQPEKDFFGRVVVRSTAVPSAGDTAPEQDSVERRMGTAVGRSEVWFRFNEGVSNAVRRSLYIRDLL

SEQ ID NO: 5300 - protein, 92 aa, Homo sapiens
SITCHRESEFLYCLPAARTKSEWWGPRSSQLGEKALPDPGTRGLGQEAGRMGGCDHRHTHTRSLSSGKGFPEAFAHTLNEVFSCQAKPPEEK

SEQ ID NO: 5301 - protein, 40 aa, Homo sapiens
  MISC_FEATURE (38): Xaa equals any of the naturally occurring L-amino acids
  MISC_FEATURE (40): Xaa equals any of the naturally occurring L-amino acids
TIKCLLLYKKKKKKKKKKKKKKKKKKKKKKKKKKKKGXPX

SEQ ID NO: 5302 - protein, 50 aa, Homo sapiens
VENLQRNDGCKWTCKPKLGIGEVRLTRLLVRVLLNSLLMRRCLDKYKLRK

SEQ ID NO: 5303 - protein, 57 aa, Homo sapiens
  MISC_FEATURE (6): Xaa equals any of the naturally occurring L-amino acids
KPLAKXRGIFFFIFKCLGTKPKSKRLTKHVSLKATCILQYNIKLFNLRNLVLLICTF

SEQ ID NO: 5304 - protein, 40 aa, Homo sapiens
RTFMKRWNCSYKFFLLLLFLNMPWNNSTIFSPSINLSNKA

SEQ ID NO: 5305 - protein, 49 aa, Homo sapiens
  MISC_FEATURE (37): Xaa equals any of the naturally occurring L-amino acids
  MISC_FEATURE (48): Xaa equals any of the naturally occurring L-amino acids
  MISC_FEATURE (49): Xaa equals any of the naturally occurring L-amino acids
NCEDILKLCLVYKYKDFHTDNYQIPNTFTGKKPSVKXLPGSSSLKFSXX

SEQ ID NO: 5306 - protein, 79 aa, Homo sapiens
  MISC_FEATURE (4): Xaa equals any of the naturally occurring L-amino acids
  MISC_FEATURE (27): Xaa equals any of the naturally occurring L-amino acids
  MISC_FEATURE (56): Xaa equals any of the naturally occurring L-amino acids
  MISC_FEATURE (77): Xaa equals any of the naturally occurring L-amino acids
  MISC_FEATURE (79): Xaa equals any of the naturally occurring L-amino acids
TTLXRRSSLLNYIHPDCGDNHTPQFRXYYYYQSVQGLCWLILFFYPLYHYSPISSXTFISKNLIVWHLSLDMECFFXKX

SEQ ID NO: 5307 - protein, 59 aa, Homo sapiens
MFGLYLVLDPELPFSKYLNDYYYFISLFYTHTRTHTHREMLFMRFCIFHILHILYMIDE

SEQ ID NO: 5308 - protein, 183 aa, Homo sapiens
  MISC_FEATURE (107): Xaa equals any of the naturally occurring L-amino acids
  MISC_FEATURE (111): Xaa equals any of the naturally occurring L-amino acids
  MISC_FEATURE (123): Xaa equals any of the naturally occurring L-amino acids
QGFERQTTAAVGVLKAVHCGEWPDQPRLTKDVICFHAEDFLEVVQRMQLDLHEPPLSQCVQWVDDAKLNQLRREGIRYARIQLYDNDIYFIPRNVVHQFKTVSAVCXLAWXIRLKLYHSEEDXSQNTATHETGTSSDSTSSVLGPHTDNMICAVSKPPWILFFQINFILNMNYSRLNMNLLHL

SEQ ID NO: 5309 - protein, 68 aa, Homo sapiens
  MISC_FEATURE (20): Xaa equals any of the naturally occurring L-amino acids
ISHFWEQTPIKVPGDYLQWXAEQKISAVLIIVVTWVTPPNTLCELSEIFGNFLMYILEILNVQIWSSI

SEQ ID NO: 5310 - protein, 93 aa, Homo sapiens
WQSVHRSWLLSLLNLCKRSLSDEGRIMVLLALAFPFCDLKASSLRPHSMAPVPYSHSCLLKLPTLLNCFWGEEHFFLKQNRYMKQYTGINTNI

SEQ ID NO: 5311 - protein, 75 aa, Homo sapiens
  MISC_FEATURE (46): Xaa equals any of the naturally occurring L-amino acids
  MISC_FEATURE (47): Xaa equals any of the naturally occurring L-amino acids
  MISC_FEATURE (48): Xaa equals any of the naturally occurring L-amino acids
  MISC_FEATURE (57): Xaa equals any of the naturally occurring L-amino acids
  MISC_FEATURE (65): Xaa equals any of the naturally occurring L-amino acids
  MISC_FEATURE (71): Xaa equals any of the naturally occurring L-amino acids
FSPKAVLLRLCFTSIYKLYVKCCHKEVSEAVGHTQGRAEKYLVVCXXXKPWMAAATXPAYPFTAXVYSLRXLTTR

SEQ ID NO: 5312 - protein, 82 aa, Homo sapiens
ELPSKRQAFVISMEFEGSWTICKDILTCSLRSLSSSKRMARVCGIILSTYCCFFVVLLMQVIIYFLGVIWRKSMRQACFSPV

SEQ ID NO: 5313 - protein, 272 aa, Homo sapiens
  MISC_FEATURE (220): Xaa equals any of the naturally occurring L-amino acids
DCVTELSVHHRNNRQTMEDLISLWQYDHLTATYLLLLAKKARGKPVRLRLSSFSCGQASATPFTDIKSNNWSLEDVTASDKNYVAGLIDYDWCEDDLSTGAATPRTSQFTKYWTESNGVESKSLTPALCRTPANKLKNKENVYTPKSAVKNEEYFMFPEPKTPVNKNQHKREILTTPNRYTTPSKARNQCLKETPIKIPVNSTGTDKLMTGVISPERRCXQWNWISTKHIWRRLQKEREPKCLGALKGGWIRLSLCSPGAKGRVLPETGPED

SEQ ID NO: 5314 - protein, 35 aa, Homo sapiens
FLGAPSICAGDEEGTEIDTLQFRLQVRCTREPPCC

SEQ ID NO: 5315 - protein, 99 aa, Homo sapiens
  MISC_FEATURE (38): Xaa equals any of the naturally occurring L-amino acids
  MISC_FEATURE (42): Xaa equals any of the naturally occurring L-amino acids
DFLKGSKAFACYLCFFSPKPKQKIMPLCQTFLLGTSTXSQLXKYNVYIAQFYNLSMAQILETYKLDDHRDIVVNIWAWNQRTLGSNLSFKSKKLNSLAE

SEQ ID NO: 5316 - protein, 66 aa, Homo sapiens
  MISC_FEATURE (38): Xaa equals any of the naturally occurring L-amino acids
  MISC_FEATURE (53): Xaa equals any of the naturally occurring L-amino acids
RFNFPASPEARYGHNTKFCPRRLSKIVWDFQEMFLKSXAGLSSCLLPLCWLEXKDHGRRPSSHPGR

SEQ ID NO: 5317 - protein, 148 aa, Homo sapiens
  MISC_FEATURE (18): Xaa equals any of the naturally occurring L-amino acids
VLYHCASRYRRRARQTCXPSYTRSADLPSRTPPVEDLLELSRAFWVGADGGGRVRVLGGTEAHEDGIPPESMDHYADGHRPQHCHLGYRCHGRPQREGLPRCLKVPPVNLSSVSVPFPVTHRAGMEFNGCSGQTLVHGQTSLLWILQD

SEQ ID NO: 5318 - protein, 77 aa, Homo sapiens
MKIFKLELEEGVVEEQGVLLHPEVVGLLLPAVEPVIHREEVLDQQEAFEVREEVPNNKEAAGREKGSRPVLTCYNED

SEQ ID NO: 5319 - protein, 704 aa, Homo sapiens
  MISC_FEATURE (1): Xaa equals any of the naturally occurring L-amino acids
  MISC_FEATURE (3): Xaa equals any of the naturally occurring L-amino acids
XGXKGREGKGGSRGGARAHRERARRRVELDRVCCQRRELRPPFYNSSTRAGHREQRARVSRNPIPSDRISPPQPNGEISGNMATEHVNGNGTEEPMDTTSAVIHSENFQTLLDAGLPQKVAEKLDEIYVAGLVAHSDLDERAIEALKEFNEDGALAVLQQFKDSDLSHVQNKSAFLCGVMKTYRQREKQGTKVADSSKGPDEAKIKALLERTGYTLDVTTGQRKYGGPPPDSVYSGQQPSVGTEIFVGKIPRDLFEDELVPLFEKAGPIWDLRLMMDPLTGLNRGYAFVTFCTKEAAQEAVKLYNNHEIRSGKHIGVCISVANNRLFVGSIPKSKTKEQILEEFSKVTEGLTDVILYHQPDDKKKNRGFCFLEYEDHKTAAQARRRLMSGKVKVWGNVGTVEWADPIEDPDPEVMAKVKVLFVRNLANTVTEEILEKAFSQFGKLERVKKLKDYAFIHFDERDGAVKAMEEMNGKDLEGENIEIVFAKPPDQKRKERKAQRQAAKNQMYDDYYYYGPPHMPPPTRGRGRGGRGGYGYPPDYYGYEDYYDYYGYDYHNYRGGYEDPYYGYEDFQVGARGRGGRGARGAAPSRGRGAAPPRGRAGYSQRGGPGSARGVRGARGGAQQQRGRGVRGARGGRGGNVGGKRKADGYNQPDSKRRQTNNQNWGSQPIAQQPLQGGDHSGNYGYKSENQEFYQDTFGQQWK

SEQ ID NO: 5320 - protein, 69 aa, Homo sapiens
  MISC_FEATURE (9): Xaa equals any of the naturally occurring L-amino acids
  MISC_FEATURE (23): Xaa equals any of the naturally occurring L-amino acids
DYALSNTTXYREKLVRLQVPVRXFPGRPTRPWETEQDSVSKKNKNKNKKTEGQAQVKYPIFILSRGIKK

SEQ ID NO: 5321 - protein, 116 aa, Homo sapiens
CSNCPKLWPKKAPSNWLLCPFDMAHHSLNTFYIWHNNVLHTHLVFFLPHLLNQPFSRGSFLIWLLLCWNSWYHLRTLRRQANQANKLSMMLLRVKQSPGTKLCHGDSELTSGLLAT

SEQ ID NO: 5322 - protein, 100 aa, Homo sapiens
  MISC_FEATURE (28): Xaa equals any of the naturally occurring L-amino acids
  MISC_FEATURE (81): Xaa equals any of the naturally occurring L-amino acids
  MISC_FEATURE (89): Xaa equals any of the naturally occurring L-amino acids
VTIIISASPTQVTLLGSPVCPHLEVTAXPWRWDSILSPGCLPPVRRPVSWCVTSGRCQACFPPSFPPQRARTNHQCHHTSXWPENFMDXFTCAIVNLRRP

SEQ ID NO: 5323 - protein, 63 aa, Homo sapiens
VPGEAELERAVEAFPLLVESYAPHSGSELQLLSRTTTESGIRVKNTSPTPPLLHPRRFHVFNL

SEQ ID NO: 5324 - protein, 269 aa, Homo sapiens
DSGSCGPDPKCGDLRRIKGLCKFANMFTLSQTSRAWFIDRARQAREERLVQKERERAAVVIQAHVRSFLCRSRLQRDIRREIDDFFKADDPESTKRSALCIFKIARKLLFLFRIKEDNERFEKLCRSILSSMDAENEPKVWYVSLACSKDLTLLWIQQIKNILWYCCDFLKQLKPEILQDSRLITLYLTMLVTFTDTSTWKILRGKGESLRPAMNHICANIMGHLNQHGFYSVLQCCDGLFPDLVSYAPHNNPVRWSVGRSWYDWQLSR

SEQ ID NO: 5325 - protein, 118 aa, Homo sapiens
  MISC_FEATURE (25): Xaa equals any of the naturally occurring L-amino acids
  MISC_FEATURE (94): Xaa equals any of the naturally occurring L-amino acids
GQARVLPLMQIPTREMSRGRLLSEXLQPKGCSIAIPFPWSCQLFSGQGPWGRWSKPSPQAGGLESTRKGSTWFYEGILGGATPHLPPTYTFCCXKCLIPHDVSLSFQQKKVKLWVVEP

SEQ ID NO: 5326 - protein, 83 aa, Homo sapiens
  MISC_FEATURE (39): Xaa equals any of the naturally occurring L-amino acids
  MISC_FEATURE (50): Xaa equals any of the naturally occurring L-amino acids
AERSLKILPLLKKLLKSNDHECMLGHLCMYIQIDRMDFXKNGITIVLQWXKKYGILPHSLNLGGIQKALLKPSNKLDQLSLDL

SEQ ID NO: 5327 - protein, 77 aa, Homo sapiens
  MISC_FEATURE (8): Xaa equals any of the naturally occurring L-amino acids
  MISC_FEATURE (17): Xaa equals any of the naturally occurring L-amino acids
  MISC_FEATURE (20): Xaa equals any of the naturally occurring L-amino acids
  MISC_FEATURE (47): Xaa equals any of the naturally occurring L-amino acids
LLRRGFIXGFYNANVVXLRXKNWQLESLSLISKGNPDFFVNYVRQVXYGFLYELQFTVHQILVSEELIYVKCLKIYT

SEQ ID NO: 5328 - protein, 65 aa, Homo sapiens
  MISC_FEATURE (41): Xaa equals any of the naturally occurring L-amino acids
SPGGRSSLLLSPVVSRTSCPDLPWSCLSDSLHQGHPTASKXAFPWTNATATFMCEAKITLQQSQY

SEQ ID NO: 5329 - protein, 132 aa, Homo sapiens
  MISC_FEATURE (131): Xaa equals any of the naturally occurring L-amino acids
  MISC_FEATURE (132): Xaa equals any of the naturally occurring L-amino acids
PAGESSPAPWLKGPGAHLPEARCGGGPRGRSQAQSPQSSGPVGGRGRSGSKARTPQLFRLQQQLQRFGHGCEVPRCWLQAAREHPGQGQEAQSEEEGEGQEGEGQEEGGSPLKGPGQGSLNLPLCLQKKKXX

SEQ ID NO: 5330 - protein, 48 aa, Homo sapiens
LSSICLNISSLGDSSPLCLVANCNSPCGPTEYHSTAFLDIYDVLTIQV

SEQ ID NO: 5331 - protein, 63 aa, Homo sapiens
KEWHCFYIFAHLFHARLNRNSYLLVRVVCCNITYHVTSGKPHCMHVREGESHVRVVIKIVLTL

SEQ ID NO: 5332 - protein, 87 aa, Homo sapiens
MRRRVFFLHRCSILVFLFPCKCNQMPFYMWTYLYWPNIFFLLSLFFFPFFLLPLFLYSFLFLFFFFFSFFFGSCCYPRHFTSPSLKG

SEQ ID NO: 5333 - protein, 79 aa, Homo sapiens
IGLKANSQGATDPFHNRMLPVNSLSILLCPVSKKKKKSRRVSQSGHLIRDLAQEEEMGRESDGEQHSPWEPEVGGHRAP

SEQ ID NO: 5334 - protein, 98 aa, Homo sapiens
  MISC_FEATURE (10): Xaa equals any of the naturally occurring L-amino acids
EPAATAAETXSCVLCGLPAAGKSTFARALAHRLQQEQGWAIGVVAYDDVMPDAFLAGARARPAHSQWKLLRQELLKYLEYFLMAVINGCQMSVPPNRT

SEQ ID NO: 5335 - protein, 178 aa, Homo sapiens
  MISC_FEATURE (4): Xaa equals any of the naturally occurring L-amino acids
  MISC_FEATURE (5): Xaa equals any of the naturally occurring L-amino acids
  MISC_FEATURE (9): Xaa equals any of the naturally occurring L-amino acids
  MISC_FEATURE (10): Xaa equals any of the naturally occurring L-amino acids
  MISC_FEATURE (12): Xaa equals any of the naturally occurring L-amino acids
  MISC_FEATURE (166): Xaa equals any of the naturally occurring L-amino acids
GKGXXLPIXXSXTFMPNGCCKTCTPRNETRVPCSTVPVTTEVSYAGCTKTVLMNHCSGSCGTFVMYSAKAQALDHSCSCCKEEKTSQREVVLSCPNGGSLTHTYTHIESCQCQDTVCGLPTGTSRRARRSPRHLGSVSGVGTAPSLPSTALPPPDPLSLLKLGFLXSDIYCLSFCSVL

SEQ ID NO: 5336 - protein, 51 aa, Homo sapiens
  MISC_FEATURE (6): Xaa equals any of the naturally occurring L-amino acids
  MISC_FEATURE (7): Xaa equals any of the naturally occurring L-amino acids
  MISC_FEATURE (13): Xaa equals any of the naturally occurring L-amino acids
RGGQTXXPAGARXGTVLNPGETAKWKTYRVCALPDFTVLLGHFTYVPAVIN

SEQ ID NO: 5337 - protein, 50 aa, Homo sapiens
PQLYKLFFKTKYFQVYLLTKNIIMVKTFLFNRLVIFLTSIFFNLSLHKKN

SEQ ID NO: 5338 - protein, 108 aa, Homo sapiens
  MISC_FEATURE (41): Xaa equals any of the naturally occurring L-amino acids
  MISC_FEATURE (93): Xaa equals any of the naturally occurring L-amino acids
SVYLKRNLIFQGSNVYVFQVVLPTFILERRSLLEMYADFFXHPDLFVRYLTEHGSFQRLQMLLSSFLPFILQDRWIPCHLSNISGYSVVLNNXFTLVACLLKVIWGRC

SEQ ID NO: 5339 - protein, 67 aa, Homo sapiens
  MISC_FEATURE (67): Xaa equals any of the naturally occurring L-amino acids
LCMSLGECVSSTVAPRGSTHSLKLLLPHCTYSLRLNWSQTNWDPAQSSSSQNEVLRPQCVRTCLAVX

SEQ ID NO: 5340 - protein, 65 aa, Homo sapiens
  MISC_FEATURE (51): Xaa equals any of the naturally occurring L-amino acids
AQFLGHAPVCSDMLLYVTEMAMSTGGKITPTWEEEKPVRGSTAGAALSTEXSCLPDSMAFVSIRV

SEQ ID NO: 5341 - protein, 63 aa, Homo sapiens
IPALLLTSLGPWRMLSISLSLSVLLCKMWMIPDSQAFCQDYMGFLHSAMSSDNINTKSNLLNV

SEQ ID NO: 5342 - protein, 404 aa, Homo sapiens
  MISC_FEATURE (42): Xaa equals any of the naturally occurring L-amino acids
  MISC_FEATURE (151): Xaa equals any of the naturally occurring L-amino acids
  MISC_FEATURE (223): Xaa equals any of the naturally occurring L-amino acids
MPDGATLAIGSSRGKIYQYDLRMLKSPVKTISAHKTSVQCIXFQYSTVLTKSSLNKGCSNKPTTVNKRMFNVNAASGGVQNSGIVREAPATSIATVLPQPMTSAMGKGTVAVQEKAGLPRSINTDTLSKETDSGKNQDFSSFDDTGKSSLXDMFSPIRDDAVVNKGSDESIGKGDGFDFLPQLNSVFPPRKNPVTSSTSVLHSSPLNVFMGSPGKEENENRDXTAESKKIYMGKQESKDSFKQLAKLVTSGAESGNLNTSPSSNQTRNSEKFEKPENEIEAQLICEPPINGSSTPNPKIASSVTAGVASSLSEKIADSIGNNRQNAPLTSIQIRFIQNMIQETLDDFREACHRDIVNLQVEMIKQFHMQLNEMHSLLERYSVNEGLVAEIERLREENKRLRAHF

SEQ ID NO: 5343 - protein, 66 aa, Homo sapiens
  MISC_FEATURE (12): Xaa equals any of the naturally occurring L-amino acids
RKPQTPTALCTXWCPHFQKKKKKISKIEFKKSHLSCPANICSSLVGAVEASTHRQAVAGTVKGKTP

SEQ ID NO: 5344 - protein, 258 aa, Homo sapiens
  MISC_FEATURE (251): Xaa equals any of the naturally occurring L-amino acids
PRVRREVQSLKEQHQKEISELNETFLSDSEKEKLTLMFEIQGLKEQCENLQQEKQEAILNYESLREIMEILQTELGESAGKISQEFESMKQQQASDVHELQQKLRTAFTEKDALLETVNRLQGENEKLLSQQELVPELENTIKNLQEKNGVYLLSLSQRDTMLKELEGKINSLTEEKDDFINKLKNSHEEMDNFHKKCEREERLILELGKKVEQTIQYNSELEQKVNELTGGLEETLKEKDQNDQKLEKLXGSNESSL

SEQ ID NO: 5345 - protein, 60 aa, Homo sapiens
YAIIMQLNVDESGRGWAQMVPHDPGIDPEFPEEWVDNTYSNKNPFLLFSIKLLSKIIDRL

SEQ ID NO: 5346 - protein, 124 aa, Homo sapiens
LCHEKLSLLEDFKDFRDSCSSSERTDGRYSKYRVRRNSLQHHQDDTKYRTKSFKGDRTFLEGYHTRGLDHSSSWQDHSRFLSSPRFSYVNSFTKRTVAPDSASNKEDATMNGTSSQPKKEEYGS

SEQ ID NO: 5347 - protein, 136 aa, Homo sapiens
  MISC_FEATURE (27): Xaa equals any of the naturally occurring L-amino acids
  MISC_FEATURE (110): Xaa equals any of the naturally occurring L-amino acids
  MISC_FEATURE (122): Xaa equals any of the naturally occurring L-amino acids
MSRTRPARPMGWGQQRHSPLVVQRQLXREGSSPEGSTRRTIEGQSPEPVFGDADVDVSAVQAKLGALELNQRDAAAETELRVHPPCQRHCPEPRVHPKKTKPPAKLPKVXTQKPPSLALFPXSSPCGNLLLARKFG

SEQ ID NO: 5348 - protein, 120 aa, Homo sapiens
VLDRERPSFFFFFSVQAQFCHQFDYEKSFGLPGSFGAWKLQMRDGGLHCFAAGERELIRSLPTEVGVMPDAERSGSPRAQAPCGRCPQRASPPPRPGSYLLHDLLPRRAAYLLDGLLDVL

SEQ ID NO: 5349 - protein, 45 aa, Homo sapiens
  MISC_FEATURE (7): Xaa equals any of the naturally occurring L-amino acids
AGMMYLXNHTPVLISHQISMFTFSVWMSGRTLKNWQSCPTHAEHL

SEQ ID NO: 5350 - protein, 288 aa, Homo sapiens
RSAPPGRCRPWPVPSPRFSAPRAVPSQSPAPRYRADRPSRRLPVPGTPARPLARSPPAAHVPGAGPRAGGRAARRSQAGLCSVPMAAAGWRDGSGQEKYRLVVVGGGGVGKSALTIQFIQSYFVTDYDPTIEDSYTKQCVIDDRAARLDILDTAGQEEFGAMREQYMRTGEGFLLVFSVTDRGSFEEIYKFQRQILRVKDRDEFPMILIGNKADLDHQRQVTQEEGQQLARQLKVTYMEASAKIRMNVDQAFHELVRVIRKFQEQECPPSPEPTRKEKDKKGCHCVIF

SEQ ID NO: 5351 - protein, 279 aa, Homo sapiens
  MISC_FEATURE (88): Xaa equals any of the naturally occurring L-amino acids
AAAERDVPPPPPPPPPPSEPLLALRGGATDACLARRTLRDPGAAQPAEPRRSPAPGAPGSQCRPAGGPVREPRVRELRLHPDAAVARXGTGHYLCNACGLYSKMNGLSRPLIKPQKRVPSSRRLGLSCANCHTTTTTLWRRNAEGEPVCNACGLYMKLHGVPRPLAMKKEGIQTRKRKPKNINKSKTCSGNSNNSIPMTPTSTSSNSDDCSKNTSPTTQPTASGAGAPVMTGAGESTNPENSELKYSGQDGLYIGVSLASPAEVTSSVRPDSWCALALA

SEQ ID NO: 5352 - protein, 55 aa, Homo sapiens
EELEARGLRWLPWVFPSRLCYCVRPFSHCGHVFLESIFQVLYIQHSPPSFSLIPF

SEQ ID NO: 5353 - protein, 59 aa, Homo sapiens
  MISC_FEATURE (40): Xaa equals any of the naturally occurring L-amino acids
TEEILRTRGSTREFRTGTCRRTSFPIVSRIRAWRNHGHSXFLCEIGIRSQFHTTYEPEA

SEQ ID NO: 5354 - protein, 103 aa, Homo sapiens
SMHKAGLLGLCARAWNSVRMASSGMTRRDPLANKVALVTASTDGIGFAIARRLAQDGAHVVVSSRKQQNVDQAVATLQGEGLSVTGTCAMWGRRRTGSGWWPR

SEQ ID NO: 5355 - protein, 51 aa, Homo sapiens
  MISC_FEATURE (48): Xaa equals any of the naturally occurring L-amino acids
SLYMLTNSKGKEIDHKLHVNVEGKLIDHKLKYNLICYIFLLIYIPMKXFLY

SEQ ID NO: 5356 - protein, 96 aa, Homo sapiens
  MISC_FEATURE (20): Xaa equals any of the naturally occurring L-amino acids
CFSLPSLFTAVKFIKCFSVXFCSLSFTGYFFMYTFRIFCLLYPVVQMISYILQMPFQFLFSFSIKLPSCPNVQFVSVCVCVCVCVNLIFKSARLPI

SEQ ID NO: 5357 - protein, 291 aa, Homo sapiens
RPDSRVDPRVREVTDYAIARRIVDLHSRIEESIDRVYSLDDIRRYLLFARQFKPKISKESEDFIVEQYKHLRQRDGSGVTKSSWRITVRQLESMIRLSEAMARMHCCDEVQPKHVKEAFRLLNKSIIRVETPDVNLDQEEEIQMEVDEGAGGINGHADSPAPVNGINGYNEDINQESAPKASLRLGFSEYCRISNLIVLHLRKVEEEEDESALKRSELVNWYLKEIESEIDSEEELINKKRIIEKVIHRLTHYDHVLIELTQAGLKGSTEGSESYEEDPYLVVNPNYLLED

SEQ ID NO: 5358 - protein, 33 aa, Homo sapiens
TCSRSRAAALLTVLGVCVQSEQGLCFWIVKEDA

SEQ ID NO: 5359 - protein, 54 aa, Homo sapiens
  MISC_FEATURE (5): Xaa equals any of the naturally occurring L-amino acids
TPAGXRSGNSRVEGPLSCLYSFSLLYSFTRSPHLTSELLGPLDPHISWAISLFC

SEQ ID NO: 5360 - protein, 80 aa, Homo sapiens
  MISC_FEATURE (1): Xaa equals any of the naturally occurring L-amino acids
  MISC_FEATURE (8): Xaa equals any of the naturally occurring L-amino acids
  MISC_FEATURE (9): Xaa equals any of the naturally occurring L-amino acids
XRKTLDVXXTIMGTRIEGFFPLKAFLPGGWALLGHALQSSVPQQESGGHHLPASSTFSASLFSMNPGRPAGTSKFPGLSA

SEQ ID NO: 5361 - protein, 53 aa, Homo sapiens
QTLRTKMNENLFASFIAPTILGLPAAVLIILFPPLLIPTSKYLINNRLITTQQ

SEQ ID NO: 5362 - protein, 185 aa, Homo sapiens
  MISC_FEATURE (113): Xaa equals any of the naturally occurring L-amino acids
RCPTRSPPPDTPGSRGTTAMCSLASGATGGRGAVENEEDLPELSDSGDEAAWEDEDDADLPHGKQQTPCLFCNRLFTSAEETFSHCKSEHQFNIDSMVHKHGLEFYGYIKLIXFIRLKNPTVEYMNSIYNPVPWEKEEYLKPVLEDDLLLQFDVEDLYEPVSVPFSYPNGLSENTSVVEKLKHME

SEQ ID NO: 5363 - protein, 76 aa, Homo sapiens
YIKALLSSDYAYFASRETEAWVGQRGAHVFTALSAPDFGAISLHPCAPVKNLASTFCSPDPPSLTCGSCHTKMGLP

SEQ ID NO: 5364 - protein, 62 aa, Homo sapiens
GTQLITRRINWPKFLIFQFVAPAPRDHQKLFWVSLSLRRDPLHRPSLILISPCPESVNVPRK

SEQ ID NO: 5365 - protein, 80 aa, Homo sapiens
GHVDNLRYHSIVHNVHHYSVDCKGLLSSCKNYPSKSIFKVLVLLIYKLCARSPKVNSNIYLKYSLSYLINLWYIFLYYAC

SEQ ID NO: 5366 - protein, 116 aa, Homo sapiens
LKMKTPFFIFNLAETAHMPSKVKAQLYAQAYDLYKEIVYLQKEHPVNWHKNYAIACERMLRLQARDADPEVLLSETIRHFRLYSQKAPNDPQQADILGALKHLRKELQSLRNRKNV

SEQ ID NO: 5367 - protein, 184 aa, Homo sapiens
  MISC_FEATURE (110): Xaa equals any of the naturally occurring L-amino acids
WIPRAAGIRHEEPAGHSQKKGKAINIGQLVDVKVLEKTKDGLEVAVLPHNIRAFLPTSHLSDHVANGPLLHHWLQAGDILHRVLCLSQSEGRVLLCRKPALVSTVEGGQXPKNFSEIHPGMLLIGFVKSIKDYGVFIQFPSGLSGLAPKAIMSDKFVTSTSDHFVEGQTVAAKVTNVDEEKQRM

SEQ ID NO: 5368 - protein, 77 aa, Homo sapiens
NLRFDDAEALDYTFAYFDKVHLSLFISSVFFCYQRQLISFVPQYFFCKYLPKFFQILCKMQVIVEMPVYAFMLASLN

SEQ ID NO: 5369 - protein, 83 aa, Homo sapiens
QSVYKRGLQKKMRACFTQQKIWPFLNDTRRVILSHTFPSFRWWTFVETGTQWSNRLCPPVADSPAGRWTRGPVLTVTRLSLLE

SEQ ID NO: 5370 - protein, 82 aa, Homo sapiens
FYPGRKIKGSHRIALVKTKHTIALTEYLGNLPNLLIFGVCFLTVGLWEDVIYDQYLPVTLFISLALKANGGKKSMKKKRLIK

SEQ ID NO: 5371 - protein, 100 aa, Homo sapiens
  MISC_FEATURE (15): Xaa equals any of the naturally occurring L-amino acids
  MISC_FEATURE (70): Xaa equals any of the naturally occurring L-amino acids
  MISC_FEATURE (98): Xaa equals any of the naturally occurring L-amino acids
  MISC_FEATURE (100): Xaa equals any of the naturally occurring L-amino acids
GKMCAAQVREYYLAXKKKKGGRSRGSKLTYACMRRHSSSIVSPKFNSLAVVLQRRDWENPGVTQLNRLAXHPPFASWRNSEEARTDRPSQQLRKPEWXMX

SEQ ID NO: 5372 - protein, 379 aa, Homo sapiens
  MISC_FEATURE (10): Xaa equals any of the naturally occurring L-amino acids
RPTRPVFYAXESWIKYDVQERQKYLAQLLNSVRLPLLSVKFLTRLYEANHLIRDDRTCKHLLNEALKYHFMPEHRLSHQTVLMTRPRCAPKVLCAVGGKSGLFACLDSVEMYFPQNDSWIGLAPLNIPRYEFGICVLDQKVYVIGGIATNVRPGVTIRKHENSVECWNPDTNTWTSLERMNESRSTLGVVVLAGELYALGGYDGQSYLQSVEKYIPKIRKWQPVAPMTTTRSCFAAAVLDGMIYAIGGYGPAHMNSVERYDPSKDSWEMVASMADKRIHFGVGVMLGFIFVVGGHNGVSHLSSIERYDPHQNQWTVCRPMKEPRTGVGAAVIDNYLYVVGGHSGSSYLNTVQKYDPISDTWLDSAGMIYCRCNFGLTAL

SEQ ID NO: 5373 - protein, 130 aa, Homo sapiens
KHWTSLTYFFSFSAFRMIPYPLEKGHLFYPYPICTETADRELLPSFHEVSVYPKKELPFFILFTAGLCSFTAMLALLTHQFPELMGVFAKAMIDIFCSAEFRDWNCKSIFMRVEDELEIPPAPQSQHFQN

SEQ ID NO: 5374 - protein, 72 aa, Homo sapiens
SSALEVLEFLISFIQFQGLIFYRLPRQFIQGLLYLRFTCHVRSSGFEHKLYSWDLSDTPLLTGLGFHFSDPF

SEQ ID NO: 5375 - protein, 62 aa, Homo sapiens
SAPSPNLLPLGRVGLRDLLSWKVLTLPGEGARHCPRESNRRWKKSIKSDQDGGKKKKKKRGG

SEQ ID NO: 5376 - protein, 80 aa, Homo sapiens
QLVTVEEAGWVFSGPRKFKMSAMLSIITFCCQKGWQIEAFLPIAFSELPCQSFTLGKERWAGILGNRTPETYLCLPKNVD

SEQ ID NO: 5377 - protein, 360 aa, Homo sapiens
  MISC_FEATURE (53): Xaa equals any of the naturally occurring L-amino acids
  MISC_FEATURE (360): Xaa equals any of the naturally occurring L-amino acids
LPQAQGDQFPWEQAEGQAPGEDGQRLPDQIHPGVPARRRPWWRERARAVRGLXEGREPEKRRERKQRREGGDGEEQDVGDAGRLLLRVLHVSENPVPLTVRVSPEVRDVRPYIVGAVVRGMDLQPGNALKRFLTSQTKLHEDLCEKRTAATLATHELRAVKGPLLYCARPPQDLKIVPLGRKEAKAKELVRQLQLEAEEQRKQKKRQSVSGLHRYLHLLDGNENYPCLVDADGDVISFPPITNSEKTKVKKTTSDLFLEVTSATSLQICKDVMDALILKMAEMKKYTLENKEEGSLSDTEADAVSGQLPDPTTNPSAGKDGPSLLVVEQVRVVDLEGSLKVVYPSKADLATAPPHVTVVX

SEQ ID NO: 5378 - protein, 43 aa, Homo sapiens
  MISC_FEATURE (3): Xaa equals any of the naturally occurring L-amino acids
  MISC_FEATURE (19): Xaa equals any of the naturally occurring L-amino acids
  MISC_FEATURE (20): Xaa equals any of the naturally occurring L-amino acids
ARXPTLTKGNKSWSSTAVXXALELVDPPGCRNSARDFEHSSDI

SEQ ID NO: 5379 - protein, 78 aa, Homo sapiens
LQTKPSPAFFLLLLVLQLQGPFTFMSEMELWLFQWKNMLKVSFCSRKKKSLPKWGKKLYIYLIIQNTDQSLDLKKKKK

SEQ ID NO: 5380 - protein, 47 aa, Homo sapiens
GITIRKTVCTCSLQMQPLLSLTTSFYLQLIESMDVEPVHMEGQLYYK

SEQ ID NO: 5381 - protein, 61 aa, Homo sapiens
TVLSLAGLLGGKYLQNNGIVLGFLLALETHLFTNRFPEDTLISPSYLPECLLMASLKKGGL

SEQ ID NO: 5382 - protein, 56 aa, Homo sapiens
SSCPKALWGPGWRSQGILYDLAIGCKRKHIPCCGSCILFHSSPLKEKVHVLSPAHP

SEQ ID NO: 5383 - protein, 238 aa, Homo sapiens
  MISC_FEATURE (16): Xaa equals any of the naturally occurring L-amino acids
  MISC_FEATURE (107): Xaa equals any of the naturally occurring L-amino acids
  MISC_FEATURE (113): Xaa equals any of the naturally occurring L-amino acids
EKLILLLSLPGIDINXKDNAGWTPLHEACNYGNTVCVQEILQRCPEVDLLTQVDGVTPLHDALSNGHVEIGKLLLQHGGPVLLQQRNAKGELPLDYVVSPQIKEELXAITKIXDTVENFHAQAEKHFHYQQLEFGSFLLSRMLLNFCSIFDLSSEFILASKGLTHLNELLMACKSHKETTSVHTDWLLDLYAGNIKTLQKLPHILKELPENLKVCPGVHTEALMITLEMMCRSVMEFS

SEQ ID NO: 5384 - protein, 78 aa, Homo sapiens
IKDCLKTKGNLTDEKKPDERHLTKNEKKLSGQNNYEKMNLQIRKREKSLFDTMGTQKRVNTNVKIPRVKKSIITTFRA

SEQ ID NO: 5385 - protein, 54 aa, Homo sapiens
  MISC_FEATURE (54): Xaa equals any of the naturally occurring L-amino acids
FGRAVTQAGVLWHNLGLLQPQFLGLNSPPTSASWVAGTTVTALPCPDNFFFFFX

SEQ ID NO: 5386 - protein, 52 aa, Homo sapiens
  MISC_FEATURE (50): Xaa equals any of the naturally occurring L-amino acids
HFTVLFGIILYEAVWIGLLFPLVNWLMLRFWLLESICVFPVLASHYVICXIF

SEQ ID NO: 5387 - protein, 82 aa, Homo sapiens
  MISC_FEATURE (10): Xaa equals any of the naturally occurring L-amino acids
MRLKSVCVCXRARMWPKNSAIMSNSSFALFLRVDDIRHFSVFGEIDWDTSPKPTQVCNWKPGGWFSGPLCPLSFTVILFTST

SEQ ID NO: 5388 - protein, 290 aa, Homo sapiens
  MISC_FEATURE (4): Xaa equals any of the naturally occurring L-amino acids
TNSXFDKQNDDPKERIDKDTKNVNSNTGMQTTENYLTEKGNERNVKFPPEHPVENDVTQTVSSFSLPASSRSKKLCDVTTGLKIHVSIPNRIPKIVKEGEDDYYTDGEESSDDGKKYHVKSKSAKPSTNVKKSIRKKYCKVSSSSSSSLSSSSSGSGTDCLDAGSDSHLSDSSPSSKSSKKHVSGITLLSPKHKYKSGIKSTETQPSSTTPKCGHYPEESEDTVTDVSPLSTPDISPLQSFELGIANDQKVKIKKQENVSQEIYEDVEDLKNNSKYLKAAKKGEENLGLL

SEQ ID NO: 5389 - protein, 59 aa, Homo sapiens
PKTAFDSCSPTCSSPSFLHLRNVTSSAKSFPDLSKIITSSVCCGNLYRMVGKFQVSYLD

SEQ ID NO: 5390 - protein, 152 aa, Homo sapiens
KLLLFSLSILLFFGKQSLSPVMGGGGWERLHSTPWKWEYPYVVFGIFLYGKFVSPSHPNLFTSVWTHVYFVFWVTQYLFCCLSCPAWLLGVLPGWLLCPFDVPILLIFEHFLLSGTTRCSRFILDIPCPNPRIPRINPCSKEPWFLLLENHT

SEQ ID NO: 5391 - protein, 76 aa, Homo sapiens
  MISC_FEATURE (62): Xaa equals any of the naturally occurring L-amino acids
FLCSVVYFFFLLLLSPLSPLKAGNRLLENLRGKRILFTGGSRKLSERSIVLSPFPLSFQFGXWWSEEEKEILCMYV

SEQ ID NO: 5392 - protein, 50 aa, Homo sapiens
GDDFGRNPFGTTHPAMSVEKWNCNPQESHFIFLPFKWLIKGSASSTGFME

SEQ ID NO: 5393 - protein, 133 aa, Homo sapiens
NAHAGRYCSYQYFAFYNKGLFILMPFLQDFFVISVHMKMLTLNINTWRPCPVALPWLPAWSVFPCGFTCGPAVATSMVCVLVDSLQLSDASFCHNHLFPDTIVLILFQNCKIISSLKCKGCFCSVSVFFEIKL

SEQ ID NO: 5394 - protein, 74 aa, Homo sapiens
YLFSLLFMSLCRILGYSFSSRLSSLILPLAVFHYCLSCPLHFKLSFKYLPFPSFPFSSLPCPALPCPALPSPPL

SEQ ID NO: 5395 - protein, 71 aa, Homo sapiens
  MISC_FEATURE (42): Xaa equals any of the naturally occurring L-amino acids
  MISC_FEATURE (59): Xaa equals any of the naturally occurring L-amino acids
  MISC_FEATURE (70): Xaa equals any of the naturally occurring L-amino acids
IFDFFHQRFCFPAIDFAYLLLDLYLKVLSFWNVCFCTCFANXFLNSKFYCLAYNNLNFXYINPGEKEPKXT

SEQ ID NO: 5396 - protein, 74 aa, Homo sapiens
LANCAFKKKNRQTFEGQEGSCPVFQKSFFPAIRNVKPNLATKINEKMGFPLVLSLSCSWLCYVLSPRLYPDKMS

SEQ ID NO: 5397 - protein, 64 aa, Homo sapiens
GKRHIFSLTQLADTEVGRWQEKASTELIQTCRKLPLLLLSKMKGSGKRHLPFPALRILASLSLY

SEQ ID NO: 5398 - protein, 220 aa, Homo sapiens
  MISC_FEATURE (156): Xaa equals any of the naturally occurring L-amino acids
  MISC_FEATURE (169): Xaa equals any of the naturally occurring L-amino acids
  MISC_FEATURE (220): Xaa equals any of the naturally occurring L-amino acids
YRESWYACRYRSGIPGSTHASANSFVKFANIEEDTPSYHRRYDFFVSRFSAMCHSCHSDPEIRTEIRIAGIRGIQGVVRKTVNDELRATIWEPQHMDKIVPSLLFNMQKIEEVDSRIGPPSSPSATDKEENPAVLAENCFRELLGRATFGNMNNAXRPVFAHLDHHKLXDPNEFAVHCFKIIMYSIQAQYSHHVIQEILGHLDARKKDAPGFEQVLFRFX

SEQ ID NO: 5399 - protein, 65 aa, Homo sapiens
  MISC_FEATURE (18): Xaa equals any of the naturally occurring L-amino acids
  MISC_FEATURE (40): Xaa equals any of the naturally occurring L-amino acids
  MISC_FEATURE (42): Xaa equals any of the naturally occurring L-amino acids
  MISC_FEATURE (45): Xaa equals any of the naturally occurring L-amino acids
  MISC_FEATURE (54): Xaa equals any of the naturally occurring L-amino acids
  MISC_FEATURE (64): Xaa equals any of the naturally occurring L-amino acids
LCVRCSKKVAQSVMRKLXGYILSRMNRQDSLKNFLGNEKXAXCNXFMPIIPNTXGGLKGEDHFXP

SEQ ID NO: 5400 - protein, 121 aa, Homo sapiens
ICEILSLCPFPTSGPTPGPSPTFLLSSLAVVIIWGLYCTYPGCVCVGWGQPFCTELPGPLPPRPSASLPTHHLKGRELLFLPVLFCFLVLPPHPTPSLIYPPSLSPFLHSQPHFLFFWSVW

SEQ ID NO: 5401 - protein, 49 aa, Homo sapiens
  MISC_FEATURE (48): Xaa equals any of the naturally occurring L-amino acids
FTNWRLLILIHLRFKIFINCKQCNYLYFTVPSQTFHLRFCCKKHQVSXT

SEQ ID NO: 5402 - protein, 78 aa, Homo sapiens
  MISC_FEATURE (26): Xaa equals any of the naturally occurring L-amino acids
LLAAGISEEGLVLILKVLCSCPRPEXTHAETLPSPSKVQGLVTEYWVEHMTGSQLIPPSLPVKPQDSCFPGSHLRPLR

SEQ ID NO: 5403 - protein, 49 aa, Homo sapiens
  MISC_FEATURE (17): Xaa equals any of the naturally occurring L-amino acids
VLHHVLIHLILTEIVNXGIILILTLWIKKTKAQRVKASLPEIIDCKFER

SEQ ID NO: 5404 - protein, 29 aa, Homo sapiens
ILTPPLCDIQKLNSKCNKHLNIRIKTIKL

SEQ ID NO: 5405 - protein, 187 aa, Homo sapiens
  MISC_FEATURE (168): Xaa equals any of the naturally occurring L-amino acids
  MISC_FEATURE (180): Xaa equals any of the naturally occurring L-amino acids
AEAEFAMDSNHQSNYKLSKTEKKFLRKQIKAKHTLLRHEGIETVSYATQSLVVANGGLGNGVSRNQLLPVLEKCGLVDALLMPPNKPYSFARYRTTEESKRAYVTLNGKEVVDDLGQKITLYLNFVEKVQWKELRPQALPPGLMVVEEIISSEEEKMLLESVDWTEDXDHQNSQKILKTXKSKAFWL

SEQ ID NO: 5406 - protein, 75 aa, Homo sapiens
  MISC_FEATURE (58): Xaa equals any of the naturally occurring L-amino acids
FFPFGNSVNPAVGCCLSDYKRLGSCFCFKCLRLWSYTLVLLGQSEHCLLCKIISFRVXSCQIYWPLIQYSWVYCM

SEQ ID NO: 5407 - protein, 81 aa, Homo sapiens
  MISC_FEATURE (29): Xaa equals any of the naturally occurring L-amino acids
  MISC_FEATURE (35): Xaa equals any of the naturally occurring L-amino acids
  MISC_FEATURE (50): Xaa equals any of the naturally occurring L-amino acids
EDQEKKELKMEKATVRTVGYRRRNSGSTXDPPPGXMSFQEWNPSLVMVSXPVLPASTLPCPPRGVSESASGFLMMVVVVVV

SEQ ID NO: 5408 - protein, 83 aa, Homo sapiens
YFVHHNFCIYFFKYCIKISFSLIIEFFGLRFFVASFFFSFFPPLFFGCPLKFCPKAGTSLISSLAQPCWLVFSIYFSKIFVSV

SEQ ID NO: 5409 - protein, 227 aa, Homo sapiens
FILRRLTMNELNSVSDLDRCHLYLMVLTELINLHLKVGWKRGNPIWRVISLLKNASIQHLQEMDSGQEPTVGSQIQRVVSMAALAMVCEAIDQKPELQLDSLHAGPLESFLSSLQLNQTLQKPHAEEQSSYAHPLECSSVLEESSSSQGWGKIVAQYIHDQWVCLSFLLKKYHTLIPTTGSEILEPFLPAVQMPIRTLQSALEALTVLSSDQVLPVFHCLKVLVPNF

SEQ ID NO: 5410 - protein, 55 aa, Homo sapiens
QTCRFLLMWEKILIINDIKVIIFSYVYRYLYFFLNELLMTFVYFYLGLLLSHLFL

SEQ ID NO: 5411 - protein, 90 aa, Homo sapiens
  MISC_FEATURE (17): Xaa equals any of the naturally occurring L-amino acids
  MISC_FEATURE (78): Xaa equals any of the naturally occurring L-amino acids
  MISC_FEATURE (84): Xaa equals any of the naturally occurring L-amino acids
QARLPSANLSNWGGERXSSSEGRARCQICSSAPASAARRRAEGAPGPRPVTGRAGAPAVRGRRRGPCRCWGTRYRPCXPRPPPXGPLLAP

SEQ ID NO: 5412 - protein, 48 aa, Homo sapiens
IRHEELRKEGFDPAIVKDPLFYLDAQKGRYVPLDQEAYSRIQAGEEKL

SEQ ID NO: 5413 - protein, 100 aa, Homo sapiens
FGTRTKPIKPALKSAEVELKTGGNNSNQVSETDEKEDLLHENRLMQDEIARLRLEKDTIKNQNLEKKYLKDFEIVKRKHEDLQKALKREWGNISKNDSLL

SEQ ID NO: 5414 - protein, 38 aa, Homo sapiens
PHRTAFSCFSDTLMKVWRSGDIIDKIYQFPEKTLDLKT

SEQ ID NO: 5415 - protein, 62 aa, Homo sapiens
DHTGQRGLHSHLRLQDGRPAAGGTRGHRAPLPLVPNSCSPGDPLVLERPPPRWSTSFVPLVS

SEQ ID NO: 5416 - protein, 183 aa, Homo sapiens
  MISC_FEATURE (83): Xaa equals any of the naturally occurring L-amino acids
  MISC_FEATURE (125): Xaa equals any of the naturally occurring L-amino acids
  MISC_FEATURE (130): Xaa equals any of the naturally occurring L-amino acids
LPPQAFNHIAKLCSLKRLVLYRTKVEIEDYDVIASMIGAKCKKLRTLDLWRCKNITENGIAELASGCPLLEELDLGWCQLCRXHRVFTRLAHQLPNLQKLFLTANRSVCDTDIDELACNCTRLQXLDILXTRMVSPASLRKLLESCKDLSLLDVSFCSQIDNRAVLELNASFPKVFIKKSFTQ

SEQ ID NO: 5417 - protein, 89 aa, Homo sapiens
SSWVGGSLRQAATLEGEQGSAVSAASHARSDLSLGTPQEPEDSSGQCRWGVGGESGREALRAPSPTTNLALVVIFRQNFVVFFPFYDGF

SEQ ID NO: 5418 - protein, 322 aa, Homo sapiens
  MISC_FEATURE (3): Xaa equals any of the naturally occurring L-amino acids
HIXTHTGERPFKCPFEGCGRSFTTSNIRKVHVRTHTGERPYYCTEPGCGRAFASATNYKNHVRIHTGEKPYVCTVPGCDKRFTEYSSLYKHHVVHTHSKPYNCNHCGKTYKQISTLAMHKRTAHNDTEPIEEEQEAFFEPPPGQGEDVLKGSQITYVTGVEGDDVVSTQVATVTQSGLSQQVTLISQDGTQHVNISQADMQAIGNTITMVTQDGTPITVPAHDAVISSAGTHSVAMVTAEGTEGQQVAIVAQDLAAFHTASSEMGHQQHSHHLVTTETRPLTLVATSNGTQIAVQLGEQPSLEEAIRIASRIQQGETPGLDD

SEQ ID NO: 5419 - protein, 64 aa, Homo sapiens
LRLQEPATTHPCPPTLGLIFVTSPHYSELVRPLHFCFTQLTWFAHTDTNKHLSIPMSLLSSKNT

SEQ ID NO: 5420 - protein, 27 aa, Homo sapiens
STHASGSRSRAAALFFFFKRFCTGKKK

SEQ ID NO: 5421 - protein, 205 aa, Homo sapiens
AAAAAGDPGAMGRARDAILDALENLTAEELKKFKLKLLSVPLREGYGRIPRGALLSMDALDLTDKLVSFYLETYGAELTANVLRDMGLQEMAGQLQAATHQGSGAAPAGIQAPPQSAAKPGLHFIDQHRAALIARVTNVEWLLDALYGKVLTDEQYQAVRAEPTNPSKMRKLFSFTPAWNWTCKDLLLQALRESQSYLVEDLERS

SEQ ID NO: 5422 - protein, 158 aa, Homo sapiens
SCCRCRCARATGARDAILDALENLTAEELKKFKLVSFYLETYGAELTANVLRDMGLQEMAGQLQAATHQGSGAAPAGIQAPPQSAAKPGLHFIDQHRAALIARVTNVEWLLDALYGKVLTDEQYQAVRPSPPTQARCGSSSVSHQPGTGPARTCSSRP

SEQ ID NO: 5423 - protein, 40 aa, Homo sapiens
PEFPGRPTRPKKKQMLKSYWQSKLKLAAIFYIIISANPIF

SEQ ID NO: 5424 - protein, 69 aa, Homo sapiens
  MISC_FEATURE (67): Xaa equals any of the naturally occurring L-amino acids
SCLMFFNMPSYKYFIQYVVFVNLTNDIKHKLQCRQKKKKKKKKKKKKKKKKKKKKKKKKKKKKKKGXPF

SEQ ID NO: 5425 - protein, 186 aa, Homo sapiens
AHASDLRAEEIDPVYFDLHPGQGHTKPEYYYPNFLPSPFSSWDLRDMALLLNAENKTEAVPRVGGLLGKYIDRLIQLEWLQVQTVQCEKAKGGKARPPTAPGTSGALKSPGRSKLIASALSKPLPHQEGASKSGPSRKKAFHHEEIHPSHYAFETSPRPIDVLGGTRFCSQRQTLEMRTEEKKKKK

SEQ ID NO: 5426 - protein, 39 aa, Homo sapiens
CYSCQTNSAKIFKVTRGKRMTNRSASEYIFQNVGKKLLN

SEQ ID NO: 5427 - protein, 54 aa, Homo sapiens
GISSGRTRRESCELYCIMYIPDLILYRTFYSDINLLHKHFSNDTKITDKIYYIQ

SEQ ID NO: 5428 - protein, 91 aa, Homo sapiens
VPPTPGQHQDGSSLGAFVSPPCLCSECAPHFSATLTLSLIWSCLTSLLYALLLSISSALMPAGVMPEIISEKARQFCVCVCAHRGVLVVLI

SEQ ID NO: 5429 - protein, 36 aa, Homo sapiens
VKNGKQKVTAVMNILVQILVLNLTPESKILGSLFPV

SEQ ID NO: 5430 - protein, 96 aa, Homo sapiens
  MISC_FEATURE (52): Xaa equals any of the naturally occurring L-amino acids
  MISC_FEATURE (72): Xaa equals any of the naturally occurring L-amino acids
  MISC_FEATURE (96): Xaa equals any of the naturally occurring L-amino acids
KSKENRNQFEGLQGGLLAQLSINTYGVIAVFSRGVLLRSGFLGLHAAMDLDXPSVWGSLKQRTRPLLINLSXKKVKKNPSKPPDLRARHHLDRRLX

SEQ ID NO: 5431 - protein, 36 aa, Homo sapiens
  MISC_FEATURE (6): Xaa equals any of the naturally occurring L-amino acids
  MISC_FEATURE (12): Xaa equals any of the naturally occurring L-amino acids
QNISSXLIGPTXVFRVMKLRFFCVWLHHEILRRPKP

SEQ ID NO: 5432 - protein, 65 aa, Homo sapiens
  MISC_FEATURE (1): Xaa equals any of the naturally occurring L-amino acids
  MISC_FEATURE (57): Xaa equals any of the naturally occurring L-amino acids
XKCKYKTFQIKIEYAHCSKAKLLPYYIYFTSLIFSPSKMHWYSGLESESFAIKLTYXGFNPLKVQ

SEQ ID NO: 5433 - protein, 67 aa, Homo sapiens
GTSRPSHYHVLWDDNCFTADELQLLTYQLCHTYVRCTRSVSIPAPAYYAHLVAFRARYHLVDKEHDR

SEQ ID NO: 5434 - protein, 96 aa, Homo sapiens
  MISC_FEATURE (83): Xaa equals any of the naturally occurring L-amino acids
  MISC_FEATURE (85): Xaa equals any of the naturally occurring L-amino acids
PIGWKTRPIEELGNVSFCYFCYSSLGFIVSFFIFKILCLKVFLLNYEVDMHVYIYVKYLLCKVFFVYSLKRSLYLNKSEGQQXKXKKKKKKKKKKK

SEQ ID NO: 5435 - protein, 25 aa, Homo sapiens
  MISC_FEATURE (9): Xaa equals any of the naturally occurring L-amino acids
RTPVVPATXEAKVGGSLEPGRQRLQ

SEQ ID NO: 5436 - protein, 82 aa, Homo sapiens
  MISC_FEATURE (51): Xaa equals any of the naturally occurring L-amino acids
  MISC_FEATURE (60): Xaa equals any of the naturally occurring L-amino acids
  MISC_FEATURE (71): Xaa equals any of the naturally occurring L-amino acids
  MISC_FEATURE (74): Xaa equals any of the naturally occurring L-amino acids
EQSRQGIPNRINSRFLIQKPCKPRKAMGDILQNAEIKTVQQTFPHPQQKSXNKGKSCCMXNLNKIGFPAGXFGXNFPPLNVP

SEQ ID NO: 5437 - protein, 168 aa, Homo sapiens
  MISC_FEATURE (5): Xaa equals any of the naturally occurring L-amino acids
RGLAXKHPGRVGQAALYGCGCWAENTGAHNPYSTAVSTSGCGEHLVRTILARECSHALQAEDAHQALLETMQNKFISSPFLASEDGVLGGVIVLRSCRCSAEPDSSQNKQTLLVEFLWSHTTESMCVGYMSAQDGKAKTHISRLPPGAVAGQSVAIEGGVCRLESPVN

SEQ ID NO: 5438 - protein, 81 aa, Homo sapiens
  MISC_FEATURE (72): Xaa equals any of the naturally occurring L-amino acids
FNFEFKPKFIGRLPFDLPLPPHLVLSCIYTPGPCGGAAGGSCAPEMRLERELASLLPSSVSKEPRPSGPASXKRWWNPCAG

SEQ ID NO: 5439 - protein, 56 aa, Homo sapiens
  MISC_FEATURE (40): Xaa equals any of the naturally occurring L-amino acids
YMLGEKIYENFTIIFCLDNRSEGFYPTWKVKGLGLTDFLXFSLDFMKSMLSFSQKH

SEQ ID NO: 5440 - protein, 62 aa, Homo sapiens
  MISC_FEATURE (42): Xaa equals any of the naturally occurring L-amino acids
  MISC_FEATURE (57): Xaa equals any of the naturally occurring L-amino acids
QCREVHLEKRRGEGLGVALVESGWGSLLPTAVIANLLHGGPXERSGALSIGDPLTGXKGDQP

SEQ ID NO: 5441 - protein, 133 aa, Homo sapiens
  MISC_FEATURE (36): Xaa equals any of the naturally occurring L-amino acids
  MISC_FEATURE (129): Xaa equals any of the naturally occurring L-amino acids
  MISC_FEATURE (130): Xaa equals any of the naturally occurring L-amino acids
  MISC_FEATURE (132): Xaa equals any of the naturally occurring L-amino acids
FLQHWAIRNNFLKITVLYKYLKFKYRKYLKQKALLXGHDTSALWQCRLLRTQPCSPSVCAPSLSSFAVITHTGLPVWSLEKPGFQSTVEHRILLLVWMFNELYFKYQRLLNKDNVCFSKKKKKKKKKKXXKXK

SEQ ID NO: 5442 - protein, 64 aa, Homo sapiens
VKGEWSQYPQKCSKRSNSPLKMSLFLSMLYPGVLVEGWGNQKSRFTFNIFLNYIHFLKRNKKCK

SEQ ID NO: 5443 - protein, 79 aa, Homo sapiens
  MISC_FEATURE (12): Xaa equals any of the naturally occurring L-amino acids
HIRNKILGYFIXLAYFFHNLRITVFVEEIRQANKVAKEAANRWTDNIFAIKSWAKRKFGFEENKIDRTFGIPEDFDYID

SEQ ID NO: 5444 - protein, 183 aa, Homo sapiens
GLLVGVGAAAVMPGIVELPTLEELKVDEVKISSAVLKAAAHHYGAQCDKPNKEFMLCRWEEKDPRRCLEEGKLVNKCALDFFRQIKRHCAEPFTEYWTCIDYTGQQLFRHCRKQQAKFDECVLDKLGWVRPDLGELSKVTKVKTDRPLPENPYHSRPRPDPSPEIEGDLQPATHGSRFYFWTK

SEQ ID NO: 5445 - protein, 65 aa, Homo sapiens
GTGCCAEGRPESQSIFFTGSAGTGKSYLLKRILGSLPPTGTVATASTGVAACHIGGTTLHAFAGK

SEQ ID NO: 5446 - protein, 48 aa, Homo sapiens
  MISC_FEATURE (2): Xaa equals any of the naturally occurring L-amino acids
  MISC_FEATURE (18): Xaa equals any of the naturally occurring L-amino acids
  MISC_FEATURE (34): Xaa equals any of the naturally occurring L-amino acids
  MISC_FEATURE (42): Xaa equals any of the naturally occurring L-amino acids
  MISC_FEATURE (44): Xaa equals any of the naturally occurring L-amino acids
HXTLTKGNKSWSSTAVQXALELVDPPGCRNSARXRELVSSFXFXFFHG

SEQ ID NO: 5447 - protein, 62 aa, Homo sapiens
  MISC_FEATURE (46): Xaa equals any of the naturally occurring L-amino acids
ELWSPCLVLFKTLCYTGVDPGLKVIQFWGLSLRKRILKYLTFANIXKIYCHINMLLGPLLGP

SEQ ID NO: 5448 - protein, 163 aa, Homo sapiens
SFFFFSRSHVSLLLPTATYFIPHGSRHSSTLTNFLTPSSFLEIISSPCAETVIALSAEMAVSSQQGEIMESRIFFQGSHAHFPTCMNVDTAATVLAVNVNLASNHCSQGNVPIRRRLSGTLILTGRWDILRDPEAGCHLLNFPEGCLGICFLFILELFFLFMG

SEQ ID NO: 5449 - protein, 68 aa, Homo sapiens
  MISC_FEATURE (62): Xaa equals any of the naturally occurring L-amino acids
  MISC_FEATURE (63): Xaa equals any of the naturally occurring L-amino acids
  MISC_FEATURE (66): Xaa equals any of the naturally occurring L-amino acids
QGILYFHYNQIIEITCVKGLQEYIQFLNILIYLLSDNLILLNYHLPLSYFIINSVQFPPKKXXYLXNI

SEQ ID NO: 5450 - protein, 170 aa, Homo sapiens
  MISC_FEATURE (7): Xaa equals any of the naturally occurring L-amino acids
  MISC_FEATURE (11): Xaa equals any of the naturally occurring L-amino acids
  MISC_FEATURE (13): Xaa equals any of the naturally occurring L-amino acids
  MISC_FEATURE (19): Xaa equals any of the naturally occurring L-amino acids
  MISC_FEATURE (21): Xaa equals any of the naturally occurring L-amino acids
  MISC_FEATURE (23): Xaa equals any of the naturally occurring L-amino acids
  MISC_FEATURE (163): Xaa equals any of the naturally occurring L-amino acids
VIPWRTXSANXEXDLHYLXLXTXTWSGRITINGESPKHRSWHTLTPIADDKLFLCGGLSADNIPLSDGWIHNVTTNCWKQLTHLPKTRPRLWHTACLGKENEIMVFGGSKDDLLALDTGHCNDLLIFQTQPYSLLRSCLDCIGKNSIMLESQISLLPPKLLQXVLKKKKK

SEQ ID NO: 5451 - protein, 120 aa, Homo sapiens
  MISC_FEATURE (111): Xaa equals any of the naturally occurring L-amino acids
  MISC_FEATURE (112): Xaa equals any of the naturally occurring L-amino acids
IGSVPAVPNGQCIGKHKKCDHNVDCSDKSDELDCYPTEEPAPQATNTVGSVIGVIVTIFVSGTVYFICQRMLCPRMKGDGETMTNDYVVHGPASVPLGYVPHPSSLSGSLXXMSRGKSMI

SEQ ID NO: 5452 - protein, 55 aa, Homo sapiens
NMYKNGYKMVEATRSVTGIIHINTTKIQFNAKLNDIILHQNLFHTKAHASRVSIR

SEQ ID NO: 5453 - protein, 125 aa, Homo sapiens
  MISC_FEATURE (73): Xaa equals any of the naturally occurring L-amino acids
  MISC_FEATURE (84): Xaa equals any of the naturally occurring L-amino acids
  MISC_FEATURE (105): Xaa equals any of the naturally occurring L-amino acids
LLKRSHFNCFCYSIYCHSKYILTQNKLNNLCMFVCVYMHTLFYIKILRLYSHCALWNKAIYINVLYVYVLYIXKTFHLIYICVXEYMCACLADICIKYKHSVVIXAICEIVNFKITSGHRLVVII

SEQ ID NO: 5454 - protein, 287 aa, Homo sapiens
  MISC_FEATURE (114): Xaa equals any of the naturally occurring L-amino acids
GAMAPKPGAEWSTALSHLVLGVVSLHAAVSTAEASRGAAAGFLLQVLAATTTLAPGLSTHEDCLAGAWVATVIGLPLLAFDFHWVNGDRSSANLLLGGGMVLAVAGGHLGPEAXCGWSGNAVGGRSDHPHCSCLHGQHLWDVGGGDAGCGRPPEPAGGGQAAAATEGGCLSLGLGCRQLGLLPGPAYTAPPVGVTVGYSQAGFLPCRTLSLPPACSWRLLPRGRLFCLLKWVCCTLTGQGQSLGAVLWPRVGTCLDQNERDRVPDTFGGPDSGLDTVVDPEKRPSLQ

SEQ ID NO: 5455 - protein, 57 aa, Homo sapiens
SHACPLTFTRNSEKQSTYFATQWSSSLNTFIQRSTNYDPPVKSYLALVFVNKVLLEH

SEQ ID NO: 5456 - protein, 100 aa, Homo sapiens
WCSRAVPPPSLLPASTSPPRSVPPPSFSLSLKSVSFGSPRASLPRPSWMRPPSPKPACFAVSPGSWKLAGARGWRGHGGVGEGSLPFLVRSIIVNGCTLF

SEQ ID NO: 5457 - protein, 118 aa, Homo sapiens
  MISC_FEATURE (6): Xaa equals any of the naturally occurring L-amino acids
RSWGSXWKQEDPIQQRPLRLVLHFLRELSVGSHHPAHWLPPKPPPLTSANLLFGDPLSDPLCLPSWSSSWRISGQRGGQRSFPIPPQRYFLLGPHTLTPSSEMNTFLLLLLRQSETPS

SEQ ID NO: 5458 - protein, 55 aa, Homo sapiens
LLVSDLTLLSKYSIIARFTEFRSLKVYILFPYVDKLVSLLLEYHKVFVKITQVIK

SEQ ID NO: 5459 - protein, 98 aa, Homo sapiens
  MISC_FEATURE (19): Xaa equals any of the naturally occurring L-amino acids
HAFFLKLFRVVEIAACHSXHTSAAKTQGGHVYMWGQCRGQSVILPHLTHFSCTDDVFACFATPAVSWRLLSVGKKVQGHFTQGGMVLPTDQFSCVFAG

SEQ ID NO: 5460 - protein, 186 aa, Homo sapiens
  MISC_FEATURE (3): Xaa equals any of the naturally occurring L-amino acids
GGXDQGQEPGPLEEQQRLAHLEDKLRLLAQARDEAQGACLQQKQVVAEAQTRVSQLGLQVEGLRRRLEELQQELSLKDQERVAEVSRVRVELQEQNGRLQAELAAQEALREKAAALERQLKVMASDHREALLDRESENASLREKLRLREAEIARIRDEEAQRASFLQNAVLAYVQASPVRTLSPPK

SEQ ID NO: 5461 - protein, 40 aa, Homo sapiens
PMANPILKLVNSDQSYFTYPTQSGPKQIAGSASKPTFLPK

SEQ ID NO: 5462 - protein, 69 aa, Homo sapiens
LSRKLLLLRFKNENRCEFSKILKNNSVKNSGAVKESWMELEVTILSDISQKQTNIACSQLFAGSKSQNN

SEQ ID NO: 5463 - protein, 129 aa, Homo sapiens
  MISC_FEATURE (115): Xaa equals any of the naturally occurring L-amino acids
  MISC_FEATURE (117): Xaa equals any of the naturally occurring L-amino acids
  MISC_FEATURE (122): Xaa equals any of the naturally occurring L-amino acids
  MISC_FEATURE (123): Xaa equals any of the naturally occurring L-amino acids
  MISC_FEATURE (127): Xaa equals any of the naturally occurring L-amino acids
LERGWCESCLTTAPSPPCAAEGTPAAHRFQEALSDFWLALEQLRGHAAIDYTQLGLRFKLQPGRCYTMWRRHSASWGSGQRRQQPKGGHVQVAGGSLNGLDSALDQVQRRGSLPXGXSPGRXXPAPXWT

SEQ ID NO: 5464 - protein, 84 aa, Homo sapiens
WIPRAAGIRHESGDKLKLDQTHLETVIPAPGKRILVLNGGYRGNEGTLESINEKTFSATIVIETGPLKGRRVEGIQYEDISKLA

SEQ ID NO: 5465 - protein, 58 aa, Homo sapiens
IFLLFSTFPQIHVSEVLSFGHHYLSTLRNMPIDEVNILGIQRIYGNVDKDIYQDKALE

SEQ ID NO: 5466 - protein, 46 aa, Homo sapiens
  MISC_FEATURE (23): Xaa equals any of the naturally occurring L-amino acids
  MISC_FEATURE (26): Xaa equals any of the naturally occurring L-amino acids
ETTKQTQKKEHNNRDKIKFRQQXTEXILKTRICSLRIFFIIKMIFG

SEQ ID NO: 5467 - protein, 64 aa, Homo sapiens
NPFASGQFQTRILACPASHGMPLPYCQCDLSETAYLILSFPGAASHLPQDLNFKLYSSPHSPQQ

SEQ ID NO: 5468 - protein, 73 aa, Homo sapiens
  MISC_FEATURE (26): Xaa equals any of the naturally occurring L-amino acids
  MISC_FEATURE (55): Xaa equals any of the naturally occurring L-amino acids
VLVSLPVPTQIASQNFDPATVSVATXHKGAEPSRGTAWGPVAKRLQQELMTLMMXGDKRISATLKALSNGHHS

SEQ ID NO: 5469 - protein, 93 aa, Homo sapiens
PKVLGLQAEPPRPALLLLLRFENRCLNAPDSALLTQRFPHLIYSVPAQSPFSLMPRAGFSLPAPRFWSPPSVLGPSCPLSGFRPSQHSLASLP

SEQ ID NO: 5470 - protein, 50 aa, Homo sapiens
GRPFGNLCLNSNRRENVQAMGLLPISLCFAIPWDKGTTSGSQSPNQYHRV

SEQ ID NO: 5471 - protein, 67 aa, Homo sapiens
EPSSVHKKPIESRSHFIRWQVSWASLLASPKRWCCQDVLEVIMGHTEALSLHRLKCHQNWPLPNIPH

SEQ ID NO: 5472 - protein, 62 aa, Homo sapiens
EREILMAPMAARITSLKFRACVNRFCFLVSERFSYSTVLICFSKPSDLCIFNRPQNNVKYMA

SEQ ID NO: 5473 - protein, 60 aa, Homo sapiens
KYQIILWNVKAFLLKPSICFIVISVANMDFIFKMMFYIIFPYKLFEKQFNNSMIVVAPLN

SEQ ID NO: 5474 - protein, 44 aa, Homo sapiens
WQSNFFCLFPRESWEYPELGALMILFQLWCLKKNYKSILNGLSS

SEQ ID NO: 5475 - protein, 20 aa, Homo sapiens
ECKLVQPSWKTGWQFLKDLC

SEQ ID NO: 5476 - protein, 58 aa, Homo sapiens
QKIELSFRVSKKVLYSCCTPGSWQGGDFCPRECSFLCIIAKQFCSCILKHHWMNFFPL

SEQ ID NO: 5477 - protein, 83 aa, Homo sapiens
  MISC_FEATURE (7): Xaa equals any of the naturally occurring L-amino acids
  MISC_FEATURE (37): Xaa equals any of the naturally occurring L-amino acids
  MISC_FEATURE (45): Xaa equals any of the naturally occurring L-amino acids
  MISC_FEATURE (47): Xaa equals any of the naturally occurring L-amino acids
  MISC_FEATURE (83): Xaa equals any of the naturally occurring L-amino acids
LLIETCXVEKLFLSLLAIQVSSFMKWLFMSFAHFYIXLFFFFPAXLXELYILSILIIYRKLFGCHYLLLVNVFCLWISFIIYX

SEQ ID NO: 5478 - protein, 79 aa, Homo sapiens
  MISC_FEATURE (21): Xaa equals any of the naturally occurring L-amino acids
QALTLCKKGGRGHSWAGGVGXQDGCPSLPIFSWLWDQRLVLGIWTWRPRAIGEGLKPVLSAACCEWPSRVMTELFWGRR

SEQ ID NO: 5479 - protein, 245 aa, Homo sapiens
  MISC_FEATURE (118): Xaa equals any of the naturally occurring L-amino acids
  MISC_FEATURE (170): Xaa equals any of the naturally occurring L-amino acids
  MISC_FEATURE (171): Xaa equals any of the naturally occurring L-amino acids
  MISC_FEATURE (172): Xaa equals any of the naturally occurring L-amino acids
  MISC_FEATURE (173): Xaa equals any of the naturally occurring L-amino acids
  MISC_FEATURE (177): Xaa equals any of the naturally occurring L-amino acids
ARGAGAAGSRCVSGEGAPRLGRRRRQRLEERERRFPCPGPREGRPTAAMEQLSDEEIDHGAEEDSDKEDQDLDKMFGAWLGELDKLTQSLDSDKPMEPVKRSPLRQETNMANFSYRFXIYNLNEALNQGETVDLDALMADLCSIEQELSSIGSGNSKRQITETKATQKLXXXXHTLXHGTLKGLSSSSNRIAKPSHASYSLDDVTAQLEQASLSMDEAAQQSVLEDTKPLVTNQHRRTAVSRHSE

SEQ ID NO: 5480 - protein, 29 aa, Homo sapiens
AFVDCEHPSYIGLYRMALSKNYSCITVVF

SEQ ID NO: 5481 - protein, 81 aa, Homo sapiens
AFPLPSPGLTPHPIPQKVRRAGCVDGIPENEPVESIWPWHVNSSLFPAVITTLFFPQGLNCTVKNSKSSFSVLLLVAFLIK

SEQ ID NO: 5482 - protein, 53 aa, Homo sapiens
SCSFGVCEQTQDIIIKHHPSIKGLFYNMCCEINLSGKVWCNELFHSMVIDAVK

SEQ ID NO: 5483 - protein, 105 aa, Homo sapiens
YACRYRSGIPGSTHASVFFFFFFFFFFFCFFFFFFVVHNHLFYLKTCLHCIEHQHRCDQETHSPVPAALGPVYDLGWTVIFHSEGGKDRKEKMAIIPTPVQESEQ

SEQ ID NO: 5484 - protein, 122 aa, Homo sapiens
  MISC_FEATURE (25): Xaa equals any of the naturally occurring L-amino acids
  MISC_FEATURE (34): Xaa equals any of the naturally occurring L-amino acids
  MISC_FEATURE (50): Xaa equals any of the naturally occurring L-amino acids
  MISC_FEATURE (51): Xaa equals any of the naturally occurring L-amino acids
GFIIHCQMLVPIKQCCLPTPTFCVXGKFWKSRGXHAKRLSTGLFLVSALXXLCEEVAIYGFWPFSVNMHEQPISHHYYDNVLPFSGFHAMPEEFLQLWYLHKIGALRMQLDPCEDTSLQPTS

SEQ ID NO: 5485 - protein, 237 aa, Homo sapiens
  MISC_FEATURE (109): Xaa equals any of the naturally occurring L-amino acids
  MISC_FEATURE (237): Xaa equals any of the naturally occurring L-amino acids
YQSIALYFEGEKRYLQAGKFFLLCGQYSRALKHFLKCPSSEDNVAIEMAIETVGQAKDELLTNQLIDHLLGENDGMPKDAKYLFRLYMALKQYREAAQTAIIIAREEQXAGNYRNAHDVLFSMYAELKSQKIKIPSEMATNLMILHSYILVKIHVKNGDHMKGARMLIRVANNISKFPSHIVPILTSTVIECHRAGLKNSAFSFAAMLMRPEYRSKIDAKYKKKIEGMVQETRYILX

SEQ ID NO: 5486 - protein, 142 aa, Homo sapiens
  MISC_FEATURE (19): Xaa equals any of the naturally occurring L-amino acids
GGAGARGGGALWVTEGVKXPGPVSGQCRKSQPHACGEIPCRAPPTMDTSGPLRSSKAVSSFPLQQRGVPSSVKQPFLFLESYKWRPKSVPMLRQGPGCSFLSGNRLELFLWDMPPRPALKGCSSLTTWNQTPPSFVYKGNKE

SEQ ID NO: 5487 - protein, 41 aa, Homo sapiens
GRKLPEEEGGKEIKNTLKVCQKKELYFLKHSRKMMSFQLLI

SEQ ID NO: 5488 - protein, 64 aa, Homo sapiens
KSIVVLVLLSWIIVQKEVQPPDNHIFTVMNGKTKCRAQLTQRKKGSKDKLWHNLAAKFLPSTDF

SEQ ID NO: 5489 - protein, 48 aa, Homo sapiens
CIILRGFFRAVLTELSINLHSSGRLLKLAGHNEIGKSRVLKSIAWPSA

SEQ ID NO: 5490 - protein, 68 aa, Homo sapiens
KLLCPHLREEGSSNNTTMCKAGSEILLSPLPSCNPSLPHLSCMCITMLFCFLMKMRLCILFDNLFQIK

SEQ ID NO: 5491 - protein, 101 aa, Homo sapiens
PLSTPHPLRRGPRSYPTVHLPRGCSELAMAATAATAADPRSGSLRRGVAALPRPPRQPEQLQSTGLGSETFKVKQAEWGDRTISPPPGAPGLSLGGPPLAP

SEQ ID NO: 5492 - protein, 87 aa, Homo sapiens
RIHEKYEIWFHPVRHFNREDQNVTWQLGNNLTSLAVGLNFLIIDPGIFQPETQLSGRQTNCTTPTISWTLKFCLLQSIVSFKAPVLA

SEQ ID NO: 5493 - protein, 59 aa, Homo sapiens
  MISC_FEATURE (5): Xaa equals any of the naturally occurring L-amino acids
TPIMXDEFVMRDNLEVVFTHYATIKGSTVERILTHSVTNGTHRQHEFAPYMTEVIQGFL

SEQ ID NO: 5494 - protein, 240 aa, Homo sapiens
VTTKFVRTSTNKVKCPVFVVRHSMENLFEKNKIRASISYKWTPEGRRLVTGASSGEFTLWNGLTFNFETILQAHDSPVRAMTWSHNDMWMLTADHGGYVKYWQSNMNNVKMFQAHKEAIREARFIHNIPFSVVPIVMVKLFSKCILGAEMHGLCQFLGNFLHPINTIFFFVFTHSPFCWHLSEVVLSRYQPLQYVRDVLSAAFCTGFLFSFMINNVYTLFLFIIYCVRQEYFIPNKEFSL

SEQ ID NO: 5495 - protein, 47 aa, Homo sapiens
NEAFIYVFRCHCSLSELAVHISLPLVLSTDFFLKKRGTVYHSSTVLL

SEQ ID NO: 5496 - protein, 72 aa, Homo sapiens
YEAKTKSWKSEQVQWFGRGNEEQRRCQPLLQTLWYHWFGRKNNHHLRGPVGKPCPHGKAIFFRLHFSWYYVY

SEQ ID NO: 5497 - protein, 75 aa, Homo sapiens
LTCYVTVIYLSISNPKACQKAFFRENHFTFVVKLLIATLKNIHVCIHRNIFSQYLYDSLTVIVLSELLCASDKNK

SEQ ID NO: 5498 - protein, 110 aa, Homo sapiens
  MISC_FEATURE (68): Xaa equals any of the naturally occurring L-amino acids
  MISC_FEATURE (102): Xaa equals any of the naturally occurring L-amino acids
  MISC_FEATURE (108): Xaa equals any of the naturally occurring L-amino acids
GPRRTLAALPLSRVSAGSGSASPGQLRESLARIPASTLFLAAKVTVPFAPALSDPPRIPRHRETRKGXGSGGGPGRIALQAALRGPAPATALTSERRNWGEXFKSLRXRC

SEQ ID NO: 5499 - protein, 122 aa, Homo sapiens
  MISC_FEATURE (41): Xaa equals any of the naturally occurring L-amino acids
  MISC_FEATURE (47): Xaa equals any of the naturally occurring L-amino acids
  MISC_FEATURE (74): Xaa equals any of the naturally occurring L-amino acids
SGRGSPQWTRLPHPAEVGGGHEEMGCRLLSELPSTNGVGVXDLPRHXFFTFGKMEGDGGGIPCSLCCADTLEKXLPSVEQNPLWRNAAVLDLEAEGVSILGICLPLPIWMPHLAVSLMVILF

SEQ ID NO: 5500 - protein, 97 aa, Homo sapiens
  MISC_FEATURE (6): Xaa equals any of the naturally occurring L-amino acids
RLFSLXGECHKLLFCISTACQALSASSNLALTATGSRCPIFQSKDRGVKFKYRFSDINLCDDLIEAGFSSITVLVPSLLYGNENKETYFLACLKKKK

SEQ ID NO: 5501 - protein, 294 aa, Homo sapiens
TYTIHADGTGSNMNINDGGRRRFEDNEHTLRIYPGAISEGTIYCPIPARKNSTAAEVIESLINKLHLDKTKCYVLAEVKEFGGEEWILNPTDCPVQRMMLWPRMALENRLSGEDYRFLLREKNLDGSIHYGSLQSWLRVTEERRRMMERGFLPQPQQKDFDDLCSLPDLNEKTLLENLRNRFKHEKIYTYVGSILIVINPFKFLPIYNPKYVKMYDNHQLGKLEPHIYAVADVAYHAMLQRKKNQCIVISGESGSGKTQSTNFLIHHLTALSQKGFASGVEQIILGAGPVLEAV

SEQ ID NO: 5502 - protein, 85 aa, Homo sapiens
PYLRRRDTQDKLQVVSRFTFYFEDPLLPQVPDLENEPPLSGLASPQPRHRLAQGSSSWLSWNLHFLTTRKRSPELTKNNILLTWE

SEQ ID NO: 5503 - protein, 274 aa, Homo sapiens
  MISC_FEATURE (51): Xaa equals any of the naturally occurring L-amino acids
  MISC_FEATURE (127): Xaa equals any of the naturally occurring L-amino acids
  MISC_FEATURE (130): Xaa equals any of the naturally occurring L-amino acids
  MISC_FEATURE (135): Xaa equals any of the naturally occurring L-amino acids
  MISC_FEATURE (188): Xaa equals any of the naturally occurring L-amino acids
  MISC_FEATURE (231): Xaa equals any of the naturally occurring L-amino acids
  MISC_FEATURE (245): Xaa equals any of the naturally occurring L-amino acids
  MISC_FEATURE (271): Xaa equals any of the naturally occurring L-amino acids
HYRESWYACRYRSGIPGSTHASGPTSPPARMAPPGPASALSTSAEPLSRSXFRKFLLMLCSLLTSLYVFYCLAERCQTLSGPVVGLSGGGEEAGAPGGGVLAGPRELAVWPAAAQRKRLLQLPQWRXRRXPAPRXDGEEAAWEEESPGLSGVRAAPGPEAPWPRPRRGPWRCSWTKAASSCRSIIIGXKKGGTRALLEFLRVHPDVRAVGAEPHFFDRSYDKGLAWYRDLXPRTLEGQITMEKKXSYSSSGKPPRASWACSKDNKLIRWLXGNR

SEQ ID NO: 5504 - protein, 66 aa, Homo sapiens
GVGHSELTSMFNTITRDTETANQDKKLTTSRCRQLFPRCQNKTSYHDEAPTPLNLPSSCLPLSLAG

SEQ ID NO: 5505 - protein, 117 aa, Homo sapiens
LDRIFSGGSLVDFEGKTFWVYHVLILETGSDESSPVVPLSNSIKVGISKEHLIQGAGADFIDSRETCFSAYSSLPSGASLLTITASLRCRWVFLKQETVSPLLPQLLGVGISDTGDG

SEQ ID NO: 5506 - protein, 171 aa, Homo sapiens
ITMDWQSIKIQELMSDDQREAGRIPRTIECELVHDLVDSCVPGDTVTITGIVKVSNAEEGSRNKNDKCMFLLYIEANSISNSKGQKTKSSEDGCKHGMLMEFSLKDLYAIQEIQAEENLFKLIVNSLCPVIFGHELVKAGLALALFGGSQKYADDKNRIPIRGDPHILVGF

SEQ ID NO: 5507 - protein, 24 aa, Homo sapiens
SVKCRLSSFIMNVIVRNTLTFSNF

SEQ ID NO: 5508 - protein, 74 aa, Homo sapiens
GFSQRRVCSGRCCGQGSRQRPLSSRLAPALRGHGGAEATRAGPEPGGPWLRFSCTEKLNPARSDVHFMVPTPLG

SEQ ID NO: 5509 - protein, 153 aa, Homo sapiens
  MISC_FEATURE (123): Xaa equals any of the naturally occurring L-amino acids
  MISC_FEATURE (132): Xaa equals any of the naturally occurring L-amino acids
  MISC_FEATURE (134): Xaa equals any of the naturally occurring L-amino acids
  MISC_FEATURE (141): Xaa equals any of the naturally occurring L-amino acids
TCYATPCLVWMGRWPPAVTLTCRPTATVPWSPGTTSAETTALARSLCSAGTQPAPSTTSLPSWRSAAPLAWPLQLSGQWWSAGACFLDLPSLALCWPGDSGDASGQKPGAEQTLGCSGWAQAXFRLAATVRXPXRPQAPSXRAFLPLHFPTIE

SEQ ID NO: 5510 - protein, 142 aa, Homo sapiens
WTWSTPASARSSGTTTWPPAPAAALHLRLRGVQRRRILTMEPVLGGTPYLDKFVVSSSRQGQGSGQMLWECLRRDLQTLFWRSRVTNPINPWYFKHSDGSFSNKQWIFFWFGLADIRDSYELVNHAKGLPDSFHKPASDPGS

SEQ ID NO: 5511 - protein, 100 aa, Homo sapiens
  MISC_FEATURE (23): Xaa equals any of the naturally occurring L-amino acids
  MISC_FEATURE (29): Xaa equals any of the naturally occurring L-amino acids
QRENRPCLKERFLVYASGLWAGXATIPYXRQSSAPAAKLACFTGKLLEEWLLMRFQNEVLANTAHGHPGFSQWLPFLLASLNRGESLTSLLLSKPFTLNG

SEQ ID NO: 5512 - protein, 165 aa, Homo sapiens
KWDEPWYNQKTEHQRNSSKILRFISDFLAFLVLYNFIIPISLYVTVEMQKFLGSFFIGWDLDLYHEESDQKAQVNTSDLNEELGQVEYVFTDKTGTLTENEMQFRECSINGMKYQEINGRLVPEDQHQTLQKETYLILVVYPILTTYPILQPVPLSEPVLKMKLN

SEQ ID NO: 5513 - protein, 54 aa, Homo sapiens
RLPSEVSDHSLLLKQLLLFLYSIEHPGIDIILSISISPLLVYLIINPVSRAVFI

SEQ ID NO: 5514 - protein, 220 aa, Homo sapiens
  MISC_FEATURE (57): Xaa equals any of the naturally occurring L-amino acids
  MISC_FEATURE (175): Xaa equals any of the naturally occurring L-amino acids
  MISC_FEATURE (178): Xaa equals any of the naturally occurring L-amino acids
HEGKCFCRKSTLTTHLRTHTGEKPYECNECGKFFSRLSYLTVHYRTHSGEKPYECNXCGKTFYLNSALMRHQRVHTGEKPYECNECGKLFSQLSYLTIHHRTHSGVKPYECSECGKTFYQNSALCRHRRIHKGEKPYECYICGKFFSQMSYLTIHHRIHSGEKPYECSECGKTFXQNXALNRHQRTHTGEKAYECYECGKCFSQMSYLTIHHRIHSGENL

SEQ ID NO: 5515 - protein, 111 aa, Homo sapiens
KREFAGEKRLDLVEDCLGWGSTTWRFQIHLACKQQSYPYLPHVNVIARVTLDKLQTDGPSSSPGAPWMAALLQSVSCFWNSLLGNFKEEKKNLNCVELLYLLLFFFEKINL

SEQ ID NO: 5516 - protein, 157 aa, Homo sapiens
  MISC_FEATURE (55): Xaa equals any of the naturally occurring L-amino acids
  MISC_FEATURE (132): Xaa equals any of the naturally occurring L-amino acids
TKSSALGPRAPSLRRHVLIHNTLQQLQAALRLAPAPALPPEPLFLGEEDFSLSAXIGSILRELDTSMDGTEPPQNPVTPLGLQNEVPPQPDPVFLEALSSRYLGDSGLDDFFLDIDTSAVEKEPARAPPEPXHNLFCAPGSWEWNELDHIMEIILGS

SEQ ID NO: 5517 - protein, 45 aa, Homo sapiens
  MISC_FEATURE (11): Xaa equals any of the naturally occurring L-amino acids
  MISC_FEATURE (20): Xaa equals any of the naturally occurring L-amino acids
  MISC_FEATURE (29): Xaa equals any of the naturally occurring L-amino acids
  MISC_FEATURE (36): Xaa equals any of the naturally occurring L-amino acids
KMMRVHQDSTXEKLPFFPLXADWKASRAXLCALFRXTHKDLGKCK

SEQ ID NO: 5518 - protein, 158 aa, Homo sapiens
  MISC_FEATURE (152): Xaa equals any of the naturally occurring L-amino acids
NFIFILKLHLLKSLKIISVHVLNTSLYSVINTPDFFPLTLCHPSVCLVSSMPCGRGVSLSSAQEGNFKHICTIKFQIKHFKKGAQTRNTCSSEIPCCNCNSCHIYPVYEEKFLQFSHCPSVLLPGCALLLELKYEIFTLKYVNVKVDRIKFXNPLRFI

SEQ ID NO: 5519 - protein, 54 aa, Homo sapiens
ITGMSHCARPSFLFNKCMYLKAIAFSRNLFLCSGRAYKLCLQLFFFSKGNTSGR

SEQ ID NO: 5520 - protein, 51 aa, Homo sapiens
  MISC_FEATURE (44): Xaa equals any of the naturally occurring L-amino acids
  MISC_FEATURE (48): Xaa equals any of the naturally occurring L-amino acids
STRQPNPFGATIDCYKAHPWVKIYYLQLYLMTLILPSSYIKFGXVFYXIIF

SEQ ID NO: 5521 - protein, 120 aa, Homo sapiens
  MISC_FEATURE (111): Xaa equals any of the naturally occurring L-amino acids
  MISC_FEATURE (113): Xaa equals any of the naturally occurring L-amino acids
QPRRPPRCPLPRGPWGRPRATGPQLGCISSTSCPAPTSSSARCPAFSRPRAGIPAGLVAGGGLGGPGLGPEPHFHRCLPHPLLLLPAPRAPRVQDPLARGRLRHLELIVPXSXAALALAS

SEQ ID NO: 5522 - protein, 67 aa, Homo sapiens
  MISC_FEATURE (67): Xaa equals any of the naturally occurring L-amino acids
AILKQTPLKKQTNKKNIDFFISFELPPFYYVMNMCCFCNRKIIKLKFQLQKKKKKKKKKKKKKKKKX

SEQ ID NO: 5523 - protein, 98 aa, Homo sapiens
  MISC_FEATURE (93): Xaa equals any of the naturally occurring L-amino acids
NATIIVNKIPVNTCCLCCLSPDSRAEFSFCTVALALTVTALQQAPSPRPFRSIPQRVLHVSSPMSSLGSSVKTHSSPAGVLRDARSLWGQFGXIDIHV

SEQ ID NO: 5524 - protein, 61 aa, Homo sapiens
GKKRKKLYFFSIYLLQRTLCFLSCKTSYFSYYCTLEKSCRFMLNSYLRTIVISSKRHELSS

SEQ ID NO: 5525 - protein, 53 aa, Homo sapiens
  MISC_FEATURE (34): Xaa equals any of the naturally occurring L-amino acids
  MISC_FEATURE (53): Xaa equals any of the naturally occurring L-amino acids
FKALNSKSIKTYLGETGIMQFITCIHSSIQKYGXIWYLKLKCGSKATKSETWX

SEQ ID NO: 5526 - protein, 33 aa, Homo sapiens
FANLKIGTPLGMPDRRVLHICRGRQELNITTSF

SEQ ID NO: 5527 - protein, 68 aa, Homo sapiens
  MISC_FEATURE (8): Xaa equals any of the naturally occurring L-amino acids
  MISC_FEATURE (11): Xaa equals any of the naturally occurring L-amino acids
  MISC_FEATURE (35): Xaa equals any of the naturally occurring L-amino acids
  MISC_FEATURE (56): Xaa equals any of the naturally occurring L-amino acids
  MISC_FEATURE (68): Xaa equals any of the naturally occurring L-amino acids
ATEPSLLXSFXHNFCFIHNFSSIESRIKTWVLSLXLSVEAYECLLKIMFLNALNIXDYKGILLFEIRX

SEQ ID NO: 5528 - protein, 95 aa, Homo sapiens
  MISC_FEATURE (52): Xaa equals any of the naturally occurring L-amino acids
TNRPLSFPQFITFSLFTLCPMTFLHHWLLFIKPTIKNIQVQLFLWAFISLWXPSCRVKLILNKCACFSLANLSFVIEISALNLGWIEGNICSPLH

SEQ ID NO: 5529 - protein, 41 aa, Homo sapiens
DGIVHFLVLSQVQPVCGNLSLPTSFVALVCSGQKVRAPLLT

SEQ ID NO: 5530 - protein, 155 aa, Homo sapiens
  MISC_FEATURE (64): Xaa equals any of the naturally occurring L-amino acids
RCSSIFTPWKLTTLSSFLHHHPGAQRSKLLSIFSPSPRTLTLYRMGPSSCLLLILIPLLQLINXGSTQCSLDSVMDKKIKDVLNSLEYSPSPISKKLSCASVKSQGRPSSCPAGMAVTGCACGYGCGSWDVQLETTCHCQCSVVDWTTARCCHLT

SEQ ID NO: 5531 - protein, 93 aa, Homo sapiens
IKVDGKAISIRIETESYNTVCTTLRWIHSAHALNVYIVLSVGSGTFSLVFLKNYKSEEKASIINKTNNCFTALRNNNYNVYYLKMGEIVCSMK

SEQ ID NO: 5532 - protein, 48 aa, Homo sapiens
ISHAIIWVCCIKSSTTLWFSHCIIKHEASRIKSYCFTCLLSPLCHFTF

SEQ ID NO: 5533 - protein, 169 aa, Homo sapiens
HEEKTTYDSAEEENKENLYAGKNTKIKRIYKTVADSDESYMEKSLYQENLEAQVKPCLELSLQSGNSTDFTTDRKSSKKHIHDKEGTAGKAKVKSKRRLEKEERKMEKIRQLKKKETKNQEDDVEQPFNDSGCLLVDKDLFETGLEDENNSPLEDEESLESIRAAVKNK

SEQ ID NO: 5534 - protein, 67 aa, Homo sapiens
GGTGSECRAQGEIGSPCRTCSSPAPKGDGVWAWGFLHVPPYPDPSSQSVTLLWAQPPNRSHLGLGQT

SEQ ID NO: 5535 - protein, 172 aa, Homo sapiens
PTRPPTRPPTRPDSSKPIVRESWMTELPPEMKDFGLGPRTFKRRADDTSGDRSIWTDTPADRERKAKETQEARKSSSKKDEEHILSGRDKRLAEQVSSYNESKRSESLMDIHHKKLKSKAAEDKNKPQERIPFDRDKDLKVNRFDEAQKKALIKKSRELNTRFSHGKGNMFL

SEQ ID NO: 5536 - protein, 76 aa, Homo sapiens
  MISC_FEATURE (53): Xaa equals any of the naturally occurring L-amino acids
AFSRKSHLIPHQRTHTGEKPYGCSECRKAFSQKSQLVNHQRIHTGEKPYRCIXCGKAFSQKSQLINHQRTHTVKKS

SEQ ID NO: 5537 - protein, 398 aa, Homo sapiens
  MISC_FEATURE (382): Xaa equals any of the naturally occurring L-amino acids
  MISC_FEATURE (395): Xaa equals any of the naturally occurring L-amino acids
CVNPELIIWVNRFVMCFFVELKKASKRMTCHKRYKIQKKVREHHRKLRKEAKKRGHKKPRKDPGVPNSAPFKEALLREAELRKQRLEELKQQQKLDRQKELEKKRKLETNPDIKPSNVEPMEKEFGLCKTENKAKSGKQNSKKLYCQELKKVIEASDVVLEVLDARDPLGCRCPQVEEAIVQSGQKKLVLILNKSDLVPKENLESWLNYLKKELPTVVFRASTKPKDKGKITKRVKAKKNAAPFRSEVCFGKEGLWKLLGGFQETCSKAIRVGVIGFPNVGKSSIINSLKQEQMCNVGVSMGLTRSMQVVPLDKQITIIDSPSFIVSPLNSSSALALRSPASIEVVKPMEAASAILSQADARQVVLKYTVPGYRNSLGIFYXACSEKRYAPKRWXPKC

SEQ ID NO: 5538 - protein, 78 aa, Homo sapiens
  MISC_FEATURE (53): Xaa equals any of the naturally occurring L-amino acids
  MISC_FEATURE (59): Xaa equals any of the naturally occurring L-amino acids
  MISC_FEATURE (68): Xaa equals any of the naturally occurring L-amino acids
QSGRGGDRGRSKVDTSAKPFAVISDCAVSCPVHQSPLVFDVGQCRQHDLAGQXLIYHSXDTSWSLGSXHPMFPLFPHL

SEQ ID NO: 5539 - protein, 80 aa, Homo sapiens
EPAWGDCQVAKGKERVANCLLHLAAQPGLPAFKGHFFGQELTRMSPESSTPRVCGNHPLLNTESCRIIVGKEATSSEAVV

SEQ ID NO: 5540 - protein, 155 aa, Homo sapiens
AVTSLKAPVITLRSSSSNCHPTSLASCRKVNLDNTWLSFLTNAGSGRNSLVLKSKNTNCLRFSNTPMKASHPSLLTRFPAKFNCWKFFRGFFPKNAPKILISVSVSLQFFNPSLTSCGTSSKCFNKLLRLPCTSQPQGSISAVSCSSTFILSISS

SEQ ID NO: 5541 - protein, 63 aa, Homo sapiens
  MISC_FEATURE (52): Xaa equals any of the naturally occurring L-amino acids
IIVIIGVSHHARPVSAFIKIVHSFIHSCSLKMLFRKEFDKINIIQNSKKKEXSFCFSHKLGLL

SEQ ID NO: 5542 - protein, 145 aa, Homo sapiens
  MISC_FEATURE (95): Xaa equals any of the naturally occurring L-amino acids
  MISC_FEATURE (100): Xaa equals any of the naturally occurring L-amino acids
KQPPLQSHPPSGCGRPGWPAEAPRPGLHPSAQTTAGRAGVQVGQLPPFHPSPPLLRPHQEQDPCASVVLPCLQAACGPAVTQPGDTTSPGGLCAXRHLRXWKPSCGRRLGEGRREGGHAASVASTTLTVPWRWLSPDRGQTHRAR

SEQ ID NO: 5543 - protein, 113 aa, Homo sapiens
ESWYACRYRSGIPGSTHASADAWGKTFARYLSFRRDNNELLLFILKQLVAEQVTYQRNRFGAQQDTIEVPEKDLVDKARQINIHNLSAFYDSELFRMNKFSHDLKRKMILQQF

SEQ ID NO: 5544 - protein, 180 aa, Homo sapiens
FSQHSRLAVHRRIHTGEKPYKCKECGKVFSDRSAFARHRRIHTGEKPYKCKECGKVFSQCSRLTVHLRIHSGEKPYKCNECGKVYSQYSHLVGHRRVHTGEKPYKCHECGKAFNQGSTLNRHQRIHTGEKPYKCNQCGNSFSQRVHLRLHQTVHTGDRPYKCNECGQNLLNGAQTSLHIR

SEQ ID NO: 5545 - protein, 164 aa, Homo sapiens
  MISC_FEATURE (102): Xaa equals any of the naturally occurring L-amino acids
  MISC_FEATURE (107): Xaa equals any of the naturally occurring L-amino acids
  MISC_FEATURE (151): Xaa equals any of the naturally occurring L-amino acids
PRMATQRKHLVKDFNPYITCYICKGYLIKPTTVTECLHTFCKTCIVQHFEDSNDCPRCGNQVHETNPLEMLRLDNTLEEIIFKLVPGLREQELERESEFWKXNKPQXNGQDDTSKADKPKVDEEGDENEDDKDYPQEVTHKLAICLGCFTXLMGPFGGHVGKGF

SEQ ID NO: 5546 - protein, 55 aa, Homo sapiens
NSVKFCLKKPLIEFENHKPFQVSLWVCFGFFFFFLSLWPNVRGIRFCKQAAVSIS

SEQ ID NO: 5547 - protein, 64 aa, Homo sapiens
  MISC_FEATURE (24): Xaa equals any of the naturally occurring L-amino acids
SGPPGLHSRSSPAPSASVEPQAWXRDERDAALARGRPSAPKTREQAPGEKPLEVSWSRESPVSC

SEQ ID NO: 5548 - protein, 68 aa, Homo sapiens
AFDGLSTSSSQHILPAVAAWLGLFFSYPNPMMPGTLITVLHQLLYFSVYFHNELYCHLDFEQLWEIED

SEQ ID NO: 5549 - protein, 113 aa, Homo sapiens
QEPPIMAEGKGGVSCLTWPEQEVERGRCHTLTNNQISGQLTQYQENSTTKLWLIIHEKPPTTQSPPTRPYLQHLGLQFNMRFGGNTDPNHITHKLQLLHTHDNPLICEGLICS

SEQ ID NO: 5550 - protein, 33 aa, Homo sapiens
SRYYSEACILYASGHVLSCEVRCISYCGLQSKF

SEQ ID NO: 5551 - protein, 63 aa, Homo sapiens
GADSACPGPAKWLSSLRAHVVRTGIGQARAKLFEKQIVQHGGQLCPAQGPGVTHIVVDEAWTM

SEQ ID NO: 5552 - protein, 62 aa, Homo sapiens
MSQAGNSEVYLAIHVFKMAASRRFTGVPDRRGGGAQARMKLELARSRKTIAGGTASVGAEET

SEQ ID NO: 5553 - protein, 317 aa, Homo sapiens
GGPMKDCEYSQISTHSSSPMESPHKKKKIAARRKWEVFPGRNKFFCNGRIMMARQTGVFYLTLVLILVTSGLFFAFDCPYLAVKITPAIPAVAGILFFFVMGTLLRTSFSDPGVLPRATPDEAADLERQIDIANGTSSGGYRPPPRTKEVIINGQTVKLKYCFTCKIFRPPRASHCSLCDNCVERFDHHCPWVGNCVGKRNYRFFYMFILSLSFLTVFIFAFVITHVILRSQQTGFLNALKDSPASVLEAVVCFFSVWSIVGLSGFHTYLISSNQTTNEDIKGSWSNKRGKENYNPYSYGNIFTNCCVALCGPSHQA

SEQ ID NO: 5554 - protein, 76 aa, Homo sapiens
IVGLFHMCSLKYLNNHSFHSLFSSQAFSRSSMWILKDLPSLTRITFKGDCFKIFLQIEIRTERLRNIVYFAKTRCL

SEQ ID NO: 5555 - protein, 117 aa, Homo sapiens
ETLVNWSTGESYKWPMSQKSWDLLPAAADADRPWEAAVLWRSWSSSFLGLAWLPQKEQSGLEGSIKFYTHKLQLEVSFLKCPAFAQLFQIISFLRLWQVSCPPSYSSVFTSSRQQSG

SEQ ID NO: 5556 - protein, 67 aa, Homo sapiens
VQINHPDLKVNTFYFSFRSITEYAAFRYRFNLPDFLKILYFYIATTGLLNMQLNCYLNKLHLMEKKK

SEQ ID NO: 5557 - protein, 315 aa, Homo sapiens
  MISC_FEATURE (115): Xaa equals any of the naturally occurring L-amino acids
NIEQENEKLKAELEKLKAHLGHQLSMHYESKTKGTEKIIAENERLRKELKKETDAAEKLRIAKNNLEILNEKMTVQLEETGKRLQFAESRGPQLEGADSKSWKSIVVTRMYETKXKELETDIAKKNQSITDLKQLVKEATEREQKVNKYNEDLEQQIKILKHVPEGAETEQGLKRELQVLRLANHQLDKEKAELIHQIEANKDQSGAESTIPDADQLKEKIKDLETQLKMSDLEKQHLKEEIKKLKKELENFDPSFFEEIEDLKYNYKEEVKKNILLEEKVKKLSEQLGVELTSPVAASEEFEDEEESPVNFPIY

SEQ ID NO: 5558 - protein, 191 aa, Homo sapiens
QLNTSSTNHQLPSEHQTILSSRDSRNSLRSNFSSRESESSRSNTQPGFSYSSSRDEAPIISNSERVVSSQRPFQESSDNEGRRTTRRLLSRIASSMSSTFFSRRSSQDSLNTRSLNSENSYVSPRILTASQSRSNVPSASEVPDNRASEASQGFRFLRRRWGLSSLSHNHSSESDSENFNQESEGRNTGPW

SEQ ID NO: 5559 - protein, 127 aa, Homo sapiens
  MISC_FEATURE (57): Xaa equals any of the naturally occurring L-amino acids
ANTSTRAALYCLFLSFIMFASVLQINPRSWLMKKVITVLAACLESENQNAQRIGAAXLWALIYNYQKAKTALKSPSVKRRVDEAYSLAKKTFPNSEANPLNAYYLKCLENLVQLLNSSLSAHGMPTP

SEQ ID NO: 5560 - protein, 89 aa, Homo sapiens
  MISC_FEATURE (32): Xaa equals any of the naturally occurring L-amino acids
  MISC_FEATURE (57): Xaa equals any of the naturally occurring L-amino acids
LNHLQNASTPGYSKLPFQIHFQTALTWASHWXSWLLVGAISCVDPQVRGPGPPAPPXQRGEPAQFFWSLKCVPLLVARSPQWGGLTRTR

SEQ ID NO: 5561 - protein, 98 aa, Homo sapiens
  MISC_FEATURE (81): Xaa equals any of the naturally occurring L-amino acids
  MISC_FEATURE (84): Xaa equals any of the naturally occurring L-amino acids
ARQVKSLRDPSAKMSKSDPDKLATVRITDSPEEIVQKFRKAVTDFTSEVTYDPAGRAGVSNIVAVHAAVTGLSVEEVVRRXAGXEHCSLQAGRGRCCD

SEQ ID NO: 5562 - protein, 74 aa, Homo sapiens
TEEVDSVAVSVLALGSRIGELRAPIWDEESRKQLSISIKRAEQPLSLHPPSALFSLPPSLLSFHSVYVSFGPIP

SEQ ID NO: 5563 - protein, 65 aa, Homo sapiens
GTGSQCTQHGAISDVIQRMRQDKSYCLIKGKLGTGMLFKLRKIFWGVKLDSTESLEKLAWREKRH

SEQ ID NO: 5564 - protein, 82 aa, Homo sapiens
  MISC_FEATURE (25): Xaa equals any of the naturally occurring L-amino acids
  MISC_FEATURE (26): Xaa equals any of the naturally occurring L-amino acids
  MISC_FEATURE (42): Xaa equals any of the naturally occurring L-amino acids
  MISC_FEATURE (45): Xaa equals any of the naturally occurring L-amino acids
  MISC_FEATURE (54): Xaa equals any of the naturally occurring L-amino acids
  MISC_FEATURE (75): Xaa equals any of the naturally occurring L-amino acids
APTNLFFFFFFETESGCASHFLSFXXSELTEQPGRCGFRSLXLSXCAKCWGRRXQRVDSGMVPAASHFYAKPDFXSHPGGQF

SEQ ID NO: 5565 - protein, 47 aa, Homo sapiens
IFIIEVSFPLGISLSLFFFNENQSTEYFVSPRKTPQLSIMLSTREKL

SEQ ID NO: 5566 - protein, 112 aa, Homo sapiens
  MISC_FEATURE (103): Xaa equals any of the naturally occurring L-amino acids
GNCQKCAFGYSGLDCKDKFQLILTIVGTIAGIVILSMIIALIVTARSNNKTKHIEEENLIDEDFQNLKLRSTGFTNLGAEGSVFPKVRITASRDSQMQNPYSXHSSMPRPDY

SEQ ID NO: 5567 - protein, 152 aa, Homo sapiens
  MISC_FEATURE (143): Xaa equals any of the naturally occurring L-amino acids
  MISC_FEATURE (147): Xaa equals any of the naturally occurring L-amino acids
  MISC_FEATURE (151): Xaa equals any of the naturally occurring L-amino acids
FTARSPWEYTNLCSRQLGASLLETVLIFFFLSEFQLILTIVGTIAGIVILSMIIALIVTARSNNKTKHIEEENLIDEDFQNLKLRSTGFTNLGAEGSVFPKVRITASRDSQMQNPYSSHTQKKKKKKKKKKKKKKKKKKKKKXKKKXKKKXG

SEQ ID NO: 5568 - protein, 169 aa, Homo sapiens
  MISC_FEATURE (4): Xaa equals any of the naturally occurring L-amino acids
  MISC_FEATURE (6): Xaa equals any of the naturally occurring L-amino acids
  MISC_FEATURE (16): Xaa equals any of the naturally occurring L-amino acids
  MISC_FEATURE (44): Xaa equals any of the naturally occurring L-amino acids
FFFXVXEKSILLVSLXVCLVLSEIPFMSTWFLLVSTFSMLPLLXKDELLMPSVVTTMAFFIACVTSFSIFEKTSEEELQLKSFSISVRKYLPCFTFLSRIIQYLFLISVITMVLLTLMTVTLDPPQKLPDLFSVLVCFVSCLNFLFFLVYFNIIIMWDSKSGRNQKKIS

SEQ ID NO: 5569 - protein, 67 aa, Homo sapiens
  MISC_FEATURE (52): Xaa equals any of the naturally occurring L-amino acids
  MISC_FEATURE (56): Xaa equals any of the naturally occurring L-amino acids
  MISC_FEATURE (61): Xaa equals any of the naturally occurring L-amino acids
GWRHGGEHHQDHVELGRDCPPKKNIGPLQAQPPLPLEFFSQAQCQKFSLGWXQICXTGFPXSSTLPP

SEQ ID NO: 5570 - protein, 115 aa, Homo sapiens
  MISC_FEATURE (109): Xaa equals any of the naturally occurring L-amino acids
SSKCGFSCISQIGRPGVVGVPGGRLWAGSQDPPFLGGDRACGAAPRNVRRKRERALAPSASCLRCWRLPIRWFYPQTPGHRESRRKGQPRIPAGFLHRGASQFLHLIFXSCGRCY

SEQ ID NO: 5571 - protein, 210 aa, Homo sapiens
  MISC_FEATURE (137): Xaa equals any of the naturally occurring L-amino acids
  MISC_FEATURE (142): Xaa equals any of the naturally occurring L-amino acids
  MISC_FEATURE (171): Xaa equals any of the naturally occurring L-amino acids
  MISC_FEATURE (179): Xaa equals any of the naturally occurring L-amino acids
  MISC_FEATURE (193): Xaa equals any of the naturally occurring L-amino acids
  MISC_FEATURE (197): Xaa equals any of the naturally occurring L-amino acids
  MISC_FEATURE (210): Xaa equals any of the naturally occurring L-amino acids
EEAAKAAGTHFTSQQLQELEATFQRNRYPDMSTREEIAVWTNLTEARVRVWFKNRRAKWRKRERNQQAELCKNGFGPQFNGLMQPYDDMYPGYSYNNWAAKGLTSASLSTKSFPFFNSMNVNPLSSQSMFSPPNSIXSMSMXSSMVPSAVTGVPGSSLNSLNNLNNLSSPXLNSAVPTXACPYAPPTSSVCLXGHVXSSLASLRLKAKQX

SEQ ID NO: 5572 - protein, 101 aa, Homo sapiens
TLTVQVVHCNEVTHICWLHKLQVLLSQYGTLNCDVVQQLPASSQLIRCEYFGLDLQPDAVLQPKKKVEPMIKNCSQDEPGKKSAKLPWRSAGTLVMTGITP

SEQ ID NO: 5573 - protein, 117 aa, Homo sapiens
  MISC_FEATURE (94): Xaa equals any of the naturally occurring L-amino acids
IPPAQLWQRLLALVISSIIQIHYHPNPSPIFGLGEKNMNYDDRTSSKPSPVLSEYPFWGCIPQKPIWGPISMYTELKFQVPLCIKRSQNFGQAXGTLKSHQCNYTLEIINPSHDYIS

SEQ ID NO: 5574 - protein, 55 aa, Homo sapiens
LPVFEDVGRVCKYSAFPLTHAGEDASSLAPAVRAQIARVKTSSLGREVCRGLEVI

SEQ ID NO: 5575 - protein, 47 aa, Homo sapiens
KLKEIKKLLEENAGINLYDLRLGSGFLDMTPKAKQQKKENLKWMSSE

SEQ ID NO: 5576 - protein, 36 aa, Homo sapiens
  MISC_FEATURE (18): Xaa equals any of the naturally occurring L-amino acids
  MISC_FEATURE (20): Xaa equals any of the naturally occurring L-amino acids
GPVLHQRILISASGVGEXRXIYIGQNRGVEQDYSIF

SEQ ID NO: 5577 - protein, 67 aa, Homo sapiens
  MISC_FEATURE (8): Xaa equals any of the naturally occurring L-amino acids
PGAVVGVXRVMTWSGWAWADVHIVCTLDPWPRRTQILTSRNFHLMNIMRIGGKENSLYRINPSFLQG

SEQ ID NO: 5578 - protein, 83 aa, Homo sapiens
  MISC_FEATURE (46): Xaa equals any of the naturally occurring L-amino acids
  MISC_FEATURE (49): Xaa equals any of the naturally occurring L-amino acids
ENAFQDLSSTHPLSLPQPHIWGHNSTCVKDNLLLFTEPPGIQDNKXLHXDQQVSFSAPSFITPFFPSEVHTHPYMAAVGISTG

SEQ ID NO: 5579 - protein, 58 aa, Homo sapiens
  MISC_FEATURE (39): Xaa equals any of the naturally occurring L-amino acids
MVLSPSGVSKCIRKQNSVVSHSSLCARCLRRGSYRSPRXNQAHLSLGVGQSGKAFWKM

SEQ ID NO: 5580 - protein, 109 aa, Homo sapiens
  MISC_FEATURE (90): Xaa equals any of the naturally occurring L-amino acids
  MISC_FEATURE (97): Xaa equals any of the naturally occurring L-amino acids
SHTTKNTDFTDLVLENHYTNSNNNAPGTKGEEMSSRVGILFKCLVFNKNNYKTQSKTRKYGPYPGKNKQPIEAVLEEVNILDLLENDFNXSIINMFXKLKEARCGGSRL

SEQ ID NO: 5581 - protein, 101 aa, Homo sapiens
NDNKGFRTITASAPGPTPSSERRSVVGNMLSNSVTCYRGIFGERKSQCGKLHCCLILIATATSTFSNHHPDSVSSHQHQGETLYHQKDYNLLKAQMIISIF

SEQ ID NO: 5582 - protein, 40 aa, Homo sapiens
DRHALQIFLYKSGSLFPIVLTLRLSVGLPIRFTAVQVHKM

SEQ ID NO: 5583 - protein, 59 aa, Homo sapiens
SWYACRYRSGIPGSTHASAKIRTAHRRVMILNHPDKGGSPYVAAKINEAKDLLETTTKH

SEQ ID NO: 5584 - protein, 51 aa, Homo sapiens
SKDLVFFTQHVSRIHKFYCFIAVIFIDVYFIVGLYNILLRNTYIYNKLYIF

SEQ ID NO: 5585 - protein, 60 aa, Homo sapiens
  MISC_FEATURE (47): Xaa equals any of the naturally occurring L-amino acids
  MISC_FEATURE (48): Xaa equals any of the naturally occurring L-amino acids
  MISC_FEATURE (51): Xaa equals any of the naturally occurring L-amino acids
YCSFSSFFAVASSSLVKTLKKNTALPWEIITLPNTPLVGNKRFYGTXXKKXSTCPFFLPV

SEQ ID NO: 5586 - protein, 72 aa, Homo sapiens
SSQIKPPESPHYKIQSYHASLPSVYKICPSLQLGETDLGQTPVSLLGCLAINFSLYKTPVLQCLVFQCEPGN

SEQ ID NO: 5587 - protein, 64 aa, Homo sapiens
  MISC_FEATURE (36): Xaa equals any of the naturally occurring L-amino acids
  MISC_FEATURE (37): Xaa equals any of the naturally occurring L-amino acids
VLNKSLLYENKQYFLYLSFGCIFPYFVISFFLTFYXXILTLFLSFASVFPRRVLWLKCITCKIE

SEQ ID NO: 5588 - protein, 43 aa, Homo sapiens
  MISC_FEATURE (3): Xaa equals any of the naturally occurring L-amino acids
MDXQTNGTKLRSQIEINQSVDLLIYGNVFCEIYQLMGKRLFKT

SEQ ID NO: 5589 - protein, 143 aa, Homo sapiens
  MISC_FEATURE (69): Xaa equals any of the naturally occurring L-amino acids
  MISC_FEATURE (70): Xaa equals any of the naturally occurring L-amino acids
  MISC_FEATURE (118): Xaa equals any of the naturally occurring L-amino acids
  MISC_FEATURE (123): Xaa equals any of the naturally occurring L-amino acids
  MISC_FEATURE (127): Xaa equals any of the naturally occurring L-amino acids
  MISC_FEATURE (129): Xaa equals any of the naturally occurring L-amino acids
  MISC_FEATURE (130): Xaa equals any of the naturally occurring L-amino acids
  MISC_FEATURE (132): Xaa equals any of the naturally occurring L-amino acids
  MISC_FEATURE (133): Xaa equals any of the naturally occurring L-amino acids
  MISC_FEATURE (135): Xaa equals any of the naturally occurring L-amino acids
  MISC_FEATURE (136): Xaa equals any of the naturally occurring L-amino acids
  MISC_FEATURE (137): Xaa equals any of the naturally occurring L-amino acids
TSGIGTSPSLRSLQSLLGPSSKFRHAQGTVLHRDSHITNLKGLNLTTPGESDGFCANKLRVAVPLLSSXXQVAVLELRKPGRLPDTALPTLQNGAAVTDLAWDPFDPHRLAVAGEDAXIRLWXVPAXGXXRXXHXXXNCAYKA

SEQ ID NO: 5590 - protein, 67 aa, Homo sapiens
  MISC_FEATURE (33): Xaa equals any of the naturally occurring L-amino acids
  MISC_FEATURE (44): Xaa equals any of the naturally occurring L-amino acids
  MISC_FEATURE (61): Xaa equals any of the naturally occurring L-amino acids
SNSLQVWGWQILAPLKWIPHAHASLFFSVARGXMDKPKLQLKTXHRPGTVTHAFNISTLGXQGGRIT

SEQ ID NO: 5591 - protein, 66 aa, Homo sapiens
  MISC_FEATURE (16): Xaa equals any of the naturally occurring L-amino acids
  MISC_FEATURE (18): Xaa equals any of the naturally occurring L-amino acids
GLPKAQQEQLLLILQXPXPRPAFHPKPHLVSMSISTVWPSCDCSLAATPSVIPHSESSFSGSLAFS

SEQ ID NO: 5592 - protein, 53 aa, Homo sapiens
  MISC_FEATURE (33): Xaa equals any of the naturally occurring L-amino acids
SLISDALRFLRSEMIKLYSLVYWYFFTSSEIGXMLYVRRAFFKLCCFEHVYLF

SEQ ID NO: 5593 - protein, 58 aa, Homo sapiens
QGKKSAVCLVFIFVFTQVGLLFETFFLNKRSYKVFTFSPSKNPIFLEFGLSIISGIKE

SEQ ID NO: 5594 - protein, 78 aa, Homo sapiens
TTVNIHVGGGGRLRPAKAQVRLNHPALLASTQESMGLHRAQGLLMPPSTCEPGHEASLKQGFQPDAIDPQNLTWKSRH

SEQ ID NO: 5595 - protein, 54 aa, Homo sapiens
  MISC_FEATURE (26): Xaa equals any of the naturally occurring L-amino acids
  MISC_FEATURE (40): Xaa equals any of the naturally occurring L-amino acids
ISKQLYFFIQACHCEPVLIVSELFVXPEFCLLISFQLHSXSFFNCVGGKNNGRN

SEQ ID NO: 5596 - protein, 89 aa, Homo sapiens
LYSFSSLLPLSPRWKKRTNVETPEGVQLDQGDIRHLTVFSVCPSLYSNVRNGSVFFFTFIGSSYFSTLFLMCSFFNWLVFPYYLQLYGL

SEQ ID NO: 5597 - protein, 53 aa, Homo sapiens
  MISC_FEATURE (18): Xaa equals any of the naturally occurring L-amino acids
  MISC_FEATURE (41): Xaa equals any of the naturally occurring L-amino acids
QKNPLMVCFLYWATQWCXKVYMKPQCKQGLSSQDINFDRKXCVFMCVCVSGCN

SEQ ID NO: 5598 - protein, 46 aa, Homo sapiens
FCKYNNNSNNTILSFKKLPIHFSNLTVSGGVYVCLCFHLCNGCLII

SEQ ID NO: 5599 - protein, 58 aa, Homo sapiens
  MISC_FEATURE (32): Xaa equals any of the naturally occurring L-amino acids
  MISC_FEATURE (53): Xaa equals any of the naturally occurring L-amino acids
CLTMASEHVKCTYILQPKTVCIKLQPSIIKFXVQFQDGNQGFFFRDVKKSPSXIILNL

SEQ ID NO: 5600 - protein, 78 aa, Homo sapiens
  MISC_FEATURE (63): Xaa equals any of the naturally occurring L-amino acids
  MISC_FEATURE (74): Xaa equals any of the naturally occurring L-amino acids
QLNFMNMFVKLLFYISCQIEKFISSLLYLWKYKPFYRKKSSKTIKWISACFVSHCLQILWLSXGHRALVGCTGXPIFP

SEQ ID NO: 5601 - protein, 42 aa, Homo sapiens
  MISC_FEATURE (1): Xaa equals any of the naturally occurring L-amino acids
  MISC_FEATURE (16): Xaa equals any of the naturally occurring L-amino acids
XTLTKGNKSWSSTAVXTALELVDPPGCRNSARGTAKVYGMVC

SEQ ID NO: 5602 - protein, 502 aa, Homo sapiens
  MISC_FEATURE (128): Xaa equals any of the naturally occurring L-amino acids
PVAAVSGRAVGGSRGGGRGGMAAAAAGAGSGPWAAQEKQFPPALLSFFIYNPRFGPREGQEENKILFYHPNEVEKNEKIRNVGLCEAIVQFTRTFSPSKPAKSLHTQKNRQFFNEPEENFWMVMVVRXPIIEKQSKDGKPVIEYQEEELLDKVYSSVLRQCYSMYKLFNGTFLKAMEDGGVKLLKERLEKFFHRYLQTLHLQSCDLLDIFGGISFFPLDKMTYLKIQSFINRMEESLNIVKYTAFLYNDQLIWSGLEQDDMRILYKYLTTSLFPRHIEPELAGRDSPIRAEMPGNLQHYGRFLTGPLNLNDPDAKCRFPKIFVNTDDTYEELHLIVYKAMSAAVCFMIDASVHPTLDFCRRLDSIVGPQLTVLASDICEQFNINKRMSGSEKEPQFKFIYFNHMNLAEKSTVHMRKTPSVSLTSVHPDLMKILGDINSDFTRVDEDEEIIVKAMSDYWVVGKKSDRRELYVILNQKNANLIEVNEEVKKLCATQFNNIFFLD

SEQ ID NO: 5603 - protein, 62 aa, Homo sapiens
  MISC_FEATURE (57): Xaa equals any of the naturally occurring L-amino acids
NPGILSPSNLKVFKLILFYVFLAVYVLLKSLSFCVKICLSLLHFTASKIKNTYILLXIDASK

SEQ ID NO: 5604 - protein, 453 aa, Homo sapiens
  MISC_FEATURE (327): Xaa equals any of the naturally occurring L-amino acids
SIFRVSPGFRIAMIIPSLEELDSLKYSDLQNLAKSLGLRANLRATKLLKALKGYIKHEARKGNENQDESQTSASSCDETEIQISNQEEAERQPLGHVTKTRRRCKTVRVDPDSQQNHSEIKISNPTEFQNHEKQESQDLRATAKVPSPPDEHQEAENAVSSGNRDSKVPSEGKKSLYTDESSKPGKNKRTAITTPNFKKLHEAHFKEMESIDQYIERKKKHFEEHNSMNELKQQPINKGGVRTPVPPRGRLSVASTPISQRRSQGRSCGPASQSTLGLKGSLKRSAISAAKTGVRFSAATKDNEHKRSLTKTPARKSAHVTVSGGTXKGEAVLGTHKLKTITGNSAAVITPFKLTTEATQTPVSNKKPVFDLKASLSRPLNYEPHKGKLKPWGQSKENNYLNQHVNRINFYKKTYKQPHLQTKEEQRKKREQERKEKKAKVLGMRRGLILAED

SEQ ID NO: 5605 - protein, 64 aa, Homo sapiens
  MISC_FEATURE (64): Xaa equals any of the naturally occurring L-amino acids
LLKKKSGEERYLSNLLNLYKTLHCRGGATPKYFHDLHGLIRFFFFYTILATFSMEKRQFTQFPX

SEQ ID NO: 5606 - protein, 307 aa, Homo sapiens
  MISC_FEATURE (147): Xaa equals any of the naturally occurring L-amino acids
  MISC_FEATURE (300): Xaa equals any of the naturally occurring L-amino acids
HTKKMSMLKPSGLKAPTKILKPGSTALKTPTAVVAPVEKTISSEKASSTPSSETQEEFVDDFRVGERVWVNGNKPGFIQFLGETQFAPGQWAGIVLDEPIGKNDGSVAGVRYFQCEPLKGIFTRPSKLTRKVQAEDEANGLQTTPAXRATSPLCTSTASMVSSSPSTPSNIPQKPSQPAAKEPSATPPISNLTKTASESISNLSEAGSIKKGERELKIGDRVLVGGTKAGVVRFLGETDFAKGEWCGVELDEPLGKNDGAVAGTRYFQCQPKYGLFAPVHKVTKIGFPSTTPAKAKANAXGELWRPR

SEQ ID NO: 5607 - protein, 118 aa, Homo sapiens
NGGGQHCCWRNRMPHPWWVLHTVSGGQVSCQPPPRNSPPSEATKTSRVSQSAILRKVLRGTDKVRRESCGLEAARNKPSRRRGIPAGGMGGAGAWEMRTGLVMVCGRQLLRWRAGGRG

SEQ ID NO: 5608 - protein, 28 aa, Homo sapiens
QYFLKIITYIIVTKHLCQIRTSSTEAAV

SEQ ID NO: 5609 - protein, 67 aa, Homo sapiens
  MISC_FEATURE (7): Xaa equals any of the naturally occurring L-amino acids
  MISC_FEATURE (49): Xaa equals any of the naturally occurring L-amino acids
KFWRLGXLRSRSQQVWCLARAHSSLPSCCVTAWWEGQASSHGLFYSGPXSIGEGSAIITSSPRHLQG

SEQ ID NO: 5610 - protein, 50 aa, Homo sapiens
  MISC_FEATURE (1): Xaa equals any of the naturally occurring L-amino acids
XSVHTLYRNSLYSIPVEGHFNPHSIPSVLRTSSKAACSSSSVVATLDLHV

SEQ ID NO: 5611 - protein, 51 aa, Homo sapiens
GDCGKGTVYKAVGMYRKAQGIGQGAGLFIVIFTSGLILGGGGVLPGTRPYG

SEQ ID NO: 5612 - protein, 143 aa, Homo sapiens
  MISC_FEATURE (123): Xaa equals any of the naturally occurring L-amino acids
  MISC_FEATURE (135): Xaa equals any of the naturally occurring L-amino acids
KQFASGNRTAGAVFLQQQTKHRGRTQASTEQAETDDNMDTKSILEELLLKRSQLLEMCYDVCEGMAFLESHQFIHRDLAARNCLVDRDLCVKVSDFGMTRYVLDDQYVSSVGTKFPVKWSAPXVFHYFKYSSKSXRMGIWDPD

SEQ ID NO: 5613 - protein, 43 aa, Homo sapiens
  MISC_FEATURE (16): Xaa equals any of the naturally occurring L-amino acids
NFVFLVEKGFLHVGQXGLELPISGDPPASQSAGITGVSTTPRL

SEQ ID NO: 5614 - protein, 83 aa, Homo sapiens
  MISC_FEATURE (11): Xaa equals any of the naturally occurring L-amino acids
  MISC_FEATURE (80): Xaa equals any of the naturally occurring L-amino acids
VGVSSQLKKKXNEIGSRNEKGERERKKKMDVGNFVACSLWILQNYHCGYCLTWLLLAMKNQEHFHYHFLTIHQPQFLGIXLKF

SEQ ID NO: 5615 - protein, 429 aa, Homo sapiens
  MISC_FEATURE (28): Xaa equals any of the naturally occurring L-amino acids
VSQATDVEVGTDLVPSVTVKVTLQNRVXLQKAKLSVYVQPPLELTCDQFTFEFMNRNPDGIPRVIQCKFRLPLKLICLPGQPSKTASHKITIDTNKSPVSLLSLFPGFASQSDDDQVNVMGFHFLGGARITVLASKTSQRYRIQSEQFEDLWLITNELILRLQEYFEKQGVKDFACSFSGSIPLQEYFELIDHHFELRINGEKLEELLSERAVQFRAIQRRLLARFKDKTPAPLQHLDTLLDGTYKQVIALADAVEENQGNLFQSFTRLKSATHLVILLIALWQKLSADQVAILEAAFLPLQEDTQELGWEETVDAAISHLLKTCLSKSSKEQALNLNSQLNIPKDTSQLKKHITLLCDRLSKGGRLCLSTDAAAPQTMVMPGGCTTIPESDLEERSVEQDSTELFTNHRHLTAETPRPEVSPLQGVSE

SEQ ID NO: 5616 - protein, 59 aa, Homo sapiens
  MISC_FEATURE (42): Xaa equals any of the naturally occurring L-amino acids
NITTMNPTSHCKDCVLYFDLSSGIGDTLFGHHEGTMQNPSFXNSFLSSIEDPKNQTFRV

SEQ ID NO: 5617 - protein, 97 aa, Homo sapiens
  MISC_FEATURE (96): Xaa equals any of the naturally occurring L-amino acids
KPGHTAGDEWKASETSWVFTAIPRRSHYHLSCVSCEISSSIRFSRSTNPFGTVCEGSKLRISYENLIPDDLLLSPTTPRWDHLVAGKQAQAPTDSXL

SEQ ID NO: 5618 - protein, 52 aa, Homo sapiens
QRKREEEGRLDTERCLARGSQSGVQPLGGPTPGEDHLPTSSIPTLPAPHPSC

SEQ ID NO: 5619 - protein, 49 aa, Homo sapiens
  MISC_FEATURE (2): Xaa equals any of the naturally occurring L-amino acids
  MISC_FEATURE (9): Xaa equals any of the naturally occurring L-amino acids
AXTNFTQEXAMTMITPSSNTTHYRESWYACRYRSGIPGSTHASGRQRLQ

SEQ ID NO: 5620 - protein, 42 aa, Homo sapiens
  MISC_FEATURE (21): Xaa equals any of the naturally occurring L-amino acids
  MISC_FEATURE (22): Xaa equals any of the naturally occurring L-amino acids
  MISC_FEATURE (31): Xaa equals any of the naturally occurring L-amino acids
LAKEVKPRGFPGGKIFPPGGXXGNPPTGPVXPGVPKFKTPKF

SEQ ID NO: 5621 - protein, 85 aa, Homo sapiens
  MISC_FEATURE (46): Xaa equals any of the naturally occurring L-amino acids
  MISC_FEATURE (55): Xaa equals any of the naturally occurring L-amino acids
  MISC_FEATURE (63): Xaa equals any of the naturally occurring L-amino acids
  MISC_FEATURE (80): Xaa equals any of the naturally occurring L-amino acids
HAQGEARVQPLRGLLQERGGQQPWGRGRPRGGGHQGTARWASSCPXSWARSKARXDLLAWQPXPGARIAAPVIQNPAEQXPCSCA

SEQ ID NO: 5622 - protein, 91 aa, Homo sapiens
  MISC_FEATURE (51): Xaa equals any of the naturally occurring L-amino acids
  MISC_FEATURE (56): Xaa equals any of the naturally occurring L-amino acids
  MISC_FEATURE (91): Xaa equals any of the naturally occurring L-amino acids
TKFHFVCVCVHVCVSTGGLCFILCFFDSCATSLPHSPKKDKTKLSTNPHIXVCLSXTLTTVPIIMSSYIPCKIWVVSYTAGLHLTLEGKKX

SEQ ID NO: 5623 - protein, 79 aa, Homo sapiens
  MISC_FEATURE (15): Xaa equals any of the naturally occurring L-amino acids
  MISC_FEATURE (34): Xaa equals any of the naturally occurring L-amino acids
  MISC_FEATURE (50): Xaa equals any of the naturally occurring L-amino acids
  MISC_FEATURE (56): Xaa equals any of the naturally occurring L-amino acids
  MISC_FEATURE (61): Xaa equals any of the naturally occurring L-amino acids
NSEKEQWLCSFLANXLQKESTWTSVPGVEILRGXELVGEHFPTWLRQGFXWGRGRXYSGGXSPPRRHHTFPPGVPQGPR

SEQ ID NO: 5624 - protein, 219 aa, Homo sapiens
  MISC_FEATURE (215): Xaa equals any of the naturally occurring L-amino acids
LSFFSLTASYSPIQPHSLIKHQQIPLHSPPSKVSHHQLILQQQQQQIQPITLQNSTQDPPPSQHCIPLQNHGLPPAPSNAQSQHCSPIQSHPSPLTVSPNQSQSAQQSVVVSPPPPHSPSQSPTIIIHPQALIQPHPLVSSALQPGPNLQQSTANQVQATAQLNLPSHLPLPASPVVHIGPVQQSALVSPGQQIVSPSHQQYSSLQSSPIPIASXPQMS

SEQ ID NO: 5625 - protein, 26 aa, Homo sapiens
  MISC_FEATURE (6): Xaa equals any of the naturally occurring L-amino acids
  MISC_FEATURE (26): Xaa equals any of the naturally occurring L-amino acids
PSRLLXPLIRVSIKLKLRPDRRTASX

SEQ ID NO: 5626 - protein, 99 aa, Homo sapiens
YRATFLNVSDVVRPSHTSAVSFSASLGLAFCSSVPHTMIPLGQAFACAVSPVKLTSLPLWAQIPAQVAGVRSSRGGESSWRAGSIVRRKGHGQNPGEHR

SEQ ID NO: 5627 - protein, 67 aa, Homo sapiens
QVLCKCLPSLQVPATCPKKRHIKKLSDTSPDFIYFIYLTTYMLVCRNYILDLFPYLLRTVLLLKAAT

SEQ ID NO: 5628 - protein, 81 aa, Homo sapiens
  MISC_FEATURE (13): Xaa equals any of the naturally occurring L-amino acids
  MISC_FEATURE (24): Xaa equals any of the naturally occurring L-amino acids
SCQVSPAGRKHCXPSAGSSLESQXGKRSWPLPPADRSSASMRFVVVTFSVTIKGDFFLNIKLFFEQGMNMSFCNVTEVEFK

SEQ ID NO: 5629 - protein, 48 aa, Homo sapiens
ALLVHEDKLPEGFGCMLHSVTSSYLKISVLYLALYLKVNTNLTYLKIF

SEQ ID NO: 5630 - protein, 107 aa, Homo sapiens
CLSPGTWADLVPGELSPLLAKELLSSQTLLLRCPPCMVFEVFEVFLEFTCWRLQLTERPGLDCASCSSRTKDISWKCMRPRICDRNGSSHVRYAPWKDLEIRNLSEH

SEQ ID NO: 5631 - protein, 52 aa, Homo sapiens
FYVRYYRYFEMVTDSFEILSSLECDAFNIASGFRWRNTMLLSLKINSISPIV

SEQ ID NO: 5632 - protein, 44 aa, Homo sapiens
  MISC_FEATURE (38): Xaa equals any of the naturally occurring L-amino acids
SSCMNQGSHSGFQGLDFLVCKRDFTMHLATSPSSLGNXKTKCRQ

SEQ ID NO: 5633 - protein, 101 aa, Homo sapiens
  MISC_FEATURE (62): Xaa equals any of the naturally occurring L-amino acids
  MISC_FEATURE (83): Xaa equals any of the naturally occurring L-amino acids
QGNPKLQKLKGGEEGPVLMAEAVKKVNRGNGKTSSRILLLTKGHVILTDTKKSQAKIVIGLXNVAGVSVTSLKDGLFSLHLSXMSSVGSKGDFLLVKRACD

SEQ ID NO: 5634 - protein, 73 aa, Homo sapiens
NRSVQSYFFLTLNFPSREYTIWLRGRGSPEERGFALRGRASLDFAASNFSRGVEGGALGGPHSLSGVPARVSF

SEQ ID NO: 5635 - protein, 146 aa, Homo sapiens
  MISC_FEATURE (59): Xaa equals any of the naturally occurring L-amino acids
SCEDGKVEQEALSAFLHDVNEEIQCQIEVDGTPRGRGAGVGSDVPSPPSPGPTDCGHEXAGWCYDSRLQHRALPSSPQWDIKTTLGPFVQGTTSSIDGENKLSRATTGWREAGTIVFLRSVTADPTDHACWYTLVPDPACRTSAVC

SEQ ID NO: 5636 - protein, 59 aa, Homo sapiens
GGNSGNGPAKIYGAAAADDTANITQQPDANVDIDWQGQAFRGNNQQVLLEQLENQGIRI

SEQ ID NO: 5637 - protein, 48 aa, Homo sapiens
KAKQCKNPLQKARLPPSTEPQLLCSPLQRQWLLLVTCISCWICVFYQG

SEQ ID NO: 5638 - protein, 39 aa, Homo sapiens
DSVLSLISHNQLFLLVPNSCSPGDPLVLERPPPRWSSSF

SEQ ID NO: 5639 - protein, 26 aa, Homo sapiens
WHMPVIPALWESEAGGSLESRSLRLP

SEQ ID NO: 5640 - protein, 87 aa, Homo sapiens
IANSKGCTSVIINKNLANSCGTGYSHLICLVPKIACPFPNSSQLDCATKTDKYLLGNHNHGDLLPQLGPWYIFVCILWCYMQINTFN

SEQ ID NO: 5641 - protein, 93 aa, Homo sapiens
  MISC_FEATURE (87): Xaa equals any of the naturally occurring L-amino acids
QETSKMETLSFPRYNVAEIVIHIRNKILTGADGKNLTKNDLYPNPKPEVLHMIYMRALQIVYGIRLEHFYMMPVNSEVMYPHLMGRXLTIQAI

SEQ ID NO: 5642 - protein, 114 aa, Homo sapiens
  MISC_FEATURE (97): Xaa equals any of the naturally occurring L-amino acids
  MISC_FEATURE (98): Xaa equals any of the naturally occurring L-amino acids
  MISC_FEATURE (99): Xaa equals any of the naturally occurring L-amino acids
  MISC_FEATURE (102): Xaa equals any of the naturally occurring L-amino acids
  MISC_FEATURE (104): Xaa equals any of the naturally occurring L-amino acids
  MISC_FEATURE (111): Xaa equals any of the naturally occurring L-amino acids
TVLGHVLYLCLAPHLFLDPLVICMTTFKNFNFVCCLRHCCEHPHGVRHPPTLAPASTLLHLTSVYPAALLLLLVCVNEDNLVAVTYKCFIWHHPSVXXXWWXEXTLAPTPXHTS

SEQ ID NO: 5643 - protein, 210 aa, Homo sapiens
  MISC_FEATURE (145): Xaa equals any of the naturally occurring L-amino acids
  MISC_FEATURE (159): Xaa equals any of the naturally occurring L-amino acids
  MISC_FEATURE (165): Xaa equals any of the naturally occurring L-amino acids
  MISC_FEATURE (179): Xaa equals any of the naturally occurring L-amino acids
  MISC_FEATURE (182): Xaa equals any of the naturally occurring L-amino acids
  MISC_FEATURE (183): Xaa equals any of the naturally occurring L-amino acids
  MISC_FEATURE (187): Xaa equals any of the naturally occurring L-amino acids
  MISC_FEATURE (190): Xaa equals any of the naturally occurring L-amino acids
KENKVVLIVGETGSGKTTQIPQFLLDDCFKNGIPCRIFCTQPRRLAAIAVAERVAAERRERIGQTIGYQIRLESRVSPKTLLTFCTNGVLLRTLMAGDSTLSTVTHVIVDEVHERDRFSDFLLTKLRDLLQKHPTLKLILSSAAXDVNLFIRYFGSCPXIYIQGXPFEVKEMFLEDILXTTXXTNKXMLXYKKEKQQDEKTLSKKKKKKK

SEQ ID NO: 5644 - protein, 63 aa, Homo sapiens
  MISC_FEATURE (1): Xaa equals any of the naturally occurring L-amino acids
  MISC_FEATURE (7): Xaa equals any of the naturally occurring L-amino acids
  MISC_FEATURE (8): Xaa equals any of the naturally occurring L-amino acids
  MISC_FEATURE (12): Xaa equals any of the naturally occurring L-amino acids
  MISC_FEATURE (16): Xaa equals any of the naturally occurring L-amino acids
XVRYIAXXSAAXRKRXVCSEWKFAACVVDRLCLMAFSVFTIICTIGILMSAPNFVEAVSKDFA

SEQ ID NO: 5645 - protein, 88 aa, Homo sapiens
PSTLDCSLTECLSLSILCPFYSFKKTVAVTKELFLIPRLCQTKVSSLRLLDFDIKYVFSSSNFIYVYSSSDPEIYFLLIILTWIPQAI

SEQ ID NO: 5646 - protein, 131 aa, Homo sapiens
  MISC_FEATURE (3): Xaa equals any of the naturally occurring L-amino acids
PGXPGRPTRPARCQQPGARSQEQSASMNLGVSMLRILFLLDVGGAQVLATGKTPGAEIDFKYALIGTAVGVAISAGFLALKICMIRRHLFDDDSSDLKSTPGGLSDTIPLKKRAPRRNHNFSKRDAQVIEL

SEQ ID NO: 5647 - protein, 166 aa, Homo sapiens
PTRPHSARLTMCHSRSCHPTMTILQAPTPAPSTIPGPRRGSGPEIFTFDPLPEPAAAPAGRPSASRGHRKRSRRVLYPRVVRRQLPVEEPNPAKRLLFLLLTIVFCQILMAEEGVPAPLPPEDAPNAASLAPTPVSPVLEPFNLTSEPSDYALDLSTFLQQHPAAF

SEQ ID NO: 5648 - protein, 169 aa, Homo sapiens
GPSWRSNPRGRSSSTWSSSSPPRSRSRSRSSSPNPSLSLSRNPSPNHNPSLSPNPSLSPSSSTRIRIHIHIHTLILTRTHTLTRTRIRTKYRTHTHSRTRSRTGTGFSAAPPTLPERGSSRARQGFEDLRKWDEHISIVFTWIKSKTVSPPRTRSSSLDITLLKTCDSS

SEQ ID NO: 5649 - protein, 62 aa, Homo sapiens
  MISC_FEATURE (12): Xaa equals any of the naturally occurring L-amino acids
KTFSIRKRGKFXPSKFDYSSKLSLLMQSSFVTLTLGHCYQTSWEISSSRRLNTCRKQMFFGP

SEQ ID NO: 5650 - protein, 337 aa, Homo sapiens
  MISC_FEATURE (7): Xaa equals any of the naturally occurring L-amino acids
APACGAXAWKFLLGYLSWEGTAEEHKAHIRKKTDEYFRMKLQWKSVSPEQERRNSLLHGYRSLIERDVSRTDRTNKFYEGPENPGLGLLNDILLTYCMYHFDLGYVQGMSDLLSPILYVIQNEVDAFWCFCGFMELVQGNFEESQETMKRQLGRLLLLLRVLDPLLCDFLDSQDSGSLCFCFRWLLIWFKREFPFPDVLRLWEVLWTGLPGPNLHLLVACAILDMERDTLMLSGFGSNEILKHINELTMKLSVEDVLTRAEALHRQLTACPELPHNVQEILGLAPPAEPHSPSPTASPLPLSPTRAPPTPPPSTDTAPQPDSSLEILPEEEDEGADS

SEQ ID NO: 5651 - protein, 54 aa, Homo sapiens
MQLLLLTCLLQLIMVTNKAIASQISQIKHFFHCILVVVCPNSSMYLIMSGSILH

SEQ ID NO: 5652 - protein, 65 aa, Homo sapiens
  MISC_FEATURE (44): Xaa equals any of the naturally occurring L-amino acids
  MISC_FEATURE (48): Xaa equals any of the naturally occurring L-amino acids
  MISC_FEATURE (51): Xaa equals any of the naturally occurring L-amino acids
CLWLFKSQSLVNHITIRPWFSIGGDFPRGTFGHVLEAFWLSHWXPGVXLPXTKKKKKKKKRGAFL

SEQ ID NO: 5653 - protein, 83 aa, Homo sapiens
  MISC_FEATURE (32): Xaa equals any of the naturally occurring L-amino acids
TNFFQLVKHHTSSAKGILLAEPSWMISVTHAXTCSLEGSGEWIHAICLEDTRMSQPPDLVIYKLLRITLVYFWSENGKAQIMK

SEQ ID NO: 5654 - protein, 407 aa, Homo sapiens
AACQPRCCCSSCCGTADRAAAPLSPLQAPIWAPATSMDARRVPQKDLRVKKNLKKFRYVKLISMETSSSSDDSCDSFASDNFANTRLQSVREGCRTRSQCRHSGPLRVAMKFPARSTRGATNKKAESRQPSENSVTDSNSDSEDESGMNFLEKRALNIKQNKAMLAKLMSELESFPGSFRGRHPLPGSDSQSRRPRRRTFPGVASRRNPERRARPLTRSRSRILGSLDALPMEEEEEEDKYMLVRKRKTVDGYMNEDDLPRSRRSRSSVTLPHIIRPVEEITEEELENVCSNSREKIYNRSLGSTCHQCRQKTIDTKTNCRNPDCWGVRGQFCGPCLRNRYGEEVRDALLDPNWHCPPCRGICNCSFCRQRDGRCATGVLVYLAKYHGFGNVHAYLKSLKQEFEMQA

SEQ ID NO: 5655 - protein, 44 aa, Homo sapiens
REASGSLWEQSYKLIEIHTLPKQLGPTTVPHVSMQNYILPRINS

SEQ ID NO: 5656 - protein, 56 aa, Homo sapiens
  MISC_FEATURE (3): Xaa equals any of the naturally occurring L-amino acids
  MISC_FEATURE (19): Xaa equals any of the naturally occurring L-amino acids
KMXLTLTKGNKSWSSTAVXAALELVDPPGCRNSAPLCMYSSLLPSSQLSVRYVFLS

SEQ ID NO: 5657 - protein, 35 aa, Homo sapiens
SVCVHTFYFSVSWVYVWLKTILESKSILIYKKTFW

SEQ ID NO: 5658 - protein, 106 aa, Homo sapiens
QCPMGPLLLPAPSLLLLMHSPLPAAPGFPAFLLTPSNSLGTPAATTLWVGHWDPLAQSWLLLTPSLDACPGTPSPLPLPCSFNRVNHVYCTGAVVIAETAGWRRSR

SEQ ID NO: 5659 - protein, 85 aa, Homo sapiens
RNPKNGNNPSHGCHTLLTCSIPTQELPAYGASHWSTSYPQHLSCHCQGTYLWPPAILYRAIVLYILHIRKLRLKVNLICLCQSQD

SEQ ID NO: 5660 - protein, 269 aa, Homo sapiens
  MISC_FEATURE (4): Xaa equals any of the naturally occurring L-amino acids
  MISC_FEATURE (177): Xaa equals any of the naturally occurring L-amino acids
GPYXYFLPGECLDCSPLLVLQGVTHAAIWAACISYLSAAVPPELRTSAQGILQGLHLGLGRGCGAMIGGVLVNYFGAAATFRGIGMACLVILLLFALIQWLAVPDEEEDKTMLAERIPVPSSPVPIATIDLVQQQTEDVMPRIEPRLPPKKTKHQEEQEDVNKPAWGVSSSPWVTFXYALYQIKEMMQLTRDNRASEIQPLQGTNENRENSPAGRAQPVPCETHSDPSRNQPSPDAAASQTQTSPAHPSVDPCTEESEEQQAQLAAGGH

SEQ ID NO: 5661 - protein, 364 aa, Homo sapiens
CLRKSFEMTVEKVQGISRLEQLCEEFSEEERVRELKQEKKRQKRKNRRKNKCVCDIPTPLQTADEKEVSQEKETDFIENSSCKACGSTEDGNTCVEVIVTNENTSCTCPSSGNLLGSPKIKKGLSPHCNGSDCGYSSSMEGSETGSREGSDVACTEGICNHDEHGDDSCVHHCEDKEDDGDSCVECWANSEENDTKGKNKKKKKKSKILKCDEHIQKLGSCITDPGNRETSGNTMHTVFHRDKTKDTHPESCCSSEKGGQPLPWFEHRKNVPQFAEPTETLFGPDSGKGAKSLVELLDESECTSDEEIFISQDEIQSFMANNQSFYSNREQYRQHLKEKFNKYCRLNDHKRPICSGWLTTAGAN

SEQ ID NO: 5662 - protein, 90 aa, Homo sapiens
ATLWDGHAAVWHGYEVHGMEKIPEDGPALIIFYHGAIPIDFYYFMAKIFIHKGRTCRVVADHFVFKIQGLVYYWMCFVLYMDQEKNVLKF

SEQ ID NO: 5663 - protein, 104 aa, Homo sapiens
  MISC_FEATURE (3): Xaa equals any of the naturally occurring L-amino acids
HSXMWLVHLTREEWGYLDPVQRDLYREVMLENYGNVVSLGILLRLPTTRIHSVNSCPALSHTQASAFSGETLAVLTAGISKRWPKYRLPIDIARPCSETPFPRL

SEQ ID NO: 5664 - protein, 49 aa, Homo sapiens
PLKTFPVCLVIAKPRKISFLSSYRELAMKLKFNCVSRSLIFLQIINYVL

SEQ ID NO: 5665 - protein, 40 aa, Homo sapiens
KLDFKITNERNLILFCDRSQVLQWFAIQNLIIVKPQFKRL

SEQ ID NO: 5666 - protein, 74 aa, Homo sapiens
  MISC_FEATURE (48): Xaa equals any of the naturally occurring L-amino acids
GYLCLLCILVMARSRLSTTGRHPAVVSLLELNVWLSKILSIESLSLKXLLQMNAQHEIFKIVSYTLGSNKQKIL

SEQ ID NO: 5667 - protein, 121 aa, Homo sapiens
FSVTGQAPVEISFVLLWAQRWWWFGSSEDCLGRFSGHGALCWPGWGWPRRCPFPGALWWLQKTSFVENCFSAWNQTSSRWFGPCPCVGHYHTKRPIKIKKIKKKKTNYWRWWPMMHLLFAG

SEQ ID NO: 5668 - protein, 25 aa, Homo sapiens
WTPVIPGTREAEAGESLEPGRQRLQ

SEQ ID NO: 5669 - protein, 52 aa, Homo sapiens
SIDTFYIQFYKYKYYNFILMVPKIHFLRLKACTSMHTCFWGEWGEDILIISL

SEQ ID NO: 5670 - protein, 49 aa, Homo sapiens
YIFLISYRLYRKEVLEKLIEKCVSKGYVFQMEMIVRARQLNYTIGEVCN

SEQ ID NO: 5671 - protein, 222 aa, Homo sapiens
  MISC_FEATURE (115): Xaa equals any of the naturally occurring L-amino acids
  MISC_FEATURE (117): Xaa equals any of the naturally occurring L-amino acids
  MISC_FEATURE (118): Xaa equals any of the naturally occurring L-amino acids
  MISC_FEATURE (156): Xaa equals any of the naturally occurring L-amino acids
  MISC_FEATURE (194): Xaa equals any of the naturally occurring L-amino acids
  MISC_FEATURE (217): Xaa equals any of the naturally occurring L-amino acids
  MISC_FEATURE (218): Xaa equals any of the naturally occurring L-amino acids
QWVAYGSEPHTSVPVPAGSLPDHAVHRPHDRCARSGVMPPAQLTTINQSQLSAQLGLNLGGASMPHTSPSPPASKSATPSPSSSINEEDADEANRAIGEKRAAPDSGKKPKTPKXKXXKDPNEPQKPVSAYALFFRDTQAAIKGQNPNATFGEVSXIVASMWDSLGEEQKQVYKRKTEAAKKEYLKALAAYRAXLVSKAAAESAEAQTIRSVQQTLXXTNLT

SEQ ID NO: 5672 - protein, 48 aa, Homo sapiens
RYIITKLKLCFCFIQRNLKIIDKKFLFRAMSLYHTLGNETLSYVLSDN

SEQ ID NO: 5673 - protein, 94 aa, Homo sapiens
KLRYILPKNFFNKIAKNILFRHFNVPIYNWIFSLNSTQSCGFYFQLIFFLVGSVHGIISLSRGLSCMCAEFVKESIGRCRRPRFAFKVFFRLCG

SEQ ID NO: 5674 - protein, 65 aa, Homo sapiens
GVFAAMYSYSSMLTLPFDVVQNLDLSPWISPVVPASRGIFLHVSQPPSCSRVLLDLGFSCPSLLG

SEQ ID NO: 5675 - protein, 111 aa, Homo sapiens
  MISC_FEATURE (95): Xaa equals any of the naturally occurring L-amino acids
  MISC_FEATURE (103): Xaa equals any of the naturally occurring L-amino acids
ISNTSSDCRPSEESELLTDTTTNILSGTTSTVESDILTQTDREVALHERSSSVSTIDTARLIQAFGHERVCLSPRRIKLYSSITNQQRRYLEEAXKHSKKVLXYRSSPSDF

SEQ ID NO: 5676 - protein, 129 aa, Homo sapiens
  MISC_FEATURE (29): Xaa equals any of the naturally occurring L-amino acids
  MISC_FEATURE (80): Xaa equals any of the naturally occurring L-amino acids
  MISC_FEATURE (91): Xaa equals any of the naturally occurring L-amino acids
  MISC_FEATURE (106): Xaa equals any of the naturally occurring L-amino acids
  MISC_FEATURE (112): Xaa equals any of the naturally occurring L-amino acids
GPSWVRLGLSWALYVFWIQGYWARYVCGXIPSLPQPHLPLKPSLALSELPFLLPSLPSAQCPTWLFCYFGSGGTSWECEXPYRKIALQEEXLQGTILNPKAWNLLXHFTFVXKGLLNALEKDLGPELLS

SEQ ID NO: 5677 - protein, 124 aa, Homo sapiens
  MISC_FEATURE (24): Xaa equals any of the naturally occurring L-amino acids
  MISC_FEATURE (25): Xaa equals any of the naturally occurring L-amino acids
PIHELMPEDRASTPRTTTMTFTCXXFFDLFNALTCRSQTKLIFEIGFLRNHMFLYSVLGSILGQLAVIYIPPLQRVFQTENLGALDLLFLTGLASSVFILSELLKLCEKYCCSPKRVQMHPEDV

SEQ ID NO: 5678 - protein, 50 aa, Homo sapiens
VSVKQFYFSYVTVAGYDLNFVFRPPARILCLLLYSRSVFLPRLRHRGPQP

SEQ ID NO: 5679 - protein, 170 aa, Homo sapiens
  MISC_FEATURE (38): Xaa equals any of the naturally occurring L-amino acids
  MISC_FEATURE (63): Xaa equals any of the naturally occurring L-amino acids
  MISC_FEATURE (97): Xaa equals any of the naturally occurring L-amino acids
  MISC_FEATURE (154): Xaa equals any of the naturally occurring L-amino acids
LLHLILYMSNASFLSVCLLAENPVQLSPGCHGKYDKEXTLGLGLKGLVIQKTREGCTCRVIYXRNLIKYLAHRSYKESFQRGPLATAGFFVRNICVXFYPREQNPRKGSFIIYSHFSSFLNKTFSSRNTAFEGLCFMQPASLVDLFTRSHQVIXSILGRWRKQTDTVSRC

SEQ ID NO: 5680 - protein, 83 aa, Homo sapiens
  MISC_FEATURE (61): Xaa equals any of the naturally occurring L-amino acids
  MISC_FEATURE (75): Xaa equals any of the naturally occurring L-amino acids
YVLSAFRGLSRVIDRHLNEALSFLKCKVGETQDTRKRKDIVHIVVAVALRTVLARDRLGIXINPGHWGSFSGSLXLSLPGSTH

SEQ ID NO: 5681 - protein, 98 aa, Homo sapiens
  MISC_FEATURE (96): Xaa equals any of the naturally occurring L-amino acids
VHFISTFYYIYLIAQVLLSRKKWDVANTALLACRQCCPVNRLKCIFISWYINLRKEKKKKKKKKKKKKKKKKKKKKKKKKKKKKKKKKKKKKKKKXGG

SEQ ID NO: 5682 - protein, 199 aa, Homo sapiens
VFLTYSGGDSVMQIVMFDRQSIFIHGMKISLQQRIPGVSIQGASQADELWQKLESYPEALVMLDGDQDGEFCYWLLQKTVVQFPEVKVLITATDCNKRWLQEVIHFNVLAIVPRDSTVETFALAVNSAAMGMMFLPGDWRTTPEKDIKDLKSLSARQREILTMLAAGESNKEIGRALNISTGTVKAHLESLYRRLEVKN

SEQ ID NO: 5683 - protein, 192 aa, Homo sapiens
  MISC_FEATURE (166): Xaa equals any of the naturally occurring L-amino acids
  MISC_FEATURE (172): Xaa equals any of the naturally occurring L-amino acids
IMLHAEAPAPARFPAFSMGHGGAFGEGLCGFPPKSRLMPLIPSQEVAEGLGSVQAPRGGDVQVKQGVCRRRGSLPWAGCQHLGVPGCQEKFTHTRALLAKGESYDGRARALSRHQVCSQSSRSAPVTWNRPAFRGLSFLICLMGIAIPTFPVLVGFSLDAQETAAXEGLFGXLFHVTPLLPCPHGAGGAGAW

SEQ ID NO: 5684 - protein, 44 aa, Homo sapiens
  MISC_FEATURE (34): Xaa equals any of the naturally occurring L-amino acids
  MISC_FEATURE (38): Xaa equals any of the naturally occurring L-amino acids
LCNCITVTNEILSLLLSICPKKPPPHVLSGELPXHFWXTAQINS

SEQ ID NO: 5685 - protein, 92 aa, Homo sapiens
EYSSLSPRIDSITQSNINLNGLAPSFFSKNNQLIKKKFEGLNYFNGCLKYSVQFVPVSSLSVWGRIKYCAKLVLGYILQHLVFYLTNRILVP

SEQ ID NO: 5686 - protein, 51 aa, Homo sapiens
  MISC_FEATURE (47): Xaa equals any of the naturally occurring L-amino acids
ARMFTFGRLFQIITVVTCLQFIQDCCIHSRQINSLLETSSLSRCLEXPDVC

SEQ ID NO: 5687 - protein, 486 aa, Homo sapiens
  MISC_FEATURE (197): Xaa equals any of the naturally occurring L-amino acids
  MISC_FEATURE (203): Xaa equals any of the naturally occurring L-amino acids
  MISC_FEATURE (483): Xaa equals any of the naturally occurring L-amino acids
QVQIRILDVNDNIPVVENKVLEGMVEENQVNVEVTRIKVFDADEIGSDNWLANFTFASGNEGGYFHIETDAQTNEGIVTLIKEVDYEEMKNLDFSVIVANKAAFHKSIRSKYKPTPIPIKVKVKNVKEGIHFKSSVISIYVSESMDRSSKGQIIGNFQAFDEDTGLPAHARYVKLEDRDNWISVDSVTSEIKLAKLXDFESRXVQNGTYTVKIVAISEDYPRKTITGTVLINVEDINDNCPTLIEPVQTICHDAEYVNVTAEDLDGHPNSGPFSFSVIDKPPGMAEKWKIARQESTSVLLQQSEKKLGRSEIQFLISDNQGFSCPEKQVLTLTVCECLHGSGCREAQHDSYVGLGPAAIALMILAFLLLLLVPLLLLMCHCGKGAKGFTPIPGTIEMLHPWNNEGAPPEDKVVPSFLPVDQGGSLVGRNGVGGMAKEATMKGSSSASIVKGQHEMSEMDGRWEEHRSLLSGRATQFTGATGAXHDH

SEQ ID NO: 5688 - protein, 311 aa, Homo sapiens
  MISC_FEATURE (135): Xaa equals any of the naturally occurring L-amino acids
  MISC_FEATURE (175): Xaa equals any of the naturally occurring L-amino acids
AIVPSWDLDKDTISLLSPVLCIFPSPSSQTSLLYVFSLAGRMTQNTVIVNGVAMASRPSQPTHVNVHIHQESALTQLLKAGGSLKKFLFHPGDTVPSTARIGYEQLALGVTQILLGVVSCVLGVCLSLGPWTVLXASGCAFWAGSVVIAAGAGAIVHEKHPGKLAGYISSLLTLXGFATAMAAVVLCVNSFIWQTEPFLYIDTVCDRSDPVFPTTGYRWMRRSQENQWQKEECRAYMQMLRKLFTAIRALFLAVCVLKVIVSLVSLGVGLRNLCGQSSQPLNEEGSEKRLLGENSVPPSPSREQTSTAIVL

SEQ ID NO: 5689 - protein, 98 aa, Homo sapiens
  MISC_FEATURE (85): Xaa equals any of the naturally occurring L-amino acids
AQWLPLEERGAETETKVQERENGESPLELEQLDQHHEMKETNEQKLHKIANELLLTERAYVNRLDLLDQVFYCKLLEEANRGSFXAEMVIKSFLIFHQ

SEQ ID NO: 5690 - protein, 58 aa, Homo sapiens
ARKEIQYCFWTLIKSCAIDTYMSHLAVLRRAIITLQLTLENILAFEHFSNNQVDSRGS

SEQ ID NO: 5691 - protein, 54 aa, Homo sapiens
SLTSKPETSEILKANLFSLLCIKFIYLKCYCSWLRIILCKFSFFVVCLFACCSP

SEQ ID NO: 5692 - protein, 486 aa, Homo sapiens
  MISC_FEATURE (7): Xaa equals any of the naturally occurring L-amino acids
  MISC_FEATURE (326): Xaa equals any of the naturally occurring L-amino acids
  MISC_FEATURE (400): Xaa equals any of the naturally occurring L-amino acids
  MISC_FEATURE (406): Xaa equals any of the naturally occurring L-amino acids
SSTAVTXALELVDPPGCRNSARGYIQYGNEEQRKQAFEELRDDLVELSKAKYSRNIVKKFLMYGSKPQIAEIIRSFKGHVRKMLRHAEASAIVEYAYNDKAILEQRNMLTEELYGNTFQLYKSADHRTLDKVLEVQPEKLELIMDEMKQILTPMAQKEAVIKHSLVHKVFLDFFTYAPPKLRSEMIEAIREAVVYLAHTHDGARVAMHCLWHGTPKDRKVIVKTMKTYVEKVANGQYSHLVLLAAFDCIDDTKLVKQIIISEIISSLPSIVNDKYGRKVLLYLLSPRDPAHTVREIIEVLQKGDGNAHSKKDTEVRRRELLESISXALLSYLQEHAQEVVLDKSACVLVSDILGSATGDVQPTMNAIASLAATGLHPGGKDGELHIAEHPAGHLVLKWLXEQDKKXKENGREGCFAKTLVEHVGMKNLKSWASVNRGAIILSSLLQSCDLEVANKVKAALKSLIPTLEKTKSTSKGIEILLEKLST

SEQ ID NO: 5693 - protein, 213 aa, Homo sapiens
  MISC_FEATURE (90): Xaa equals any of the naturally occurring L-amino acids
  MISC_FEATURE (138): Xaa equals any of the naturally occurring L-amino acids
VLDVAAGMIKPGVTTEEIDHAVHLACIARNCYPSPLNYYNFPKSCCTSVNEVICHGIPDRRPLQEGDIVNVDITLYRNGYHGDLNETFFXGEVDDGARKLVQTTYECLMQAIDAVKPGVRYRELGNIIQKHAQANGFXVVRSYCGHGNPQAFSYSSQCTPLCLKIKQLGVMEVGPCIYNWSQWFVEGGWQDGNLGQMVGTAVDKRRESGLLQF

SEQ ID NO: 5694 - protein, 279 aa, Homo sapiens
  MISC_FEATURE (39): Xaa equals any of the naturally occurring L-amino acids
  MISC_FEATURE (251): Xaa equals any of the naturally occurring L-amino acids
  MISC_FEATURE (256): Xaa equals any of the naturally occurring L-amino acids
  MISC_FEATURE (257): Xaa equals any of the naturally occurring L-amino acids
THASAHTTNPEQTLPGTNLTGFLSPVDNHMRNLTSQDLXYDLDINIFDEINLMSLATEDNFDPIDVSQLFDEPDSDSGLSLDSSHNNTSVIKSNSSHSVCDEGAIGYCTDHESSSHHDLEGAVGGYYPEPSKLCHLDQSDSDFHGDLTFQHVFHNHTYHLQPTAPESTSEPFPWPGKSQKIRSRYLEDTDRNLSRDEQRAKALHIPFSVDEIVGMPVDSFNSMLSRYYLTDLQVSLIRDIRRRGKNKVAAXNCRKXXLDIILNLEDDGMVTWPAKKGNP

SEQ ID NO: 5695 - protein, 234 aa, Homo sapiens
KNLTENQEALAKEMRADADAYRRKVDLEEHMFHKLIEAGETQSQKTQKVIKENLAKAEQACLNTDWQIQSLHKQKCDDLQRNKCYQEVAKLLRENRRKEIEIINAMVEEEAKKWKEAEGKEFRLRSAKKASALSDASRKWFLKQEINAAVEHAENPCHKEEPRFQNEQDSSCLPRTSQLNDSSEMDPSTQISLNRRAVEWDTTGQNLIKKVRNLRQRLTARARHRCQTPHLLAA

SEQ ID NO: 5696 - protein, 113 aa, Homo sapiens
  MISC_FEATURE (66): Xaa equals any of the naturally occurring L-amino acids
  MISC_FEATURE (84): Xaa equals any of the naturally occurring L-amino acids
EIKFCFYLGTRALQDLIPAYLSSLDSLYSSIWKCGPWTEALPNNAEHLVLPFARMVLMVPKITASXPKFRTQITLWRRPQPLAXAFKALRDLDTRLALIYIYFKSISSLSHAH

SEQ ID NO: 5697 - protein, 78 aa, Homo sapiens
LDIKTSYSLNPKAKLMSRANQSSWGQNRTKTYLMQGIEARPKTGQPNRMGHLPPLMPACPSVIINSAPFHSPKSPVQT

SEQ ID NO: 5698 - protein, 43 aa, Homo sapiens
  MISC_FEATURE (10): Xaa equals any of the naturally occurring L-amino acids
  MISC_FEATURE (11): Xaa equals any of the naturally occurring L-amino acids
LSLTKGNKSXXSTAVAAALELVDPPGCRNSARASNLYFYLLCI

SEQ ID NO: 5699 - protein, 51 aa, Homo sapiens
TTYCFPLFQGDAVDYQKQLKQMIKDLAKEKDKTEKELPKMSQVWTFFSAEN

SEQ ID NO: 5700 - protein, 35 aa, Homo sapiens
EALVDFLYWYFRSLLSFLTEVGANELSILSTWLIK

SEQ ID NO: 5701 - protein, 32 aa, Homo sapiens
GNKSWGSTAVTTALELVDPPGCRNSARAYKLS

SEQ ID NO: 5702 - protein, 74 aa, Homo sapiens
GTLLKFLCKLGLFFSLSCVSRTVGVPGLLSCWVQASRILRRCEEEVRKIGGNRKEKEIWPRFWGEKVWGKSKGN

SEQ ID NO: 5703 - protein, 50 aa, Homo sapiens
ENACKALGIVHDVNTQMLLKSINVNYFLAHFSGLISPVKMIHSILFNGFM

SEQ ID NO: 5704 - protein, 147 aa, Homo sapiens
  MISC_FEATURE (35): Xaa equals any of the naturally occurring L-amino acids
  MISC_FEATURE (92): Xaa equals any of the naturally occurring L-amino acids
  MISC_FEATURE (134): Xaa equals any of the naturally occurring L-amino acids
  MISC_FEATURE (140): Xaa equals any of the naturally occurring L-amino acids
GLGCALAQVLCGDARQHILLRDDTLSGQHRPVTIXSLATSLSPASPSLDTRPQTPGSGRGGWTSLHTPAGRGQVPRSPMWRAGPGAAQAGGXNWGLRVLRRRVKIIKGATESKRREGLVPNSCSPGDPLVLERXPPRWSXSFVPLVR

SEQ ID NO: 5705 - protein, 58 aa, Homo sapiens
VFSGMHRFIIFSTLKMRAFKSVHYLYSPVLSIVYIIYMIKENMHNQTSLNIVFAPDEQ

SEQ ID NO: 5706 - protein, 54 aa, Homo sapiens
  MISC_FEATURE (22): Xaa equals any of the naturally occurring L-amino acids
TRCKRFVNSLAPKLSHWRRDFXHYAESGWVEFRTATLVAEELHQLGYSLALGRE

SEQ ID NO: 5707 - protein, 57 aa, Homo sapiens
QQFGRDGSPAAYVGGPSVGLRVRVAMAVDITLLFRASVKTVKTRNKRWEWRWATGSM

SEQ ID NO: 5708 - protein, 92 aa, Homo sapiens
  MISC_FEATURE (17): Xaa equals any of the naturally occurring L-amino acids
QKSPSVEDGLKGRDQTXMDTNPKTEDAPCLPHEAYLSACVSMIAGIELLGTSRMIYLAICFLHSKNQNGPVIPNRENRANSLFSPLPSEASF

SEQ ID NO: 5709 - protein, 122 aa, Homo sapiens
  MISC_FEATURE (108): Xaa equals any of the naturally occurring L-amino acids
GRGWGWEGTVLPGEAEEDRVGLRARRRPSRLLAPLAWCPAPGREAAGLDRAGLPGGARALAAGRPLLSAMAGLHPWVIFSGPLWPLLTPREQTTRTTQEQIKSRPQPXRERASILFAPRVAV

SEQ ID NO: 5710 - protein, 82 aa, Homo sapiens
  MISC_FEATURE (38): Xaa equals any of the naturally occurring L-amino acids
  MISC_FEATURE (40): Xaa equals any of the naturally occurring L-amino acids
AELTPSSKLTVDTDTLTPSSTLCENSVSELLTPAKAEXSXHPNSDFFGQEGETQFGFPNAAGNHGSQKERNLITVTGSSFLV

SEQ ID NO: 5711 - protein, 316 aa, Homo sapiens
  MISC_FEATURE (14): Xaa equals any of the naturally occurring L-amino acids
  MISC_FEATURE (25): Xaa equals any of the naturally occurring L-amino acids
WIPRAAGIRHETGXNNTKAFEVPAXANFLNSNDVFVLKTQSCCYLWCGKGCSGDEREMAKMVADTISRTEKQVVVEGQEPANFWMALGGKAPYANTKRLQEENLVITPRLFECSNKTGRFLATEIPDFNQDDLEEDDVFLLDVWDQVFFWIGKHANEEEKKAAATTAQEYLKTHPSGRDPETPIIVVKQGHEPPTFTGWFLAWDPFKWSNTKSYEDLKAELGNSRDWSQITAEVTSPKVDVFNANSNLSSGPLPIFPLEQLVNKPVEELPEGVDPSRKEEHLSIEDFTQAFGMTPAAFSALPRWKQQNLKKEKGLF

SEQ ID NO: 5712 - protein, 99 aa, Homo sapiens
  MISC_FEATURE (58): Xaa equals any of the naturally occurring L-amino acids
  MISC_FEATURE (84): Xaa equals any of the naturally occurring L-amino acids
  MISC_FEATURE (85): Xaa equals any of the naturally occurring L-amino acids
GKKEENNPVSLEVGVWVGTGDPGVVMMKTRAGFGGRLRLFRSLLSPPPSRSLPPPPHXSAGKAACAAPGGEMVDAHELCMWFLXXLSVLGPVFGGTPKG

SEQ ID NO: 5713 - protein, 292 aa, Homo sapiens
LQAIPAKKAPLQLLSRLCGDHLQAIPAKKAPAGQEEPGTPPSSPLSAEQLDRIQRNKAAALLRLAARNVPVGFGESWKKHLSGEFGKPYFIKLMGFVAEERKHYTVYPPPHQVFTWTQMCDIKDVKVVILGQDPYHGPNQAHGLCFSVQRPVPPPPSLENIYKELSTDIEDFVHPGHGDLSGWAKQGVLLLNAVLTVRAHQANSHKERGWEQFTDAVVSWLNQNSNGLVFLLWGSYAQKKGSAIDRKRHHVLQTAHPSPLSVYRGFFGCRHFSKTNELLQKSGKKPIDWKEL

SEQ ID NO: 5714 - protein, 103 aa, Homo sapiens
FLRCVDLDGRCDMLVFLTCIYLRHCYRDTVVTFWGTVFGERGVHLDLCGTVQIVMWLHRKPCAKNKLHLKNIKNLRFMCFLSFSLRKQKSSGLRYLTLHVKTL

SEQ ID NO: 5715 - protein, 173 aa, Homo sapiens
  MISC_FEATURE (131): Xaa equals any of the naturally occurring L-amino acids
  MISC_FEATURE (146): Xaa equals any of the naturally occurring L-amino acids
  MISC_FEATURE (154): Xaa equals any of the naturally occurring L-amino acids
  MISC_FEATURE (157): Xaa equals any of the naturally occurring L-amino acids
ASMATAATEEPFPFHGLLPKKETGAASFLCRYPEYDGRGVLIAVLDTGVDPGAPGMQVTTDGKPKIVDIIDTTGSGDVNTATEVEPKDGEIVGLSGRVLKIPASWTNPSGKYHIGIKNGYDFYPKALKERXQKERKEKIWDPVHRXALAEACRXQEXFDVANNGSSQANKLIK

SEQ ID NO: 5716 - protein, 77 aa, Homo sapiens
TLVAEATMDLLLGDSWGSPRPPRAERGDEEFGTVGEEMGRDGISGSQSGWDTHAQLLHWWGVGHTLFLTGHDLQEEK

SEQ ID NO: 5717 - protein, 53 aa, Homo sapiens
IQHLMQVSSWVVFQLVWNSLVLTQTGIKHYFRFSLCQFLSSYNHVNQDVRTSI

SEQ ID NO: 5718 - protein, 64 aa, Homo sapiens
QPQCPASLTSSFLCPLCGSLLLVSAFSMLRTKSPIHCLCSRKLQKNKEPNYQNHIKSPLFCLGI

SEQ ID NO: 5719 - protein, 39 aa, Homo sapiens
AAFFLLRLSLFVLLPKRQLPEFGCLNYNLCRNSSVNTFK

SEQ ID NO: 5720 - protein, 112 aa, Homo sapiens
QLQLFCLGFQLFLVRVCSLMIWIYFAFIFQRLHLIPGKSSARQVSGFSLLSFNPSNTIFVKLDWWCFIQLIYSAYLFEKRLLEIDDVFVPVILKVVGARIEFHSGIGFGSGL

SEQ ID NO: 5721 - protein, 62 aa, Homo sapiens
WVMEYNLEKKRNKRDCVSPCCPGWSRTSELKQSTLLSLQKCWDYRHETPSPAIRFLFYIYMK

SEQ ID NO: 5722 - protein, 194 aa, Homo sapiens
  MISC_FEATURE (101): Xaa equals any of the naturally occurring L-amino acids
  MISC_FEATURE (113): Xaa equals any of the naturally occurring L-amino acids
  MISC_FEATURE (173): Xaa equals any of the naturally occurring L-amino acids
  MISC_FEATURE (192): Xaa equals any of the naturally occurring L-amino acids
PMRRPRGEPGPRAPRPTEGATCAGPGESWSPSPNSMLRVLLSAQTSPARLSGLLLIPPVQPCCLGPSKWGDRPVGGGPSAGPVQGLQRLLEQAKSPGELLXWLGQNPSKVRAXHYSVALRRLGQLLGSRPRPPPVEQVTLQDLSQLIIRNCPSFDIHTIHVCLHLAVLLGFPXDGPLVCALEQEPKLRLLRXHL

SEQ ID NO: 5723 - protein, 275 aa, Homo sapiens
  MISC_FEATURE (22): Xaa equals any of the naturally occurring L-amino acids
  MISC_FEATURE (47): Xaa equals any of the naturally occurring L-amino acids
  MISC_FEATURE (101): Xaa equals any of the naturally occurring L-amino acids
RWATYGRTGGLPNVGKSSTINXIMGNKKVSVSATPGHTKHFQTLYVXPGLCLCDCPGLVMPSFVSTKAEMTCSGILPIDQMRDHVPPVSLVCQNIPRHVLXATYGINIITPREDEDPHRPPTSEELLTAYGYMRGFMTAHGQPDQPRSARYILKDYVSGKLLYCHPPPGRDPVTFQHQHQRLLENKMNSDEIKMQLGRNKKAKQIENIVDKTFFHQENVRALTKGVQAVMGYKPGSGVVTASTASSENGAGKPWKKHGNRNKKEKSRRLYKHLDM

SEQ ID NO: 5724 - protein, 94 aa, Homo sapiens
HELEHTLVMAGPNSKRQTQGVHVPRMLQPALGPRVSHEDWPPLCTGARGGQVPVLARLLAAVPTETTALLCFPRRGAWLLAVRAGLFQKVGPCP

SEQ ID NO: 5725 - protein, 47 aa, Homo sapiens
  MISC_FEATURE (41): Xaa equals any of the naturally occurring L-amino acids
GQVAALSPRVVPGRLRSSPKRGCSSGKQVNSWYFTFLGNTXNEDLQL

SEQ ID NO: 5726 - protein, 71 aa, Homo sapiens
PKTVSKMHIKSIILEGFKSYAQRTEVNGFDPLFNAITGLNGSGKSNILDSICFLLGISNLSQVRASKFTRF

SEQ ID NO: 5727 - protein, 52 aa, Homo sapiens
PTYGCWDNSPSRMYCCSAQDSKMDYKRRFLLGGSKQKVQQHSNTRCLSWAEH

SEQ ID NO: 5728 - protein, 136 aa, Homo sapiens
  MISC_FEATURE (53): Xaa equals any of the naturally occurring L-amino acids
FGTKETVNKDICEKGTIQQMIGIFKNIISKPNEKEEAIVLEIQSDILLILSGXCENHIQRKEIFGTEGVDIVLHVMKTDPRKLQSGLGYNVLLFSTLDSIWCCILGCYPSEDYFLEKEGIFLLLDLLALNQKNSVI

SEQ ID NO: 5729 - protein, 67 aa, Homo sapiens
KSLGEKKSHTVFLAIRIMKTNFGECEQLRQTGHRLQGLTSLTVTDNLGMDPTADVSKGHRGELVTSN

SEQ ID NO: 5730 - protein, 47 aa, Homo sapiens
  MISC_FEATURE (4): Xaa equals any of the naturally occurring L-amino acids
LIRXQSWSSTAVAAALELVDPPGCRNSARGLLQKGYIILSLVIQRYS

SEQ ID NO: 5731 - protein, 100 aa, Homo sapiens
  MISC_FEATURE (26): Xaa equals any of the naturally occurring L-amino acids
VLLNWIIQYYGYNVIQYYGGICVIIXINNTGEISGRQKSEMALTEFKSRCWEGSTPLGGCGGGSISLPSPTYGLCIPWLVAPSSIFKASSVVLPISLIFL

SEQ ID NO: 5732 - protein, 63 aa, Homo sapiens
ARAEIGFLEGSSGKWPDSILRLCMTSRYYPVGVPWGAMAAIRCRLGYIKWAEGTCLGRWGGLQ

SEQ ID NO: 5733 - protein, 38 aa, Homo sapiens
  MISC_FEATURE (5): Xaa equals any of the naturally occurring L-amino acids
FMILXYKSYEFLELQKWPGVVAHTVNPGTLGGQGRRTT

SEQ ID NO: 5734 - protein, 95 aa, Homo sapiens
  MISC_FEATURE (37): Xaa equals any of the naturally occurring L-amino acids
  MISC_FEATURE (73): Xaa equals any of the naturally occurring L-amino acids
  MISC_FEATURE (89): Xaa equals any of the naturally occurring L-amino acids
DEEVYIWVSFLHPVESSRKSGPILSCSFTEKLLSPFXFLLNELWSPDLLCKGQPDPPFMHSPSESLLVAWLEXSGIFEFWPLQLSWGPXGGLPPL

SEQ ID NO: 5735 - protein, 80 aa, Homo sapiens
HEGVSTAPSQKFYIFYRGKKTLYTMARPFLSQKAGPTEQFKLCSSRLKAGFVEELQLLSRANPVVIQGECKLASLDRDQS

SEQ ID NO: 5736 - protein, 51 aa, Homo sapiens
IQINFHAHLYLKDSDFSLSQLRNIRLNPAVLQMFLLRLKHQLINRYLFIFN

SEQ ID NO: 5737 - protein, 38 aa, Homo sapiens
  MISC_FEATURE (2): Xaa equals any of the naturally occurring L-amino acids
PXSSWDYRHTPPCPAHFCIFSRDGVSPCWPGWLHLLTL

SEQ ID NO: 5738 - protein, 112 aa, Homo sapiens
  MISC_FEATURE (6): Xaa equals any of the naturally occurring L-amino acids
  MISC_FEATURE (8): Xaa equals any of the naturally occurring L-amino acids
  MISC_FEATURE (109): Xaa equals any of the naturally occurring L-amino acids
SKDGAXCXKSKDLLKQRYLFAKAGYPLRRSQSLPTTLLSPVRVVSSVNVRLSPGKETRCSPPSFTYKYTPEEEQELEKRVMEHDGQSLVKSTIFISPSSVKKEEAPQSXAPR

SEQ ID NO: 5739 - protein, 64 aa, Homo sapiens
  MISC_FEATURE (29): Xaa equals any of the naturally occurring L-amino acids
ILFAPPRFAPERQSSSRGPLRHRYSSQIXTHFTATPGILPPLRDSSLPVSDAVPRLSPGISHLT

SEQ ID NO: 5740 - protein, 63 aa, Homo sapiens
SLSAPELKSLAKTFHLVNPNGQKQQLVDAFLKLAKQRSVCTWGKNKPGIGAVILKRFCWLLLQ

SEQ ID NO: 5741 - protein, 94 aa, Homo sapiens
  MISC_FEATURE (40): Xaa equals any of the naturally occurring L-amino acids
  MISC_FEATURE (64): Xaa equals any of the naturally occurring L-amino acids
EMSHKERHFELLLKSCKVSYPGTVFLNGNVMAESCSITTXGLVHQVPTHPLQALGSGMCPSWKXQVLWLCWFWLSFSVTFQYLSPSRYCKPLSN

SEQ ID NO: 5742 - protein, 71 aa, Homo sapiens
  MISC_FEATURE (2): Xaa equals any of the naturally occurring L-amino acids
GXGFWPASVARVLTGVTNHLAFNTKKPHILRNPRTQKVLGFVSDAEGWVESMKPTQRDDSTICSIGWKWRG

SEQ ID NO: 5743 - protein, 85 aa, Homo sapiens
HQWRGALHILCQQQHSHTRWFWALCRLVLVGDTQQHPCWTGLIVRSLRPTLQSEMLLGGGKENTFFPPCGNEERGKWIGKPKCES

SEQ ID NO: 5744 - protein, 123 aa, Homo sapiens
FSLTLFPPPTCHQASPKPTAMGPSGPFRDWSEIWVWRGRRQGGGASHSRTVDERDRLRRKWALRLQGWKSLPTSHSPAPIYLVLPRQIGPFEAPECPQMVKTQFSLWEPKPGCIGGQDPDHSL

SEQ ID NO: 5745 - protein, 42 aa, Homo sapiens
  MISC_FEATURE (20): Xaa equals any of the naturally occurring L-amino acids
  MISC_FEATURE (32): Xaa equals any of the naturally occurring L-amino acids
  MISC_FEATURE (34): Xaa equals any of the naturally occurring L-amino acids
CCPIASEAPWTITDAELRVXLTVEDSQPYEDXLXGRSSLSKV

SEQ ID NO: 5746 - protein, 34 aa, Homo sapiens
YPTHYRESWYACRYRSGIPGSTHASGILGLRFFM

SEQ ID NO: 5747 - protein, 202 aa, Homo sapiens
  MISC_FEATURE (167): Xaa equals any of the naturally occurring L-amino acids
  MISC_FEATURE (195): Xaa equals any of the naturally occurring L-amino acids
YSRPQAHSSASGGIRRSSSMSYVDGFIGTWPKEKRSSVHGVSFDISFDKEDSVQRSTPNRGITRSISNEGLTLNNSHVSKHIRKNLSFKPINGEEEAESIEEELNIDSHSDLKSCVPLNTNELNSNENIHYKLPNGALQNRILLDEFGNQIETPSIEEALQIIHDTXKSPHTPQPDQIANGFFLHSQGMSILNSXIKLNQSS

SEQ ID NO: 5748 - protein, 35 aa, Homo sapiens
GRISHVGSRTEGSRLPAQCSLCSTMLPLVGETGQK

SEQ ID NO: 5749 - protein, 35 aa, Homo sapiens
QWGKKAVSRGFSKGNTQMAKKHMQRCSMFFVIRKM

SEQ ID NO: 5750 - protein, 220 aa, Homo sapiens
  MISC_FEATURE (65): Xaa equals any of the naturally occurring L-amino acids
  MISC_FEATURE (96): Xaa equals any of the naturally occurring L-amino acids
  MISC_FEATURE (117): Xaa equals any of the naturally occurring L-amino acids
EKTILTGECCYLNPLLRRIIRFTGVFAFGLFATDIFVNAGQVVTGHLTPYFLTVCKPNYTSADCXAHHQFINNGNICTGDREVIEKARRSFPSKHXALSIYSALYATMYITSTIKTXSSRLAKPVLCLGTLCTAFLTGLNRVSEYRNHCSDVIAGFILGTAVALFLGMCVVHNFKGTQGSPSKPKPEDPRGVPLMAFPRIESPLETLSAQNHSASMTEVT

SEQ ID NO: 5751 - protein, 38 aa, Homo sapiens
KTFRLFLAISLTFATIVTKHSLYMHPPNVSCLFIGKLY

SEQ ID NO: 5752 - protein, 59 aa, Homo sapiens
  MISC_FEATURE (14): Xaa equals any of the naturally occurring L-amino acids
  MISC_FEATURE (23): Xaa equals any of the naturally occurring L-amino acids
  MISC_FEATURE (57): Xaa equals any of the naturally occurring L-amino acids
WQGHWPGPHLPSSXLPKRKLPWXSRPLNANSWLPVSGWVDLTWPLLAGPCSFLTCRXEQ

SEQ ID NO: 5753 - protein, 122 aa, Homo sapiens
  MISC_FEATURE (1): Xaa equals any of the naturally occurring L-amino acids
XLVAGDIVLDKLGERLAILLKVRDMVSSHVERVFQIYEQHADTVGIDAVLQPSAVSPSVADMLEWLQDIERHYRKSYLKRKYLLSSIQWGDLANIQALPKAWDRISKDEHQDLVQDILLNVS

SEQ ID NO: 5754 - protein, 66 aa, Homo sapiens
  MISC_FEATURE (2): Xaa equals any of the naturally occurring L-amino acids
  MISC_FEATURE (6): Xaa equals any of the naturally occurring L-amino acids
  MISC_FEATURE (8): Xaa equals any of the naturally occurring L-amino acids
TXNFHXRXEVINSGHQRILASALGLVMYQVWYYFLFVLIRFLPSSSIWEIKTGLLAWLVTERQAHS

SEQ ID NO: 5755 - protein, 59 aa, Homo sapiens
  MISC_FEATURE (13): Xaa equals any of the naturally occurring L-amino acids
  MISC_FEATURE (41): Xaa equals any of the naturally occurring L-amino acids
SFPPRNSPRLKTXLHYQVMRCEGGSLKVENLGVEATVPSWXLSFLICEMRVNVKLLCKM

SEQ ID NO: 5756 - protein, 117 aa, Homo sapiens
  MISC_FEATURE (41): Xaa equals any of the naturally occurring L-amino acids
  MISC_FEATURE (111): Xaa equals any of the naturally occurring L-amino acids
KATLLSCEAHHLSLALGSSCRRSLGPLMHPFQQTFHFGVRXDFLALQGAPASSCIPCPGPGISPFSKEPRVLLLASLKRVRPGCQAGSPRSFYWEVLESEAWVPGGCQVGXVLLGCC

SEQ ID NO: 5757 - protein, 52 aa, Homo sapiens
LTLTKGNKSWGSTAVTAALELVDPPGCRNSARGLVRVFFFFFFKTNTFIAHL

SEQ ID NO: 5758 - protein, 270 aa, Homo sapiens
  MISC_FEATURE (266): Xaa equals any of the naturally occurring L-amino acids
TLEQEQEALVNRLWKRMDKLEAEKRILQEKLDQPVSAPPSPRDISMEIDSPENMMRHIRFLKNEVERLKKQLRAAQLQHSEKMAQYLEEERHMREENLRLQRKLQREMERREALCRQLSESESSLEMDDERYFNEMSAQGLRPRTVSSPIPYTPSPSSSRPISPGLSYASHTVGFTPPTSLTRAGMSYYNSPGLHVQHMGTSHGITRPSPRRSNSPDKFKRPTPPPSPNTQTPVQPPPPPPPPPMQPTVPSAATSQPTPSQHSAHXSSQP

SEQ ID NO: 5759 - protein, 67 aa, Homo sapiens
VIQVYTSVKIQRMYTQDLCISLYVNVTLKCCKQILNKYTHAKVFKRKYWCLQNKNFFSIFCGKIYII

SEQ ID NO: 5760 - protein, 152 aa, Homo sapiens
PRGSVGVSSELHQFPGYLGPWITLRSATCQLISKLLLAGLRLSREHLGEPCAAGWTPAHLADYSCFCSPVCPQEVRACLLFLHDHGRRGTNMRVLASPQWWLPRAGETLGEGLGQGPLSLAATAWVNCLARLAARAQKAEALPAFSSHPAPM

SEQ ID NO: 5761 - protein, 98 aa, Homo sapiens
RVAVEDVSMVKQKNTTFLWKEILKQQSQIVKMLRISVPPLTSVSVKPQLGCTEDYLLSKLPSDGKEVPFVVRKFKLSYIQPRTQETPSHLEELEGSAG

SEQ ID NO: 5762 - protein, 92 aa, Homo sapiens
  MISC_FEATURE (81): Xaa equals any of the naturally occurring L-amino acids
DRKRDLTSPWRLSVSAEALGLALGLCIPESCCMPGIGFQACLSFSSLPGIAMRWEGEPSSPAEIPAAWQPAGGSWIPRGDXTDALWFHVIWI

SEQ ID NO: 5763 - protein, 88 aa, Homo sapiens
  MISC_FEATURE (49): Xaa equals any of the naturally occurring L-amino acids
  MISC_FEATURE (60): Xaa equals any of the naturally occurring L-amino acids
  MISC_FEATURE (74): Xaa equals any of the naturally occurring L-amino acids
  MISC_FEATURE (81): Xaa equals any of the naturally occurring L-amino acids
  MISC_FEATURE (84): Xaa equals any of the naturally occurring L-amino acids
PRRHRVPGSGFAFPKNENKLLPKELVFPLLFSNCEGPRGVEHGAPHKPXGWCPGYQGHAXGLDDLSLQGALVVXNWLKVTXEGXCGNW

SEQ ID NO: 5764 - protein, 28 aa, Homo sapiens
  MISC_FEATURE (16): Xaa equals any of the naturally occurring L-amino acids
KIFSFAVPDPLMPDPXKQPKNQLNPIGS

SEQ ID NO: 5765 - protein, 75 aa, Homo sapiens
RMNICVSVCVSELCDFIRGICQFSHCGSFSDFACSSSKEARSFADFTIPQTCKFLTSSKLALALSSTFPFKSNLC

SEQ ID NO: 5766 - protein, 540 aa, Homo sapiens
  MISC_FEATURE (320): Xaa equals any of the naturally occurring L-amino acids
  MISC_FEATURE (508): Xaa equals any of the naturally occurring L-amino acids
TMDEEEKDDGEAKEISTPTHWSKLDPKTMKVNDLRKELESRALSSKGLKSQLIARLTKQLKVEEQKEEQKELEKSEKEEDEDDDRKSEDDKEEEERKRQEEIERQRRERRYILPDEPAIIVHPNWAAKSGKFDCSIMSLSVLLDYRLEDNKEHSFEVSLFAELFNEMLQRDFGVRIYKSLLSLPEKEDKKEKDKKSKKDERKDKKEERDDETDEPKPKRRKSGDDKDKKEDRDERKKEDKRKDDSKDDDETEEDNNQDEYDPMEAEEAEDEEDDRDEEEMTKRDDKRDINRYCKERPSKDKEKEKTQMITINRDLLMAFXYFDQSHCGYLLEKDLEEILYTLGLHLSRAQVKKLLNKVVLRESCFYRKLTDTSKDEENHEESESLQEDMLGNRLLLPTPTVKQESKDVEENVGLIVYNGAMVDVGSLLQKLEKSEKVRAEVEQKLQLLEEKTDEDEKTILNLENSNKSLSGELREVKKDLSQLQENLKISENMNLQFENQMNKTIRNXSTVMDEIHTVLKKDNVKNEDKDQKSKENGASV

SEQ ID NO: 5767 - protein, 231 aa, Homo sapiens
  MISC_FEATURE (201): Xaa equals any of the naturally occurring L-amino acids
  MISC_FEATURE (214): Xaa equals any of the naturally occurring L-amino acids
  MISC_FEATURE (220): Xaa equals any of the naturally occurring L-amino acids
EKQAEILEYAYHGQIAIVAPEALLAGHNYTLKIEYSANISSSYYGFYGFSYTDESNEKKYFAATQFEPLAARSAFPCFDEPAFKATFIIKIIRDEQYTALSNMPKKSSVVLDDGLVQDEFSESVKMSTYLVAFIVGEMKNLSQDVNGTLVSIYAVPEKIGQVHYALETTVKLLEFFQNYFEIQYPLKKLDLVAIPDFEARXNGKLGFCSPSEKXTLLFDXYTSSMADKKAG

SEQ ID NO: 5768 - protein, 294 aa, Homo sapiens
NMTEDSQRNFRSVYYEKVGFRGVEEKKSLEILLKDDRLDTEKLCTFSQRFPLPSMYRALVWKVLLGILPPHHESHAKVMMYRKEQYLDVLHALKVVRFVSDATPQAEVYLRMYQLESGKLPRSPSFPLEPDDEVFLAIAKAMEEMVEDSVDCYWITRRFVNQLNTKYRDSLPQLPKAFEQYLNLEDGRLLTHLRMCSAAPKLPYDLWFKRCFAGCLPESSLQRVWDKVVSGSCKILVFVAVEILLTFKIKVMALNSAEKITKFLENIPQDSSDAIVSKAIDLWHKHCGTPVHSS

SEQ ID NO: 5769 - protein, 431 aa, Homo sapiens
  MISC_FEATURE (1): Xaa equals any of the naturally occurring L-amino acids
  MISC_FEATURE (5): Xaa equals any of the naturally occurring L-amino acids
XFGAXGTVESETSPDRDKKKEQSEVSVSPRASKHHYSRSRSRSRERKRKSDNEGRKHRSRSRSKEGRRHESKDKSSKKHKSEEHNDKEHSSDKGRERLNSSENGEDRHKRKERKSSRGRSHSRSRSRERRHRSRSRERKKSRSRSRERKKSRSRSRERKKSRSRSRERKRRIRSRSRSRSRHRHRTRSRSRTRSRSRDRKKRIEKPRRFSRSLSRTPSPPPFRGRNTAMDAQEALARRLERAKKLQEQREKEMVEKQKQQEIAAAAAATGGSVLNVAALLASGTQVTPQIAMAAQMAALQAKALAETGIAVPSYYNPAAVNPMKFAEQEKKRKMLWQGKKEGDKSQSAEIWEKLNFGNKDQNVKFRKLMGIKSEDEAGCSSVDEESYKTLKQQEEVFRNLDAQYEMARSQTHTQRGMGLGFTSSMRGMDAV

SEQ ID NO: 5770 - protein, 59 aa, Homo sapiens
AGVFIGERKCVVWAGLLVEAGFLAHLLYMLPMDLRLEMLKVEWNYFPPKTFIYSTPLYP

SEQ ID NO: 5771 - protein, 99 aa, Homo sapiens
VIFYFTNKGTKSMNISLFLIISALKYFGYLAPVRADWHCLVQEVCSRCSASELHYDCPPTNHPPASPRERGIQRGTVLTRSSQLDPGQRNPYPGTLSLS

SEQ ID NO: 5772 - protein, 48 aa, Homo sapiens
PPSLTKGNKSWCSTAVAAALELVDPPGCRNSARFPLFLGVSILSPWKM

SEQ ID NO: 5773 - protein, 101 aa, Homo sapiens
  MISC_FEATURE (31): Xaa equals any of the naturally occurring L-amino acids
  MISC_FEATURE (85): Xaa equals any of the naturally occurring L-amino acids
  MISC_FEATURE (86): Xaa equals any of the naturally occurring L-amino acids
WNEHRPLNPRYEFKSQLWRWLLKVSVPSFFXLYKVDITISNLQSHWELYMQRLGKAPGTWQAISKCWLLLLLSLPFSQSIIISLXXGTMSYLPLYFPQYFP

SEQ ID NO: 5774 - protein, 136 aa, Homo sapiens
CVILTKGSSLGQPSPGLGHIHLVAKPLLGPKYTPESCQRKEIFKKHRQIVCKWKIPIGLDSCGGKTSWVPGGCQSWELCRYESGKAQRQAESLYGDNLQCLLGFPNNLGVQSIGFFSPLPTPRKIIRKMFRRKEKN

SEQ ID NO: 5775 - protein, 168 aa, Homo sapiens
  MISC_FEATURE (34): Xaa equals any of the naturally occurring L-amino acids
  MISC_FEATURE (134): Xaa equals any of the naturally occurring L-amino acids
  MISC_FEATURE (160): Xaa equals any of the naturally occurring L-amino acids
  MISC_FEATURE (161): Xaa equals any of the naturally occurring L-amino acids
  MISC_FEATURE (167): Xaa equals any of the naturally occurring L-amino acids
VRVQEVVKENEELHQELNKSSAVTSEEWRQLQTXAKLVLEENKLLLEQLEIQQRKAKDSHQERLQEVSKLTKQLMLLEAKTHGQEKELAENREQLEILRAKCQELKTHSDGKIAVEVHKSIVNELKSQLQKEEXKERAEMEELMEKLTVLQAQKKSLLLXXNILTEXN

SEQ ID NO: 5776 - protein, 135 aa, Homo sapiens
IRHEVVGGSGGVYALCSAHLANVVMNWAGMRCPYKLLRMVLALVCMSSEVGRAVWLRFSPPLPASGPQPSFMAHLAGAVVGVSMGLTILRSYEERLRDQCGWWVVLLAYGTFLLFAVFWNVFAYDLLGAHIPPPP

SEQ ID NO: 5777 - protein, 351 aa, Homo sapiens
  MISC_FEATURE (35): Xaa equals any of the naturally occurring L-amino acids
IRHEILWLLCSHRPAPGRPPTHNAHNWRLGQAPAXWYNDTYPLSPPQRTPAGIRYRIAVIADLDTESRAQEENTWFSYLKKGYLTLSDSGDKVAVEWDKDHGVLESHLAEKGRGMELSDLIVFNGKLYSVDDRTGVVYQIEGSKAVPWVILSDGDGTVEKGFKAEWLAVKDERLYVGGLGKEWTTTTGDVVNENPEWVKVVGYKGSVDHENWVSNYNALRAAAGIQPPGYLIHESACWSDTLQRWFFLPRRASQERYSEKDDERKGANLLLSASPDFGDIAVSHVGAVVPTHGFSSFKFIPNTDDQIIVALKSEEDSGRVASYIMAFTLDGRFLLPETKIGSVKYEGIEFI

SEQ ID NO: 5778 - protein, 55 aa, Homo sapiens
NYQISEIYFLLVTMKSTFTLESNCNTPKIRATKGMYGAFFNLKNCILFLIPYLKH

SEQ ID NO: 5779 - protein, 121 aa, Homo sapiens
YPFFTLCQRNRVFDISSYVKEMLQNVNCFKLKLPLKRPRYIYLIVYIMFNICQSILQVCSFISIKYGYYVAQLLKWYCIVYICTPNNIVCTFCFLYCICAGFFRLYQCNLCLLRYVQKMSI

SEQ ID NO: 5780 - protein, 191 aa, Homo sapiens
  MISC_FEATURE (181): Xaa equals any of the naturally occurring L-amino acids
EFGTSHWDMSLPLIVTLSTISIILLAAMITIAVKCKRENKEIRTYNCRIAEYSHPQLGGGKGKKKKINKNDIMLVQSEVEERNAMNVMNVVSSPSLATSPMYFDYQTRLPLSSPRSEVMYLKPASNNLTVPQGHAGCHTSFTGQGTNASETPATRMSIIQTDNFPAEPNYMGSRQQFVQSXSTFKDPERPA

SEQ ID NO: 5781 - protein, 129 aa, Homo sapiens
  MISC_FEATURE (2): Xaa equals any of the naturally occurring L-amino acids
  MISC_FEATURE (4): Xaa equals any of the naturally occurring L-amino acids
  MISC_FEATURE (95): Xaa equals any of the naturally occurring L-amino acids
RXPXLTKGNKSWSSTAVTTALELVDPPGCRNSARAPASRSRTPPASRLTRSCQRRSAAAEPKGPEDSGAGGTGCGGADDPAKKKKQRRQRTHFTXQQLQELEATFQRNRYPDMSMREEIAVWTNLTEPR

SEQ ID NO: 5782 - protein, 399 aa, Homo sapiens
  MISC_FEATURE (208): Xaa equals any of the naturally occurring L-amino acids
  MISC_FEATURE (349): Xaa equals any of the naturally occurring L-amino acids
LEPPAEPLQYLACYRFHCSHQLGDNMWFLTTLLLWVPVDGQVDTTKAVITLQPPWVSVFQEETVTLHCEVLHLPGSSSTQWFLNGTATQTSTPSYRITSASVNDSGEYRCQRGLSGRSDPIQLEIHRGWLLLQVSSRVFTEGEPLALRCHAWKDKLVYNVLYYRNGKAFKFFHWNSNLTILKTNISHNGTYHCSGMGKHRYTSAGISXTVKELFPAPVLNASVTSPLLEGNLVTLSCETKLLLQRPGLQLYFSFYMGSKTLRGRNTSSEYQILTARREDSGLYWCEAATEDGNVLKRSPELELQVLGLQLPTPVWFHVLFYLAVGIMFLVNTVLWVTIRKELKRKKKWXLEISLDSGHEKKVISSLQEDRHLEEELKCQEQKEEQLQEGVHRKEPQGAT

SEQ ID NO: 5783 - protein, 164 aa, Homo sapiens
  MISC_FEATURE (20): Xaa equals any of the naturally occurring L-amino acids
  MISC_FEATURE (154): Xaa equals any of the naturally occurring L-amino acids
GDRAEPSVYWAAVTLRFQMXMFESADSTATRSGQDLWAEICSCLPNPEQEDGANNAFSDSFVDSCPEGEGQREVADFAVQPAVKPWAPLQDSEVYLASLEKKLRRIKGLNQEVTSKDMLRTLAQAKKECWDRFLQEKLASEFFVDGLDSDESTXGTFQEVAPAR

SEQ ID NO: 5784 - protein, 184 aa, Homo sapiens
KMASNKTTLQKMGKKQNGKSKKVEEAEPEEFVVEKVLDRRVVNGKVEYFLKWKGFTDADNTWEPEENLDCPELIEAFLNSQKAGKEKDGTKRKSLSDSESDDSKSKKKRDAADKPRGFARGLDPERIIGATDSSGELMFLMKWKDSDEADLVLAKEANMKCPQIVIAFYEERLTWHSCPEDEAQ

SEQ ID NO: 5785 - protein, 76 aa, Homo sapiens
KVTEDTSSVLRSPMPGVVVAVSVKPGDAVAEGQEICVIEAMKMQNSMTAGKTGTVKSVHCQAGDTVGEGDLLVELE

SEQ ID NO: 5786 - protein, 57 aa, Homo sapiens
TLQSKDIDWLNEWRKQDPLICCLQETHLNYKDTHRLKVKSWKELFHANGNQEKEKEY

SEQ ID NO: 5787 - protein, 277 aa, Homo sapiens
  MISC_FEATURE (12): Xaa equals any of the naturally occurring L-amino acids
  MISC_FEATURE (91): Xaa equals any of the naturally occurring L-amino acids
  MISC_FEATURE (125): Xaa equals any of the naturally occurring L-amino acids
RQKGTAARRRQXGLLASSRPEPANERKMADNFSLHDALSGSGNPNPQGWPGAWGNQPAGAGGYPGASYPGAYPGQAPPGAYPGQAPPGAYXGAPGAYPGAPAPGVYPGPPSGPGAYPSSGQPSAXGAYPATGPYGAPAGPLIVPYNLPLPGGVVPRMLITILGTVKPNANRIALDFQRGNDVAFHFNPRFNENNRRVIVCNTKLDNNWGREERQSVFPFESGKPFKIQVLVEPDHFKVAVNDAHLLQYNHRVKKLNEISKLGISGDIDLTSASYTMI

SEQ ID NO: 5788 - protein, 565 aa, Homo sapiens
LHCTMCGIWALFGSDDCLSVQCLSAMKIAHRGPDAFRFENVNGYTNCCFGFHRLAVVDPLFGMQPIRVKKYPYLWLCYNGEIYNHKKMQQHFEFEYQTKVDGEIILHLYDKGGIEQTICMLDGVFAFVLLDTANKKVFLGRDTYGVRPLFKAMTEDGFLAVCSEAKGLVTLKHSATPFLKVEPFLPGHYEVLDLKPNGKVASVEMVKYHHCRDEPLHALYDNVEKLFPGFEIETVKNNLRILFNNAVKKRLMTDRRIGCLLSGGLDSSLVAATLLKQLKEAQVQYPLQTFAIGMEDSPDLLAARKVADHIGSEHYEVLFNSEEGIQALDEVIFSLETYDITTVRASVGMYLISKYIRKNTDSVVIFSGEGSDELTQGYIYFHKAPSPEKAEEESERLLRELYLFDVLRADRTTAAHGLELRVPFLDHRFSSYYLSLPPEMRIPKNGIEKHLLRETFEDSNLIPKEILWRPKEAFSDGITSVKNSWFKILQEYVEHQVDDAMMANAAQKFPFNTPKTKEGYYYRQVFERHYPGRADWLSHYWMPKWINATDPSARTLTHYKSAVKA

SEQ ID NO: 5789 - protein, 173 aa, Homo sapiens
  MISC_FEATURE (110): Xaa equals any of the naturally occurring L-amino acids
CFASDRISLHRDLGPDTRPPECIEQKFKRCPPLPTTSVIIVFHNEAWSTLLRTVHSVLYSSPAILLKEIILVDDASVDEYLHDKLDEYVKQFSIVKIVRQRERKGLITAXLLGATVATAETLTFLDAHCECFYGWLEPLLARIAENYTAVVSPDIASIDLNTFEFNKPSPYGK

SEQ ID NO: 5790 - protein, 49 aa, Homo sapiens
EKLTDLNKWGSTPCSTIGKLRIVKMSFLPKLIYKSQKTFFLQTLIKVVF

SEQ ID NO: 5791 - protein, 63 aa, Homo sapiens
  MISC_FEATURE (25): Xaa equals any of the naturally occurring L-amino acids
  MISC_FEATURE (32): Xaa equals any of the naturally occurring L-amino acids
  MISC_FEATURE (33): Xaa equals any of the naturally occurring L-amino acids
  MISC_FEATURE (36): Xaa equals any of the naturally occurring L-amino acids
  MISC_FEATURE (38): Xaa equals any of the naturally occurring L-amino acids
  MISC_FEATURE (41): Xaa equals any of the naturally occurring L-amino acids
  MISC_FEATURE (42): Xaa equals any of the naturally occurring L-amino acids
  MISC_FEATURE (43): Xaa equals any of the naturally occurring L-amino acids
  MISC_FEATURE (46): Xaa equals any of the naturally occurring L-amino acids
  MISC_FEATURE (48): Xaa equals any of the naturally occurring L-amino acids
  MISC_FEATURE (51): Xaa equals any of the naturally occurring L-amino acids
  MISC_FEATURE (60): Xaa equals any of the naturally occurring L-amino acids
SCKKDMKNMNYCTSHCYFHVQYSRXILTTIDXXLKXVXGKXXXILXIXIAXERRIQGPEXGAT

SEQ ID NO: 5792 - protein, 104 aa, Homo sapiens
  MISC_FEATURE (75): Xaa equals any of the naturally occurring L-amino acids
MRRVILHSPLMSGLRVAFPDTRKTYCFDAFPSIDKISKVTSPVLVIHGTEDEVIDFSHGLAMYERCPRAVEPLWXEGAGHNDIELYAQYLERLKQFISHELPNS

SEQ ID NO: 5793 - protein, 219 aa, Homo sapiens
  MISC_FEATURE (5): Xaa equals any of the naturally occurring L-amino acids
  MISC_FEATURE (13): Xaa equals any of the naturally occurring L-amino acids
  MISC_FEATURE (43): Xaa equals any of the naturally occurring L-amino acids
SFRLXCELRRCMXGNNMSTPLPAIVPAARKATAAVIFLHGLGXTGPVRPVTLNMNVAMPSWFDIIGLSPDSQEDESGIKQAAENIKALIDQEVKNGIPSNRIILGGFSQGGALSLYTALTTQQKLAGVTALSCWLPLRASFPQGPIGGANRDISILQCHGDCDPLVPLMFGSLTVEKLKTLVNPANVTFKTYEGMMHSSCQQEMMDVKQFIDKLLPPID

SEQ ID NO: 5794 - protein, 326 aa, Homo sapiens
  MISC_FEATURE (123): Xaa equals any of the naturally occurring L-amino acids
  MISC_FEATURE (136): Xaa equals any of the naturally occurring L-amino acids
PRHGQHHREQGDTAILRCVVEDKNSKVAWLNRSGIIFAGHDKWSLDPRVELEKRHSLEYSLRIQKVDVYDEGSYTCSVQTQHEPKTSQVYLIVQVPPKISNISSDVTVNEGSNVTLVCMANGXPEPVITWRHLTPXGREFEGEEEYLEILGITREQSGKYECKAANEVSSADVKQVKVTVNYPPTITESKSNEATTGRQASLKCEASAVPAPDFEWYRDDTRINSANGLEIKSTEGQSSLTVTNVTEEHYGNYTCVAANKLGVTNASLVLFKRVLPTIPHPIQEIGTTVHFKQKGPGSVRGINGSISLAVPLWLLAASLLCLLSKC

SEQ ID NO: 5795 - protein, 217 aa, Homo sapiens
  MISC_FEATURE (76): Xaa equals any of the naturally occurring L-amino acids
  MISC_FEATURE (191): Xaa equals any of the naturally occurring L-amino acids
  MISC_FEATURE (208): Xaa equals any of the naturally occurring L-amino acids
  MISC_FEATURE (213): Xaa equals any of the naturally occurring L-amino acids
PTRPAEKDPGRSAPGAASAAAALKQLGDSPAEDKSSFKPYSKGSGGGDSRKDSGSSSVSSTSSSSSSSPGDKAGFXVPSAACPPFPPHGAPVSASSSSSSPGGSRGGSPHHSDCKNGGGVGGGELDKKDQEPKPSPEPAAVSRGGGGEPGAHGGAESGASGRKSEPPSALVGAGHVAPVSPTSRATRCSRXRLQHWLPRLHRGRLRRXPVLIXAWPG

SEQ ID NO: 5796 - protein, 69 aa, Homo sapiens
PQKKYFMWVFCFSLLDFMDEGIWLTFYFLMEQPVFVNYSLVNCEILNSLPAILVLVSGQIYAVVLMRLV

SEQ ID NO: 5797 - protein, 145 aa, Homo sapiens
HCSEGHAKSRHRSWQQEGDRASPRHTSPGGDSGKEPRTGKDWVGEGVRGLVVTQSWRGAKSTGGYPLAASALAVCPFMSQTATTMYLQWGCRDGGDSSLTPQELPGPKEENAASFQSGLHPLSGSLSASCNSGCFSRLSSNSAPP

SEQ ID NO: 5798 - protein, 113 aa, Homo sapiens
LRRPFLMLLLDLMSSPSPQLLVAAAQQTLGMGKRRSPPQAICLHLAGEVLAVARGLKPAVLYDCNCAGASELQSYLEELKGLGFLTFGLHILEIGENSLIVSPEHVCQHLEQV

SEQ ID NO: 5799 - protein, 32 aa, Homo sapiens
KFSQAWWHMPIVPAIWVAKVGELLEPGRSRLQ

SEQ ID NO: 5800 - protein, 67 aa, Homo sapiens
VYKMFSMRNQETYTGLTVVSYMSPQFQCACSLTSPFPNPSLLGCCFKVCPSPNLDFYYRSKALSILY

SEQ ID NO: 5801 - protein, 77 aa, Homo sapiens
WLLCPVRVFSSLTWVHFLMAHMKFGSYGLTLAMVLSYGEQHQRPVTCKLKIQCQGPSPAPLIENLLAICIFRCSRLV

SEQ ID NO: 5802 - protein, 120 aa, Homo sapiens
YVYLIILPLAKCYVCKMWHLLVFIVCVFFVYYTLGNFVLPKKKKKRKCNVRHTRKANQCCKLKVQFQRSLPTAGFFLYFKNIMLHIIAIFIFWGFATLIQWNQWKCHPATELPLLYLKSF

SEQ ID NO: 5803 - protein, 104 aa, Homo sapiens
  MISC_FEATURE (42): Xaa equals any of the naturally occurring L-amino acids
  MISC_FEATURE (66): Xaa equals any of the naturally occurring L-amino acids
  MISC_FEATURE (74): Xaa equals any of the naturally occurring L-amino acids
  MISC_FEATURE (82): Xaa equals any of the naturally occurring L-amino acids
LLGSCLQEAMTLNSEPYSVLTSGSHVFLCQVIKYLVLVFCLXPKLPLWVHRRLGSIVRMAIREYKXGFSRAWEXILEPRRAXPALRSFGVEMQPWEIWGVSRPV

SEQ ID NO: 5804 - protein, 36 aa, Homo sapiens
  MISC_FEATURE (13): Xaa equals any of the naturally occurring L-amino acids
DLKRKSKSFYYDXIPVEYLKGTPHLNNQCKYFLSKL

SEQ ID NO: 5805 - protein, 96 aa, Homo sapiens
IARLVGFATCGSPRGSKNGGRRGGGGPGREWVELEPQKSAELRGRAGRKGGGAAGARGHPAAGCSDRGKCLENCGLRCLYDAVLLEPWRKMELVLQ

SEQ ID NO: 5806 - protein, 220 aa, Homo sapiens
  MISC_FEATURE (26): Xaa equals any of the naturally occurring L-amino acids
  MISC_FEATURE (30): Xaa equals any of the naturally occurring L-amino acids
  MISC_FEATURE (33): Xaa equals any of the naturally occurring L-amino acids
  MISC_FEATURE (36): Xaa equals any of the naturally occurring L-amino acids
  MISC_FEATURE (37): Xaa equals any of the naturally occurring L-amino acids
FGGAYDGKYEKTLYGHNLEISDVAWXSDSXRLXSAXXDKTLKLWDVRSGKCLKTLKGHSNYVFCCNFNPPSNLIISGSFDETVKIWEVKTGKCLKTLSAHSDPVSAVHFNCSGSLIVSGSYDGLCRIWDAASGQCLKTLVDDDNPPVSFVKFSPNGKYILTATLDNTLKLWDYSRGRCLKTYTGHKNEKYCIFANFSVTGGKWIVSGSEDNRVYIWEPSD

SEQ ID NO: 5807 - protein, 131 aa, Homo sapiens
  MISC_FEATURE (8): Xaa equals any of the naturally occurring L-amino acids
  MISC_FEATURE (88): Xaa equals any of the naturally occurring L-amino acids
  MISC_FEATURE (101): Xaa equals any of the naturally occurring L-amino acids
DPRVRTRXPNMYQVVLLFVVVPELQEHQSKPSRPSPRVADNPEEGREPHNDRPVSMAFGCQPEHVYAECGKTYRPPPTPKLFPQSTVXNTTPSFTSGTQEXLFVFLISISRRLFSTPLFLPPQFAIPLLAL

SEQ ID NO: 5808 - protein, 239 aa, Homo sapiens
QPPGTRDPAPPLITPATPQLSAAPDAMDPALAAQMSEAVAEKMLQYRRDTAGWKICREGNGVSVSWRPSVEFPGNLYRGEGIVYGTLEEVWDCVKPAVGGLRVKWDENVTGFEIIQSITDTLCVSRTSTPSAAMKLISPRDFVDLVLVKRYEDGTISSNATHVEHPLCPPKPGFVRGFNHPCGCFCEPLPGEPTKTNLVTFFHTDLSGYLPQNVVDSFFPRSMTRFYANLQKAVKQFHE

SEQ ID NO: 5809 - protein, 66 aa, Homo sapiens
AYTTMTENKRLFFETPSQKQNKTKKLDKCYINVWVVRFYFESEVCRYAYRFLEFTTFLFCIINVIF

SEQ ID NO: 5810 - protein, 173 aa, Homo sapiens
  MISC_FEATURE (55): Xaa equals any of the naturally occurring L-amino acids
  MISC_FEATURE (62): Xaa equals any of the naturally occurring L-amino acids
  MISC_FEATURE (164): Xaa equals any of the naturally occurring L-amino acids
  MISC_FEATURE (165): Xaa equals any of the naturally occurring L-amino acids
  MISC_FEATURE (166): Xaa equals any of the naturally occurring L-amino acids
  MISC_FEATURE (168): Xaa equals any of the naturally occurring L-amino acids
RHEDFTDTAYLFKIQIESLNDKLQNAKEQLREKEFIMLQNEQEISQLKKEIERTXQRMKEMXSVMKEQEQYIATQYKEAIDLGQELRLTREQVQNSHTELAEARHQQVQAQREIERLSSELEDMKQLSKEKDAHGNHLAEELGASKGREAYLEARMQAEIKKLXXXVXISSKK

SEQ ID NO: 5811 - protein, 719 aa, Homo sapiens
  MISC_FEATURE (302): Xaa equals any of the naturally occurring L-amino acids
FKVIFLLQDGIVNPTIRKDLKTGPKFYCCPIEGCPRGPERPFSQFSLVKQHFMKMHAEKKHKCSKCSNSYGTEWDLKRHAEDCGKTFRCTCGCPYASRTALQSHIYRTGHEIPAEHRDPPSKKRKMENCAQNQKLSNKTIESLNNQPIPRPDTQELEASEIKLEPSFEDSCGSNTDKQTLTTPPRYPQKLLLPKPKVALVKLPVMQFSVMPVFVPTADSSAQPVVLGVDQGSATGAVHLMPLSVGTLILGLDSEACSLKESLPLFKIANPIAGEPISTGVQVNFGKSPSNPLQELGNTCQKXSISSINVQTDLSYASQNFIPSAQWATADSSVSSCSQTDLSFDSQVSLPISVHTQTFLPSSKVTSSIAAQTDAFMDTCFQSGGVSRETQTSGIESPTDDHVQMDQAGMCGDIFESVHSSYNVATGNIISNSLVAETVTHSLLPQNEPKTLNQDIEKSAPIINFSAQNSMLPSQNMTDNQTQTIDLLSDLENILSSNLPAQTLDHRSLLSDTNPGPDTQLPSGPAQNPGIDFDIEEFFSASNIQTQTEESELSTMTTEPVLESLDIETQTDFLLADTSAQSYGCRGNSNFLGLEMFDTQTQTDLNFFLDSSPHLPLGSILKHSSFSVSTDSSDTETQTEGVSTAKNIPALESKVQLNSTETQTMSSGFETLGSLFFTSNETQTAMDDFLLADLAWNTMESQFSSVETQTSAEPHTVSNF

SEQ ID NO: 5812 - protein, 56 aa, Homo sapiens
  MISC_FEATURE (3): Xaa equals any of the naturally occurring L-amino acids
  MISC_FEATURE (6): Xaa equals any of the naturally occurring L-amino acids
  MISC_FEATURE (36): Xaa equals any of the naturally occurring L-amino acids
  MISC_FEATURE (50): Xaa equals any of the naturally occurring L-amino acids
NSXMQXPEWHFATLSHALIAFQNESYLRQLLWVKSXLYSRVRLLGVCLYXKRGGLS

SEQ ID NO: 5813 - protein, 60 aa, Homo sapiens
  MISC_FEATURE (43): Xaa equals any of the naturally occurring L-amino acids
SVACKEKKMASDIWYKLLNRIIRASFVKPAFKCWTASKSVCFXSSVPYTKKQLLPSYYIC

SEQ ID NO: 5814 - protein, 55 aa, Homo sapiens
FTQYGAACFCDFKIDQGTFAFEERNFLGLVTRAVDVPKSKDVCCPWVSHCRFITW

SEQ ID NO: 5815 - protein, 367 aa, Homo sapiens
  MISC_FEATURE (358): Xaa equals any of the naturally occurring L-amino acids
ARQTGLEDPLRLRRAESTRRVLGLELNKDRDVERIHGGGINTLDIEPVEGRYMLSGGSDGVIVLYDLENSSRQSYYTCKAVCSIGRDHPDVHRYSVETVQWYPHDTGMFTSSSFDKTLKVWDTNTLQTADVFNFEETVYSHHMSPVSTKHCLVAVGTRGPKVQLCDLKSGSCSHILQGHRQEILAVSWSPRYDYILATASADSRVKLWDVRRASGCLITLDQHNGKKSQAVESANTAHNGKVNGLCFTSDGLHLLTVGTDNRMRLWNSSNGENTLVNYGKVCNNSKKGLKFTVSCGCSSEFVFVPYGSTIAVYTVYSGEQITMLKGHYKTVDCCVFQSNFQVLYSGSRDCNILAWVPXLYEPVPDDG

SEQ ID NO: 5816 - protein, 72 aa, Homo sapiens
  MISC_FEATURE (3): Xaa equals any of the naturally occurring L-amino acids
  MISC_FEATURE (28): Xaa equals any of the naturally occurring L-amino acids
  MISC_FEATURE (51): Xaa equals any of the naturally occurring L-amino acids
  MISC_FEATURE (68): Xaa equals any of the naturally occurring L-amino acids
KKXGLNRPPFGAQRRVLTPRGGFPPGGXKIFSPPPGGGFPGKPPPKTGARXFPPGGGPFPKFFFAQNXSQKI

SEQ ID NO: 5817 - protein, 125 aa, Homo sapiens
  MISC_FEATURE (45): Xaa equals any of the naturally occurring L-amino acids
HGVRRRLRVTRQRATALVQSARVRRWKRSRRNPQIAPFPRDLSGXRATAQPRAPALRPRHTPQSSSSGSAPTPRRDQPARGGLTAPSSQEGTQRTTEPHSAPRSPLWLLASRPTRAAMVTSPPPL

SEQ ID NO: 5818 - protein, 227 aa, Homo sapiens
KMDWGTLQTILGGVNKHSTSIGKIWLTVLFIFRIMILVVAAKEVWGDEQADFVCNTLQPGCKNVCYDHYFPISHIRLWALQLIFVSTPALLVAMHVAYRRHEKKRKFIKGEIKSEFKDIEEIKTQKVRIEGSLWWTYTSSIFFRVIFEAAFMYVFYVMYDGFSMQRLVKCNAWPCPNTVDCFVSRPTEKTVFTVFMIAVSGICILLNVTELCYLLIRYCSGKSKKPV

SEQ ID NO: 5819 - protein, 213 aa, Homo sapiens
  MISC_FEATURE (65): Xaa equals any of the naturally occurring L-amino acids
  MISC_FEATURE (72): Xaa equals any of the naturally occurring L-amino acids
  MISC_FEATURE (75): Xaa equals any of the naturally occurring L-amino acids
  MISC_FEATURE (80): Xaa equals any of the naturally occurring L-amino acids
  MISC_FEATURE (86): Xaa equals any of the naturally occurring L-amino acids
  MISC_FEATURE (166): Xaa equals any of the naturally occurring L-amino acids
ATVPIRPNFTGKSSYRVYKLPISGETFNREKFRSQDWENPTEREDDSDKYCKLNLQQSGSFQYYXLQGNEKXGGXYIVVXPILRVXADNHVLPLDCVTLQTFLAKCLGPFDEWESRLRVAKESGYNMIHFTPLQTLGLSRSCYSLANQLELNPDFSRPNRKYTWNXVGQLVEKLKKEWIVFCITDVVYNHTAANSNCIQEHPECAYILVISPH

SEQ ID NO: 5820 - protein, 67 aa, Homo sapiens
  MISC_FEATURE (22): Xaa equals any of the naturally occurring L-amino acids
  MISC_FEATURE (38): Xaa equals any of the naturally occurring L-amino acids
GVHYCEFIILKVGDAKSTRLKXYEVFSSFNSILLEKNXHNRGSFTFPQPSRLLYCNVGKIAYNKNCS

SEQ ID NO: 5821 - protein, 260 aa, Homo sapiens
  MISC_FEATURE (165): Xaa equals any of the naturally occurring L-amino acids
  MISC_FEATURE (185): Xaa equals any of the naturally occurring L-amino acids
  MISC_FEATURE (195): Xaa equals any of the naturally occurring L-amino acids
VRAGPAAAGPRPGAERKCWSLRSLRPLGGRCAWPGTSAPAHRPGAAEGRPRGPVPAEPRPCPLALLSGHYLYYHYGCDGLDDRGWGCGYRTLQTLCSWPEGQPAGVPGLAAVQAALEDMGDKPPGFRGSRDWIGCVEASLCLAHFGGPQGRLCHVPRGVGLHGEXERLYSHFAGGGGPVMVGGDXDARSKALLGXCVGSGTEAYVLVLDPHYWGTPKSPSELQAAGWVGWQEVSAAFDPNSFYNLCLTSLSSQQQQRTLD

SEQ ID NO: 5822 - protein, 364 aa, Homo sapiens
  MISC_FEATURE (2): Xaa equals any of the naturally occurring L-amino acids
  MISC_FEATURE (154): Xaa equals any of the naturally occurring L-amino acids
  MISC_FEATURE (166): Xaa equals any of the naturally occurring L-amino acids
  MISC_FEATURE (269): Xaa equals any of the naturally occurring L-amino acids
  MISC_FEATURE (299): Xaa equals any of the naturally occurring L-amino acids
  MISC_FEATURE (310): Xaa equals any of the naturally occurring L-amino acids
  MISC_FEATURE (319): Xaa equals any of the naturally occurring L-amino acids
  MISC_FEATURE (356): Xaa equals any of the naturally occurring L-amino acids
  MISC_FEATURE (363): Xaa equals any of the naturally occurring L-amino acids
WXPRAAGIRHELFQALIDIQEFYEVTLLDNPKCIDRSKPSEPIQPVNTWEISSLPSSTVTSETLPSSLSPSVEKYRYQDEDTPPQEHISPQITNEVIGPELVHVSEKNLSEIENVHGFVSHSHISPIKPTEAVLPSPPTVPVIPVLPVPAENTXILPTIPQANPPXVLVNTDSLETPTYVNGTDADYEYEEITLERGNSGLGFSIAGGTDNPHIGDDSSIFITKIITGGAAAQDGRLRVNDCILRVNEVDVRDVTHSKAVEALKEAGSXVRLYVKRRKPVSEKIMEIKLIKGPKGLGFXIAGGVGNQHIXGDNSIYVTXIIEGGAAHKDGKLQIGDKLLAVNNVCLEEVTHEEAVXALKSTSXF

SEQ ID NO: 5823 - protein, 277 aa, Homo sapiens
  MISC_FEATURE (45): Xaa equals any of the naturally occurring L-amino acids
GSCSSRCDSRNQRHLRVSRKPPFVVSRTEGYIGVLIDDLTTLGTXEPYRMFTSRVEFRLSLRPDNADSRLTLRGYKDAGCVSQQRYERACWMKSSLEEGISVLKSIEFLSSKWKKLIPEASISTSRSLPVRALDVLKYEEVDMDSLAKAVPEPLKKYTKCRELAERLKIEATYESVLFHQLQEIKGVQQDEALQLPKDLDYLTIRDVSLSHEVREKLHFSRPQTIGAASRIPGVTPAAIINLLRFVKTTQRRQSAMNESSKTDQYLCDADRLQEREL

SEQ ID NO: 5824 - protein, 36 aa, Homo sapiens
IFHRVLLCDLNFSLGPASDIVGGLSWFQEIRLAFSS

SEQ ID NO: 5825 - protein, 160 aa, Homo sapiens
AGSQESAKALMIREKYAGSPTHLPADHIPVPGSSRADTAPPEEGLPDFHPPPLPQEDPYCLDDAPPNLDYLVHMQGGILFVYDNKKMLEHQEPHSLPYPDLETYTVDMSHILALITDGPTKTYCHRRLNFLESKFSLHEMLNEMSEFKELKSNPHRDFYN

SEQ ID NO: 5826 - protein, 71 aa, Homo sapiens
KTKYLLWDKILYAYLEYWEDGKEYKEKNNCTPHSRHNLLFTSLGCISIPTRWNHLYVYLIRIMLHTVLFPS

SEQ ID NO: 5827 - protein, 23 aa, Homo sapiens
KKAWEPVCFERTDDIGRALEVPG

SEQ ID NO: 5828 - protein, 155 aa, Homo sapiens
  MISC_FEATURE (5): Xaa equals any of the naturally occurring L-amino acids
  MISC_FEATURE (7): Xaa equals any of the naturally occurring L-amino acids
  MISC_FEATURE (12): Xaa equals any of the naturally occurring L-amino acids
  MISC_FEATURE (48): Xaa equals any of the naturally occurring L-amino acids
PHPTXWXQLEEXCRRLAEVSKPPKQRCCVASQQRDRNHSATVQTGATXFSNPSLAPEDHKEPKKLAGVHALQASELVVTYFFCGEEIPYRRMLKAQSLTLGHFKEQLSKKGNYRYYFKKASDEFACGAVFEEIWEDETVLPMYEGRILGKVERID

SEQ ID NO: 5829 - protein, 317 aa, Homo sapiens
  MISC_FEATURE (20): Xaa equals any of the naturally occurring L-amino acids
  MISC_FEATURE (113): Xaa equals any of the naturally occurring L-amino acids
  MISC_FEATURE (116): Xaa equals any of the naturally occurring L-amino acids
  MISC_FEATURE (245): Xaa equals any of the naturally occurring L-amino acids
MNKLNELEKICEILQAEKYXLVTELNDSRSECITATRKMAEEVGKLLNEVKILNDDSGLLHGELVEDIPGGEFGEQPNEQHPVSLAPLDESNSYEHLTLSDKEVQMHFAELQXKFXSLQSEHKILHDQHCQMSSKMSELQTYVDSLKAENLVLSTNLRNFQGDLVKEMQLGLEEGLVPSLSSSCVPDSSSLSSLGDSSFYRALLEQTGDMSLLSNLEGAVSANQCSVDEVFCSSLQEENLTRKEXPSAPAKGVEELESLCEVYRQSLEKLEEKMESQGIMKNKEIQELEQLLSSEGKSLTALGAVFVRHDSGTELTA

SEQ ID NO: 5830 - protein, 55 aa, Homo sapiens
  MISC_FEATURE (13): Xaa equals any of the naturally occurring L-amino acids
  MISC_FEATURE (52): Xaa equals any of the naturally occurring L-amino acids
PNWEKKCIRLALXTREQHIRRDKATSNICTAQALLANMAAMFAIYHGSHGLXHIA

SEQ ID NO: 5831 - protein, 70 aa, Homo sapiens
NQNKGQYRKYHGVYNKLNFWLPIQTGLNGMFILNKEFAMDKIYLAYCELEVRPAVTLVFPHSMEEEERKT

SEQ ID NO: 5832 - protein, 465 aa, Homo sapiens
AGEKLLKDCVLLHLPCARSPPVSHSVTMVQWKRLCQLHYLWALGCYMLLATVALKLSFRLKCDSDHLGLESRESQSQYCRNILYNFLKLPAKRSINCSGVTRGDQEAVLQAILNNLEVKKKREPFTDTHYLSLTRDCEHFKAERKFIQFPLSKEEVEFPIAYSMVIHEKIENFERLLRAVYAPQNIYCVHVDEKSPETFKEAVKAIISCFPNVFIASKLVRVVYASWSRVQADLNCMEDLLQSSVPWKYFLNTCGTDFPIKSNAEMVQALKMLNGRNSMESEVPPKHKETRWKYHFEVVRDTLHLTNKKKDPPPYNLTMFTGNAYIVASRDFVQHVLKNPKSQQLIEWVKDTYSPDEHLWATLQRARWMPGSVPNHPKYDISDMTSIARLVKWQGHEGDIDKGAPYAPCSGIHQRAICVYGAGDLNWMLQNHHLLANKFDPKVDDNALQCLEEYLRYKAIYGTEL

SEQ ID NO: 5833 - protein, 65 aa, Homo sapiens
  MISC_FEATURE (24): Xaa equals any of the naturally occurring L-amino acids
HQPHGSPELCWKVETGREASHGSXEPDPTNQLIFKRQDGGRDHSREPCSLFLPVAKSGARKSLSV

SEQ ID NO: 5834 - protein, 101 aa, Homo sapiens
DLGLEGWGMGREGHSLLLHESDISETEQLPDAWVRNPRPHLLRTGSSESTLREKGENITSVDSPATTALEEKAAATSQRGVKDPCPRNRAAPPALTPLTFS

SEQ ID NO: 5835 - protein, 62 aa, Homo sapiens
HVSFALLVFYVISFNCLLHLTVYIIQQFTSLNSRWKNRCQSMKIFPSISKYFSRIYFSKQTI

SEQ ID NO: 5836 - protein, 152 aa, Homo sapiens
  MISC_FEATURE (131): Xaa equals any of the naturally occurring L-amino acids
VLELDQEELQLGRGGAPRRARAARRGVLLLAHREPPPARAEAPSRQAACLPPLSISPESQPGAPGPLPLSGWRSSRPLPVSLLLSLGSQPPLSFSWTGSHPLRSPSFSSGSLPLPLAHKPRSPKLLSHFPXPKVPAFLLPFLCTIPILPFLY

SEQ ID NO: 5837 - protein, 86 aa, Homo sapiens
PIEIERCEPVRSKLEEVQRKLGFALSDISVVSNYSSEWELDPVKDVLILSALRRMLWAADDFLEDLPFEQIGNLREEIINCAQGKK

SEQ ID NO: 5838 - protein, 154 aa, Homo sapiens
  MISC_FEATURE (59): Xaa equals any of the naturally occurring L-amino acids
ATVHPACQIFPHYTPSVAYPWSPEAHPLICGPPGLDKRLLPETPGPCYSNSQPVWLCLXPRQPLEPHPPGEGPSEWSSDTAEGRPCPYPHCQVCRPSLAQRRNSRSCVNRLCEMFRPSSNQECAPDVFGPYLAQSPAPGKGKDHSKHHSFCRTS

SEQ ID NO: 5839 - protein, 53 aa, Homo sapiens
IFFLIALLVKSEKKNQRRFETGALCARMTKCTSFRVCMLVNSQIYLYFFASIE

SEQ ID NO: 5840 - protein, 75 aa, Homo sapiens
KNFESTYNLEPPRSTFELSYLSGQKQCGSCMYLIDVSCLPKMYTIRLCPDHPGHMFSGPPEVSVSGHWSLRFGSE

SEQ ID NO: 5841 - protein, 356 aa, Homo sapiens
  MISC_FEATURE (25): Xaa equals any of the naturally occurring L-amino acids
ALLSWEMSAACWEEPWGLPGGFAKXVLVTGGAGFIASHMIVSLVEDYPNYMIINLDKLDYCASLKNLETISNKQNYKFIQGDICDSHFVKLLFETEKIDIVLHFAAQTHVDLSFVRAFEFTYVNVYGTHVLVSAAHEARVEKFIYVSTDEVYGGSLDKEFDESSPKQPTNPYASSKAAAECFVQSYWEQYKFPVVITRSSNVYGPHQYPEKVIPKFISLLQHNRKCCIHGSGLQTRNFLYATDVVEAFLTVLKKGKPGEIYNIGTNFEMSVVQLAKELIQLIKETNSESEMENWVDYVNDRPTNDMRYPMKSEKIHGLGWRPKVPWKEGIKKTIEWYRENFHNWKNVEKALEPFPV

SEQ ID NO: 5842 - protein, 52 aa, Homo sapiens
AKTSHLEFGKIRISQVEHLLNARIVSMHFKSIFNLYYSLIIGIMTPEQRQLS

SEQ ID NO: 5843 - protein, 55 aa, Homo sapiens
TRMPSKAALMEEAKLMASLWHLAAMAFITYVLLAGMALGIQKRSVPSPSLTLPSL

SEQ ID NO: 5844 - protein, 231 aa, Homo sapiens
  MISC_FEATURE (1): Xaa equals any of the naturally occurring L-amino acids
  MISC_FEATURE (3): Xaa equals any of the naturally occurring L-amino acids
  MISC_FEATURE (5): Xaa equals any of the naturally occurring L-amino acids
  MISC_FEATURE (17): Xaa equals any of the naturally occurring L-amino acids
  MISC_FEATURE (20): Xaa equals any of the naturally occurring L-amino acids
  MISC_FEATURE (21): Xaa equals any of the naturally occurring L-amino acids
  MISC_FEATURE (90): Xaa equals any of the naturally occurring L-amino acids
  MISC_FEATURE (140): Xaa equals any of the naturally occurring L-amino acids
  MISC_FEATURE (152): Xaa equals any of the naturally occurring L-amino acids
  MISC_FEATURE (159): Xaa equals any of the naturally occurring L-amino acids
  MISC_FEATURE (189): Xaa equals any of the naturally occurring L-amino acids
  MISC_FEATURE (195): Xaa equals any of the naturally occurring L-amino acids
  MISC_FEATURE (198): Xaa equals any of the naturally occurring L-amino acids
  MISC_FEATURE (202): Xaa equals any of the naturally occurring L-amino acids
  MISC_FEATURE (203): Xaa equals any of the naturally occurring L-amino acids
  MISC_FEATURE (217): Xaa equals any of the naturally occurring L-amino acids
  MISC_FEATURE (219): Xaa equals any of the naturally occurring L-amino acids
XCXAXAPSVPAWQVLHXHNXXRLVEFSAFLEQQRDPDSYNKHLFVHIGHANHSYSDPLLESVDIRQIYDKFPEKKGGLKELFGKGPQNAXFLVKFWADLNCNIQDDAGAFYGVTSQYESSENMTVTCSTKVCSFGKQVVXKVETEYARFENXRFVYRIXRSPMCEYMINFIHKLKHLPEKYMMNSVLEXFTILLXVTXRDTXXTLLCMACVFEVSNXEXGAQHHIYRLVKD

SEQ ID NO: 5845 - protein, 57 aa, Homo sapiens
ADLREQRGLRQATDHQELVEIPTRPLLTKLSLITAPRRGERAPVPLRAGGHSTGDTA

SEQ ID NO: 5846 - protein, 56 aa, Homo sapiens
  MISC_FEATURE (21): Xaa equals any of the naturally occurring L-amino acids
IAHYFLYRYLKKTVYGLHFFXCHIGLMLLSNGGARSHHSLSPQIDFVPPSNKLSKS

SEQ ID NO: 5847 - protein, 555 aa, Homo sapiens
QYRSEFPGRPTRPAVTATAASDRMESDSDSDKSSDNSGLKRKTPALKMSVSKRARKASSDLDQASVSPSEEENSESSSESEKTSDQDFTPEKKAAVRAPRRGPLGGRKKKKAPSASDSDSKADSDGAKPEPVAMARSASSSSSSSSSSDSDVSVKKPPRGRKPAEKPLPKPRGRKPKPERPPSSSSSDSDSDEVDRISEWKRRDEARRRELEARRRREQEEELRRLREQEKEEKERRRERADRGEAERGSGGSSGDELREDDEPVKKRGRKGRGRGPPSSSDSEPEAELEREAKKSAKKPQSSSTEPARKPGQKEKRVRPEEKQQAKPVKVERTRKRSEGFSMDRKVEKKKEPSVEEKLQKLHSEIKFALKVDSPDVKRCLNALEELGTLQVTSQILQKNTDVVATLKKIRRYKANKDVMEKAAEVYTRLKSRVLGPKIEAVQKVNKAGMEKEKAEEKLAGEELAGEEAPQEKAEDKPSTDLSAPVNGEATSQKGESAEDKEHEEGRDSEEGPRCGSSEDLHDSVREGPDLDRPGSDRQERERARGDSEALDEES

SEQ ID NO: 5848 - protein, 227 aa, Homo sapiens
  MISC_FEATURE (26): Xaa equals any of the naturally occurring L-amino acids
  MISC_FEATURE (208): Xaa equals any of the naturally occurring L-amino acids
QHPQPADSRQTGSSKALAQTLPPPTXAGESNSVTCNCGQEAVLLTVRKEGPNRGRQFFKCNGGSCNFFLWADSPNPGAGGPPALAYRPLGASLGCPPGPGIHLGGFGNPGDGSGSGTSCLCSQPSVTRTVQKDGPNKGRQFHTCAKPREQQCGFFQWVDENTAPGTSGAPSWTGDRGRTLESEARSKRPRAGSSDMGSTAKKPRKCSXCHQPGTHPSLLSSEQMSSG

SEQ ID NO: 5849 - protein, 254 aa, Homo sapiens
  MISC_FEATURE (172): Xaa equals any of the naturally occurring L-amino acids
GRSRVSSRKRHPAGPPGEAQEGSAKAERPGLQNMELAPVQRKIEARSAEDSFTGFVRTLYFADTYLKDSSRHCPSLWAGTNGGTIYAFSLRVPPAERRMDEPVRAEQAKEIQLMHRAPVVGILVLDGHSVPLPEPLEVAHDLSKSPDMQGSHQLLVVSEEQFKVFTLPKVSXKLKLKLTALEGSRVRRVSVAHFGSRRAEDYGEHHLAVLTNLGDIQVVSLPLLKPQVRYSCIRREDVMASPPASSPNMAKAST

SEQ ID NO: 5850 - protein, 88 aa, Homo sapiens
QPIHTRPGLFIYTAAHSSLQLHMLYLDHSEANSEHYIILSINISNILKYTIGIQASPIVPQMFGCFCSWIVCIRIQARPIYCIYLKCL

SEQ ID NO: 5851 - protein, 98 aa, Homo sapiens
SFTGQSRTKIVYSMYSRKAAEEVKRELIKLKVNYYILEESWCVRRSKPGCSMPEIWDVEDPANAGKTPLCNLLVKDSKPHFTTVFQNSVYKVLEVVKE

SEQ ID NO: 5852 - protein, 96 aa, Homo sapiens
  MISC_FEATURE (7): Xaa equals any of the naturally occurring L-amino acids
RAEFGTXSLQAPSREEAAKWSQVRKDLCSLKVSLQLRGEDGSVWNYKPPADSGGKEIFSLLPHMADMSTYMFKGIISFAKVISYFRDLPIEDQISC

SEQ ID NO: 5853 - protein, 158 aa, Homo sapiens
  MISC_FEATURE (4): Xaa equals any of the naturally occurring L-amino acids
VTAXSGILDVTVVYLNPEQHCCQESSDEEACPEDKGPQDPQALALDTQIPATPGPKPLVRTSREPGKDVTTSGYSSVSTASPTSSVDGGLGALPQPTSVLSLDSDSHTQPCHHQARKSCLQCRPPSPPESSVPQQQVKRINLCIHSEEEDMNLGLVRL

SEQ ID NO: 5854 - protein, 71 aa, Homo sapiens
  MISC_FEATURE (47): Xaa equals any of the naturally occurring L-amino acids
  MISC_FEATURE (64): Xaa equals any of the naturally occurring L-amino acids
GCLNDEHLEELGGILKAKLEGHFKNQELRQVKRQEENYDQQVEMSLXDEDECDVYILTKVSDIXHSLFKYL

SEQ ID NO: 5855 - protein, 137 aa, Homo sapiens
RGQHQLEGGLGGFQGLHQVRRPCPEDWLLYGRKCYFFSEEPRDWNTGRQYCHTHEAVLAVIQSQKELEFMFKFTRREPWIGLRRVGDEFHWVNGDPFDPDTFTIAGPGECVFVEPTRLVSTECLMTRPWVCSKMAYT

SEQ ID NO: 5856 - protein, 130 aa, Homo sapiens
  MISC_FEATURE (121): Xaa equals any of the naturally occurring L-amino acids
  MISC_FEATURE (130): Xaa equals any of the naturally occurring L-amino acids
GARPGAEGARAFGGSIGLQAEEQGPCHLPGGRSHLCSQVRGSSGGETECASWEAPRIVGGELAASLACPLFPVPPSRLAPAPAWEDPHLRLQCLFPLEALPSARGPRILPWPSEHRLGRPXNSSVKPGIX

SEQ ID NO: 5857 - protein, 140 aa, Homo sapiens
  MISC_FEATURE (100): Xaa equals any of the naturally occurring L-amino acids
  MISC_FEATURE (129): Xaa equals any of the naturally occurring L-amino acids
EFGRGEISRGPDVHLTHGLEPKDVNREFRLTESSTCEPSTVAAVLSRAQGCRSPSAPDVRTGSFSHSATDGSVGLIGVPEKKVAEKQASTELEAASFPAXMYSEPLRQFRDSSVGDQNAQVCQTNSRTXCNNSGDHTPWI

SEQ ID NO: 5858 - protein, 194 aa, Homo sapiens
LLSNKMNFVLVKVRYDVVGMFWNMFFQVASGGGGVGDGVQEPTTGNWRGMLKTSKAEELLAEEKSKPIPIMPASPQKGHAVNLLDVPVPVARKLSAREQRDCEVIERLIKSYFLIVRKNIQDSVPKAVMHFLVNHVKDTLQSELVGQLYKSSLLDDLLTESEDMAQRRKEAADMLKALQGASQIIAEIRETHLW

SEQ ID NO: 5859 - protein, 75 aa, Homo sapiens
LFKVSNVHPGLGITNVGVKMPTKGFSALEVLRSPICIKADPFCKDLSFRTFSVLLVRTLEVILIISTDSLTAEAT

SEQ ID NO: 5860 - protein, 241 aa, Homo sapiens
  MISC_FEATURE (2): Xaa equals any of the naturally occurring L-amino acids
  MISC_FEATURE (4): Xaa equals any of the naturally occurring L-amino acids
  MISC_FEATURE (199): Xaa equals any of the naturally occurring L-amino acids
  MISC_FEATURE (226): Xaa equals any of the naturally occurring L-amino acids
  MISC_FEATURE (229): Xaa equals any of the naturally occurring L-amino acids
  MISC_FEATURE (230): Xaa equals any of the naturally occurring L-amino acids
  MISC_FEATURE (231): Xaa equals any of the naturally occurring L-amino acids
CXFXNAGVKQSALLGLKDLLSQYPFIIDAHLSNILSEVTAVFTDKDANVRLAAVQLLQFLAPKIRAEQISPFFPLVSAHLSSAMTHITEGIQEDSLKVLDILLEQYPALITGRSSILLKNFVELISHQQLSKGLINRDRSQSWILSVNPNRRLTSQQWRLKVLVRLSKFLQALADGSSRLRESEGLQEQKENPHATSNXIFINWKEHANDQQHIQGYENGGSQAKXGPXXXTDLVGGLMGG

SEQ ID NO: 5861 - protein, 260 aa, Homo sapiens
NSRTDVRMETDLEVIIKDNSLVLTPSHIKAYMLMTLQGLEYLHQHWILHRDLKPNNLLLDENGVLKLADFGLAKSFGSPNRAYTHQVVTRWYRAPELLFGARMYGVGVDMWAVGCILAELLLRVPFLPGDSDLDQLTRIFETLGTPTEEQWPDMCSLPDYVTFKSFPGIPLHHIFSAAGDDLLDLIQGLFLFNPCARITATQALKMKYFSNRPGPTPGCQLPRPNCPVETLKEQSNPALAIKRKRTEALEQGGLPKKLIF

SEQ ID NO: 5862 - protein, 94 aa, Homo sapiens
SSYRSKAYTHTKITVPRERVCVSVRVSVCARARSWPNVRTLHKGGRSSYRLFNVRETIFLLFQLYQILVPQHRNDSESQTKCIICSILILLLHS

SEQ ID NO: 5863 - protein, 89 aa, Homo sapiens
CCLCGLWVWTNPVVACPPEPPPSQQRHQGALGSPKTYHSRVPQAPGCCFLLPVPQPHAPFYILCVSKGWKNKTQLKIKKKKKKKKKKKK

SEQ ID NO: 5864 - protein, 544 aa, Homo sapiens
  MISC_FEATURE (266): Xaa equals any of the naturally occurring L-amino acids
  MISC_FEATURE (320): Xaa equals any of the naturally occurring L-amino acids
  MISC_FEATURE (321): Xaa equals any of the naturally occurring L-amino acids
  MISC_FEATURE (527): Xaa equals any of the naturally occurring L-amino acids
  MISC_FEATURE (528): Xaa equals any of the naturally occurring L-amino acids
  MISC_FEATURE (529): Xaa equals any of the naturally occurring L-amino acids
LSWPVVANQVLKLGNLEFKPESRVNGLDESKIKDKNELKEICELTGIDQSVLERAFSFRTVEAKQEKVSTTLNVAQAYYARDALAKNLYSRLFSWLVNRINESIKAQTKVRKKVMGVLDIYGFEIFEDNSFEQFIINYCNEKLQQIFIELTLKEEQEEYIREDIEWTHIDYFNNAIICDLIENNTNGILAMLDEECLRPGTVTDETFLEKLNQVCATHQHFESRMSKCSRFLNDTSLPHSCFRIQHYAGKVLYQVEGFVDKNNDLXYRDLSQAMWKASHALIKSLFPEGNPAKINLKRPPTAGSQFKASVATLMKNLQTXXPNYIRCIKPNDKKAAHIFNEALVCHQIRYLGLLENVRVRRAGYAFRQAYEPCLERYKMLCKQTWPHWKGPARSGVEVLFNELEIPVEEYSFGRSKIFIRNPRTLFKLEDLRKQRLEDLATLIQKIYRGWKCRTHFLLMKKSQIVIAAWYRRYAQQKRYQQTKSSALVIQSYIRGWKARKILRELKHQKRCKEAVTTIAAYWHGTQXXXKNQEILQSQCWKRKS

SEQ ID NO: 5865 - protein, 87 aa, Homo sapiens
LCLLKRPSPILFNPGSPSGGPTLGTTSPTDGPLASAILLAAISWAKMLLLPDVADFPCGAKRKPRLLMLIIPLSSQPLYIKASGTKR

SEQ ID NO: 5866 - protein, 600 aa, Homo sapiens
  MISC_FEATURE (45): Xaa equals any of the naturally occurring L-amino acids
  MISC_FEATURE (48): Xaa equals any of the naturally occurring L-amino acids
  MISC_FEATURE (52): Xaa equals any of the naturally occurring L-amino acids
  MISC_FEATURE (81): Xaa equals any of the naturally occurring L-amino acids
  MISC_FEATURE (120): Xaa equals any of the naturally occurring L-amino acids
  MISC_FEATURE (137): Xaa equals any of the naturally occurring L-amino acids
  MISC_FEATURE (167): Xaa equals any of the naturally occurring L-amino acids
  MISC_FEATURE (270): Xaa equals any of the naturally occurring L-amino acids
RTRGKQAANNSLLLHLLKSQTIPKPMNGHSHSERGSIFEESSTPXTIXEYSXNNPSFTDDSSGDESSYSNCVPIDLSCKHXTEKSESDQPVSLDNFTQSLLNTWDPKVPDVDIKEDQDTXKNSKLNSHQKVTLLQLXLGHKNEENVEKNTSPQGVHNDVSKFNTQNXARTSVIESPSTNRTTPVSTPPLLTSSKAGSPINLSQHSLVIKWNSPPYVCSTQSEKLTNTASNHSMDLTKSKDPPGEKPAQNEGAQNSATFSASKLLQNLAQXGMQSSMSVEEQRPSKQLLTGNTDKPIGMIDRLNSPLLSNKTNAVEENKAFSSQPTGPEPGLSGSEIENLLERRTVLQLLLGNPNKGKSEKKEKTPLRDESTQEHSERALSEQILMVKIKSEPCDDLQIPNTNVHLSHDAKSAPFLGMAPAVQRSAPALPVSEDFKSEPVSPQDFSFSKNGLLSRLLRQNQDSYLADDSDRSHRNNEMALLESKNLCMVPKKRKLYTEPLENPFKKMKNNIVDAANNHSAPEVLYGSLLNQEELKFSRNDLEFKYPAGHGSASESEHRSWARESKSFNVLKQLLLSENCVRDLSPHRSNSVADSKKERTQK

SEQ ID NO: 5867 - protein, 308 aa, Homo sapiens
QYGRIPGSTHASAEPLENPFKKMKNNIVDAANNHSAPEVLYGSLLNQEELKFSRNDLEFKYPAGHGSASESEHRSWARESKSFNVLKQLLLSENCVRDLSPHRSNSVADSKKKGHKNNVTNSKPEFSISSLNGLMYSSTQPSSCMDNRTFSYPGVVKTPVSPTFPEHLGCAGSRPESGLLNGCSMPSEKGPIKWVITDAEKNEYEKDSPRLTKTNPILYYMLQKGGNSVTSRETQDKDIWREASSAESVSQVTAKEELLPTAETKASFFNLRSPYNSHMGNNASRPHSANGEVYGLLGSVLTIKKESE

SEQ ID NO: 5868 - protein, 553 aa, Homo sapiens
  MISC_FEATURE (129): Xaa equals any of the naturally occurring L-amino acids
  MISC_FEATURE (133): Xaa equals any of the naturally occurring L-amino acids
  MISC_FEATURE (375): Xaa equals any of the naturally occurring L-amino acids
  MISC_FEATURE (438): Xaa equals any of the naturally occurring L-amino acids
  MISC_FEATURE (549): Xaa equals any of the naturally occurring L-amino acids
TLEAEKERRKSGLSSRVQFRNQGSEPKYTQELTLKRQKQKVCMEETLWLQDNIRDKLRPIPITASVEIQEPSSRRRVNSLPEVLPILNSDEPKTAHIDVHFLKEGCGDDNVCNSNLKLEYKFCTREGNXDKFXYLPIQKGVPELVLKDQKDIALEITVTNSPSNPRNPTKDGDDAHEAKLIATFPDTLTYSAYRELRAFPEKQLSCVANQNGSQADCELGNPFKRNSNVTFYLVLSTTEVTFDTPDLDINLKLETTSNQDNLAPITAKAKVVIELLLSVSGVAKPSQVYFGGTVVGEQAMKSEDEVGSLIEYEFRVINLGKPLTNLGTATLNIQWPKEISNGKWLLYLVKVESKGLEKVTCEPQKEINSLNLTEXHNSRKKREITEKQIDDNRKFSLFAERKYQTLNCSVNVNCVNIRCPLRGLDSKASLILRSRLWXSTFLEEYSKLNYLDILMRAFIDVTAAAENIRLPNAGTQVRVTVFPSKTVAQYSGVPWWIILVAILAGILMLALLVFILWKCGFFKRNKKDHYDATYHKAEIHAQPSDKERXTSDA

SEQ ID NO: 5869 - protein, 110 aa, Homo sapiens
  MISC_FEATURE (110): Xaa equals any of the naturally occurring L-amino acids
RTPESWRLTPPAKVGGLDFSPVQTSQGASDPLPDPLGLMDLSTTPLQSAPPLESPQRLLSSEPLDLISVPFGNSSPSDIDVPKPGSPEPQVSGLAANRSLTEGLVLGHNX

SEQ ID NO: 5870 - protein, 198 aa, Homo sapiens
  MISC_FEATURE (2): Xaa equals any of the naturally occurring L-amino acids
PXRPRGAAAAAAAAGAAMPKGGRKGGHKGRARQYTSPEEIDAQLQAEKQKAREEEEQKEGGDGAAGDPKKEKKSLDSDESEDEEDDYQQKRKGVEGLIDIENPNRVAQTTKKVTQLDLDGPKELSRREREEIEKQKAKERYMKMHLAGKTEQAKADLARLAIIRKQREEAARKKEEERKAKDDATLSGKRMQSLSLNK

SEQ ID NO: 5871 - protein, 63 aa, Homo sapiens
KNKTKAVFPNFGMNPPLFQMKTASRSSSKRKSLGGAQRARCPSTSVLGTWRVAASPPAPVPSC

SEQ ID NO: 5872 - protein, 229 aa, Homo sapiens
  MISC_FEATURE (221): Xaa equals any of the naturally occurring L-amino acids
ATKINLSLSALGNVISALVDGKSTHIPYRDSKLTRLLQDSLGGNAKTVMVANVGPASYNVEETLTTLRYANRAKNIKNKPRVNEDPKDALLREFQEEIARLKAQLEKRSIGRRKRREKRREGGGSGGGGEEEEEEGEEGEEEGDDKDDYWREQQEKLEIEKRAIVEDHSLVAEEKMRLLKEKEKKMEDLRREKDAAEMLGAKIKVPYPYPSLGPCPVTAFXFIKQQQKT

SEQ ID NO: 5873 - protein, 298 aa, Homo sapiens
CERGSLHFTGVTGGNLRVNGKERASGIYFGANEALLAVKDYIRTQIISKKINTKFFQEENTEKLKLKYYNLMIQLDQHEGSYLSICKHYRAIYDTPCIQAESEKWQQALKSVVLYVILAPFDNEQSDLVHRISGDKKLEEIPKYKDLLKLFTTMELMRWSTLVEDYGMELRKGSLESPATDVFGSTEEGEKRWKDLKNRVVEHNIRIMAKYYTRITMKRMAQLLDLSVDESEAFLSNLVVNKTIFAKVDRLAGIINFQRPKDPNNLLNDWSQKLNSLMSLVNKTTHLIAKEEMIHNLQ

SEQ ID NO: 5874 - protein, 102 aa, Homo sapiens
  MISC_FEATURE (10): Xaa equals any of the naturally occurring L-amino acids
NSAECNPRFXNATIVCNSLDGSNWGQEQREDHLCFSPGSEVKVRSKGERALGVMSRGGPRWKRAWPGTQWLALFEPSGTALAHFQGLLPPLTPSLPTVHSDL

SEQ ID NO: 5875 - protein, 345 aa, Homo sapiens
LPVRAEPTRAAAMSGDEMIFDPTMSKKKKKKKKPFMLDEEGDTQTEETQPSETKEVEPEPTEDKDLEADEEDTRKKDASDDLDDLNFFNQKKKKKKTKKIFDIDEAEEGVKDLKIESDVQEPTEPEDDLDIMLGNKKKKKKNVKFPDEDEILEKDEALEDEDNKKDDGISFSNQTGPAWAGSERDYTYEELLNRVFNIMREKNPDMVAGEKRKFVMKPPQVVRVGTKKTSFVNFTDICKLLHRQPKHLLAFLLAELGTSGSIDGNNQLVIKGRFQQKQIENVLRRYIKEYVTCHTCRSPDTILQKDTRLYFLQCETCHSRCSVASIKTGFQAVTGKRAQLRAKAN

SEQ ID NO: 5876 - protein, 194 aa, Homo sapiens
RTSMGILYSEPICQAAYQNDFGQVWRWVKEDSSYANVQDGFNGDTPLICACRRGHVRIVSFLLRRNANVNLKNQKERTCLHYAVKKKFTFIDYLLIILLMPVLLIGYFLMVSKTKQNEALVRMLLDAGVEVNATDCYGCTALHYACEMKNQSLIPLLLEARADPTIKNKHGESSLDIARRLKFSQIELMLRKAL

SEQ ID NO: 5877 - protein, 469 aa, Homo sapiens
  MISC_FEATURE (8): Xaa equals any of the naturally occurring L-amino acids
  MISC_FEATURE (47): Xaa equals any of the naturally occurring L-amino acids
  MISC_FEATURE (65): Xaa equals any of the naturally occurring L-amino acids
  MISC_FEATURE (436): Xaa equals any of the naturally occurring L-amino acids
SASFSRGXQLSFTDLGLPPTDHLQASFGFQTFQPSGILLDHQTWTRXLQVTLEDGYIELSTSDSXGPIFKSPQTYMDGLLHYVSVISDNSGLRLLIDDQLLRNSKRLKHISSSRQSLRLGGSNFEGCISNVFVQRLSLSPEVLDLTSNSLKRDVSLGGCSLNKPPFLMLLKGSTRFNKTKTFRINQLLQDTPVASPRSVKVWQDACSPLPKTQANHGALQFGDIPTSHLLFKLPQELLKPRSQFAVDMQTTSSRGLVFHTGTKNSFMALYLSKGRLVFALGTDGKKLRIKSKEKCNDGKWHTVVFGHDGEKGRLVVDGLRAREGSLPGNSTISIRAPVYLGSPPSGKPKSLPTNSFVGCLKNFQLDSKPLYTPSSSFGVSSCLGGPLEKGIYFSEEGGHVVLAHSVLLGPEFKLVFSIRPRSLTGILIHIGSQPGXALMCLPGGRKGHGLYGQWGRWDLNVGHTKAVSV

SEQ ID NO: 5878 - protein, 83 aa, Homo sapiens
FLILSGELLARIIYLQIILDQRLGAGLTPSSRLGASIHFLVGLNIPPAFRRIHRTYCSFQMTFWKIVPFANRNMPEGIFSSFI

SEQ ID NO: 5879 - protein, 117 aa, Homo sapiens
SCTRHQSLPGSCDELHLSPFLPQPQTLSFKEGLPGSLHPTAPMRLGPRVHSPGGSQLSGRSFPPNIFQLLGGDHRALLLKIWLLQRPESQEGLLPGRLVVMERRVKMTSCPSCPRFC

SEQ ID NO: 5880 - protein, 170 aa, Homo sapiens
  MISC_FEATURE (47): Xaa equals any of the naturally occurring L-amino acids
  MISC_FEATURE (149): Xaa equals any of the naturally occurring L-amino acids
  MISC_FEATURE (155): Xaa equals any of the naturally occurring L-amino acids
RTYFPVKMPTTKKTLMFLSSFFTSLGSFIVICSILGTQAWITSTIAXRDSASNGSIFITYGLFRGESSEELSHGLAEPKKKFAVLEILNNSSQKNSAFGDYPVPGPEFDHVAAELWVYLLQQHQQPLPDIPGARRGCTPGTGSGILRFXTMILLXRTRSPTNFPKVVQML

SEQ ID NO: 5881 - protein, 173 aa, Homo sapiens
RTYFPVKMPTTKKTLMFLSSFFTSLGSFIVICSILGTQAWITSTIAVRDSASNGSIFITYGLFRGESSEELSHGLAEPKKKFAASFVFVTMILFVANTQSNQLSEELFQMLYPATTSKGTTHSYGYSFWLILLVILLNIVTVTIIIFYQKARYQRKQEQRKPMEYAPRDGILF

SEQ ID NO: 5882 - protein, 132 aa, Homo sapiens
HRNRPSQCHLLNLWRPPDLEEPTKVDKLQEPLLEALKIYIRKRRPSKPHMFPKILMKITDLRSISAKGAERVITLKMEIPGSMPPLIQEMLENSEGHEPLTPSSSGNTAEHSPSISPSSVENSGVSQSPLVQ

SEQ ID NO: 5883 - protein, 326 aa, Homo sapiens
AHASAHASAWVPAPQRSRDSPRRRARRPELPKPSRAAHTPGLHSLFQHPLVLAAARVPETELPQRPRRRRCEGPMRAPLLPPAPVVLSLLILGSGHYAAGLDLNDTYSGKREPFSGDHSADGFEVTSRSEMSSGSEISPVSEMPSSSEPSSGADYDYSEEYDNEPQIPGYIVDDSVRVEQVVKPPQNKTESENTSDKPKRKKKGGKNGKNRRNRKKKNPCNAEFQNFCIHGECKYIEHLEAVTCKCQQEYFGERCGEKSMKTHSMIDSSLSKIALAAIAAFMSAVILTAVAVITVQLRRQYVRKYEGEAEERKKLRQENGNVHAIA

SEQ ID NO: 5884 - protein, 58 aa, Homo sapiens
APQRSSLVDRVRLHLKKIKIKLFSEEQMSHSSNDPLSRNMVEFSPIQVSHIQKTTSHY

SEQ ID NO: 5885 - protein, 93 aa, Homo sapiens
GRLWSREEAMATMENKVICALVLVSMLALGTLAEAQTETCTVAPRERQNCGFPGVTPSQCANKGCCFDDTVRGVPWCFYPNTIDVPPEEECEF

SEQ ID NO: 5886 - protein, 55 aa, Homo sapiens
  MISC_FEATURE (24): Xaa equals any of the naturally occurring L-amino acids
KVPVRNSRVDPRVRISPRARLPPXPDTSDTLLQLCLGSQHRLTALTLTTQNWPKN

SEQ ID NO: 5887 - protein, 214 aa, Homo sapiens
AGRPMKVGHVTERTDASSASSFLDSDELERTGIDLGTTGRLQLMARLAEGTGLQIPPAAQQALQMSGSLAFGAVAEFSFVIDLQTRLSQQTEASALAAAASVQPLATQCFQLSNMFNPQTEEEVGWDTEIKDDVIEECNKHGGVIHIYVDKNSAQGNVYVKCPSIAAAIAAVNALHGRWFAGKMITAAYVPLPTYHNLFPDSMTATQLLVPSRR

SEQ ID NO: 5888 - protein, 91 aa, Homo sapiens
  MISC_FEATURE (47): Xaa equals any of the naturally occurring L-amino acids
NCSPAFYGSSLPCPQTQQKRRGRIRGLSRPAPLPTCHTRCEFEHSPXMETSHPQLNNGPFMPTLPTRRGQRCTRRPSSSPSSAPSHYSWFY

SEQ ID NO: 5889 - protein, 52 aa, Homo sapiens
TQKTSSLLPALSLQLPLLTRFSIMCSVKEEFWRVQSIITELVLKGEFGVKRQ

SEQ ID NO: 5890 - protein, 43 aa, Homo sapiens
  MISC_FEATURE (12): Xaa equals any of the naturally occurring L-amino acids
ADDSFFTGIAFXTSISVNNCVCHFSPLKSDQDYILKEGDLVKM

SEQ ID NO: 5891 - protein, 131 aa, Homo sapiens
PTRPAQTALPYAMNSEFSSVLAAQLKHHSENKGLDKVMETQAQVDELKGIMVRNIDLVAQRGERLELLIDKTENLVDSSVTFKTTSRNLARAMCMKNLKLTIIIIIVSIVFIYIIVSPLCGGFTWPSCVKK

SEQ ID NO: 5892 - protein, 226 aa, Homo sapiens
  MISC_FEATURE (197): Xaa equals any of the naturally occurring L-amino acids
NFGIKDKPTFIKGIGAGGSITGLKFNPLNTNQFYASSMEGTTRLQDFKGNILRVFASSDTINIWFCSLDVSASSRMVVTGDNVGNVILLNMDGKELWNLRMHKKKVTHVALNPCCDWFLATASVDQTVKIWDLRQVRGKASFLYSLPHRHPVNAACFSPDGARLLTTDQKSEIRVYSASQWDCPLGLIPHPHRHFQXLTPIKAAWDPRYNLIVVGRYPDPNFKSCT

SEQ ID NO: 5893 - protein, 484 aa, Homo sapiens
  MISC_FEATURE (25): Xaa equals any of the naturally occurring L-amino acids
WLLRSPGKLTARERISLLLDPGSFXESDMFVEHRCADFGMAADKNKFPGDSVVTGRGRINGRLVYVFSQDFTVFGGSLSGAHAQKICKIMDQAITVGAPVIGLNDSGGARIQEGVESLAGYADIFLRNVTASGVIPQISLIMGPCAGGAVYSPALTDFTFMVKDTSYLFITGPDVVKSVTNEDVTQEELGGAKTHTTMSGVAHRAFENDVDALCNLRDFFNYLPLSSQDPAPVRECHDPSDRLVPELDTIVPLESTKAYNMVDIIHSVVDEREFFEIMPNYAKNIIVGFARMNGRTVGIVGNQPKVASGCLDINSSVKGARFVRFCDAFNIPLITFVDVPGFLPGTAQEYGGIIRHGAKLLYAFAEATVPKVTVITRKAYGGAYDVMSSKHLCGDTNYAWPTAEIAVMGAKGAVEIIFKGHENVEAAQAEYIEKFANPFPAAVRGFVDDIIQPSSTRARICCDLDVLASKKVQRPWRKHANIPL

SEQ ID NO: 5894 - protein, 344 aa, Homo sapiens
  MISC_FEATURE (56): Xaa equals any of the naturally occurring L-amino acids
  MISC_FEATURE (62): Xaa equals any of the naturally occurring L-amino acids
  MISC_FEATURE (110): Xaa equals any of the naturally occurring L-amino acids
  MISC_FEATURE (325): Xaa equals any of the naturally occurring L-amino acids
  MISC_FEATURE (327): Xaa equals any of the naturally occurring L-amino acids
NKMKIFSESHKTVFVVDHCPYMAESCRQHVEFDMLVKNRTQGIIPLAPISKSLWTXSVESSXEYCRIMYDIFPFKKLVNFIVSDSGAHVLNSWTQEDQNLQELMAALAAXGPPNPRADPECCSILHGLVAAVETLCKITEYQHEARTLLMENAERVGNRGRIICITNAKSDSHVRMLEDCVQETIHEHNKLAANSDHLMQIQKCELVLIHTYPVGEDSLVSDRSKKELSPVLTSEVHSVRAGRHLATKLNILVQQHFDLASTTITNIPMKEEQHANTSANYDVELLHHKDAHVDFLKSGDSHLGGGSREGSFKETITLKWCTPRXKXTLCFLLFQELHYCTGAL

SEQ ID NO: 5895 - protein, 365 aa, Homo sapiens
  MISC_FEATURE (155): Xaa equals any of the naturally occurring L-amino acids
  MISC_FEATURE (171): Xaa equals any of the naturally occurring L-amino acids
  MISC_FEATURE (192): Xaa equals any of the naturally occurring L-amino acids
PEHSWSSSSSTKRWTEKTAETMGPPSAPPCRLHVPWKEVLLTASLLTFWNPPTTAKLTIESTPFNVAEGKEVLLLAHNLPQNRIGYSWYKGERVDGNSLIVGYVIGTQQATPGPAYSGRETIYPNASLLIQNVTQNDTGFYTLQVIKSDLVNEEXTGQFHVYPELPKPSIXSNNSNPVEDKDAVAFTCEPEXQNTTYLWWVNGQSLPVSPRLQLSNGNMTLTLLSVKRNDAGSYECEIQNPASANRSDPVTLNVLYGPDGPTISPSKANYRPGENLNLSCHAASNPPAQYSWFINGTFQQSTQELFIPNITVNNSGSYMCQAHNSATGLNRTTVTMITVSGSAPVLSAVATVGITIGVLARVALI

SEQ ID NO: 5896 - protein, 93 aa, Homo sapiens
  MISC_FEATURE (13): Xaa equals any of the naturally occurring L-amino acids
  MISC_FEATURE (16): Xaa equals any of the naturally occurring L-amino acids
DPVSEEGEGLSCXDQXHRDPLGRGAGRAKKRTCKGRRRNPDAASEVQAHLVNMHCHEFLPDVLLFSFTYSFDQIVCGLNKMKISSPLFLGNTL

SEQ ID NO: 5897 - protein, 82 aa, Homo sapiens
LCEKWAQWPSPEISFILGQEFDEVTADDRKVKSTITLDGGVLVHVQKWDGKSTTIKRKREDDKLVVECVMKGVTSTRVYERA

SEQ ID NO: 5898 - protein, 102 aa, Homo sapiens
DLHSQWGTWPPILGDLRKRTSPWGEGWVGPEGPVPSSVLRGRATCSNGICILAPLHLLSPAESFPSKPKSCHCFFLPGKNAWTLPGDRLKPEQCHTLALIPC

SEQ ID NO: 5899 - protein, 51 aa, Homo sapiens
YPLFTIMLFETKVTMYTILLEEVFDRKSNIMSFINFLVLKKAVIYIYKLCK

SEQ ID NO: 5900 - protein, 239 aa, Homo sapiens
EYGSPSVISVSKGSPDGSHPVVVAPYNGGPPRTCPKIKQEAVSSCTHLGAGPPLSNGHRPAAHDFPLGRQLPSRTTPTLGLEEVLSSRDCHPALPLPPGFHPHPGPNYPSFLPDQMQPQVPPLHYQELMPPGSCMPEEPKPKRGRRSWPRKRTATHTCDYAGCGKTYTKSSHLKAHLRTHTGEKPYHCDWDGCGWKFARSDELTRHYRKHTGHRPFQCQKCDRAFSRSDHLALHMKRHF

SEQ ID NO: 5901 - protein, 269 aa, Homo sapiens
LVPNSARVGTRSKGVCVHGNAEYQPGSPVYSSKCQDCVCTDKVDNNTLLNVIACTHVPCNTSCSPGFELMEAPGECCKKCEQTHCIIKRPDNQHVILKPGDFKSDPKNNCTFFSCVKIHNQLISSVSNITCPNFDASICIPGSITFMPNGCCKTCTPRNETRVPCSTVPVTTEVSYAGCTKTVLMNHCSGSCGTFVMYSAKAQALDHSCSCCKEEKTSQREVVLSCPNGGSLTHTYTHIESCQCQDTVCGLPTGTSRRARRSPRHLGSG

SEQ ID NO: 5902 - protein, 227 aa, Homo sapiens
  MISC_FEATURE (29): Xaa equals any of the naturally occurring L-amino acids
ACHEKVVNIQKDPGESLGMTVAGGASHRXWDLPIYVISVEPGGVISRDGRIKTGDILLNVDGVELTEVSRSEAVALLKRTSSSIVLKALEVKEYEPQEDCSSPAALDSNHNMAPPSDWSPSWVMWLELPRCLYNCKDIVLRRNTAGSLGFCIVGGYEEYNGNKPFFIKSIVEGTPAYNDGRIRCGDILLAVNGRSTSGMIHACLARLLKELKGRITLTIVSWPGTFL

SEQ ID NO: 5903 - protein, 88 aa, Homo sapiens
  MISC_FEATURE (10): Xaa equals any of the naturally occurring L-amino acids
SSHFYAKQEXSITLVLMYTLHFDKINFVVSFEVDRCVVVLLHFLLFCVWSCIPETNEALGYFIKCSDCQQRAGFLFLCCGVNRTMVWE

SEQ ID NO: 5904 - protein, 571 aa, Homo sapiens
RVRSKVPRCVNTQPGFHCLPCPPRYRGNQPVGVGLEAAKTEKQVCEPENPCKDKTHNCHKHAECIYLGHFSDPMYKCECQTGYAGDGLICGEDSDLDGWPNLNLVCATNATYHCIKDNCPHLPNSGQEDFDKDGIGDACDDDDDNDGVTDEKDNCQLLFNPRQADYDKDEVGDRCDNCPYVHNPAQIDTDNNGEGDACSVDIDGDDVFNERDNCPYVYNTDQRDTDGDGVGDHCDNCPLVHNPDQTDVDNDLVGDQCDNNEDIDDDGHQNNQDNCPYISNANQADHDRDGQGDACDPDDDNDGVPDDRDNCRLVFNPDQEDLDGDGRGDICKDDFDNDNIPDIDDVCPENNAISETDFRNFQMVPLDPKGTTQIDPNWVIRHQGKELVQTANSDPGIAVGFDEFGSVDFSGTFYVNTDRDDDYAGFVFGYQSSSRFYVVMWKQVTQTYWEDQPTRAYGYSGVSLKVVNSTTGTGEHLRNALWHTGNTPGQVRTLWHDPRNIGWKDYTAYRWHLTHRPKTGYIRVLVHEGKQVMADSGPIYDQTYAGGRLGLFVFSQEMVYFSDLKYECRDI

SEQ ID NO: 5905 - protein, 59 aa, Homo sapiens
NFLNEMINRWNLKYILLQKRFLSLLYFDDCFLKIKICSCSFIRLFKLCFPLIFFHHCIY

SEQ ID NO: 5906 - protein, 176 aa, Homo sapiens
RPTRPSRDCEGERSKPRRRWKGWRTHLNMWNPNAGQPGPNPYPPNIGCPGGSNPAHPPPINPPFPPGPCPPPPGAPHGNPAFPPGGPPHPVPQPGYPGCQPLGPYPPPYPPPAPGIPPVNPLAPGMVGPAVIVDKKMQKKMKKAHKKMHKHQKHHKYHKHGKHSSSSSSSSSSDSD

SEQ ID NO: 5907 - protein, 205 aa, Homo sapiens
LGGCRDVPSLTLLSTVAGALIADFLSGLVHWGADTWGSVELPIVGKAFIRPFREHHIDPTAITRHDFIETNGDNCLVTLLPLLNMAYKFRTHSPEALEQLYPWECFVFCLIIFGTFTNQIHKWSHTYFGLPRWVTLLQDWHVILPRKHHRIHHVSPHETYFCITTGWLNYPLEKIGFWRRLEDLIQGLTGEKPRADDMKWAQKIK

SEQ ID NO: 5908 - protein, 96 aa, Homo sapiens
  MISC_FEATURE (84): Xaa equals any of the naturally occurring L-amino acids
  MISC_FEATURE (85): Xaa equals any of the naturally occurring L-amino acids
KWLLVNFDCSAMWVKKRTDLTGAFRLDPTYLKHSHQDSGLITDYRHWQIPLGRRFRSLKMWFVFRMYGVKGLQAYIRKHVQLSXXFESLVRQGSPL

SEQ ID NO: 5909 - protein, 98 aa, Homo sapiens
  MISC_FEATURE (2): Xaa equals any of the naturally occurring L-amino acids
LXHPFAVTSYGKNLYFTDWKMNSVVALDLAISKETDAFQPHKQTRLYGITTALSQCPQGHNYCSVNNGGCTHLCLATPGSRTCRCPDNTLGVDCIEQK

SEQ ID NO: 5910 - protein, 48 aa, Homo sapiens
EISAFLISSNYKRTAVFFHTHLPEGRIGSHIYVYERKLKGKFNMKMKF

SEQ ID NO: 5911 - protein, 87 aa, Homo sapiens
  MISC_FEATURE (10): Xaa equals any of the naturally occurring L-amino acids
  MISC_FEATURE (36): Xaa equals any of the naturally occurring L-amino acids
  MISC_FEATURE (47): Xaa equals any of the naturally occurring L-amino acids
SSLGKLDHQXFSLDRVSLVNKGDTGNPEWTVICVGXHSGSGASDTLXPKTAPSFRLAYEMMFMCFLETRWKERGRINFLILLLLNVM

SEQ ID NO: 5912 - protein, 83 aa, Homo sapiens
LNWLLQGEGQKARPSALESRPEVSGKLTLKMDTPQPALPFGLPRISFSGCSHTCAITSSSMTWTGTSLTIPIGITRATNYAVF

SEQ ID NO: 5913 - protein, 269 aa, Homo sapiens
RRCCHSATMFEARLVQGSILKKVLEALKDLINEACWDISSSGVNLQSMDSSHVSLVQLTLRSEGFDTYRCDRNLAMGVNLTSMSKILKCAGNEDIITLRAEDNADTLALVFEAPNQEKVSDYEMKLMDLDVEQLGIPEQEYSCVVKMPSGEFARICRDLSHIGDAVVISCAKDGVKFSASGELGNGNIKLSQTSNVDKEEEAVTIEMNEPVQLTFALRYLNFFTKATPLSSTVTLSMSADVPLVVEYKIADMGHLKYYLAPKIEDEEGS

SEQ ID NO: 5914 - protein, 211 aa, Homo sapiens
NKMKKVRLKELESRLQQVDGFEKPKLLLEQYPTRPHIAACMLYTIHNTYDDIENKVVADLGCGCGVLSIGTAMLGAGLCVGFDIDEDALEIFNRNAEEFELTNIDMVQCDVCLLSNRMSKSFDTVIMNPPFGTKNNKGTDMAFLKTALEMARTAVYSLHKSSTREHVQKKAAEWKIKIDIIAELRYDLPASYKFHKKKSVDIEVDLIRFSF

SEQ ID NO: 5915 - protein, 77 aa, Homo sapiens
KFLLKVNFPENGFLSPDKLSLLEKLLPERKEVEETDEMDQVELVDFDPNQERRRHYNGEAYEDDEHHPRGGVQCQTS

SEQ ID NO: 5916 - protein, 142 aa, Homo sapiens
SWETEKMQTAGALFISPALIRCCTRGLIRPVSASFLNSPVNSSKQPSYSNFPLQVARREFQTSVVSRDIDTAAKFIGAGAATVGVAGSGAGIGTVFGSLIIGYARNPSLKQQLFSYAILGFALSEAMGLFCLMVAFLILFAM

SEQ ID NO: 5917 - protein, 63 aa, Homo sapiens
  MISC_FEATURE (36): Xaa equals any of the naturally occurring L-amino acids
TCPFLQEFSLGMWSCLHAVLELIDSQQQDRYWCPPXLHRAAIAFLHALWQDRRDSAMLVLRTK

SEQ ID NO: 5918 - protein, 61 aa, Homo sapiens
RNKGVRANIQQLLSPVMKFIQTKDGMSLYIIPCNKYSVKLCWCNLTCFCQSKKKKKKKKKK

SEQ ID NO: 5919 - protein, 466 aa, Homo sapiens
VSPRAGGAGNNRGRAHRASSCSLPAPPATLDPRIPPARLPAMADKEAAFDDAVEERVINEEYKIWKKNTPFLYDLVMTHALEWPSLTAQWLPDVTRPEGKDFSIHRLVLGTHTSDEQNHLVIASVQLPNDDAQFDASHYDSEKGEFGGFGSVSGKIEIEIKINHEGEVNRARYMPQNPCIIATKTPSSDVLVFDYTKHPSKPDPSGECNPDLRLRGHQKEGYGLSWNPNLSGHLLSASDDHTICLWDISAVPKEGKVVDAKTIFTGHTAVVEDVSWHLLHESLFGSVADDQKLMIWDTRSNNTSKPSHSVDAHTAEVNCLSFNPYSEFILATGSADKTVALWDLRNLKLKLHSFESHKDEIFQVQWSPHNETILASSGTDRRLNVWDLSKIGEEQSPEDAEDGPPELLFIHGGHTAKISDFSWNPNEPWVICSVSEDNIMQVWQMAENIYNDEDPEGSVDPEGQGS

SEQ ID NO: 5920 - protein, 67 aa, Homo sapiens
LLPHPFSCVHVAFSNPGQWFLPRPCTEAGCLPDPRRVREGRGILLLELQALAEAVSHTVVSSAWAGT

SEQ ID NO: 5921 - protein, 212 aa, Homo sapiens
EIITDRQSGKKRGFGFVTFDDHDPVDKIVLQKYHTINGHNAEVRKALSRQEMQEVQSSRSGRGGNFGFGDSRGGGGNFGPGPGSNFRGGSDGYGSGRGFGDGYNGYGGGPGGGNFGGSPGYGGGRGGYGGGGPGYGNQGGGYGGGYDNYGGGNYGSGNYNDFGNYNQQPSNYGPMKSGNFGGSRNMGGPYGGGNYGPGGSGGSGGYGGRSRY

SEQ ID NO: 5922 - protein, 385 aa, Homo sapiens
HLEPAQLVSKKHKLRSQKRPRRCLWLHQSSRRTWLGPRRGHPLCRCPPRRPWLWLDRSQKLTSSASSPSQPYSVQPLHLPDGWADPAGLRLRGVFLCLPRVLQRRCPPGVPNTSRAVQEASGRGRAARHRNSLQRPCSRSQSPGGEEGMARAYAVVCDCKLFLYDLPEGKSTQPGVIASQVLDLRDDEFSVSSVLASDVIHATRRDIPCIFRVTASLLGAPSKTSSLLILTENENEKRKWVGILEGLQSILHKNRLRNQVVHVPLEAYDSSLPLIKAILTAAIVDADRIAVGLEEGLYVIEVTRDVIVRAADCKKVHQIELAPREKIVILLCGRNHHVHLYPWSSLDGAEGSFDIKLPETKGCQLMATATLKRNSGTCLFVAVKR

SEQ ID NO: 5923 - protein, 39 aa, Homo sapiens
TQSKWRLEVQCGKEKQVFIESTNSTPFIDTENVENPKFD

SEQ ID NO: 5924 - protein, 321 aa, Homo sapiens
ERTLGQPGFLGCPRQPHTAMHYPTALLFLILANGAQAFRICAFNAQRLTLAKVAREQVMDTLVRILARCDIMVLQEVVDSSGSAIPLLLRELNRFDGSGPYSTLSSPQLGRSTYMETYVYFYRSHKTQVLSSYVYNDEDDVFAREPFVAQFSLPSNVLPSLVLVPLHTTPKAVEKELNALYDVFLEVSQHWQSKDVILLGDFNADCASLTKKRLDKLELRTEPGFHWVIADGEDTTVRASTHCTYDRVVLHGERCRSLLHTAAAFDFPTSFQLTEEEALNISDHYPVEVELKLSQAHSVQPLSLTVLLLLSLLSPQLCPAA

SEQ ID NO: 5925 - protein, 38 aa, Homo sapiens
FSCLSLPSSWENRPVPPHRSSFCIFSRDGVSPCWPGWS

SEQ ID NO: 5926 - protein, 359 aa, Homo sapiens
INLEEVGTICLGFFKSSTNLSEFVMRKIGDLACANIQHLSSRSLVNIVKMFRFTHVDHINFMKQIGEIAPQRIPSLGVQGVMHLTLYCSALRFLNEGVMNAVAASLPPRVAHCRSKDVAKILWSFGTLNYKPPNAEEFYSSLISEIHRKMPEFNQYPEHLPTCLLGLAFLEYFPVELIDFALSPGFVRLAQERTKFDLLKELYTLDGTVGIECPDYRGNRLSTHLQQEGSELLWYLAEKDMNSKPEFLETVFLLETMLGGPQYVKHHMILPHTRSSDLEVQLDVNLKPLPFNREATPAENVAKLRLEHVGVSLTDDLMNKLLKGKARGHFQGKTESEPGQQPWSWRIRQLYLWGASFAM

SEQ ID NO: 5927 - protein, 82 aa, Homo sapiens
FGLFCTLYKWTHIMFIFWVCLLSFNIRFVGSSLLCVVLSCSLYSVPKYSILQFTHSTLDSKCFHIWAITNSAAVNIHIHIFW

SEQ ID NO: 5928 - protein, 111 aa, Homo sapiens
AFLPAGPSGFPSGPGCVWKCHLGARAWMSASGLCLAPYPTVAELVYKLQDSLLYSSSSSPVAERRNLSQSCELYCLGLGEGWHKHSLSHPGWCLTNLCAPQVHWLQGQRST

SEQ ID NO: 5929 - protein, 441 aa, Homo sapiens
RRRRACRSAEGTGLRSLLLPPRLQLPAGPFSRCRWDPVSSPRPSTMPPKKGGDGIKPPPIIGRFGTSLKIGIVGLPNVGKSTFFNVLTNSQASAENFPFCTIDPNESRVPVPDERFDFLCQYHKPASKIPAFLNVVDIAGLVKGAHNGQGLGNAFLSHISACDGIFHLTRAFEDDDITHVEGSVDPIRDIEIIHEELQLKDEEMIGPIIDKLEKVAVRGGDKKLKPEYDIMCKVKSWVIDQKKPVRFYHDWNDKEIEVLNKHLFLTSKPMVYLVNLSEKDYIRKKNKWLIKIKEWVDKYDPGALVIPFSGALELKLQELSAEERQKYLEANMTQSALPKIIKAGFAALQLEYFFTAGPDEVRAWTIRKGTKAPQAAGKIHTDFEKGFIMAEVMKYEDFKEEGSENAVKAAGKYRQQGRNYIVEDGDIIFFKFNTPQQPKKK

SEQ ID NO: 5930 - protein, 275 aa, Homo sapiens
GVALFKSAAGDQPTAACICIQRQVPPVPAARAPQSRTRSAQAKLALTMPVKGGTKCIKYLLFGFNFIFWLAGIAVLAIGLWLRFDSQTKSIFEQETNNNNSSFYTGVYILIGAGALMMLVGFLGCCGAVQESQCMLGLFFGFLLVIFAIEIAAAIWGYSHKDEVIKEVQEFYKDTYNKLKTKDEPQRETLKAIHYALNCCGLAGGVEQFISDICPKKDVLETFTVKSCPDAIKEVFDNKFHIIGAVGIGIAVVMIFGMIFSMILCCAIRRNREMV

SEQ ID NO: 5931 - protein, 115 aa, Homo sapiens
VGCRPLSSCHLLAVARSYFSLSGVICIWRFHCCFSLSYLEWNPESCPFPPTCSYLKAPETYWVPDSCFVCIRRVVACHLACFLNNPTSCPPCTYIATALIWAFFFLGQCLCPNSE

SEQ ID NO: 5932 - protein, 291 aa, Homo sapiens
  MISC_FEATURE (60): Xaa equals any of the naturally occurring L-amino acids
  MISC_FEATURE (217): Xaa equals any of the naturally occurring L-amino acids
HGLCRLFNSPLKPLADLDPVVVTFWYRAPELLLGARHYTKAIDIWAIGCIFAELLTSEPXFHCRQEDIKTSNPYHHDQLDRIFNVMGFPADKDWEDIKKMPEHSTLMKDFRRNTYTNCSLIKYMEKHKVKPDSKAFHLLQKLLTMDPIKRITSEQAMQDPYFLEDPLPTSDVFAGCQIPYPKREFLTEEEPDDKGDKKNQQQQQGNNHTNGTGHPGXQDSSHTQGPPLKKVRVVPPTTTSGGLIMTSDYQRSNPHAAYPNPGPSTSQPQSSMGYSATSQQPPQYSHQTHRY

SEQ ID NO: 5933 - protein, 100 aa, Homo sapiens
RPPSRWSWWQGKPTGGVCVAAARSSPSVTAPTSSNALAYLHSSSRPKRPAWWHSVPARPLRGPRTAMAPTGVSACRRQKWAPHSEGAAAVQPQVALAPGL

SEQ ID NO: 5934 - protein, 241 aa, Homo sapiens
  MISC_FEATURE (13): Xaa equals any of the naturally occurring L-amino acids
  MISC_FEATURE (17): Xaa equals any of the naturally occurring L-amino acids
  MISC_FEATURE (19): Xaa equals any of the naturally occurring L-amino acids
  MISC_FEATURE (44): Xaa equals any of the naturally occurring L-amino acids
YRPGPLTSQGMNXSRQXPXLNLLPSSAHFRPSTYKKSSGPLKAXKLIIHWNCWEDSLSGIAMNVPASRGSNLNSSGANRTSLSGGTGSGTQGATKPLSTPHRPSTASGSSVVTASVQKLIHTEDPFNDEHQERQEVEMLAKKFEMKYYDELVPASLTTKYGGFYINTGTLQFRQASDTEEDDITDNQKHKPPKVPKIKEDDIEMKKRKRKEEGEKEKKPRKKVPKQLGVVALNSHKSEKKK

SEQ ID NO: 5935 - protein, 330 aa, Homo sapiens
AGSRCPAWRARSACRWPLARCSSPGCDSGFGKETAKKLDSMGFTVLATVLELNSPGAIELRTCCSPRLRLLQMDLTKPGDISRVLEFTKAHTTSTGLWGLVNNAGHNEVVADAELSPVATFRSCMEVNFFGALELTKGLLPLLRSSRGRIVTVGSPAGDMPYPCLGAYGTSKAAVALLMDTFSCELLPWGVKVSIIQPGCFKTESVRNVGQWEKRKQLLLANLPQELLQAYGKDYIEHLHGQFLHSLRLAMSDLTPVVDAITDALLAARPRRRYYPGQGLGLMYFIHYYLPEGLRAASCRPSSSVTVCLEHCSLASLALPHHRTQPRTQT

SEQ ID NO: 5936 - protein, 88 aa, Homo sapiens
  MISC_FEATURE (2): Xaa equals any of the naturally occurring L-amino acids
  MISC_FEATURE (56): Xaa equals any of the naturally occurring L-amino acids
  MISC_FEATURE (82): Xaa equals any of the naturally occurring L-amino acids
CXHMVIMCDWIMKIIVVCVGTRDCPVSRTPAHYLSILQPFIWKLPTSLCCVCLHMXGFAVLALTAHRECRPHPNPHQLPLEXQNLGWG

SEQ ID NO: 5937 - protein, 40 aa, Homo sapiens
RYHILSGISPPALWLLVERLFGYGLAVEKIQVILLNDFTF

SEQ ID NO: 5938 - protein, 113 aa, Homo sapiens
  MISC_FEATURE (96): Xaa equals any of the naturally occurring L-amino acids
TFPNGAFALISKLTARDAFLYFDCFTVEGQIPRLSKVNLFTLLSLWMELFPAEAQRQKSQKNEEGKHGPLGDNEERTRVSTDKRQKTMFCLFENDXKCKALTVMIRSMSRSVP

SEQ ID NO: 5939 - protein, 52 aa, Homo sapiens
CIGPKCKLHWSDLEAFMLTSFGKVKNNKIILDFILYIKIYLLRKQSVYYLLV

SEQ ID NO: 5940 - protein, 89 aa, Homo sapiens
AEQEEHGKRKKKGKGLGKKRDPCLRKYKDFCIHGECKYVKELRAPSCICHPGYHGERCHGLSLPVENRLYTYDHTTILAVVAVVLDLMS

SEQ ID NO: 5941 - protein, 85 aa, Homo sapiens
  MISC_FEATURE (66): Xaa equals any of the naturally occurring L-amino acids
ESPTIVKAGTPAGTGPEFPGRPTRPPTRPGLLEPWTSKGVEIAAAPHYKHLGLEATEYHFLHILLXKAGGEPALTKRVGDQTFTS

SEQ ID NO: 5942 - protein, 155 aa, Homo sapiens
  MISC_FEATURE (21): Xaa equals any of the naturally occurring L-amino acids
EWTEGQTVQGREDHWGREVTXREVSVGRGETKEKIEEQKALALQLQNQRLQEREHSVHDSVELHLRVPLEKEIPVTVVQETQKKGHKLTDSEDEFPEITEEMEKEIKNVFRNGNQDEVLSEAFRLTITRKDIQTLNHLNWLNDEIINFYMNMLMG

SEQ ID NO: 5943 - protein, 150 aa, Homo sapiens
GTTTRDFTQLNELQCRFPRRLVVLGFPCNQFGHQENCQNEEILNSLKYVRPGGGYQPTFTLVQKCEVNGQNEHPVFAYLKDKLPYPYDDPFSLMTDPKLIIWSPVRRSDVAWNFEKFLIGPEGEPFRRYSRTFPTINIEPDIKRLLKVAI

SEQ ID NO: 5944 - protein, 67 aa, Homo sapiens
HIRTGERERRGLFFCSIFQSHIRVILNCNKDQLLKISLLKIQNDLSILKIIYLPCSCLLTLAISWRG

SEQ ID NO: 5945 - protein, 107 aa, Homo sapiens
  MISC_FEATURE (25): Xaa equals any of the naturally occurring L-amino acids
ILGDTIEGTPAGTGPEFPGRPTRPXTVRLSAIDGALLWCLLEVYCHYREPCLLASLDLYSKQSVSDDKFCRRVYSEPLTSCKGKMGGLPEIPLKQGGLWGGRLGYLS

SEQ ID NO: 5946 - protein, 125 aa, Homo sapiens
  MISC_FEATURE (21): Xaa equals any of the naturally occurring L-amino acids
RALWFFSSRGHDASQITLALXTAASYPRACQALGAMLSKGALNPADITVLFKMFTSMDPPPVELEVASQESPMSAGKVTLESLCLSDCLKAVNANPSLSWSFLSHTLCLEPVGPLLCRDTLRGGG

SEQ ID NO: 5947 - protein, 223 aa, Homo sapiens
  MISC_FEATURE (35): Xaa equals any of the naturally occurring L-amino acids
RHCLPPTPPQGCGLPALGGQAMLTLHGGHSSREAXKVVNSILAFREKEWQRLQSNPHLKEGSVTSVNLTKLEGGVAYNVIPATMSASFDFRVAPDVDFKAFEEQLQSWCQAAGEGVTLEFAQKWMHPQVTPTDDSNPWWAAFSRVCKDMNLTLEPEIMPAATDNRYIRAVGVPALGFSPMNRTPVLLHDHDERLHEAVFLRGVDIYTRLLPALASVPALPSDS

SEQ ID NO: 5948 - protein, 86 aa, Homo sapiens
ALCPPRGTASGPRHTLWLNQGLQGPCGPAQALMGRHVRSWRTQAPFLSGVVFFLCPGASPSSNGPFARFGVPLAGPIRTLRSNQGR

SEQ ID NO: 5949 - protein, 130 aa, Homo sapiens
RRDACPISREPPTRPWGTTSTLLLSLQSPVPRMGHLQPLALPQFLHLPAAAPRNWAPSSRAWPACAPRSRPGRAAVFLKYARPQRQGTSLAAALPAAASSLSLPEYWDSVTKKSTTKNKTLPVCVRLSSQ

SEQ ID NO: 5950 - protein, 148 aa, Homo sapiens
GRTCKKELTRKDTIMAHVTEFHNGHRYFYEMDEVEGETLPSSSTTLDNLTANKPSSAITVIDHSPANSSPRGKWQCRICEDMFDSQEYVKQHCMSLASHKFHRYSCAHCRKPFHKIETLYRHCQDEHDNEIKIKYFCGLCDLIFNVEE

SEQ ID NO: 5951 - protein, 268 aa, Homo sapiens
PGRPTRPRTRGINKLIRIGRNECVVVIRVDKEKGYIDLSKRRVSPEEAIKCEDKFTKSKTVYSILRHVAEVLEYTKDEQLESLFQRTAWVFDDKYKRPGYGAYDAFKHAVSDPSILDSLDLNEDEREVLINNINRRLTPQAVKIRADIEVACYGYEGIDAVKEALRAGLNCSTENMPIKINLIAPPRYVMTTTTLERTEGLSVLSQAMAVIKEKIEEKRGVFNVQMEPKVVTDTDETELARQMERLERENAEVDGDDDAEEMEAKAED

SEQ ID NO: 5952 - protein, 249 aa, Homo sapiens
SREIDIIHVIKNMGFNLTFHLSYKFRLLLLLTLCLTVVGWATSNYFVGAIQEIPKAKEFMANFHKTLILGKGKTLTNEASTKKVELDNCPSVSPYLRGQSKLIFKPDLTLEEVQAENPKVSRGRYRPQECKALQRVAILVPHRNREKHLMYLLEHLHPFLQRQQLDYGIYVIHQAEGKKFNRAKLLNVGYLEALKEENWDCFIFHDVTWYPRMTLTFTSVRSIPSIWWLAGTALGTGYVTVDILGVLLP

SEQ ID NO: 5953 - protein, 25 aa, Homo sapiens
QAPRRPSPASLCGPRRPAAPELLTV

SEQ ID NO: 5954 - protein, 70 aa, Homo sapiens
  MISC_FEATURE (46): Xaa equals any of the naturally occurring L-amino acids
QGGDPWVVRQLWVNFVSTLSRGKFGLSPGVHTAAATQCATYHFFLXCFVLFLKDHFILKRKADPSKHESI

SEQ ID NO: 5955 - protein, 409 aa, Homo sapiens
  MISC_FEATURE (3): Xaa equals any of the naturally occurring L-amino acids
PVXPRVRRRRAKVQQGAVGRARRFPARVSARGSAPGPGLGGAGALDPPAVVAESVSSLTIADAFIAAGESSAPTPPRPALPRRFICSFPDCSANYSKAWKLDAHLCKHTGERPFVCDYEGCGKAFIRDYHLSRHILTHTGEKPFVCAANGCDQKFNTKSNLKKHFERKHENQQKQYICSFEDCKKTFKKHQQLKIHQCQHTNEPLFKCTQEGCGKHFASPSKLKRHAKAHEGYVCQKGCSFVAKTWTELLKHVRETHKEEILCEVCRKTFKRKDYLKQHMKTHAPERDVCRCPREGCGRTYTTVFNLQSHILSFHEESRPFVCEHAGCGKTFAMKQSLTRHAVVHDPDKKKMKLKVKKSREKRSLASHLSGYIPPKRKQGQGLSLCQNGESPNCVEDKMLSTVAVLTLG

SEQ ID NO: 5956 - protein, 84 aa, Homo sapiens
  MISC_FEATURE (73): Xaa equals any of the naturally occurring L-amino acids
  MISC_FEATURE (81): Xaa equals any of the naturally occurring L-amino acids
KRMAALFLKRLTLQTVKSENSCIRCFGKHILQKTAPAQLSPIASAPRLSFLIHAKAFSTAEDTQNEGKKTKKXKTAFSNVXKKN

SEQ ID NO: 5957 - protein, 288 aa, Homo sapiens
  MISC_FEATURE (78): Xaa equals any of the naturally occurring L-amino acids
  MISC_FEATURE (79): Xaa equals any of the naturally occurring L-amino acids
DVIRRTVEERKLKLEMEKQEFEQLRQEMGEEEEENETFGLSREYEELIKLKRSGSIQAKNLKSKFEKIGQLSEKEIQXXIEEERARRRAIDLEIKEREAENFHEEDDVDVRPARKSEAPFTHKVNMKARFEQMAKAREEEEQRRIEEQKLLRMQFEQREIDAALQKKREEEEEEEGSIMNGSTAEDEEQTRSGAPWFKKPLKNTSVVDSEPVRFTVKVTGEPKPEITWWFEGEILQDGEDYQYIERGETYCLYLPETFPEDGGEYMCKAVNNKGSAASTCILTIESKN

SEQ ID NO: 5958 - protein, 98 aa, Homo sapiens
  MISC_FEATURE (10): Xaa equals any of the naturally occurring L-amino acids
  MISC_FEATURE (15): Xaa equals any of the naturally occurring L-amino acids
  MISC_FEATURE (25): Xaa equals any of the naturally occurring L-amino acids
  MISC_FEATURE (31): Xaa equals any of the naturally occurring L-amino acids
  MISC_FEATURE (66): Xaa equals any of the naturally occurring L-amino acids
WHYGMYGQAXPCQEXIPGMVESFIXNGWFSXYAKRPMSNPLLLIPAAWGLVPVVPQKCGPRTQPVXASSGNLVKKCKLLGPTLNLLNHKLCFNKQPAL

SEQ ID NO: 5959 - protein, 138 aa, Homo sapiens
VPDFQGQQFILEKGDYPRWSAWSGSSSHNSNQLLSFRPVLCANHNDSRVTLFEGDNFQGCKFDLVDDYPSLPSMGWASKDVGSLKVSSGAWVAYQYPGYRGYQYVLERDRHSGEFCTYGELGTQAHTGQLQSIRRVQH

SEQ ID NO: 5960 - protein, 196 aa, Homo sapiens
  MISC_FEATURE (158): Xaa equals any of the naturally occurring L-amino acids
KKDFFGKSDPFLVFYRSNEDGTFTICHKTEVVKNTLNPVWQPFSIPVRALCNGDYDRTVKIDVYDWDRDGSHDFIGEFTTSYRELSKAQNQFTVYEVLNPRKKCKKKKYVNSGTVTLLSFSVDSEFTFVDYIKGGTQLNFTVAIDFTASNGNPLQPTXLHYMSPYQLSAYAMALKAVGEIIQDYDSDKLFPAYGFG

SEQ ID NO: 5961 - protein, 124 aa, Homo sapiens
  MISC_FEATURE (80): Xaa equals any of the naturally occurring L-amino acids
KEHLMCWAFYRLTLTSQAELYTFSFTTISILINYGFMLLKTIYNADHYYKCVVLTNCTETALSLYSVWIFGENNKCSQEXLLRGRLCEWITLKAAFETPVSGISCILAWRPDVNLTSSKNTRFP

SEQ ID NO: 5962 - protein, 129 aa, Homo sapiens
  MISC_FEATURE (118): Xaa equals any of the naturally occurring L-amino acids
TFAGLCHIPLAVSSEEAPFALGNGSVSHWFISLELFGSQICFFENLSWGRLQVVNRGVGVGGGVHYLGLLGASRFSGRRIHCVLLLFPWPGLPASLCHPAWGKAPTGIVSPLHASLAXKSQKKSKTGRK

SEQ ID NO: 5963 - protein, 179 aa, Homo sapiens
  MISC_FEATURE (21): Xaa equals any of the naturally occurring L-amino acids
  MISC_FEATURE (99): Xaa equals any of the naturally occurring L-amino acids
  MISC_FEATURE (175): Xaa equals any of the naturally occurring L-amino acids
VLEPQNVDPSMVQMTFLDDVXHSLLKGENIGITSRRRSRANQNVNAVHSHYTRAQANSPRPAMNSQAAVPKQNTHQQQQQRSIRPNKRKGSDSSIPDEXKMKEEKYDYISRGENPKGKNKHLMNKRRKPEEDEKKLNMKRLRTDNVSDFSESSDSENSNKRIIDNSSEQKPENEXKKKY

SEQ ID NO: 5964 - protein, 273 aa, Homo sapiens
  MISC_FEATURE (32): Xaa equals any of the naturally occurring L-amino acids
AGFCVVQLRTCFSRQRFKISGDGIRNGNAERXGRGGLYPGHPQGGRRAKKRQAEQLSAAGEGGDAGRMDTEEARPAKRPVFPPLCGDGLLSGKEETRKIPVPANRYTPLKENWMKIFTPIVEHLGLQIRFNLKSRNVEIRTCKETKDVSALTKAADFVKAFILGFQVEDALALIRLDDLFLESFEITDVKPLKGDHLSRAIGRIAGKGGKTKFTIENVTRTRIVLADVKVHILGSFQNIKMARTAICNLILGNPPSKVYGNIRAVASRSADRF

SEQ ID NO: 5965 - protein, 92 aa, Homo sapiens
RMERSLKGIFIKQVLEDSPAGKTNALKTGDKILEVSGVDLQNASHSEAVEAIKNAGNPVVFIVQSLSSTPRVIPNVHNKANKITGNQNQDTQ

SEQ ID NO: 5966 - protein, 203 aa, Homo sapiens [sequence omitted]

SEQ ID NO: 5967 - protein, 77 aa, Homo sapiens
  MISC_FEATURE (42): Xaa equals any of the naturally occurring L-amino acids
  MISC_FEATURE (59): Xaa equals any of the naturally occurring L-amino acids
  MISC_FEATURE (60): Xaa equals any of the naturally occurring L-amino acids
  MISC_FEATURE (71): Xaa equals any of the naturally occurring L-amino acids
WALCTNCFSPSPLDLRIKHPVLKLICCSFVNISLRFSLRVRXNISEPKVPYTTLAYYSXXFKGFRIFGSHXKSVFIM

SEQ ID NO: 5968 - protein, 32 aa, Homo sapiens
  MISC_FEATURE (20): Xaa equals any of the naturally occurring L-amino acids
CNDHKIAWKIVIQISTMNSXPKFFFPMIKVVD

SEQ ID NO: 5969 - protein, 56 aa, Homo sapiens
NQVYFLMAFITLTHKVTDQCISYGYRPRALEGGGLLKHMQKKKKKKFCIYNHFNLL

SEQ ID NO: 5970 - protein, 82 aa, Homo sapiens
GYVCEFLGNLSVLDASLQQGPLLAMDGPGRSLEITHLKNEGPMKVFGCLLMPLLLTLLFAYFQNIIKCQHIISERQVGVGEK

SEQ ID NO: 5971 - protein, 77 aa, Homo sapiens
FVTCHNTKQVTEETIMGPRGRCLYHVDKIQSSLFQTKHFALETFETSMAVEYSRDDLKILEAVEVPVVGARHGSGDP

SEQ ID NO: 5972 - protein, 170 aa, Homo sapiens
  MISC_FEATURE (170): Xaa equals any of the naturally occurring L-amino acids
ADAWVDYSEDKSSWDNQQENPPPTKKIGKKPVAKMPLRRPKMKKTPEKLDNTPASPPRSPAEPNDIPIAKGTYTFDIDKWDDPNFNPFSSTSKMQESPKLPQQSYNFDPDTCDESVDPFKTSSKTPSSPSKSPASFEIPASAMEANGVDGDGLNKPAKKKKTPLKTEHLX

SEQ ID NO: 5973 - protein, 55 aa, Homo sapiens
LIAGIQHGCQDIGARSLSVLRSMMYSGELKFEKRTMSAQIEGGVHGLHSYEKRLY

SEQ ID NO: 5974 - protein, 493 aa, Homo sapiens
  MISC_FEATURE (112): Xaa equals any of the naturally occurring L-amino acids
  MISC_FEATURE (135): Xaa equals any of the naturally occurring L-amino acids
  MISC_FEATURE (156): Xaa equals any of the naturally occurring L-amino acids
  MISC_FEATURE (165): Xaa equals any of the naturally occurring L-amino acids
  MISC_FEATURE (359): Xaa equals any of the naturally occurring L-amino acids
  MISC_FEATURE (434): Xaa equals any of the naturally occurring L-amino acids
  MISC_FEATURE (436): Xaa equals any of the naturally occurring L-amino acids
  MISC_FEATURE (468): Xaa equals any of the naturally occurring L-amino acids
  MISC_FEATURE (471): Xaa equals any of the naturally occurring L-amino acids
  MISC_FEATURE (473): Xaa equals any of the naturally occurring L-amino acids
  MISC_FEATURE (488): Xaa equals any of the naturally occurring L-amino acids
VIRGGSNRRGEGEVIPEESRLGRTRWPGNRVIREMKPTGTDPRILSIAAEVAKSPEQNVPVILLKLKEIINITPLGSSELKKIKQDIYCYDLIQYCLLVLSQDYSRIQGGWXTISQLTQILSHCCVGLEPGEDAXEFYNELLPSAAENFLVLGRQXQTCFINAAXAEEKDELLHFFQIVTDSLFWLLGGHVELIQNVLQSDHFLHLLQADNVQIGSAVMMMLQNILQINSGDLLRIGRKALYSILDEVIFKLFSTPSPVIRSTATKLLLLMAESHQEILILLRQSTCYKGLRRLLSKQETGTEFSQELRQLVGLLSPMVYQEVEEQKLHQAACLIQAYWKGFQTRKRLKKLPSAVIALXRSFRSKRSKMLLEINRQKEEEDLKLQLQLQRQRAMRLSRELQLSMLEIVHPGQVEKHYREMGREISTDYPETLEXVXGKEKFSPTEAVSHRSIKATVTLQKSKRFKFLXEIXRXEKRKLFCLPWAKGPXKETST

SEQ ID NO: 5975 - protein, 47 aa, Homo sapiens
  MISC_FEATURE (5): Xaa equals any of the naturally occurring L-amino acids
LFVCXFLVARSDPRIFLLSRETRRIMRLFLVAFQEYEEKNGSQSGFE

SEQ ID NO: 5976 - protein, 65 aa, Homo sapiens
LHKTLVRYQLLHRESSYTIPYIFIYLLFYYSRITKLDALSQFFATENYLFLLPFHTPCIYDQPLH

SEQ ID NO: 5977 - protein, 67 aa, Homo sapiens
AKNIKGREIGIQGDSVQESKPGICLCGRPNHYYLNPLRKAFPAFHNSGSSFIKWETHNCPTYLTGVL

SEQ ID NO: 5978 - protein, 124 aa, Homo sapiens
LETSAVYISLYSFFSPLPMMFRNTTILFAKHSNYLISKQVLEYHRNHKTAHQNMPHSTSSEQSGKRTSRSWKSGLVLSRSTKNLNISDNHNTSLTWERAVIIFHRGQDGSLDEEVDMPFPNSRK

SEQ ID NO: 5979 - protein, 87 aa, Homo sapiens
ICPRSPSKVSVALRVRTLIRLGRVLESLRRQEECAELSVSGRLIHCWAHIKAPMGSRPDCTWLFCWKKSMAAQRTKISSGKASFDCQ

SEQ ID NO: 5980 - protein, 57 aa, Homo sapiens
  MISC_FEATURE (4): Xaa equals any of the naturally occurring L-amino acids
MERXQVFNSTNIFFSFVPFFCLLYTDIPTLATAQRGSYLRNTADFEYLVLQSHLSEA

SEQ ID NO: 5981 - protein, 184 aa, Homo sapiens
  MISC_FEATURE (183): Xaa equals any of the naturally occurring L-amino acids
EKKKTLKKKIPKYHQPRKEKRRQKPLGGFGKESKEKEPKTKGKDAKDGKKDSSAAQPGVAFSVDNTIKRPNPAPGTRKKSSNAEVIKELNKCREENSMRLDLSKRSIHILPSSIKELTQLTELYLYSNKLQSLPAEVGCLVNLMTLALSENSLTSLPDSLDNLKKLRMLDLRHNKLREIPSVXV

SEQ ID NO: 5982 - protein, 58 aa, Homo sapiens
AHPTRNYVKKKFKKEFKGDYSVTVTPGKLRTLCEIDWPALEVGWPSEGSLDRSLVSKV

SEQ ID NO: 5983 - protein, 35 aa, Homo sapiens
GQQFETSLTISTKCTKVSWAWWRAPVIPATWETDA

SEQ ID NO: 5984 - protein, 86 aa, Homo sapiens
RNSGFCCNRFIFLLFSPILAQSGAIVLLVRPSLKMRSREAGPKLRRIQEPANGSPGAVSETGGYREERLSDAEIMGKLLAWLAVGM

SEQ ID NO: 5985 - protein, 53 aa, Homo sapiens
  MISC_FEATURE (22): Xaa equals any of the naturally occurring L-amino acids
  MISC_FEATURE (46): Xaa equals any of the naturally occurring L-amino acids
IFSNLVFFYIIIASLKIVLQAXHGWVTPVYLTLWEAEAGKHLKSGXQNNPGHW

SEQ ID NO: 5986 - protein, 27 aa, Homo sapiens
CLGAYADYSLRGGVERRRRYAGRRVLC

SEQ ID NO: 5987 - protein, 91 aa, Homo sapiens
  MISC_FEATURE (52): Xaa equals any of the naturally occurring L-amino acids
  MISC_FEATURE (69): Xaa equals any of the naturally occurring L-amino acids
  MISC_FEATURE (86): Xaa equals any of the naturally occurring L-amino acids
VSRLVSKEFSKSWSCGGCSYAAGAVTERQEGLGGKGRRLNQAPAWTWACVLXSHLSSRTQVGKSLSGHXPLGGVGLSVPFLAVTSXCARVE

SEQ ID NO: 5988 - protein, 224 aa, Homo sapiens
  MISC_FEATURE (107): Xaa equals any of the naturally occurring L-amino acids
  MISC_FEATURE (117): Xaa equals any of the naturally occurring L-amino acids
  MISC_FEATURE (127): Xaa equals any of the naturally occurring L-amino acids
  MISC_FEATURE (129): Xaa equals any of the naturally occurring L-amino acids
  MISC_FEATURE (135): Xaa equals any of the naturally occurring L-amino acids
  MISC_FEATURE (140): Xaa equals any of the naturally occurring L-amino acids
  MISC_FEATURE (151): Xaa equals any of the naturally occurring L-amino acids
  MISC_FEATURE (152): Xaa equals any of the naturally occurring L-amino acids
  MISC_FEATURE (213): Xaa equals any of the naturally occurring L-amino acids
  MISC_FEATURE (216): Xaa equals any of the naturally occurring L-amino acids
ALVSVLTKEYEDAVSIATAVLVVVTVAFIQEYRSEKSLEELTKLVPPECNCLREGKLQHLLARELVPGDVVSLSIGDRIPADIRLTEVTDLLVDESSFTGEAEPCSXTDSPLTGGGXLTTLSNIVFXGXLVQYGXGQGVXIGTGESSQFGXXFKMMQAEETPKTPLQKSMDRLGKQLTLFSFGIIGLIMLIGWSQGKQLLSMFTIGVSLAVAXISXGSAHSSSW

SEQ ID NO: 5989 - protein, 155 aa, Homo sapiens
PCCIWKAKWGHEEGWKGQGVMAAYLVSPTPPVLGEPSCYTGSSPRSSFLSPTSWWRLQGRPESWTERVTGGVGDKHQTSIVCPDLGVIGGMGWERVSWYSHGLIFFVSIPFISLCLNRGGGVVTGNKDLRSSAPKKKKKKKKKKKKKKKKKKKKK

SEQ ID NO: 5990 - protein, 90 aa, Homo sapiens
  MISC_FEATURE (22): Xaa equals any of the naturally occurring L-amino acids
  MISC_FEATURE (41): Xaa equals any of the naturally occurring L-amino acids
IRHEGTLPLQRVRALLHPQRSXAKHLRGHASVRPCRCNECXKSFSRRDHLVRHQRTHTGEKPFTCPTCGKSFSRGYHLIRHQRTHSEKTS

SEQ ID NO: 5991 - protein, 54 aa, Homo sapiens
  MISC_FEATURE (41): Xaa equals any of the naturally occurring L-amino acids
  MISC_FEATURE (46): Xaa equals any of the naturally occurring L-amino acids
FSSPGVVGRCKLKGTLGGGGRGEDDSDPSPVGVRITQELRXREEGXRRLQLLQG

SEQ ID NO: 5992 - protein, 96 aa, Homo sapiens
  MISC_FEATURE (47): Xaa equals any of the naturally occurring L-amino acids
GRQPAPLVPPCSSSHYHRPHTLTRTLTHRSLQRMRWGYDRSLRLVSXSLLQPPPGFQPILFAAGVPTLPYSQLLFPADGEMDSAAYPPTPLQGVED

SEQ ID NO: 5993 - protein, 78 aa, Homo sapiens
EKTQVCDISVIPKNILGFLFVFLFFGFFFFTAENWWYFHIHSVSIQFQYPHLMRKKCFTNEGGILKLAVMLGWRKFGI

SEQ ID NO: 5994 - protein, 87 aa, Homo sapiens
  MISC_FEATURE (47): Xaa equals any of the naturally occurring L-amino acids
KITMWMAVSHITDVESIILYLYFQINKFVKGFHPLLWSRKMLEIYIXIDTYICIYIKKILTTKVPEPPSKVLYYCILYIMYHPMWNL

SEQ ID NO: 5995 - protein, 101 aa, Homo sapiens
DKSIKNKAERERRVRELNSSNTKKFLEERKRLAMKQSKEMDQLKKVQLEHLEFLEKQNEQLLKSCHAVSQTQGEGDAADGEIGSRDGPQTSNSSMKLQNAN

SEQ ID NO: 5996 - protein, 216 aa, Homo sapiens
  MISC_FEATURE (96): Xaa equals any of the naturally occurring L-amino acids
KSSRGNTQATSHSFDVRVLTQLLLNSDHRSTATVQICSGSVNLKGAVKCRAYIHSSKPKVKDAVQAVKRDILNTVADRCEMLFEDLLLNEIPEKKXSEKEFHVLPYRVFVPLPGSTVMLCDYKFDDESAEEIRDHFMEMLDHTIQIEDLEIAEETNTACMSSSMNSQASLDNTDDEQPKQPIKTTMLLKIQQNIGVIAAFTVAVLAAGISFHYFSD

SEQ ID NO: 5997 - protein, 67 aa, Homo sapiens
PFLVSVFPGENEAKQEFGFLLMSSYTIHSVNFEKIYPPFSLLGDINYSQEEYNELYSYFDLLKRCYQ

SEQ ID NO: 5998 - protein, 162 aa, Homo sapiens
  MISC_FEATURE (74): Xaa equals any of the naturally occurring L-amino acids
  MISC_FEATURE (93): Xaa equals any of the naturally occurring L-amino acids
  MISC_FEATURE (94): Xaa equals any of the naturally occurring L-amino acids
  MISC_FEATURE (96): Xaa equals any of the naturally occurring L-amino acids
PAELKCAVTSQCEFLPNSRAYHLKKERTEEQTKVLRNETHLFSLKALRGGRRPAQAGGGFGQSEDPARTLVRWXAAHLLRILLESCSPRGLLXXWXKEAAWCGVTQISIPICCTFTLQGTCFKTDPQQVLEKCIQSEDVCVSVYIQSSVTHAPQIAAKIPRH

SEQ ID NO: 5999 - protein, 87 aa, Homo sapiens
  MISC_FEATURE (80): Xaa equals any of the naturally occurring L-amino acids
  MISC_FEATURE (86): Xaa equals any of the naturally occurring L-amino acids
NCAFSGLLSSIPSFSLLSSFQHVTVKAFSLIFYHCEYVPFENPFAVIFVGFGEEAVVNACIILSSKCSMLALLISGDVRXQLLSLXK

SEQ ID NO: 6000 - protein, 71 aa, Homo sapiens
RPAEDVLQVRETGPGNPAVTEDYIEFENVGIFENAPPKKLLMSSGNVRRLIYTDTAEEKGRRIKDPVLLPG

SEQ ID NO: 6001 - protein, 217 aa, Homo sapiens
  MISC_FEATURE (51): Xaa equals any of the naturally occurring L-amino acids
  MISC_FEATURE (104): Xaa equals any of the naturally occurring L-amino acids
  MISC_FEATURE (120): Xaa equals any of the naturally occurring L-amino acids
  MISC_FEATURE (131): Xaa equals any of the naturally occurring L-amino acids
  MISC_FEATURE (137): Xaa equals any of the naturally occurring L-amino acids
GYWTFDMECYKKYRKVWGIYDCQQPMLAITDPDMIKTVLVKECYSVFTNRXPFGPVGFMKNAISIAEDEEWKRIRSLLSPTFTSGKLKEMFPIIAQYGDVLVRXLRREAEKGKPVTLKDXFGAYSMDVITXTSFGVXIDSLNNPQDPFVESTKKFLKFGFLDPLFLSIILFPFLTPVFEALNVSLFPKDTINFLSKSVNRMKKSRLNDKQKVKSDGG

SEQ ID NO: 6002 - protein, 77 aa, Homo sapiens
  MISC_FEATURE (27): Xaa equals any of the naturally occurring L-amino acids
  MISC_FEATURE (29): Xaa equals any of the naturally occurring L-amino acids
VPPACCASRVARLGFSRCTCPRWPGPXAXRAAAGALPRGQVRIWPRSHPSSTARTPHSLPQSICLSPMGKLINFALD

SEQ ID NO: 6003 - protein, 68 aa, Homo sapiens
KMLNRFHDCLLEDFKVHCGSSRRNPVNHSSHLPTGLFSNGASCEASGFFCCCYLFFFFNALENTALGY

SEQ ID NO: 6004 - protein, 128 aa, Homo sapiens
WIPRAAGIRHELLSPALPCTVHSSSTMASRTPRNCAVLKGEVDLTALAKELRAVEDVRPPHKVTDYSSSSEESGTTDEEDDDVEQEGADESTSGPEDTRAASSLNLSNGETESVKTMIVHDDVESEPA

SEQ ID NO: 6005 - protein, 52 aa, Homo sapiens
HSLKYIYLITFYNKELLSPNVISAHFEIPCYRWSLQTRKYSSYYVYTLVLVL

SEQ ID NO: 6006 - protein, 75 aa, Homo sapiens
ISPGQSGMLTGTNVRNCIVHCTCCPVPQACQCLEILFGLLKPLFIENFCPYRSVCMGLGKSTCVYLSSEAQIHSN

SEQ ID NO: 6007 - protein, 63 aa, Homo sapiens
PDLFAHREVPLSLHGLSDLIPPHSQFQVVEQDEAAPSPLPHPDSAAEFIPQERGSTDSVHACG

SEQ ID NO: 6008 - protein, 226 aa, Homo sapiens
  MISC_FEATURE (1): Xaa equals any of the naturally occurring L-amino acids
  MISC_FEATURE (6): Xaa equals any of the naturally occurring L-amino acids
  MISC_FEATURE (125): Xaa equals any of the naturally occurring L-amino acids
  MISC_FEATURE (170): Xaa equals any of the naturally occurring L-amino acids
  MISC_FEATURE (216): Xaa equals any of the naturally occurring L-amino acids
  MISC_FEATURE (218): Xaa equals any of the naturally occurring L-amino acids
XSASLXEQKLELHRGGGRSRTSGSPGLQEFGTRSGGPRLPQAQKTAALPRTRGAGLLESELRDGSGKKVAVADVQFGPMRFHQDQLQVLLVFTKEDNQCNGFCRACEKAGFKCTVTKEAQAVLAXFLDKHHDIIIIDHRNPRQLDAEALCRSIRSSKLSENTVIVGVVRXVDREELSVMPFISAGFTRRYVENPNIMACYNELLQLEFGEGAITTXTXGLLLKYSL

SEQ ID NO: 6009 - protein, 51 aa, Homo sapiens
  MISC_FEATURE (2): Xaa equals any of the naturally occurring L-amino acids
GXVGPSLVSRIENIQNDISLVSFEGNNQRWSTQLLVLLFTISHLVQSGSYI

SEQ ID NO: 6010 - protein, 83 aa, Homo sapiens
  MISC_FEATURE (27): Xaa equals any of the naturally occurring L-amino acids
  MISC_FEATURE (35): Xaa equals any of the naturally occurring L-amino acids
  MISC_FEATURE (37): Xaa equals any of the naturally occurring L-amino acids
  MISC_FEATURE (39): Xaa equals any of the naturally occurring L-amino acids
  MISC_FEATURE (44): Xaa equals any of the naturally occurring L-amino acids
VLNSMLKSNWIWSRPTPRVVSGVFFQXLSQTTQVXLXLXAALWXGVEGGGQQMHCRVIFLGMVFKKPEIFTRTSKTRSGELGR

SEQ ID NO: 6011 - protein, 146 aa, Homo sapiens
RCPIASEVPWTITEAELRVTLTVEGKSIPCLIDTGATHSTLPSFQGPVSLAPITVVGIDGQASKPLKTPPLWCQLGQHSFMHSFLVIPTCPLPLLGRNILTKLSASLTIPGVQLHLIAALLPNPKPPLCPLTSPQYHPLPQDLPSA

SEQ ID NO: 6012 - protein, 111 aa, Homo sapiens
IPYSAYIKSKMWGRSLLLPGGDGSPLTLLGEGGSCWPVGMKVLAPHLVFPDTTAVGCWGAPLQPFECGILGSPLDLPWCGQRFFLWCLLGVEQLSSKSFLSCWDVLFWSFS

SEQ ID NO: 6013 - protein, 65 aa, Homo sapiens
  MISC_FEATURE (64): Xaa equals any of the naturally occurring L-amino acids
RWALDLLILVKWVWDLLTFVLRRDRPGKELGEVSSKERGVGTRMEESGLQIAFTSPFFLESLSXR

SEQ ID NO: 6014 - protein, 427 aa, Homo sapiens
  MISC_FEATURE (301): Xaa equals any of the naturally occurring L-amino acids
AACCFSCWASSGFAFVASEPLAFKPLSLLLPHTPLSLTPLFCCPVTCPKLCPELRTFPFLSLEPFFDSTKPSWYPGMTRLLDAEWWRRSEAGHLRRQVAAVLFFPEGTCSNKKALLKFKPGAFIAGVPVQPVLIRYPNSLDTTSWAWRGPGVLKVLWLTASQPCSIVDVEFLPVYHPSPEESRDPTLYANNVQRVMAQALGIPATECEFVGSLPVIVVGRLKVALEPQLWELGKVLRKAGLSAGYVDAGAEPGRSRMISQEEFARQLQLSDPQTVAGAFGYFQQDTKGLVDFRDVALALAXLDGGRSLEELTRLAFELFAEEQAEGPNRLLYKDGFSTILHLLLGSPHPAATALHAELCQAGSSQGLSLCQFQNFSLHDPLYGKLFSTYLRPPHTSRGTSQTPNASSPGNPTALANGTVQAPKQKGD

SEQ ID NO: 6015 - protein, 68 aa, Homo sapiens
IYTNRKLGTNLLCLWLLYNYQGKGNLPIKYKVVKFKITIINNVLLLQNEMLGLIIEGSSTVEIELNGS

SEQ ID NO: 6016 - protein, 69 aa, Homo sapiens
  MISC_FEATURE (15): Xaa equals any of the naturally occurring L-amino acids
  MISC_FEATURE (17): Xaa equals any of the naturally occurring L-amino acids
GPEFPGRPTRPVKLXFXYQYMHVLCMSSTCVDTPVDVKLLYNINSMCFYISLCKFNITYAVINHLFYCC

SEQ ID NO: 6017 - protein, 97 aa, Homo sapiens
  MISC_FEATURE (43): Xaa equals any of the naturally occurring L-amino acids
  MISC_FEATURE (72): Xaa equals any of the naturally occurring L-amino acids
  MISC_FEATURE (74): Xaa equals any of the naturally occurring L-amino acids
  MISC_FEATURE (83): Xaa equals any of the naturally occurring L-amino acids
  MISC_FEATURE (85): Xaa equals any of the naturally occurring L-amino acids
  MISC_FEATURE (90): Xaa equals any of the naturally occurring L-amino acids
QMEGYFSVLAFQLYVGKLPVLLQVQSTLDDLSINYSGCNSPKXSSYIFWLIPPHLSIQSDGKRGRWILMSCXLXPYFQVLWWXRXNICQXSGFLARC

SEQ ID NO: 6018 - protein, 74 aa, Homo sapiens
  MISC_FEATURE (71): Xaa equals any of the naturally occurring L-amino acids
  MISC_FEATURE (74): Xaa equals any of the naturally occurring L-amino acids
IILYQGQRDFCRTSPLEELSLGRNTRINISTYSSPKNFPPHYSHLPINNLLWVNIQHSVLVQSICSAITVXSTX

SEQ ID NO: 6019 - protein, 47 aa, Homo sapiens
  MISC_FEATURE (20): Xaa equals any of the naturally occurring L-amino acids
MPGIVCKGIVDNKVILMTRXKSFLLSLIRPLVGWGVGRRVVLTESFK

SEQ ID NO: 6020 - protein, 150 aa, Homo sapiens
  MISC_FEATURE (70): Xaa equals any of the naturally occurring L-amino acids
  MISC_FEATURE (84): Xaa equals any of the naturally occurring L-amino acids
  MISC_FEATURE (115): Xaa equals any of the naturally occurring L-amino acids
  MISC_FEATURE (146): Xaa equals any of the naturally occurring L-amino acids
GVYLNVLPSPFPSRLCSFEGLGVCSRPCCLAQNMLRKVLRTHFFPIKPISFPNHKGVCDSSPRETKELQXGVWFSPVQTHPELXRCLSNTLSLPKQPVQTFSLGHEAPRVLPVPXSDAYLSAEPQNLCSGNAVHLLSVGSEHIVLXDTSF

SEQ ID NO: 6021 - protein, 79 aa, Homo sapiens
  MISC_FEATURE (13): Xaa equals any of the naturally occurring L-amino acids
  MISC_FEATURE (60): Xaa equals any of the naturally occurring L-amino acids
  MISC_FEATURE (61): Xaa equals any of the naturally occurring L-amino acids
  MISC_FEATURE (66): Xaa equals any of the naturally occurring L-amino acids
  MISC_FEATURE (77): Xaa equals any of the naturally occurring L-amino acids
VLRMQHGSGFGIXFNATDALRCVNNYQGMLKVACAEEWQESRTEGEHSKEVIKPYDWTYXXDYKGXLLGESLKLKVXSI

SEQ ID NO: 6022 - protein, 81 aa, Homo sapiens
IFRSDFLLHFYLTKETGHTPWFRDVVIAYLPVFKKCFLQLLSTTVLSLMNTVVSHPNSCTEIISHESFSNISNESFSNLGA

SEQ ID NO: 6023 - protein, 112 aa, Homo sapiens
  MISC_FEATURE (39): Xaa equals any of the naturally occurring L-amino acids
  MISC_FEATURE (94): Xaa equals any of the naturally occurring L-amino acids
  MISC_FEATURE (98): Xaa equals any of the naturally occurring L-amino acids
  MISC_FEATURE (107): Xaa equals any of the naturally occurring L-amino acids
QLPVQGHGLFGAQEVLNHVLRDIELFMGKLEKAQAKTSXKKKFGKKNKDQGGLTQAQYIDCFQKIKHSFNLLGRLATWLKETSAPELVHILFKXLNFXLARCPEAGXAAQVI

SEQ ID NO: 6024 - protein, 95 aa, Homo sapiens
  MISC_FEATURE (24): Xaa equals any of the naturally occurring L-amino acids
  MISC_FEATURE (54): Xaa equals any of the naturally occurring L-amino acids
  MISC_FEATURE (69): Xaa equals any of the naturally occurring L-amino acids
  MISC_FEATURE (70): Xaa equals any of the naturally occurring L-amino acids
  MISC_FEATURE (78): Xaa equals any of the naturally occurring L-amino acids
  MISC_FEATURE (81): Xaa equals any of the naturally occurring L-amino acids
  MISC_FEATURE (82): Xaa equals any of the naturally occurring L-amino acids
  MISC_FEATURE (83): Xaa equals any of the naturally occurring L-amino acids
  MISC_FEATURE (84): Xaa equals any of the naturally occurring L-amino acids
  MISC_FEATURE (90): Xaa equals any of the naturally occurring L-amino acids
  MISC_FEATURE (92): Xaa equals any of the naturally occurring L-amino acids
  MISC_FEATURE (93): Xaa equals any of the naturally occurring L-amino acids
  MISC_FEATURE (94): Xaa equals any of the naturally occurring L-amino acids
LEEDISKKMDKDEEALKAAQAELXEARRQWHHLQVEIESLHAVERGLENSLHAXEQHYQMQLQDLETVXXGLEKELQXVKXXXXKAAFKXTXXXF

SEQ ID NO: 6025 - protein, 29 aa, Homo sapiens
LRAHTVRHEEKVPCHVCGKMLSPADPFNF

SEQ ID NO: 6026 - protein, 53 aa, Homo sapiens
QGPTEVKEGGWECYSLEWRCDFSRWKVVFLKGIGRSRFLLIQIHFPPTEGRNY

SEQ ID NO: 6027 - protein, 29 aa, Homo sapiens
PRVVFHLNLHPPPPGDYFEINLRHQGQAQ

SEQ ID NO: 6028 - protein, 78 aa, Homo sapiens
  MISC_FEATURE (33): Xaa equals any of the naturally occurring L-amino acids
  MISC_FEATURE (71): Xaa equals any of the naturally occurring L-amino acids
  MISC_FEATURE (72): Xaa equals any of the naturally occurring L-amino acids
  MISC_FEATURE (73): Xaa equals any of the naturally occurring L-amino acids
SFHNTLAFPYLYGLYLVNLNKNLDFKKNWERRXVILLAFSSLDVGSHNSNIEGKFCFCKIGLKLRSFHERXXXTCTSA

SEQ ID NO: 6029 - protein, 59 aa, Homo sapiens
SATCLFEVLYQSVTRAFCVCAILCLSFKVAPKVSHLAFQQGHFLSFYNMQYICNDLAFF

SEQ ID NO: 6030 - protein, 62 aa, Homo sapiens
RSHILLLSGCFSILCPFPQQQVGPRLCTALRCRWYRDNCLNSCADFCNSAVETKVLESVLSM

SEQ ID NO: 6031 - protein, 216 aa, Homo sapiens
  MISC_FEATURE (39): Xaa equals any of the naturally occurring L-amino acids
SGGSSVHLSDPVAPSSAGLYFEPEPISSTPNYLQRGEFXSCVSCEENSSCLDQIFDSYLQTEMHPEPLLNSTQSAPHHFPDSFQATPFCFNQSLIPGSPSNSSILSGSLDYSYSPVQLPSYAPENYNSPASLDTRTCGYPPEDHSYQHLSSHAQYSCFSSATTSICYCASCEAEDLDALQAAEYFYPSTDCVDFAPSAAATSDFYKRETNCDICYS

SEQ ID NO: 6032 - protein, 43 aa, Homo sapiens
  MISC_FEATURE (29): Xaa equals any of the naturally occurring L-amino acids
SKRRDKKRGGVGSRKQSLNFSRTQLSLRXNFLLSLWDAIVIFN

SEQ ID NO: 6033 - protein, 55 aa, Homo sapiens
  MISC_FEATURE (4): Xaa equals any of the naturally occurring L-amino acids
  MISC_FEATURE (9): Xaa equals any of the naturally occurring L-amino acids
PPCXLRCVXETGSNTTHYRESWYACRYRSGIPGSTHASEISWPYFLSGNLLTMMW

SEQ ID NO: 6034 - protein, 83 aa, Homo sapiens
  MISC_FEATURE (34): Xaa equals any of the naturally occurring L-amino acids
  MISC_FEATURE (43): Xaa equals any of the naturally occurring L-amino acids
  MISC_FEATURE (48): Xaa equals any of the naturally occurring L-amino acids
  MISC_FEATURE (49): Xaa equals any of the naturally occurring L-amino acids
  MISC_FEATURE (58): Xaa equals any of the naturally occurring L-amino acids
DAIKVKEYNNLLNALQMDSDEMKKILAENSRKIXVLQVNEKSXIRQYXXLVELERQLXKENEKQKNELLSMEAEVCEKIGCLQ

SEQ ID NO: 6035 - protein, 64 aa, Homo sapiens
  MISC_FEATURE (3): Xaa equals any of the naturally occurring L-amino acids
  MISC_FEATURE (49): Xaa equals any of the naturally occurring L-amino acids
HVXDVILEVNGYPVGGQNDLERLQQLPEAEPPLCLKLAARSLRGLEAWXPPGAAEDWALASDLL

SEQ ID NO: 6036 - protein, 109 aa, Homo sapiens
  MISC_FEATURE (11): Xaa equals any of the naturally occurring L-amino acids
  MISC_FEATURE (91): Xaa equals any of the naturally occurring L-amino acids
  MISC_FEATURE (96): Xaa equals any of the naturally occurring L-amino acids
  MISC_FEATURE (98): Xaa equals any of the naturally occurring L-amino acids
GSSSLAGWLHXPWAPQIIKSTFSVSGICMTSLEVPCWVVILVSDGTHLNLKYFCQGSGGFMACSSPALLGRLQRCHLALSPKNFETQPGAXRGLKXSXFPFKNYQKIRP

SEQ ID NO: 6037 - protein, 146 aa, Homo sapiens
  MISC_FEATURE (100): Xaa equals any of the naturally occurring L-amino acids
  MISC_FEATURE (110): Xaa equals any of the naturally occurring L-amino acids
  MISC_FEATURE (144): Xaa equals any of the naturally occurring L-amino acids
RDENTMKNIFSKKRKLEVACSDCEVEVLPLGLETHPRTAKTEKCPPKFSNNPKELTMETKYDNISRIQYHSVIRDPESKTAIFQHNGKKMEFVSSESVTXEDNDGFKPPXEHLNSKTKGAQKDSSSNHVDEFEDNLLIGIQMWXRY

SEQ ID NO: 6038 - protein, 222 aa, Homo sapiens
  MISC_FEATURE (37): Xaa equals any of the naturally occurring L-amino acids
  MISC_FEATURE (221): Xaa equals any of the naturally occurring L-amino acids
KAPASTCPRRPTGAACCVNWRSPKGPGRPPGSAPPTXAQRHPLCSRNQPPTLPRTRPQSPAAPSTPTCQPAGSSALWSPSSTCLPAPAWVPVPPSPRTWTMRAVIKPRLKMKMRMSSRMKTRMRTRMRMESRASQSLERRPRSATPWTWATVTHHEVPTSHSIPCSVRVAAHHTSPCQEQESPQAECPRGALLRLSREPVKEIEIKPVLLGHRFAVLKKKXN

SEQ ID NO: 6039 - protein, 49 aa, Homo sapiens
FVEVGMIWQSLKFILGRRWQKSGVYQVMRFLLTHQPNFCSFCTSEMKKR

SEQ ID NO: 6040 - protein, 73 aa, Homo sapiens
  MISC_FEATURE (45): Xaa equals any of the naturally occurring L-amino acids
DTEADVLGLVASGTPDVARAMTHTLLRHLAARPPTQAQHQHQCPXCLLPLPGVLTGWGWVWQKAELSEAWGQE

SEQ ID NO: 6041 - protein, 55 aa, Homo sapiens
NNFYILYFPTKQNRDQYSHLLSDHFLPYQGHNSFREKYFSGVTKRIAKEEKSTQE

SEQ ID NO: 6042 - protein, 147 aa, Homo sapiens
  MISC_FEATURE (7): Xaa equals any of the naturally occurring L-amino acids
  MISC_FEATURE (21): Xaa equals any of the naturally occurring L-amino acids
  MISC_FEATURE (24): Xaa equals any of the naturally occurring L-amino acids
  MISC_FEATURE (40): Xaa equals any of the naturally occurring L-amino acids
VFREHRXSVICLELVNRLVYXGSXDRTVKCWLADTGECVXTFTAHRRNVSALKYHAGTLFTGSGDACARAFDAQSGELRRVFRGHTFIINCIQVHGQVLYTASHDGALRLWDVRGLRGAPRSPPPMRSLSRLFSNKVGCAVAPLQPA

SEQ ID NO: 6043 - protein, 70 aa, Homo sapiens
  MISC_FEATURE (34): Xaa equals any of the naturally occurring L-amino acids
GNRARLHLKKRKKNCNSYTLALLLYHCVILKTTXIYYTGTCLLSISTTKMEAPTAIRLISLPGPILIMLL

SEQ ID NO: 6044 - protein, 162 aa, Homo sapiens
  MISC_FEATURE (135): Xaa equals any of the naturally occurring L-amino acids
EHLERMLGQAGERRADVYVGVDVFARGNVVGGRFDTDKSLELIRKHGFSVALFAPGWVYECLEKKDFFQNQDKFWGRLERYLPTHSICSLPFVTSFCLGMGARRVCYGQEEAVGPWYHLSAQEIQPLFGEHRLGXDGRGWVRTHCCLEDAWHGGSSLLVRGV

SEQ ID NO: 6045 - protein, 64 aa, Homo sapiens
  MISC_FEATURE (9): Xaa equals any of the naturally occurring L-amino acids
  MISC_FEATURE (15): Xaa equals any of the naturally occurring L-amino acids
  MISC_FEATURE (24): Xaa equals any of the naturally occurring L-amino acids
  MISC_FEATURE (27): Xaa equals any of the naturally occurring L-amino acids
  MISC_FEATURE (52): Xaa equals any of the naturally occurring L-amino acids
  MISC_FEATURE (53): Xaa equals any of the naturally occurring L-amino acids
KYYTCETDXENQCGXGVVHINYLXSTXHKSQACKISGLAPERQIPHDLTDMXXLKKSNSEQRVE

SEQ ID NO: 6046 - protein, 85 aa, Homo sapiens
  MISC_FEATURE (43): Xaa equals any of the naturally occurring L-amino acids
  MISC_FEATURE (75): Xaa equals any of the naturally occurring L-amino acids
GVLHFCGKSPFWRSSTGRFLGCYNQDFSTTTLLVFGARVILCXWGGQFIVGCFTASIPLSYSLQGKTTKNVPRHXQISPGGQSFI

SEQ ID NO: 6047 - protein, 214 aa, Homo sapiens
LSLRNAKYSFPQELISLFSMTDLNDNICKRYIKMITNIVILSLIICISLAFWIISMTASTYYGNLRPISPWRWLFSVVVPVLIVSNGLKKKSLDHSGALGGLVVGFILTIANFSFFTSLLMFFLSSSKLTKWKGEVKKRLDSEYKEGGQRNWVQVFCNGAVPTELALLYMIENGPGEIQSIFPSSTPLPGCVCLSWLHWPALLETHGLQKLAQF

SEQ ID NO: 6048 - protein, 65 aa, Homo sapiens
FFYNTKVTTWNFKDNVMCVCEIYIHIYIYFLKEEKIPFCSTCINSSFLIAVKWQLLINYCDCFKI

SEQ ID NO: 6049 - protein, 55 aa, Homo sapiens
KAGFRQSVHFYSKIGVSVYIYLKLNRSDFYFLGYSRSILKLLFKILKPHFKSCRP

SEQ ID NO: 6050 - protein, 54 aa, Homo sapiens
  MISC_FEATURE (34): Xaa equals any of the naturally occurring L-amino acids
  MISC_FEATURE (35): Xaa equals any of the naturally occurring L-amino acids
QLQINRYTPYTITNTFYTVHISVHQHYFIYTLFXXINIFLNWDYCPYALYFLFQ

SEQ ID NO: 6051 - protein, 77 aa, Homo sapiens
LLTTWVKGKRQMASKPLVCLSSSGSEEITSAFLPEEFGVFKGGWGGCHFENMLLFLLIVLRLIWKGYFFLANTFWYF

SEQ ID NO: 6052 - protein, 218 aa, Homo sapiens
  MISC_FEATURE (133): Xaa equals any of the naturally occurring L-amino acids
  MISC_FEATURE (202): Xaa equals any of the naturally occurring L-amino acids
  MISC_FEATURE (208): Xaa equals any of the naturally occurring L-amino acids
  MISC_FEATURE (216): Xaa equals any of the naturally occurring L-amino acids
HIEMALPKDAIPSLSECQCGICMEILVEPVTLPCNHTLCKPCFQSTVEKASLCCPFCRRRVSSWTRYHTRRNSLVNVELWTIIQKHYPRECKLRASGQESEEVADDYQPVRLLSKPGELRREYEEEISKVAAXRRASEEEENKASEEYIQRLLAEEEEEEKRQAEKRRRAMEEQLKSDEELARKLSIDINNFCEGSISASPXEFQKNXVPVTPKSXKR

SEQ ID NO: 6053 - protein, 106 aa, Homo sapiens
  MISC_FEATURE (4): Xaa equals any of the naturally occurring L-amino acids
WPGXWTLATELLHRAWCPQASRLGLEPGMSPGSALALLWSLPASDLGRSVIAGLWPHTGVLIHLETSQSFLQGQLTKSIFPLCCTSLFCVCVVTVGGGRVGSTFVA

SEQ ID NO: 6054 - protein, 67 aa, Homo sapiens
IPAPLYHLFLPLKGKTFHPSKLTAFSVGFSYALHTLDLTCRYSSPLARSICMWYFSFPSVDISYMIF

SEQ ID NO: 6055 - protein, 78 aa, Homo sapiens
  MISC_FEATURE (59): Xaa equals any of the naturally occurring L-amino acids
  MISC_FEATURE (60): Xaa equals any of the naturally occurring L-amino acids
  MISC_FEATURE (70): Xaa equals any of the naturally occurring L-amino acids
  MISC_FEATURE (73): Xaa equals any of the naturally occurring L-amino acids
HVVYPRKLGRPLPSQALRNNFSCLPMLIILVFNSLSDLQNVFINSSCTWLDKLSCLCWXXNDYLLIYFGXNIXKNINK

SEQ ID NO: 6056 - protein, 162 aa, Homo sapiens
  MISC_FEATURE (102): Xaa equals any of the naturally occurring L-amino acids
PYRESWYACRYRSGIPGSTHASGRLAGRGAESGLPRRGTSYSVGEAMEELLPDGQIWANMDPEERMLAAATAFTHICAGQGEGDVRREAQSIQYDPYSKASXAPGKRPALPVQLQYPHVESNVPSETVSEASQRLRKPVMKRKVLRRKPDGEVLVTDESIIK

SEQ ID NO: 6057 - protein, 48 aa, Homo sapiens
VLCVCVCVCVCAHMCTLVLVPNSCSPGDPLVLERPPPRWSTSFVPLVR

SEQ ID NO: 6058 - protein, 74 aa, Homo sapiens
  MISC_FEATURE (27): Xaa equals any of the naturally occurring L-amino acids
NVKKHIYLYIDFKQNTLNTLLSVRLMXAEEFYWVEKTVIYIVLNVFIINGCSIISILFSASNGMIIRHFSLLIS

SEQ ID NO: 6059 - protein, 45 aa, Homo sapiens
FIKWVIIHTNAKLSIYYIKIFNVLANFGKAKTTSVNKDGFLVICH

SEQ ID NO: 6060 - protein, 62 aa, Homo sapiens
GETSGLLCSGKTRDAHYCEGPLKSGLLNGFLLISWVHARMMGLDAVGKRRCKNNKQYIPSKK

SEQ ID NO: 6061 - protein, 59 aa, Homo sapiens
  MISC_FEATURE (2): Xaa equals any of the naturally occurring L-amino acids
  MISC_FEATURE (22): Xaa equals any of the naturally occurring L-amino acids
QXCKNIQKSRTIGLSFQSKSKXSCFHFTRLWKPMDVIVKCICITLTFLKCFELIKNSTM

SEQ ID NO: 6062 - protein, 51 aa, Homo sapiens
DTFNPVNFFSVSDKVKFSSRVQNTFIYFFVFLKVQRTTLINLSFPATWNST

SEQ ID NO: 6063 - protein, 89 aa, Homo sapiens
  MISC_FEATURE (14): Xaa equals any of the naturally occurring L-amino acids
KLLSPLNGLGPLVXSHCSIRVSLHLWALLSCDSRNVLLIHFMVDHPLALSTLPLFSSAPHRIISIVSVSSLLILYSACSDLPVNPLVNL

SEQ ID NO: 6064 - protein, 92 aa, Homo sapiens
ISGDKHLKKVQLTLEQHESELCVGLLTGRFFFSISILENFLEIFGNLKKLANYSLEISEVKKKLVCHRCIKLTMSILVHFIIYYHKIYTSFF

SEQ ID NO: 6065 - protein, 48 aa, Homo sapiens
  MISC_FEATURE (10): Xaa equals any of the naturally occurring L-amino acids
  MISC_FEATURE (16): Xaa equals any of the naturally occurring L-amino acids
  MISC_FEATURE (19): Xaa equals any of the naturally occurring L-amino acids
  MISC_FEATURE (27): Xaa equals any of the naturally occurring L-amino acids
  MISC_FEATURE (28): Xaa equals any of the naturally occurring L-amino acids
  MISC_FEATURE (29): Xaa equals any of the naturally occurring L-amino acids
TEKEMKIDQXEKGLVXKGXKGRSLWNXXXLKNEVTPNNRTGQSEMTWL

SEQ ID NO: 6066 - protein, 55 aa, Homo sapiens
  MISC_FEATURE (5): Xaa equals any of the naturally occurring L-amino acids
KSSIXPPLIFPATDIDRILRAGFTLQEALGALHRVGGNADLALLVLLAKNIVVPT

SEQ ID NO: 6067 - protein, 56 aa, Homo sapiens
SQLLGRLRQENHLNPGGRGCSEPRSHHCTPAWATRAKLHLKKTHIFMNISHQQCRK

SEQ ID NO: 6068 - protein, 113 aa, Homo sapiens
  MISC_FEATURE (98): Xaa equals any of the naturally occurring L-amino acids
EETWLLALINEESHFPQATDSTLLEKLHSQHANNHFYVKPRVAVNNFGVKHYAGEVQYDVRGILEKNRDTFRDDLLNLLRESRFDFIYDLFEHVSKPXQPGYLEMWEPTSAAY

SEQ ID NO: 6069 - protein, 44 aa, Homo sapiens
AFIYLNFEFLNFLVKNQDKHTSLGLCRVRIKTSLAGDRNFSTPL

SEQ ID NO: 6070 - protein, 59 aa, Homo sapiens
ADYPTVGTKLDSYFVGLSFLILTIYHPILCPVIFFKSLFNVLQHCDCMLATLLLECSFS

SEQ ID NO: 6071 - protein, 51 aa, Homo sapiens
WVNLRFQSQKLQVVVTFLSAWIKPLKCGKCCQSRAISLLSSMRGIETKQQF

SEQ ID NO: 6072 - protein, 73 aa, Homo sapiens
  MISC_FEATURE (17): Xaa equals any of the naturally occurring L-amino acids
  MISC_FEATURE (46): Xaa equals any of the naturally occurring L-amino acids
  MISC_FEATURE (52): Xaa equals any of the naturally occurring L-amino acids
KLTLTKGNKSWSSTAVXTALELVDPPGCRNSARGGVSSLKLRTIFXVAKLHXMMLPLLSVLSGPLFTSTRYPS

SEQ ID NO: 6073 - protein, 59 aa, Homo sapiens
  MISC_FEATURE (55): Xaa equals any of the naturally occurring L-amino acids
RGNRCLTKREAIRGIDEAQLKSSLASSSLASVHLKNKSWLTVGSTRFEIRWLYFXFFGI

SEQ ID NO: 6074 - protein, 66 aa, Homo sapiens
  MISC_FEATURE (2): Xaa equals any of the naturally occurring L-amino acids
TXMFQQHRFICNHKSDTFRMTKPQKNAIFKAETVLFWAKWNPCFSDTVRVEIKDTENLPLGNHNYL

SEQ ID NO: 6075 - protein, 46 aa, Homo sapiens
KRQLENVMHGVFKKTKCSFYLTDNSFYTLYNKISTRHLVGKVKKKK

SEQ ID NO: 6076 - protein, 136 aa, Homo sapiens
  MISC_FEATURE (10): Xaa equals any of the naturally occurring L-amino acids
  MISC_FEATURE (13): Xaa equals any of the naturally occurring L-amino acids
  MISC_FEATURE (76): Xaa equals any of the naturally occurring L-amino acids
RGLPSIPENXNLXEYFVAVDVNNMLHLYASMLYERRILIICSKLSTLTACIHGSAAMLYPMYWQHVYIPVLPPHLXDYCCAPMPYLIGIHLSLMEKVRNMALDDVVILNVDTNTLETPFDDLQSLPNDVEESIVIQ

SEQ ID NO: 6077 - protein, 74 aa, Homo sapiens
  MISC_FEATURE (40): Xaa equals any of the naturally occurring L-amino acids
HFAAYGNVCVLFILMNCAMTHKPKQCQLQLNLGRNPWCFXFFFDAGERLHFVTNLLPNRKIYFLSDRHHTRCLL

SEQ ID NO: 6078 - protein, 86 aa, Homo sapiens
GKPGAPLQPWDNLRIPPEASSVMDAVLRITCCPGVTCFHLPAHQPSAHLTCLPMDWGLPGPPPYVNLHFLFKNQEKKRFEDPKSCQ

SEQ ID NO: 6079 - protein, 82 aa, Homo sapiens
  MISC_FEATURE (47): Xaa equals any of the naturally occurring L-amino acids
  MISC_FEATURE (50): Xaa equals any of the naturally occurring L-amino acids
  MISC_FEATURE (76): Xaa equals any of the naturally occurring L-amino acids
LEGRALLQVRVGVLSESCVLGLVSFPCPCSGSVRQIGRLCSRPQECXSPXLAQYIGTCGFYFVFDVPDRNRARGTXKTTVGS

SEQ ID NO: 6080 - protein, 50 aa, Homo sapiens
SKERVDGLKRLASVSVAGSHLASNWKQNFWGVLFCIRVCFMLSKTYFRSK

SEQ ID NO: 6081 - protein, 51 aa, Homo sapiens
  MISC_FEATURE (15): Xaa equals any of the naturally occurring L-amino acids
WKLVGPPGLTGIRTXGKNFVRPQKHCTVNILEKVCQTGINDSMIFNDCKLR

SEQ ID NO: 6082 - protein, 52 aa, Homo sapiens
  MISC_FEATURE (29): Xaa equals any of the naturally occurring L-amino acids
  MISC_FEATURE (47): Xaa equals any of the naturally occurring L-amino acids
  MISC_FEATURE (52): Xaa equals any of the naturally occurring L-amino acids
KSMGEENVKMLSDIRCMKSHNIKAISYFXRGIFLLPLLVLDRFYKMXNKIWX

SEQ ID NO: 6083 - protein, 102 aa, Homo sapiens
  MISC_FEATURE (50): Xaa equals any of the naturally occurring L-amino acids
  MISC_FEATURE (58): Xaa equals any of the naturally occurring L-amino acids
ESSICCSFLQLYFCSISWFHSLLFWDFVFRSAYFLYICMQMKEGSLYWCXFSLQLLVXGDLLEKILPLKGENRPLCVYLYRDVYMGCGGTLLNVNLPCQWKD

SEQ ID NO: 6084 - protein, 37 aa, Homo sapiens
LFGAVRKKKKKKIAISSCVHNSRYNIQSLEGPFWALD

SEQ ID NO: 6085 - protein, 37 aa, Homo sapiens
YSFDNTRVSEIPDTSVQNAMDLLFYSCQPFSIPIQKR

SEQ ID NO: 6086 - protein, 73 aa, Homo sapiens
  MISC_FEATURE (48): Xaa equals any of the naturally occurring L-amino acids
TLSDVGCPHQNICTSCFCPTLEAAEKKGKQGSRNLCYVFSPLYLFLWXVVQEILFSCSKLIKRSNIRNYDNSL

SEQ ID NO: 6087 - protein, 49 aa, Homo sapiens
  MISC_FEATURE (46): Xaa equals any of the naturally occurring L-amino acids
YRGREISKVFTSSLKGVGSNSSSPCYFGVSHYSLTHQKIHSFKCLXVLS

SEQ ID NO: 6088 - protein, 38 aa, Homo sapiens
  MISC_FEATURE (13): Xaa equals any of the naturally occurring L-amino acids
  MISC_FEATURE (16): Xaa equals any of the naturally occurring L-amino acids
  MISC_FEATURE (25): Xaa equals any of the naturally occurring L-amino acids
  MISC_FEATURE (26): Xaa equals any of the naturally occurring L-amino acids
  MISC_FEATURE (30): Xaa equals any of the naturally occurring L-amino acids
PNADQKYSTDKMXEPXVYVKSLYTXXGPDXYFLLLIGG

SEQ ID NO: 6089 - protein, 303 aa, Homo sapiens
  MISC_FEATURE (10): Xaa equals any of the naturally occurring L-amino acids
  MISC_FEATURE (14): Xaa equals any of the naturally occurring L-amino acids
  MISC_FEATURE (118): Xaa equals any of the naturally occurring L-amino acids
  MISC_FEATURE (147): Xaa equals any of the naturally occurring L-amino acids
AFSSSEDNKXGKRXRTNSRSTPTTPQGKPETTFLDQGCSSPVLIDCPHPNCNKKYKHINGLRYHQAHAHLDPENKLEFEPDSEDKISDCEEGLSNVALECSEPSTSVSAYDQLKAPAXPGAGNPPGTPKGKRELMSNGPGSIIGAKXGKNSGKKKGLNNELNNLPVISNMTAALDSCSAADGSLAAEMPKLEAEGLIDKKNLGDKEKGKKANNCKTDKNLSKLKSARPIAPAPAPTPPQLIAIPTATFTTTTTGTIPGLPSLTTTVVQATPKSPPLKPIQPKPTIMGEPITVNPALVSLKDKK

SEQ ID NO: 6090 - protein, 61 aa, Homo sapiens
  MISC_FEATURE (49): Xaa equals any of the naturally occurring L-amino acids
RLSQHPYHTVQKSELQRLCSVSWSTSKFVVRKVRCRNLRLQRLCSVSWXTSTFFVVNIQSH

SEQ ID NO: 6091 - protein, 77 aa, Homo sapiens
PNPALTAPQRIPVAAQPPAPPSPELRREPQGGAMRTGVWWSTYGSWPASGAVAGRPLAFSDAGPHVHYGWGDPIRLR

SEQ ID NO: 6092 - protein, 44 aa, Homo sapiens
  MISC_FEATURE (22): Xaa equals any of the naturally occurring L-amino acids
  MISC_FEATURE (33): Xaa equals any of the naturally occurring L-amino acids
TAGPSHPWISSCTTLKLEQHQXLPRSPPAQPSXGNVSSSPGLQL

SEQ ID NO: 6093 - protein, 52 aa, Homo sapiens
  MISC_FEATURE (10): Xaa equals any of the naturally occurring L-amino acids
  MISC_FEATURE (41): Xaa equals any of the naturally occurring L-amino acids
AEGHERERSXESGEEDSSLTDEPRRACLSHPSLCQLLGGQXPALRNSPVLGE

SEQ ID NO: 6094 - protein, 78 aa, Homo sapiens
LVLHYFPREFLQVNVHPFDLEADSQFCLFGKSASELNFLVCKMGLRKCGLLFQRLLLGWNEIMCVTKALETFWNLKAI

SEQ ID NO: 6095 - protein, 67 aa, Homo sapiens
  MISC_FEATURE (45): Xaa equals any of the naturally occurring L-amino acids
  MISC_FEATURE (51): Xaa equals any of the naturally occurring L-amino acids
ALSVCDLLKNKFFVKENTSLKNEKAILSLINLIQDPSIINLTVLXFTEISXNQSQKIPPCTNLLPLH

SEQ ID NO: 6096 - protein, 61 aa, Homo sapiens
  MISC_FEATURE (31): Xaa equals any of the naturally occurring L-amino acids
  MISC_FEATURE (44): Xaa equals any of the naturally occurring L-amino acids
  MISC_FEATURE (48): Xaa equals any of the naturally occurring L-amino acids
  MISC_FEATURE (55): Xaa equals any of the naturally occurring L-amino acids
LRIMTPLVSCGMGRIFYFFCTFTWRLFLLRXFIMGFKALHLPNXGKCXKYCIFYXFGPKGY

SEQ ID NO: 6097 - protein, 50 aa, Homo sapiens
NEECNPFYKMYTLCYLLLNFGLVIPTDAKFFLQSTEIIQIFLHCQQDEIV

SEQ ID NO: 6098 - protein, 141 aa, Homo sapiens
WKKYFKTFINGKVVWGSWFDHVKGWWEMKDRHQILFLFYEDIKRDPKHEIRKVMQFMGKKVDETVLDKIVQETSFEKMKENPMTNRSTVSKSILDQSISSFMRKGTVGDWKNHFTVAQNERFDEIYRRKMEGTSINFCMEL

SEQ ID NO: 6099 - protein, 65 aa, Homo sapiens
NKHLEAIFGLIKIVLGRAWWLTPAIPALWEAEDSGFLELRSWETSLGNMVIPVCLFKIKKINEVM

SEQ ID NO: 6100 - protein, 85 aa, Homo sapiens
  MISC_FEATURE (13): Xaa equals any of the naturally occurring L-amino acids
VAKGLLSHLCPPXILKARSLEFELCPHMPPRHQQSKMKSLHCLSVDPTLSPHWRGRGGGLRMSSSCPGCNMVKDERKEMLGASLH

SEQ ID NO: 6101 - protein, 90 aa, Homo sapiens
QEPSSRVSCFKAPYPFLRVTNTCARSLPFPSSPCIWLITGQLPASLQFGRWVGNDHHSPRSPDGLVFRALHRHLQQAPARPEVILRRDGS

SEQ ID NO: 6102 - protein, 45 aa, Homo sapiens
LQLWIAYFEKGELQILPKDGEKHIKKIPTFRNSFQQLLLEIFKLI

SEQ ID NO: 6103 - protein, 49 aa, Homo sapiens
ISDKFPGNADFTVQGPHFGNHTNRNLMQTQGTYQKIFNQVILHDKGQQC

SEQ ID NO: 6104 - protein, 58 aa, Homo sapiens
TGFHHVSQASLELLTSGDPPASASQSAGITGISHRAWPNNWNIFIMKMSSALPKETTN

SEQ ID NO: 6105 - protein, 89 aa, Homo sapiens
CKHCISYVEMVKDDYEDDSHVFRKPANDITSQLEINFGNLPRPGRGARGGTRGGRGRIRRAENYGPRAEVVMQDVAPNPDDPEDFPALS

SEQ ID NO: 6106 - protein, 32 aa, Homo sapiens
KLKMLAEHFVVLQALLIFHCSTCCWQSNFSEL

SEQ ID NO: 6107 - protein, 65 aa, Homo sapiens
  MISC_FEATURE (64): Xaa equals any of the naturally occurring L-amino acids
AEHCSPILVLIWKFLGHYADKKTRTPGARKTCCKSLVCSYECPSTLEEALDSPVPSFLGARVPXC

SEQ ID NO: 6108 - protein, 47 aa, Homo sapiens
  MISC_FEATURE (33): Xaa equals any of the naturally occurring L-amino acids
FYCYSEESQLTDLDDFKDAVQMREGCKYCFSIXELTVAKVGYSIESL

SEQ ID NO: 6109 - protein, 165 aa, Homo sapiens
  MISC_FEATURE (149): Xaa equals any of the naturally occurring L-amino acids
  MISC_FEATURE (153): Xaa equals any of the naturally occurring L-amino acids
IRHEETSIALQDNYEIRYTAISVIKNLLIKHAFDTRYQHKNQQAKIAQLYLPFVGLLLENIQRLAGRDTLYSCAAMPNSASRDEFPCGFTSPANRGSLSTDKDTAYGSFQNGHGIKREDSRGSLFPEGATGFPDQGNTGENTRQNSTRXIVSXYNRLDQYEITTS

SEQ ID NO: 6110 - protein, 61 aa, Homo sapiens
  MISC_FEATURE (44): Xaa equals any of the naturally occurring L-amino acids
QRGRWKQCSWKLLLSPLSHHSRHLLQAGRHVSVRFLPGDIRSPXIQIKCNILQTALLREIS

SEQ ID NO: 6111 - protein, 156 aa, Homo sapiens
  MISC_FEATURE (92): Xaa equals any of the naturally occurring L-amino acids
  MISC_FEATURE (110): Xaa equals any of the naturally occurring L-amino acids
  MISC_FEATURE (146): Xaa equals any of the naturally occurring L-amino acids
WIPRASGIRHEHLRSHTQEKVVACPTCGGMFANNTKFLDHIRRQTSLDQQHFQCSHCSKRFATERLLRDHMRNHVNHYKCPLCDMTCPLPSXLRNHMRFRHSEDRPFKCXCCDYSCKNLIDLQKHLDTHSEEPAYRCDFENCTSVXDPLLYQVPLP

SEQ ID NO: 6112 - protein, 65 aa, Homo sapiens
FCLLLAGEEAMSWYSQWSQDPECVAKPYTAFHGLFLGARVGGDMVLGSNLPCNRWRAVFSMAPAV

SEQ ID NO: 6113 - protein, 72 aa, Homo sapiens
  MISC_FEATURE (10): Xaa equals any of the naturally occurring L-amino acids
  MISC_FEATURE (31): Xaa equals any of the naturally occurring L-amino acids
  MISC_FEATURE (49): Xaa equals any of the naturally occurring L-amino acids
LQVTLSSWPXIAPRLFLPHWGQSFPWTKERXLQPFFKSLGPGPWHQHHXSLYSIHQKHLKPTQICSMGSIHV

SEQ ID NO: 6114 - protein, 137 aa, Homo sapiens
VYKYLFFKRRCCACETILFFFFFFFFFFLVTAKDREPFHFGHTGLLSRSHFSSWLLKITASPVPSWRSSRGRADFSPTGGTMWGSEGWEGDFPLEWWSCWGLISRDPKGGLCRRFHIGGALSLAAVRVGPGCGVQTA

SEQ ID NO: 6115 - protein, 65 aa, Homo sapiens
GNSRVDPRVRRNVTRVRGSYLYIGFPAENRPLLYRFWVHNLALLVNPRDLSDPPPPVFFLFLFLF

SEQ ID NO: 6116 - protein, 50 aa, Homo sapiens
YYKSYCTHFVLEKNTEAVAQTLFNIREFILEKNPANVMNLEKHFFSKTTA

SEQ ID NO: 6117 - protein, 67 aa, Homo sapiens
  MISC_FEATURE (46): Xaa equals any of the naturally occurring L-amino acids
  MISC_FEATURE (47): Xaa equals any of the naturally occurring L-amino acids
VDRAISITLRPLWVIGADKVPCIADEISPSWTFPRNGPGVSSNLSXXITCLEITLEYVSYKARSHGN

SEQ ID NO: 6118 - protein, 47 aa, Homo sapiens
TRERRGGNMKVNLNNFCNTSYLQTIGFMLLHSRCDLSYVSDRFYELF

SEQ ID NO: 6119 - protein, 122 aa, Homo sapiens
GPAKGGKKKKDPNAPKRPPSGFFLFCSEFRPKIKSTNPGISIGDVAKKLGEMWNNLNDSEKQPYITKAAKLKEKYEKDVADYKSKGKFDGAKGPAKVARKKVEEEDEEEEEEEEEEEEEEDE

SEQ ID NO: 6120 - protein, 82 aa, Homo sapiens
VDFLFAINQAKVNAIISRFMVNKFEVWINLSHIFYCSLVKKGTRKKISSSLVLSQCGDCRKLTMPACVNVWLTVKASFLAAC

SEQ ID NO: 6121 - protein, 34 aa, Homo sapiens
  MISC_FEATURE (34): Xaa equals any of the naturally occurring L-amino acids
MVLRKYFLWKIGRKYFNLNIKKIGNCYFQQQSPX

SEQ ID NO: 6122 - protein, 87 aa, Homo sapiens
GSPGAHEPCQAPAGSSRHVPDLWGPREGTFPSWERRRSGQLGEGCEHFPPGRDQGDLHALRRAWKGSEKPADRPCPSSRDHLMNHVF

SEQ ID NO: 6123 - protein, 253 aa, Homo sapiens
QNLPLTRRRPTGSCVCLGRGGPGGGGLRAGSRHPAPAAMHPRRPDGFDGLGYRGGARDEQGFGGAFPARSFSTGSDLGHWVTTPPDIPGSRNLHWGEKSPPYGVPTTSTPYEGPTEEPFSSGGGGSVQGQSSEQLNRFAGFGIGLASLFTENVLAHPCIVLRRQCQVNYHAQHYHLTPFTVINIMYSFNKTQGPRALWKGMGSTFIVQGVTLGAEGIISEFTPLPREVLHKWSPKQIGEHLLLKSLNLRGGNA

SEQ ID NO: 6124 - protein, 168 aa, Homo sapiens
  MISC_FEATURE (9): Xaa equals any of the naturally occurring L-amino acids
  MISC_FEATURE (115): Xaa equals any of the naturally occurring L-amino acids
ILFCPAAAXKASHPTPRTFLVRSGLAWGPPFSVSLVCLYPALLSSLCSACLSLFASPFSLSCRLLSLGPPWFCLVSLSLLISSLYSFSRAGPTGRTRLSQINPHTNKIQNQIPLXTGAGTLRRSRIKLFSVSEALLTCVCVCVCVLGEGDLDCSIRTLSETEGRWEDD

SEQ ID NO: 6125 - protein, 180 aa, Homo sapiens
  MISC_FEATURE (140): Xaa equals any of the naturally occurring L-amino acids
  MISC_FEATURE (157): Xaa equals any of the naturally occurring L-amino acids
  MISC_FEATURE (169): Xaa equals any of the naturally occurring L-amino acids
HEVENNTLGSPAASELLEHLKPTYWFSAHLHVKFAALMQHQAKDKGQTARATKFLALDKCLPHRDFLQILEIEHDPSAPDYLEYDIEWLTILRATDDLINVTGRLWNMPENNGLHARWDYSATEEGMKEVLEKLNHDLKXPCNFSVTAACYDPSKPXTQMQLIHRINPXTTEFCAQLGII

SEQ ID NO: 6126 - protein, 63 aa, Homo sapiens
  MISC_FEATURE (31): Xaa equals any of the naturally occurring L-amino acids
NYKICMYLALNHNLKYFMNSFTSIDSQNSNXKLASEPVRTPPHPSSCLDLSTAIILCKAVVLT

SEQ ID NO: 6127 - protein, 72 aa, Homo sapiens
  MISC_FEATURE (6): Xaa equals any of the naturally occurring L-amino acids
  MISC_FEATURE (10): Xaa equals any of the naturally occurring L-amino acids
  MISC_FEATURE (60): Xaa equals any of the naturally occurring L-amino acids
  MISC_FEATURE (62): Xaa equals any of the naturally occurring L-amino acids
  MISC_FEATURE (69): Xaa equals any of the naturally occurring L-amino acids
TLTKGXKSWXSTAVTTALELVDPPGCRNSARAQLTRCQLGSCSGGRKRLRRFPALSPQPXRXSGSQDVXFDD

SEQ ID NO: 6128 - protein, 257 aa, Homo sapiens
PRVRAFAGVPTRGRTRGQSRRCAAEASAGPERDARPGAPAAGTMGAAHSASEEVRELEGKTGFSSDQIEQLHRRFKQLSGDQPTIRKENFNNVPDLELNPIRSKIVRAFFDNRNLRKGPSGLADEINFEDFLTIMSYFRPIDTTMDEEQVELSRKEKLRFLFHMYDSDSDGRITLEEYRNVVEELLSGNPHIEKESARSIADGAMMEAASVCMGQMEPDQVYEGITFEDFLKIWQGIDIETKMHVRFLNMETMALCH

SEQ ID NO: 6129 - protein, 94 aa, Homo sapiens
LSSGAEGDPGSLTGRAFFFTTTWAEVREFCHTGGRVTHQGGMWLQQAKGHRKGGAGDSRVAATLVGWGGAGGRSNRDGVGLKKSFFFSFFKQKK

SEQ ID NO: 6130 - protein, 120 aa, Homo sapiens
RYFLKMAKILTTPKFAHAFRNLTFEGYDGPVTLDDWGDVDSTMVLLYTSVDTKKYKVLLTYDTHVNKTYPVDMSPTFTWKNSKLPNDITGRGPQILMIAVFTLTGAVVLSCRRSPDAQKI

SEQ ID NO: 6131 - protein, 72 aa, Homo sapiens
RPEGAQLCPQGKLKSPALSALGPCRAVRVELPPQTLRSHAVHSSSWISLRTFVLAYLNDLSTETPGCLPLPL

SEQ ID NO: 6132 - protein, 34 aa, Homo sapiens
  MISC_FEATURE (3): Xaa equals any of the naturally occurring L-amino acids
  MISC_FEATURE (25): Xaa equals any of the naturally occurring L-amino acids
VLXSIPFIISYVISLSFLVGSKTHXQFSQSSMDI

SEQ ID NO: 6133 - protein, 69 aa, Homo sapiens
  MISC_FEATURE (8): Xaa equals any of the naturally occurring L-amino acids
  MISC_FEATURE (19): Xaa equals any of the naturally occurring L-amino acids
  MISC_FEATURE (30): Xaa equals any of the naturally occurring L-amino acids
SSFPQPPXHGWVGEARRNXLRQEVAAAQVXLLASEPTEVRSGRWTCPPNVPDSGSCCHWISWHGRQKER

SEQ ID NO: 6134 - protein, 80 aa, Homo sapiens
  MISC_FEATURE (73): Xaa equals any of the naturally occurring L-amino acids
  MISC_FEATURE (80): Xaa equals any of the naturally occurring L-amino acids
TPAPPSPAAARESTRRVAINVRASIALSSSLRTLVLPRLTPTSPGPRGWGNLAVPRLSNKAVLSNSKKKKKKXSFFFFFX

SEQ ID NO: 6135 - protein, 92 aa, Homo sapiens
  MISC_FEATURE (4): Xaa equals any of the naturally occurring L-amino acids
  MISC_FEATURE (6): Xaa equals any of the naturally occurring L-amino acids
  MISC_FEATURE (8): Xaa equals any of the naturally occurring L-amino acids
SSSXKXDXRIGKAGTPAGTGPEFPGRPTRPGEVLFSTCGVSHWKHNPIVPEGFSPQWLSHPKRKSLSFLTLLFCHLLPLDNQGQGATWKCLT

SEQ ID NO: 6136 - protein, 105 aa, Homo sapiens
DEEAKDEKAEPNRDKSVGPLPQADPEVSDIESRIAALRAAGLTVKPSGKPRRKSNLPALYEGTLSLCSEDLKHTHPDSVKSKRSRLNHVASCGNLSPPPREDGCD

SEQ ID NO: 6137 - protein, 42 aa, Homo sapiens
TPELKRSFHLILQSSWDYSRVSTCLANFSFLIFLELGSHYVA

SEQ ID NO: 6138 - protein, 176 aa, Homo sapiens
  MISC_FEATURE (151): Xaa equals any of the naturally occurring L-amino acids
  MISC_FEATURE (154): Xaa equals any of the naturally occurring L-amino acids
  MISC_FEATURE (170): Xaa equals any of the naturally occurring L-amino acids
PAAVQPLGLPSPSTSCSSASQAIAMVFVRRPWPALTTVLLALLVCLGALVDAYPIKPEAPGEDASPEELNRYYASLRHYLNLVTRQRYGKRDGPDTLLSKTFFPDGEDRPVSRGKSARYHTSCIRERGLALPWQHHLTTSPRLASPDPILXFVXQSEGQTVVRTLRLWEXANSQSF

SEQ ID NO: 6139 - protein, 205 aa, Homo sapiens
KVHSSEAGLTSRFLIAWDVHRANVLEGGDPTFPQLTASPHSMDSMLPSGEGGPKRTHPTVPGIPGGTRAGAGKIGRMIAEEIMEIHRIRGSSPSSCGSSPLNITSTPPPDASSPGGKKILNGGTPDIPSSGLLSGQAQENPGYPYSDSSSILGENPHIGIDMIDNDQGSSSPSNDEAAMAVIMSLLEADAGLGGPVDFSDLPWPL

SEQ ID NO: 6140 - protein, 63 aa, Homo sapiens
PAKPQKGQESGKLQRPKRQQLIVSSECCCQNKPTRAVFSPCPNQIKVQIPEKEPPWLGRTQAH

SEQ ID NO: 6141 - protein, 83 aa, Homo sapiens
  MISC_FEATURE (1): Xaa equals any of the naturally occurring L-amino acids
  MISC_FEATURE (82): Xaa equals any of the naturally occurring L-amino acids
XTVSRVRALYKRVLQLHRVLPPDLKSLGDQYVKDEFRRHKTVGSDEAQRFLQEWEGFKCLKSGREKETVFKEFKILKWKRPXR

SEQ ID NO: 6142 - protein, 53 aa, Homo sapiens
VGLEINMLAFIPVLTKKINPRSTEAAIKYFLTQATASIILLIAILFNNILSGQ

SEQ ID NO: 6143 - protein, 180 aa, Homo sapiens
  MISC_FEATURE (44): Xaa equals any of the naturally occurring L-amino acids
  MISC_FEATURE (48): Xaa equals any of the naturally occurring L-amino acids
AQDQNSKCIGTDLNRNFNASWNSIPNTNDPCADNYRGSAPESEXETKXVTNFIRSHLNEIKVYITFHSYSQMLLFPYGYTSKLPPNHEDLAKVAKIGTDVLSTRYETRYIYGPIESTIYPISGSSLDWAYDLGIKHTFAFELRDKGKFGFLLPESRIKPTCRETMLAVKFIAKYILKHTS

SEQ ID NO: 6144 - protein, 42 aa, Homo sapiens [sequence omitted]

SEQ ID NO: 6145 - protein, 212 aa, Homo sapiens
FYLGSSTASDFLAVEMRRGRVAFLWDLGSGSTRLEFPDFPIDDNRWHSIHVARFGNIGSLSVKEMSSNQKSPTKTSKSPGTANVLDVNNSTLMFVGGLGGQIKKSPAVKVTHFKGCLGEAFLNGKSIGLWNYIEREGKCRGCFGSSQNEDPSFHFDGSGYSVVEKSLPATVTQIIMLFNTFSPNGLLSLPGFIRHKRLFIHRAVSWQSEGYD

SEQ ID NO: 6146 - protein, 75 aa, Homo sapiens
  MISC_FEATURE (22): Xaa equals any of the naturally occurring L-amino acids
  MISC_FEATURE (28): Xaa equals any of the naturally occurring L-amino acids
  MISC_FEATURE (31): Xaa equals any of the naturally occurring L-amino acids
HASPPSEKKILRQSMCFSCPSXHRSLSXTQXDFSGVKFRRHGADNHEASAATATTAAATTVAAAAAAAAARVTLT

SEQ ID NO: 6147 - protein, 186 aa, Homo sapiens
  MISC_FEATURE (8): Xaa equals any of the naturally occurring L-amino acids
  MISC_FEATURE (18): Xaa equals any of the naturally occurring L-amino acids
KLTLTKGXKSWELHRGDXRSRTSGSPGLQEFGTRTTEGEEITESSSTEEMEVRSVVADTDQKALGSEVQDASKVTTQIDKEKKEIPVSIKKEPEVTVVSQPTEPQPVLIPSININSDSGENKEEIGSLSKTETILPPESENPKENDNDSGTGSTADTSSIDLNLSISSFLSKTKDSGSISLQETKK

SEQ ID NO: 6148 - protein, 87 aa, Homo sapiens
  MISC_FEATURE (1): Xaa equals any of the naturally occurring L-amino acids
  MISC_FEATURE (2): Xaa equals any of the naturally occurring L-amino acids
  MISC_FEATURE (9): Xaa equals any of the naturally occurring L-amino acids
  MISC_FEATURE (16): Xaa equals any of the naturally occurring L-amino acids
XXLLKGTKXGSSTAVXTALELVDPPGCRNSARAGSGPEPESESESESEPKSECQSEPDSESDAESDSEFEPEGEPGKPEAELRQGAE

SEQ ID NO: 6149 - protein, 86 aa, Homo sapiens
  MISC_FEATURE (8): Xaa equals any of the naturally occurring L-amino acids
  MISC_FEATURE (39): Xaa equals any of the naturally occurring L-amino acids
  MISC_FEATURE (73): Xaa equals any of the naturally occurring L-amino acids
RAFGQARXAAEAISLTQGRSCPEPATALSQPASFSVLPXPRLPRRGYPQPQPGAGEAAKGEGRNQGMSAGRAXGALSRTRTALGAG

SEQ ID NO: 6150 - protein, 594 aa, Homo sapiens
RQIFQSLPPFMDILLLLLFFMIIFAILGFYLFSPNPSDPYFSTLENSIVSLFVLLTTANFPDVMMPSYSRNPWSCVFFIVYLSIELYFIMNLLLAVVFDTFNDIEKRKFKSLLLHKRTAIQHAYRLLISQRRPAGISYRQFEGLMRFYKPRMSARERYLTFKALNQNNTPLLSLKDFYDIYEVAALKWKAKKNREHWFDELPRTALLIFKGINILVKSKAFQYFMYLVVAVNGVWILVETFMLKGGNFFSKHVPWSYLVFLTIYGVELFLKVAGLGPVEYLSSGWNLFDFSVTVFAFLGLLALALNMEPFYFIVVLRPLQLLRLFKLKERYRNVLDTMFELLPRMASLGLTLLIFYYSFAIVGMEFFCGIVFPNCCNTSTVADAYRWRNHTVGNRTVVEEGYYYLNNFDNILNSFVTLFELTVVNNWYIIMEGVTSQTSHWSRLYFMTFYIVTMVVMTIIVAFILEAFVFRMNYSRKNQDSEVDGGITLEKEISKEELVAVLELYREARGASSDVTRLLETLSQMERYQQHSMVFLGRRSRTKSDLSLKMYQEEIQEWYEEHAREQEQQRQLSSSAAPAAQQPPGSRQRSQTVT

SEQ ID NO: 6151 - protein, 377 aa, Homo sapiens
LAEATKKEITFFQTHPYFRVLLEEGSATVPRLAERLTTELIMHIQKSLPLLEGQIRESHQKATEELRRCGADIPSQEADKMFFLIEKIKMFNQDIEKLVEGEEVVRENETRLYNKIREDFKNWVGILATNTQKVKNIIHEEVEKYEKQYRGKELLGFVNYKTFEIIVHQYIQQLVEPALSMLQKAMEIIQQAFINVAKKHFGEFFNLNQTVQSTIEDIKVKHTAKAENMIQLQFRMEQMVFCQDQIYSVVLKKVREEIFNPLGTPSQNMKLNSHFPSNESSVSSFTEIGIHLNAYFLETSKRLANQIPFIIQYFMLRENGDSLQKAMMQILQEKNRYSWLLQEQSETATKRRILKERIYRLTQARHALCQFSSKEIH

SEQ ID NO: 6152 - protein, 87 aa, Homo sapiens
QIKGEVLAKSICEDDTLGIAGHKTGKVGKCSLNGAYTLSYRQWEALGKNTVIRKFCIHFSNGEKLGNSLLGGSLWAGISQLISGFIF

SEQ ID NO: 6153 - protein, 43 aa, Homo sapiens
  MISC_FEATURE (18): Xaa equals any of the naturally occurring L-amino acids
IRHRLDLLLGVREKSVSXLLVLLPKCFYKEMTGDIYSPKELIY

SEQ ID NO: 6154 - protein, 76 aa, Homo sapiens
HKRCLIFIQAIFAHIHQNGMTQGKNHFAKGNKTSCRQLDTFRLFRKVCTGTLIGILLVYLLSYFKVVALIIVVSVF

SEQ ID NO: 6155 - protein, 112 aa, Homo sapiens
  MISC_FEATURE (76): Xaa equals any of the naturally occurring L-amino acids
WMKMRKTEPRELLETSLRKKRRDQFNVLIKELSSMLPGNTRKMDKTTVLEKVIGFLQKHNEVSAQTEICDIQQDWXPSFLSNEEFTQLMLESHFRDCEESRCHVLVARMFPF

SEQ ID NO: 6156 - protein, 75 aa, Homo sapiens
SFTPANTSILLINGNILMCHFLSKQVSYTAPRGPREAEAQTEGEHSLAGRHMPGRMTIGIASSINQLLKGFLSDS

SEQ ID NO: 6157 - protein, 32 aa, Homo sapiens
TLCVGSWQAAMSLGIIEIIDDTEHSYALSLYS

SEQ ID NO: 6158 - protein, 42 aa, Homo sapiens
  MISC_FEATURE (8): Xaa equals any of the naturally occurring L-amino acids
  MISC_FEATURE (15): Xaa equals any of the naturally occurring L-amino acids
  MISC_FEATURE (16): Xaa equals any of the naturally occurring L-amino acids
QDRKGDRXRLYLKKXXTILFLILFNSSFLFFSPWLLCSLIVI

SEQ ID NO: 6159 - protein, 74 aa, Homo sapiens
DFFFKRTFKIMISNFNCIYRGFKESLISCTLLRLSYSFSHPRTGLPLREADPLQVAITVVASSASRLLQSRVPF

SEQ ID NO: 6160 - protein, 35 aa, Homo sapiens
LTLYDMCKAVSRDIVLEEIKLISKTGGQRGDFHRA

SEQ ID NO: 6161 - protein, 46 aa, Homo sapiens
  MISC_FEATURE (43): Xaa equals any of the naturally occurring L-amino acids
LSTECDRYCSKHFICNDLLLQNTPMSNVLLSPYLQLRKLGTEXLSN

SEQ ID NO: 6162 - protein, 66 aa, Homo sapiens
AKIKGLQKHSFLCCSLLGFMQRQFCVNVQLTLIWKYENQSILVIKNFFTIVIILMFILCKITHLIK

SEQ ID NO: 6163 - protein, 52 aa, Homo sapiens
  MISC_FEATURE (6): Xaa equals any of the naturally occurring L-amino acids
  MISC_FEATURE (9): Xaa equals any of the naturally occurring L-amino acids
  MISC_FEATURE (16): Xaa equals any of the naturally occurring L-amino acids
GVLGQXVTXYFSQPLXCDWRTLLFSHVFLIMPESPTPLLGRDILGKAGAVIH

SEQ ID NO: 6164 - protein, 83 aa, Homo sapiens
SVWGSVSFPGSWHSSGPLSLPLLGEGGKREIPSSQPERAEADRSPLALCACVRASVSLLVGRSDVVGGKPGMYPFQTKLNILK

SEQ ID NO: 6165 - protein, 96 aa, Homo sapiens
  MISC_FEATURE (30): Xaa equals any of the naturally occurring L-amino acids
  MISC_FEATURE (69): Xaa equals any of the naturally occurring L-amino acids
ENALQTFLHPTPPNSEACWDPSSPIGSPGXPSVFTQSRPFFRSFPVRGRYTWTRIYPHLTTLKSCFLPXIHILSSCHLPIQLHICLIALFFSVHLS

SEQ ID NO: 6166 - protein, 89 aa, Homo sapiens
LAISFTKMSSAAENGEAAPGKQNEEKTYKKTASSAIKGAIQLGIGYTVGNLTSKPEPRCSYARLLCGGKCVPTQRREAILTPAHHYPRL

SEQ ID NO: 6167 - protein, 36 aa, Homo sapiens
TACKILYMRCCRYRNEFSVHVWLIFFVHDFCMFPFQ

SEQ ID NO: 6168 - protein, 387 aa, Homo sapiens
  MISC_FEATURE (9): Xaa equals any of the naturally occurring L-amino acids
PAQRPPPAXGASRGPGQTRCEMEKYLTPQLPPVPIIPEHKKYRRDSASVVDQFFTDTEGLPYSINMNVFLPDITHLRTGLYKSQRPCVTHIKTEPVAIFSHQSETTAPPPAPTQALPEFTSIFSSHQTAAPEVNNIFIKQELPTPDLHLSVPTQQGHLYQLLNTPDLDMPSSTNQTAAMDTLNVSMSAAMAGLNTHTSAVPQTAVKQFQGMPPCTYTMPSQFLPQQATYFPPSPPSSEPGSPDRQAEMLQNLTPPPSYAATIASKLAIHNPNLPTTLPVNSQNIQPVRYNRRSNPDLEKRRIHYCDYPGCTKVYTKSSHLKAHLRTHTGEKPYKCTWEGCDWRFARSDELTRHYRKHTGAKPFQCGVCNRSFSRSDHLALHMKRHQN

SEQ ID NO: 6169 - protein, 81 aa, Homo sapiens
  MISC_FEATURE (7): Xaa equals any of the naturally occurring L-amino acids
  MISC_FEATURE (19): Xaa equals any of the naturally occurring L-amino acids
TGNSQSXFTHHLPVNSQNXQPVRYNRRSNPDLEKRRIHYCDYPGCTKVYTKSSHLKAHLRTHTGEVISTRLFCFNLQKEGV

SEQ ID NO: 6170 - protein, 142 aa, Homo sapiens
VLPPLLIMLVIYIKIFLVACRQLQRTELMDHSRTTLQREIHAAKSLAMIVGIFALCWLPVHAVNCVTLFQPAQGKNKPKWAMNMAILLSHANSVVNPIVYAYRNRDFRYTFHKIISRYLLCQADVKSGNGQAGVQPALGVGL

SEQ ID NO: 6171 - protein, 69 aa, Homo sapiens
KSIEQKGMHAVFQWLRHAFYSLTSIHFFTTCIKTNDLCFCHRQKQVDTGGLALLINFFSIRFSLIMLNF

SEQ ID NO: 6172 - protein, 96 aa, Homo sapiens
FSKHNLIPNRFPLNGLRCVRTWARAGRTILIPLFPAYHLCSPFSSLPFNCLLCFVSYHCCWCLEPASSTWQTSRPCGQRLGLHIYISQMIWVDGDR

SEQ ID NO: 6173 - protein, 53 aa, Homo sapiens
ILCTRIPGRVFYPWKQVSDYFVFTVRVSSLEMLTLKSVFFSLYLKIVNILISS

SEQ ID NO: 6174 - protein, 105 aa, Homo sapiens
IRHEGAGPSQLRLHYPRISMAVRQWVIALALAALLVVDREVPVAAGKLPFSRMPICEHMVESPTCSQMSNLVCGTDGLTYTNECQLCLARIKTKQDIQIMKDGKC

SEQ ID NO: 6175 - protein, 69 aa, Homo sapiens
HRLDFLQLMIDSQNSKETESHKALSDLELAAQSIIFIFAGYETTSSVLSFTLYELATHPDVQQKLQKGD

SEQ ID NO: 6176 - protein, 79 aa, Homo sapiens
HRLDFLQLMIDSQNSKETESHKALSDLELAAQSIIFIFAGYETTSSVLSFTLYELATHPDVQQKLQKEIDAVLPNKVRG

SEQ ID NO: 6177 - protein, 119 aa, Homo sapiens
  MISC_FEATURE (1): Xaa equals any of the naturally occurring L-amino acids
  MISC_FEATURE (115): Xaa equals any of the naturally occurring L-amino acids
XEHPSTAPGKMSTEGGGRRCQAQVSRRISFSASHRLYSKFLSDEENLKLFGKCNNPNGHGHNYKVVVTVHGEIDPATGMVMNLADLKKYMEEAIMQPLDHKNLDMDVPYFADVVXLPGL

SEQ ID NO: 6178 - protein, 192 aa, Homo sapiens
PEQRGSSMAHGPGALMLKCVVVGDGAVGKTCLLMSYANDAFPESTCPPSSTTTQEDYDRLRPLSYPMTDVFLICFSVVNPASFQNVKEEWVPELKEYAPNVPFLLIGTQIDLRDDPKTLARLNDMKEKPICVEQGQKLAKEIGACCYVECSALTQKGLKTVFDEAIIAILTPKKHTVKKRIGSRCINCCLIT

SEQ ID NO: 6179 - protein, 51 aa, Homo sapiens
AKCRPVCSCVFFLWLPHLFHLQLDPPLQIENSGGGWGLKSREPPFCSTNFT

SEQ ID NO: 6180 - protein, 353 aa, Homo sapiens
RRRSVLPVTAAAAAAPDTCGGGGDPAAGAEMWPLVAALLLGSACCGSAQLLFNKTKSVEFTFCNDTVVIPCFVTNMEAQNTTEVYVKWKFKGRDIYTFDGALNKSTVPTDFSSAKIEVSQLLKGDASLKMDKSDAVSHTGNYTCEVTELTREGETIIELKYRVVSWFSPNENILIVIFPIFAILLFWGQFGIKTLKYRSGGMDEKTIALLVAGLVITVIVIVGAILFVPGEYSLKNATGLGLIVTSTGILILLHYYVFSTAIGLTSFVIAILVIQVIAYILAVVGLSLCIAACIPMHGPLLISGLSILALAQLLGLVYMKFVASNQKTIQPPRKAVEEPLNAFKESKGMMNDE

SEQ ID NO: 6181 - protein, 358 aa, Homo sapiens
REQKLELHRGGGRSRTSGSPGLQEFGTSGWALRISRFLPGFHSFAPCTVAPSLRAQPAKQRAPVAGVMQRARPTLWAAALTLLVLLRGPPVARAGASSAGLGPVVRCEPCDARALAQCAPPPAVCAELVREPGCGCCLTCALSEGQPCGIYTERCGSGLRCQPSPDEARPLQALLDGRGLCVNASAVSRLRAYLLPAPPAPGNASESEEDRSAGSVESPSVSSTHRVSDPKFHPLHSKIIIIKKGHAKDSQRYKVDYESQSTDTQNFSSESKRETEYGPCRREMEDTLNHLKFLNVLSPRGVHIPNCDKKGFYKKKQCRPSKGRKRGFCWCVDKYGQPLPGYTTKGKEDVHCYSMQSK

SEQ ID NO: 6182 - protein, 140 aa, Homo sapiens
  MISC_FEATURE (93): Xaa equals any of the naturally occurring L-amino acids
  MISC_FEATURE (101): Xaa equals any of the naturally occurring L-amino acids
  MISC_FEATURE (104): Xaa equals any of the naturally occurring L-amino acids
  MISC_FEATURE (126): Xaa equals any of the naturally occurring L-amino acids
  MISC_FEATURE (134): Xaa equals any of the naturally occurring L-amino acids
  MISC_FEATURE (136): Xaa equals any of the naturally occurring L-amino acids
  MISC_FEATURE (137): Xaa equals any of the naturally occurring L-amino acids
QRIPDPAREGSRTMESSSSSNSYFSVGPTSPSAVVLLYSKELKKWDEFEDILEERRHVSDLKFAMKCYTPLVYKGITPCKPIDIKCSVLNSEXIHYVIKQXSKXSLQSVGVPPRKLVGFRWNGSQXGFGPFGLXLXXASF

SEQ ID NO: 6183 - protein, 229 aa, Homo sapiens
  MISC_FEATURE (165): Xaa equals any of the naturally occurring L-amino acids
  MISC_FEATURE (170): Xaa equals any of the naturally occurring L-amino acids
VPGAEGGGTGLDVGRPAMKPPSSIQTSEFDSSDEEPIEDEQTPIHISWLSLSRVNCSQFLGLCALPGCKFKDVRRNVQKDTEELKSCGIQDIFVFCTRGELSKYRVPNLLDLYQQCGIITHHHPIADGGTPDIASCCEIMEELTTCLKNYRKTLIHCYGGLGRSXLVAAXLLLYLSDTISPEQAIDSLRDLRGSGAIQTIKQYNYLHEFRDKLAAHLSSRDSQSRSVSR

SEQ ID NO: 6184 - protein, 183 aa, Homo sapiens
SRLSLSRVNCSQFLGLCALPGCKFKDVRRNVQKDTEELKSCGIQDIFVFCTRGELSKYRVPNLLDLYQQCGIITHHHPIADGGTPDIASCCEIMEELTTCLKNYRKTLIHCYGGLGRSCLVAACLLLYLSDTISPEQAIDSLRDLRGSGAIQTIKQYNYLHEFRDKLAAHLSSRDSQSRSVSR

SEQ ID NO: 6185 - protein, 594 aa, Homo sapiens
  MISC_FEATURE (148): Xaa equals any of the naturally occurring L-amino acids
RRRAAVEEKRRQRLEEDKERHEAVVRRTMERSQKPKQKHNRWSWGGSLHGSPSIHSAARRLQLSPWESSVVNRLLTPTHSFLARSKSTAALSGEAASCSPIIMPYKAAHSRNSMDRPKLFVTPPEGSSRRRIIHGTASYKKERERENXLFLTSGTRRAVSPSNPKARQPARSRLWLPSKSLPHLPGTPRPTSSLPPGSVKAAPAQVRPPSPGNIRPVKREVKVEPEKKDPEKEPQKVANEPSLKGRAPLVKVEEATVEERTPAEPEVGPAAPAMAPAPASAPAPASAPAPAPVPTPAMVSAPSSTVNASASVKTSAGTTDPEEATRLLAEKRRLAREQREKEERERREQEELERQKREELAQRVAEERTTRREEESRRLEAEQAREKEEQLQRQAEERALREWEEAERAQRQKEEEARVREEAERVRQEREKHFQREEQERLERKKRLEEIMKRTRRTEATDKKTSDQRNGDIAKGALTGGTEVSALPCTTNAPGNGKPVGSPHVVTSHQSKVTVESTPDLEKQPNENGVSVQNENFEEIINLPIGSKPSRLDVTNSESPEIPLNPILAFDDEGTLGPLPQVDGVQTQQTAEVI

SEQ ID NO: 6186 - protein, 293 aa, Homo sapiens
  MISC_FEATURE (270): Xaa equals any of the naturally occurring L-amino acids
  MISC_FEATURE (280): Xaa equals any of the naturally occurring L-amino acids
NTCESNHGLGTTPPENGLSEHPCETEQINAKRKDTTSDKDDSLGSQQTNEQCAQKAEPTESCEQIAVQVNNGDAGREMPCPLPCDEESPEAELHNHGIQINSCSVRLVDIKKEKPFSNSKVECQAQARTHHNQASDIIVISSEDSEGSTDVDEPLEVFISAPRSEPVINNDNPLESNDEKEGQEATCSRPQIVPEPMDFRKLSTFRESFKKRVIGQDHDFSESSEEEAPAEASSGALRSKHGEKAPMTSRSTSTWRIPSRKRRFSSSDFXDLSNKCLYLXQKLHSLFILKDIT

SEQ ID NO: 6187 - protein, 720 aa, Homo sapiens
  MISC_FEATURE (693): Xaa equals any of the naturally occurring L-amino acids
DTGPTGIKYDLDRHQYNYVDAVCYENRLHWFAKYFPYLVLLHTLIFLACSNFWFKFPRTSSKLEHFVSILLKCFDSPWTTRALSETVVEESDPKPAFSKMNGSMDKKSSTVSEDVEATVPMLQRTKSRIEQGIVDRSETGVLDKKEGEQAKALFEKVKKFRTHVEEGDIVYRLYMRQTIIKVIKFILIICYTVYYVHNIKFDVDCTVDIESLTGYRTYRCAHPLATLFKILASFYISLVIFYGLICMYTLWWMLRRSLKKYSFESIREESSYSDIPDVKNDFAFMLHLIDQYDPLYSKRFAVFLSEVSENKLRQLNLNNEWTLDKLRQRLTKNAQDKLELHLFMLSGIPDTVFDLVELEVLKLELIPDVTIPPSIAQLTGLKELWLYHTAAKIEAPALAFLRENLRALHIKFTDIKEIPLWIYSLKTLEELHLTGNLSAENNRYIVIDGLRELKRLKVLRLKSNLSKLPQVVTDVGVHLQKLSINNEGTKLIVLNSLKKMANLTELELIRCDLERIPHSIFSLHNLQEIDLKDNNLKTIEEIISFQHLHRLTCLKLWYNHIAYIPIQIGNLTNLERLYLNRNKIEKIPTQLFYCRKLRYLDLSHNNLTFLPADIGLLQNLQNLAITANRIETLPPELFQCRKLRALHLGNNVLQSLPSRVGELTNLTQIELRGNRLECLPVELGECPLLKRSXLVVEEDLFNTLPPEVKERLWRADKEQA

SEQ ID NO: 6188 - protein, 27 aa, Homo sapiens
VSGDYGHPVYIVQDGPPQSPPNIYYKV

SEQ ID NO: 6189 - protein, 154 aa, Homo sapiens
DLCRLSCGRKMPKVKRSRKAPPDGWELIEPTLDELDQKMREAETEPHEGKRKVESLWPIFRIHHQKTRYIFDLFYKRKAISRELYEYCIKEGYADKNLIAKWKKQGYENLCCLRCIQTRDTNFGTNCICRVPKSKLEVGRIIECTHCGCRGCSG

SEQ ID NO: 6190 - protein, 442 aa, Homo sapiens
  MISC_FEATURE (22): Xaa equals any of the naturally occurring L-amino acids
LEQELGDGWGHSDLHKALLCRXPPLPEPDAMSSKGSVVLAYSGGLDTSCILVWLKEQGYDVIAYLANIGQKEDFEEARKKALKLGAKKVFIEDVSREFVEEFIWPAIQSSALYEDRYLLGTSLARPCIARKQVEIAQREGAKYVSHGATGKGNDQVRFELSCYSLAPQIKVIAPWRMPEFYNRFKGRNDLMEYAKQHGIPIPVTPKNPWSMDENLMHISYEAGILENPKNQAPPGLYTKTQDPAKAPNTPDILEIEFKKGVPVKVTNVKDGTTHQTSLELFMYLNEVAGKHGVGRIDIVENRFIGMKSRGIYETPAGTILYHAHLDIEAFTMDREVRKIKQGLGLKFAELVYTGFWHSPECEFVRHCIAKSQERVEGKVQVSVLKGQVYILGRESPLSLYNEELVSMNVQGDYEPTDATGFININSLRLKEYHRLQSKVTAK

SEQ ID NO: 6191 - protein, 155 aa, Homo sapiens
DSYFDRICSHSSCKLQMYKLHLYFYRVVMFYMCMVQEKIGSNQSAVDVPKCKHRHTHAHTHKHTHSALRKGQVISHPNFTSTDPLAPTPASTVTSKARATCAHQTCIKQLAGDGCGAGGLSDGSLLLPLLRVKLLSFLRVYLCQVCAFNCFYFVF

SEQ ID NO: 6192 - protein, 401 aa, Homo sapiens
  MISC_FEATURE (309): Xaa equals any of the naturally occurring L-amino acids
  MISC_FEATURE (311): Xaa equals any of the naturally occurring L-amino acids
  MISC_FEATURE (377): Xaa equals any of the naturally occurring L-amino acids
NIKKRDEELTEKMKKAEEEYKLEKEEEISNLKAAFEKNINTERTLKTQAVNKLAEIMNRKDFKIDRKKANTQDLRKKEKENRKLQLELNQEREKFNQMVVKHQKELNDMQAQLVEECAHRNELQMQLASKESDIEQLRAKLLDLSDSTSVASFPSADETDGNLPESRIEGWLSVPNRGNIKRYGWKKQYVVVSSKKILFYNDEQDKEQSNPSMVLDIDKLFHVRPVTQGDVYRAETEEIPKIFQILYANEGECRKDVEMEPVQQAEKTNFQNHKGHEFIPTLYHFPANCDACAKPLWHVFKPPPALECXRXHVKCHRDHLDKKEDLICPCKVSYDVTSARDMLLLACSQDEQKKWVTHLVKKIPKNPPSGFVRASPXTLSTRSTANQSFRKVVKNTSGKTS

SEQ ID NO: 6193 - protein, 337 aa, Homo sapiens
QSRSDSRVDPRVRGPPGPVGPSGKEGNPGPLGPIGPPGVRGSVGEAGPEGPPGEPGPPGPPGPPGHLTAALGDIMGHYDESMPDPLPEFTEDQAAPDDKNKTDPGVHATLKSLSSQIETMRSPDGSKKHPARTCDDLKLCHSAKQSGEYWIDPNQGSVEDAIKVYCNMETGETCISANPSSVPRKTWWASKSPDNKPVWYGLDMNRGSQFAYGDHQSPNTAITQMTFLRLLSKEASQNITYICKNSVGYMDDQAKNLKKAVVLKGANDLDIKAEGNIRFRYIVLQDTCSKRNGNVGKTVFEYRTQNVARLPIIDLAPVDVGGTDQEFGVEIGPVCFV

SEQ ID NO: 6194 - protein, 104 aa, Homo sapiens
LHCFYSGLGFRKTGTVLSVHRNTCQCQGFQSGVYPNWSGREGQTHSQRPPCPRSDSSPLAAPTGALGWSGSWGSVPLIAGLCSPGFGIYVGTTPGLLSKGLWLL

SEQ ID NO: 6195 - protein, 74 aa, Homo sapiens
GLTWAFRYRPAGIIVMALLGMFNVHRHGAINSAAILLYALTCCISGYVSSHFYRQIGGERWVWEHHSHHQSLLW

SEQ ID NO: 6196 - protein, 134 aa, Homo sapiens
TLLEALTVAVVVTFYDVYIILQAFILTTTVFFGLTVYTLQSKKDFSKFGAGLFALLWILCLSGFLKFFFYSEIMELVLAAAGALLFCGFIIYDTHSLMHKLSPEEYVLAAISLYLDIINLFLHLLRFLEAVNKK

SEQ ID NO: 6197 - protein, 220 aa, Homo sapiens
  MISC_FEATURE (4): Xaa equals any of the naturally occurring L-amino acids
DYAXTPQGLCYDVACTRKLGPLEGSSRAAAAAFGESAGQMSNERGFENVELGVIGKKKKVPRRVIHFVSGETMEEYSTDEDEVDGLEKKDVLPTVDPTKLTWGPYLWFYMLRAATSTLSVCDFLGEKIASVLGISTPKYQYAIDEYYRMKKEEEEEEEENRMSEEAEKQYQQNKLQTDSIVQTDQPETVISSSFVNVNFEMEGDSEVIMESKQNPVSVPP

SEQ ID NO: 6198 - protein, 103 aa, Homo sapiens
  MISC_FEATURE (5): Xaa equals any of the naturally occurring L-amino acids
  MISC_FEATURE (6): Xaa equals any of the naturally occurring L-amino acids
  MISC_FEATURE (36): Xaa equals any of the naturally occurring L-amino acids
  MISC_FEATURE (39): Xaa equals any of the naturally occurring L-amino acids
  MISC_FEATURE (65): Xaa equals any of the naturally occurring L-amino acids
  MISC_FEATURE (100): Xaa equals any of the naturally occurring L-amino acids
  MISC_FEATURE (101): Xaa equals any of the naturally occurring L-amino acids
  MISC_FEATURE (103): Xaa equals any of the naturally occurring L-amino acids
ERCGXXREAQEGDLQGQEGAEASHAGGPAADHYSGXAHXGRGRALDRGVCVRGHAPHHHRVSPAXGRGPHRQGEECSGGGRKQKMAFIFRDVHVAELLSXXHX

SEQ ID NO: 6199 - protein, 166 aa, Homo sapiens
  MISC_FEATURE (7): Xaa equals any of the naturally occurring L-amino acids
KFWLQKXHFLCANKNVCIKYDVPPTWTHSVPHKAKPTAAATSLGLRCSRCFFQDRNQNVRNTAERGHLETKRRMRSSAEVTGKSQNSNTLAGAWGVKNRRREEAFPSLQRRNQGQPKLPGSQNQFFYQAVPLLSFQLLATGRCCSKGFALRLQEEAAGRTAGVLGF

SEQ ID NO: 6200 - protein, 90 aa, Homo sapiens
  MISC_FEATURE (20): Xaa equals any of the naturally occurring L-amino acids
  MISC_FEATURE (21): Xaa equals any of the naturally occurring L-amino acids
SLQVEKPLYPFNPLWPSFPXXVDATRETNRLGRLINHSKCGNCQTKLHDIDGVPHLILIASRDIAAGEELLYDYGDRSKASIEAHPWLKH

SEQ ID NO: 6201 - protein, 162 aa, Homo sapiens
YKMTEPGASPEDPWVKVEYAYSDNSLDPGLFVESTRKGSVVSRANSIGSTSASSVPNTDDEDSDYHQEAYKESYKDRRRRAHTQAEQKRRDAIKRGYDDLQTIVPTCQQQDFSIGSQKLSKAIVLQKTIDYIQFLHKEKKKQEEEVSRYARMYRPKDHESEL

SEQ ID NO: 6202 - protein, 350 aa, Homo sapiens
  MISC_FEATURE (126): Xaa equals any of the naturally occurring L-amino acids
  MISC_FEATURE (135): Xaa equals any of the naturally occurring L-amino acids
  MISC_FEATURE (141): Xaa equals any of the naturally occurring L-amino acids
  MISC_FEATURE (143): Xaa equals any of the naturally occurring L-amino acids
  MISC_FEATURE (145): Xaa equals any of the naturally occurring L-amino acids
  MISC_FEATURE (148): Xaa equals any of the naturally occurring L-amino acids
  MISC_FEATURE (150): Xaa equals any of the naturally occurring L-amino acids
GTSGCWLLLVLVLVLLVSPRGCRARRGLRGLLMAHSQRLLFRIGYSLYTRTWLGYLFYRQQLRRARNRYPKGHSKTQPRLFNGVKVLPIPVLSDNYSYLIIDTQAQLAVAVDPSDPRAVQASIEKXGVTLVAILXTHKHWXHXGXNRXLXRGHRDCRVYGSPQDGIPYLTHPLCHQDVVSVGRLQIRALATPGHTQGHLVYLLDGEPYKGPSCLFSGDLLFLSGCGRTFEGNAETMLSSLDTVLGLGDDTLLWPGHEYAEENLGFAGVVEPENLARERKMQWVQRQRLERKGTCPSTLGEERSYNPFLRTHCLALQEALGPGPGPTGDDDYSRAQLLEELRRLKDMHKSK

SEQ ID NO: 6203 - protein, 200 aa, Homo sapiens
  MISC_FEATURE (16): Xaa equals any of the naturally occurring L-amino acids
  MISC_FEATURE (19): Xaa equals any of the naturally occurring L-amino acids
ISYSRWKTLHTVLPQXIRXLLFCLLQKDPCPVAERGNDKDFTLNDFGFMIFHSPYCKLVQKSLARMLLNDFLNDQNRDKNSIYSGLEAFGDVKLEDTYFDRDVEKAFMKASSELFSQKTKASLLVSNQNGNMYTSSVYGSLASVLAQYSPQQLAGKRIGVFSYGSGLAATLYSLKVTQDATPGSALDKITASLCDLKSKA

SEQ ID NO: 6204 - protein, 113 aa, Homo sapiens
EELRESAAAGSADAMDNVQPKIKHRPFCFSVKGHVKMLRLDIINSLVTTVFMLIVSVLALIPETTTLTVGGGVFALVTAVCCLADGALIYRKLLFNPSGPYQKKPVHEKKEVL

SEQ ID NO: 6205 - protein, 480 aa, Homo sapiens
  MISC_FEATURE (196): Xaa equals any of the naturally occurring L-amino acids
  MISC_FEATURE (392): Xaa equals any of the naturally occurring L-amino acids
SDKWPTAVRANGHLLLNSEKMSKSTGNFLTLTQAIDKFSADGMRLALADAGDTVEDANFVEAMADAGILRLYTWVEWVKEMVANWDSLRSGPASTFNDRVFASELNAGIIKTDQNYEKMMFKEALKTGFFEFQAAKDKYRELAVEGMHRELVFRFIEVQTLLLAPFCPHLCEHIWTLLGKPDSIMNASWPVAGPVXEVLIHSSQYLMEVTHDLRLRLKNYMMPAKGKKTDKQPLQKPSHCTIYVAKNYPPWQHTTLSVLRKHFEANNGKLPDNKVIASELGSMPELKKYMKKVMPFVAMIKENLEKMGPRILDLQLEFDEKAVLMENIVYLTNSLELEHIEVKFASEAEDKIREDCCPGKPLNVFRIEPGVSVSLVNPQPSNGHFSTKIEIXQGDNCDSIIRRLMKMNRGIKDLSKVKLMRFDDPLLGPRRVPVLGKEYTEKTPISEHAVFNVDLMSKKIHLTENGIRVDIGDTIIYLVH

SEQ ID NO: 6206 - protein, 110 aa, Homo sapiens
MKTRTISFARIPNLARPAAPSLRPDDVFIAVKTTRKNHGPRLRLLLRTWISRARQQTFIFTDGDDPELELQGGDRVINTNCSAVRTRQALCCKMSVEYDKFIESGRKWFC

SEQ ID NO: 6207 - protein, 74 aa, Homo sapiens
WLNAAKMRIKGMKWFNTLSHNRWLEQETDRIFDFGKNSVVPTGFGWLGNKGQIKEEMGTHLWITARMLHVYSVA

SEQ ID NO: 6208 - protein, 251 aa, Homo sapiens
  MISC_FEATURE (60): Xaa equals any of the naturally occurring L-amino acids
LLPAGRKARLSEAPGGKKSLSMLHYIRGAAPKDIPVPLSHSTNGKSKPWEPFVAEEFAHXFHESVLQSTQKALQKHKGSVAVLSAEQNHKVDTSVHYNIPELQSSSRAPPPQHNGQQEPPTARKGPPTQELDRDSEEEEEEDDEDGEDEEEVPKRKWQGIEAVFEAYQEHIEEQNLERQVLQTQCRRLEARHYSLSLTAEQLSHSVAELRSQKQKMVSERERLQAELDHLRKCLALPAMHWPRGYLKGYPR

SEQ ID NO: 6209 - protein, 115 aa, Homo sapiens
ERVSVGGLVGEVACACRDCIPETMAEGDNRSTNLLAAETASLEEKPKMYFMTMIVSLAAVAWVGQQVHNLLLTYLIVTSLLLLPGLNQHGIILKYIGMAKREINKLLKQKEKKNE

SEQ ID NO: 6210 - protein, 63 aa, Homo sapiens
LFVSFIFTLKQELSYLIIKVSYVLSARTFLAFVRMCLHMSIINPHVYTIVSYVLLPDSSLCIL

SEQ ID NO: 6211 - protein, 141 aa, Homo sapiens
  MISC_FEATURE (107): Xaa equals any of the naturally occurring L-amino acids
PLPSQGARWWLWHSCRVVFFSLRWSLTLVTPAGMWWCKQLTAALTLRLKRSFCLGLLSSWDPRRESPHPVHVPAGLDMRGRCVFPATFSSSFLRQTLAPSPRPECGXANTAHCSLDPQAQAILTPRTPKVLGSQARVTMLA

SEQ ID NO: 6212 - protein, 231 aa, Homo sapiens
IAGTATARWWPSWWCSNVRHLGLKSEEICWTNSETFAAWCALASGSSRREGRCRQARSPRSSSTISRCTWERTRSTPPGFTAWKTSSARSAVSTPAAACECSRSSPTSWTTRSSRLGAAGPSASPAPRSLPFPAPGLRSQRFSTSAPPRHARPPPVARARAAPPHPQASGRKSQELPQGRKGAAASAWLTATAVVTVLGDPACAFPLRCKPGTGKGLRGERTWPSPRVHGQ

SEQ ID NO: 6213 - protein, 191 aa, Homo sapiens
  MISC_FEATURE (171): Xaa equals any of the naturally occurring L-amino acids
  MISC_FEATURE (172): Xaa equals any of the naturally occurring L-amino acids
  MISC_FEATURE (178): Xaa equals any of the naturally occurring L-amino acids
  MISC_FEATURE (188): Xaa equals any of the naturally occurring L-amino acids
  MISC_FEATURE (189): Xaa equals any of the naturally occurring L-amino acids
GDPTCRQNLRCGTPGTVAAAGDCGLFSAMHPLQCVLQVQRSLGWGPLASVSWLSLRMCRAHSSLSSTMCPSPERQEDGARKDFSSRLAAGPTFQHFLKSASAPQEKLSSEVEDPPPYLMMDELLGRQRKVYLETYGCQMNVNDTEIAWSILQKSGYLRTSNLQEADVILLXXALSGRXLSRPSGTVTXXKA

SEQ ID NO: 6214 - protein, 408 aa, Homo sapiens
KIMAHYGSIQYCFHTCTLETKFPIIPYIPTLITQLTQKLLAVSKNPSKPHFNHYMFEAICLSIRITCKANPAAVVNFEEALFLVFTEILQNDVQEFIPYVFQVMSLLLETHKNDIPSSYMALFPHLLQPVLWERTGNIPALVRLLQAFLERGSNTIASAAADKIPGLLGVFQKLIASKANDHQGFYLLNSIIEHMPPESVDQYRKQIFILLFQRLQNSKTTKFIKSFLVFINLYCIKYGALALQEIFDGIQPKMFGMVLEKIIIPEIQKVSGNVEKKICAVGITKLLTECPPMMDTEYTKLWTPLLQSLIGLFELPEDDTIPDEEHFIDIEDTPGYQTAFSQLAFAGKKEHDPVGQMVNNPKIHLAQSLHKLSTACPGRVPSMVSTSLNAEALQYLQGYLQAASVTLL

SEQ ID NO: 6215 - protein, 139 aa, Homo sapiens
  MISC_FEATURE (94): Xaa equals any of the naturally occurring L-amino acids
  MISC_FEATURE (106): Xaa equals any of the naturally occurring L-amino acids
  MISC_FEATURE (113): Xaa equals any of the naturally occurring L-amino acids
AAASRRPCAQRSRTSPAAASCRSAFGVRRAQPASELRGPGRVARMAWAGSRRVPAGTRAAAERCCRLSLSPGAQPARPRPSAPPRPMRFLTSCXLLLPRAAQILAXEAGLPSXRSFMGFAAPFTNKRKAYSERRIMGYS

SEQ ID NO: 6216 - protein, 275 aa, Homo sapiens
GGASNFLSWRESARWSRQLRRTLIRLSFPISCGRSHAFGGCKMAATSGTDEPVSGELVSVAHALSLPAESYGNDPDIEMAWAMRAMQHAEVYYKLISSVDPQFLKLTKVDDQIYSEFRKNFETLRIDVLDPEELKSESAKEKWRPFCLKFNGIVEDFNYGTLLRLDCSQGYTEENTIFAPRIQFFAIEIARNREGYNKAVYISVQDKEGEKGVNNGGEKRADSGEEENTKNGGEKGADSGEEKEEGINREDKTDKGGEKGKEADKEINKSGEKAM

SEQ ID NO: 6217 - protein, 87 aa, Homo sapiens
  MISC_FEATURE (4): Xaa equals any of the naturally occurring L-amino acids
  MISC_FEATURE (12): Xaa equals any of the naturally occurring L-amino acids
  MISC_FEATURE (18): Xaa equals any of the naturally occurring L-amino acids
  MISC_FEATURE (21): Xaa equals any of the naturally occurring L-amino acids
  MISC_FEATURE (50): Xaa equals any of the naturally occurring L-amino acids
  MISC_FEATURE (56): Xaa equals any of the naturally occurring L-amino acids
KMLXEIKIISLXVRLNTXNLXPNITYGSNYFLFCCLPILNNIFSLNYCKXFFVGGXFYLLQNNKVQTILCLTVALSKHYAWIAFEKK

SEQ ID NO: 6218 - protein, 119 aa, Homo sapiens
PFPSLPSSCCQGLQVCHRPGPSLKHGIISELEVAASEKNPSRVLTAEIQELGNQPPVCRLLSLEILWPNLVAVFWNSFYRGRQCCAFLDFRMFQGCCWICVCVCVCVCVCVCVRACMCA

SEQ ID NO: 6219 - protein, 180 aa, Homo sapiens
RNMSSFSRAPQQWATFARIWYLLDGKMQPPGKLAAMASIRLQGLHKPVYHALSDCGDHVVIMNTRHIAFSGNKWEQKVYSSHTGYPGGFRQVTAAQLHLRDPVAIVKLAIYGMLPKNLHRRTMMERLHLFPDEYIPEDILKNLVEELPQPRKIPKRLDEYTQEEIDAFPRLWTPPEDYRL

SEQ ID NO: 6220 - protein, 86 aa, Homo sapiens
AELGANGSIAVISGRRVSIQVSDSSARLPWVWEEALPFCAVDPACLLWSPPTLARSFTNQRRAVSKSSDRMWCKCRCTSLTLSCRS

SEQ ID NO: 6221 - protein, 42 aa, Homo sapiens
ILSDVWSLSIQTVNIVLVFVLILILLLYSLRCAMQTLSNCVW

SEQ ID NO: 6222 - protein, 269 aa, Homo sapiens
RDLSEPVAGLFYFPSLSPAPYLFSPFSHPRSRSHGGASAATQSHSISSSSFGAEPSAPGGGGSPGACPALGTKSCSSSCAVHDLIFWRDVKKTGFVFGTTLIMLLSLAAFSVISVVSYLILALLSVTISFRIYKSVIQAVQKSEEGHPFKAYLDVDITLSSEAFHNYMNAAMVHINRALKLIIRLFLVEDLVDSLKLAVFMWLMTYVGAVFNGITLLILAELLIFSVPIVYEKYKTQIDHYVGIARDQTKSIVEKIQAKLPGIAKKKAE

SEQ ID NO: 6223 - protein, 206 aa, Homo sapiens
PAGDNGNMALNGAEVDDFSWEPPTEAETKVLQARRERQDRISRLMGDYLLRGYRMLGETCADCGTILLQDKQRKIYCVACQELDSDVDKDNPALNAQAALSQAREHQLASASELPLGSRPAPQPPVPRPEHCEGAAAGLKAAQGPPAPAVPPNTDVMACTQTALLQKLTWASAELGSSTSLETSIQLCGLIRACAEALRSLQQLQH

SEQ ID NO: 6224 - protein, 583 aa, Homo sapiens
  MISC_FEATURE (397): Xaa equals any of the naturally occurring L-amino acids
AAPAWAALPLSRSLPPCSNSSSFSMPLFLLLLLVLLLLLEDAGAQQGDGCGHTVLGPESGTLTSINYPQTYPNSTVCEWEIRVKMGERVRIKFGDFDIEDSDSCHFNYLRIYNGIGVSRTEIGKYCGLGLQMNHSIESKGNEITLLFMSGIHVSGRGFLASYSVIDKQDLITCLDTASNFLEPEFSKYCPAGCLLPFAEISGTIPHGYRDSSPLCMAGVHAGVVSNTLGGQISVVISKGIPYYESSLANNVTSVVGHLSTSLFTFKTSGCYGTLGMESGVIADPQITASSVLEWTDHTGQENSWKPKKARLKKPGPPWAAFATDEYQWLQIDLNKEKKITGIITTGITMVEHNYYVSAYRILYSDDGQKWTVYREPGVEQDKIFQGNKDYHQDVRNXFLPPIIARFIRVNPTQWQQKIAMKMELLGCQFIPKGRPPKLTQPPPPRNSNDLKNTTAPPKIAKGRAPKFTQPLQPRSSNEFPAQTEQTTASPDIRNTTVTPNVTKDVALAAVLVPVLVMVLTTLILILVCAWHWRNRKKKTEGTYDLPYWDRAGNSRGLCISFLSEGCRSPTGGSSEKRVILWPR

SEQ ID NO: 6225 - protein, 167 aa, Homo sapiens
  MISC_FEATURE (12): Xaa equals any of the naturally occurring L-amino acids
  MISC_FEATURE (17): Xaa equals any of the naturally occurring L-amino acids
  MISC_FEATURE (143): Xaa equals any of the naturally occurring L-amino acids
  MISC_FEATURE (158): Xaa equals any of the naturally occurring L-amino acids
  MISC_FEATURE (163): Xaa equals any of the naturally occurring L-amino acids
PSRGHTWAYSGXAEPAXARLRASLTLSREAQKFALAREVVYLESSTTAVHALLAPACLAGTWALGVGAKYTLGLHAGPMNLRAAFSLVAAVAGFVAYAFSQDSLTHAVESWLDRRTASLSAAYACGGVEFYEKLLSGNLALRXLFGQKKGEKLYTPNXEHRPXDTCS

SEQ ID NO: 6226 - protein, 63 aa, Homo sapiens
QGLPSMKYLTFSHPLKNIHFYKMKTIINVLNIKKNNNLQRKINGDSYLPCTFSTIVAASCTHL

SEQ ID NO: 6227 - protein, 521 aa, Homo sapiens
  MISC_FEATURE (84): Xaa equals any of the naturally occurring L-amino acids
  MISC_FEATURE (93): Xaa equals any of the naturally occurring L-amino acids
  MISC_FEATURE (94): Xaa equals any of the naturally occurring L-amino acids
ADYLLSRMDVTSCISYRNFASCMGDSRLLNKVDAYIQEHLLQISEEEEFLKLPRLKLEVMLEDNVCLPSNGKLYTKVINWVQRXIWENGDSLXXLMEEVQTLYYSADHKLLDGNLLDGQAEVFGSDDDHIQFVQKKPPRENGHKQISSSSTGCLSSPNATVQSPKHEWKIVASEKTSNNTYLCLAVLDGIFCVIFLHGRNSPQSSPTSTPKLSKSLSFEMQQDELIEKPMSPMQYARSGLGTAEMNGKLIAAGGYNREECLRTVECYNPHTDHWSFLAPMRTPRARFQMAVLMGQLYVVGGSNGHSDDLSCGEMYDSNIDDWIPVPELRTNRCNAGVCALNGKLYIVGGSDPYGQKGLKNCDVFDPVTKLWTSCAPLNIRRHQSAVCELGGYLYIIGGAESWNCLNTVERYNPENNTWTLIAPMNVARRGAGVAVLNGKLFVCGGFDGSHAISCVEMYDPTRNEWKMMGNMTSPRSNAGIATVGNTIYAVGGFDGNEFLNTVEVYNLESNEWSPYTKIFQF

SEQ ID NO: 6228 - protein, 425 aa, Homo sapiens
  MISC_FEATURE (14): Xaa equals any of the naturally occurring L-amino acids
  MISC_FEATURE (16): Xaa equals any of the naturally occurring L-amino acids
GVWSLMLLGDMRLXFXQVEDELSSPVVVFRFFQELPGSDPVFKAVPVPNMTPSGVGRERHSCDALNRWLGEQLKQLVPASGLTVMDLEAEGTCLRFSPLMTAAVLGTRGEDVDQLVACIESKLPVLCCTLQLREEFKQEVEATAGLLYVDDPNWSGIGVVRYEHANDDKSSLKSDPEGENIHAGLLKKLNELESDLTFKIGPEYKSMKSCLYVGMASDNVDAAELVETIAATAREIEENSRLLENMTEVVRKGIQEAQVELQKASEERLLEEGVLRQIPVVGSVLNWFSPVQALQKGRTFNLTAGSLESTEPIYVYKAQGAGVTLPPTPSGSRTKQRLPGQKPFKRSLRGSDALSETSSVSHIEDLEKVERLSSGPEQITLEASSTEGHPGAPSPQHTDQTEAFQKGVPHPEDDHSQVEGPESLR

SEQ ID NO: 6229 - protein, 130 aa, Homo sapiens
  MISC_FEATURE (22): Xaa equals any of the naturally occurring L-amino acids
  MISC_FEATURE (45): Xaa equals any of the naturally occurring L-amino acids
  MISC_FEATURE (54): Xaa equals any of the naturally occurring L-amino acids
  MISC_FEATURE (60): Xaa equals any of the naturally occurring L-amino acids
  MISC_FEATURE (77): Xaa equals any of the naturally occurring L-amino acids
SKEAALQWHSWVWCTTPQEHLXFCLINAGVLYLYFSNYLQIDEEXYGGTWELTXEGFMTXFALFRSLDHLLHCHPLXLMVYSSQCSLSSPKDPLGLQHRNLDRWGTQPLGNLEDPCFRDRESVCWGISVF

SEQ ID NO: 6230 - protein, 150 aa, Homo sapiens
TPTPFGSARAPQARPGRRDGRMSGGRRKEEPPQPQLANGALKVSVWSKVLRSDAAWEDKDEFLDVIYWFRQIIAVVLGVIWGVLPLRGFLGIAGFCLINAGVLYLYFSNYLQIDEEEYGGTWELTKEGFMTSFALFMVIWIIFYTAIHYD

SEQ ID NO: 6231 - protein, 782 aa, Homo sapiens
WSAAAAAAAAAQSRWWSRRGGSRSTMPALPLDQLQITHKDPKTGKLRTSPALHPEQKADRYFVLYKPPPKDNIPALVEEYLERATFVANDLDWLLALPHDKFWCQVIFDETLQKCLDSYLRYVPRKFDEGVASAPEVVDMQKRLHRSVFLTFLRMSTHKESKDHFISPSAFGEILYNNFLFDIPKILDLCVLFGKGNSPLLQKMIGNIFTQQPSYYSDLDETLPTILQVFSNILQHCGLQGDGANTTPQKLEERGRLTPSDMPLLELKDIVLYLCDTCTTLWAFLDIFPLACQTFQKHDFCYRLASFYEAAIPEMESAIKKRRLEDSKLLGDLWQRLSHSRKKLMEIFHIILNQICLLPILESSCDNIQGFIEEFLQIFSSLLQEKRFLRDYDALFPVAEDISLLQQASSVLDETRTAYILQAVESAWEGVDRRKATDAKDPSVIEEPNGEPNGVTVTAEAVSQASSHPENSEEEECMGAAAAVGPAMCGVELDSLISQVKDLLPDLGEGFILACLEYYHYDPEQVINNILEERLAPTLSQLDRNLDREMKPDPTPLLTSRHNVFQNDEFDVFSRDSVDLSRVHKGKSTRKEENTRSLLNDKRAVAAQRQRYEQYSVVVEEVPLQPGESLPYHSVYYEDEYDDTYDGNQVGANDADSDDELISRRPFTIPQVLRTKVPREGQEEDDDDEEDDADEEAPKPDHFVQDPAVLREKAEARRMAFLAKKGYRHDSSTAVAGSPRGHGQSRETTQERRKKEANKATRANHNRRTMADRKRSKGMIPS

SEQ ID NO: 6232 - protein, 345 aa, Homo sapiens
IRHEPGSTQSKTLMAAVFLVTLYEYSPLFYIAVVFTCFIVTTGLVLGWFGWDVPVILRNSEETQFSTRVFKKQMRQVKNPFGLEITNPSSASITTGITLTTDCLEDSLLTCYWGCSVQKLYEALQKHVYCFRISTPQALEDALYSEYLYQEQYFIKKDSKEEIYCQLPRDTKIEDFGTVPRSRYPLVALLTLADEDDREIYDIISMVSVIHIPDRTYKLSCRILYQYLLLAQGQFHDLKQLFMSANNNFTPSNNSSSEEKNTDRSLLEKVGLSESEVEPSEENSKDCVVCQNGTVNWVLLPCRHTCLCDGCVKYFQQCPMCRQFVQESFALCSQKEQDKDKPKTL

SEQ ID NO: 6233 - protein, 133 aa, Homo sapiens
RSPTETLFCKEPTSRAAAAREESTCSSRLTVRLSSALAGEGPQASPTATERASLQGNHIRHACAHSRLKTASKMSMKPLSSRAVSFNTSEYYLWLKGCMCIGVCVCVCVCVFGLVWRMKKGFHLGICKYSMAS

SEQ ID NO: 6234 - protein, 109 aa, Homo sapiens
  MISC_FEATURE (108): Xaa equals any of the naturally occurring L-amino acids
GTAEELKRNAETGNLPHSYRLISVVSHIGSTSSSGHYISDVYDIKKQAWFTYNDLEVSKIQEAAVQSDRDRSGYIFFYMHKEIFDELLETEKNSQSLSTEVGKTTRQXS

SEQ ID NO: 6235 - protein, 219 aa, Homo sapiens
PGAAWSRPDLRGCCTGPQPALRMLVLPSPCPQPLAFSSVETMEGPPRRTCRSPEPGPSSSIGSPQASSPPRPNHYLLIDTQGVPYTVLVDEESQREPGASGAPGQKKCYSCPVCSRVFEYMSYLQRHSITHSEVKPFECDICGKAFKRASHLARHHSIHLAGGGRPHGCPLCPRRFRDAGELAQHSRVHSGERPFQCPHCPRRFMEQNTLQKHTRWKHP

SEQ ID NO: 6236 - protein, 163 aa, Homo sapiens
VYLFIYFRNKSLGDKSETLSPKKKKKKKKNWIAWLYSGHSMQAQFCCSAVCSAFLHILASPSGAKMAAAFQASHPDSDPEKLPIPTWVSLCRNEKPHPAAETSPSSVFSGLIHQRRPPLNQSLAKRMGPPGRLDQTGPALWGWGEAQMKAAGQDGLLDLCYQQ

SEQ ID NO: 6237 - protein, 185 aa, Homo sapiens
  MISC_FEATURE (90): Xaa equals any of the naturally occurring L-amino acids
  MISC_FEATURE (94): Xaa equals any of the naturally occurring L-amino acids
  MISC_FEATURE (142): Xaa equals any of the naturally occurring L-amino acids
  MISC_FEATURE (143): Xaa equals any of the naturally occurring L-amino acids
  MISC_FEATURE (155): Xaa equals any of the naturally occurring L-amino acids
  MISC_FEATURE (168): Xaa equals any of the naturally occurring L-amino acids
  MISC_FEATURE (178): Xaa equals any of the naturally occurring L-amino acids
HRRKGKDRVRQGAWGGAMVPMHLLGRLEKPLLLLCCASFLLGLALLGIKTDITPVAYFFLTLGGFFLFAYLLVRFLEWGLRSQLQSMQTXSPGXSGNARDNEAFEVPVYEEAVVGLESQCRPKSWTNHPPTATGGDTPSTLXXEQPSPFQKGSRXKPKLGTEAEWALXGGPMGPRKGXPWEELPN

SEQ ID NO: 6238 - protein, 58 aa, Homo sapiens
  MISC_FEATURE (13): Xaa equals any of the naturally occurring L-amino acids
  MISC_FEATURE (38): Xaa equals any of the naturally occurring L-amino acids
  MISC_FEATURE (41): Xaa equals any of the naturally occurring L-amino acids
  MISC_FEATURE (52): Xaa equals any of the naturally occurring L-amino acids
  MISC_FEATURE (57): Xaa equals any of the naturally occurring L-amino acids
VLLSQLQRAGARXPSGLPGAPGTALHHPPREGDSEAQXGPXPTEPTPPYSSXLKNIXG

SEQ ID NO: 6239 - protein, 231 aa, Homo sapiens
  MISC_FEATURE (20): Xaa equals any of the naturally occurring L-amino acids
  MISC_FEATURE (24): Xaa equals any of the naturally occurring L-amino acids
  MISC_FEATURE (27): Xaa equals any of the naturally occurring L-amino acids
  MISC_FEATURE (55): Xaa equals any of the naturally occurring L-amino acids
  MISC_FEATURE (172): Xaa equals any of the naturally occurring L-amino acids
  MISC_FEATURE (179): Xaa equals any of the naturally occurring L-amino acids
  MISC_FEATURE (216): Xaa equals any of the naturally occurring L-amino acids
  MISC_FEATURE (218): Xaa equals any of the naturally occurring L-amino acids
MSYCDESRLSNLLRRITREXDRDXRLXTVKQLKEFIQQPENKLVLVKQLDILAAXHDVLNESSKLLQELRQEGACCLGLLCASLSYEAEKIFKWIFSKFSSSAKDEVKLLYLCATYKALETVGEKKAFSSVMQLVMTSLQSILENVDTPELLCKCVKCILLVARCYPHIFSXNFRDTVXILVGWHRDHTQKPSLTQQVSGWLQSLEPFWVADLAFXTXLLGSVSRRHGSIC

SEQ ID NO: 6240 - protein, 305 aa, Homo sapiens
DWVSVGGAWVWRAGQGLLGLGDGDGAGSQRRQGLRAEERTWSPGSRVGDAARHRCFLKVSRLEAQLLLERYPECGNLLLRPSGDGADGVSVTTRQMHNGTHVVRHYKVKREGPKYVIDVEQPFSCTSLDAVVNYFVSHTKKALVPFLLDEDYEKVLGYVEADKENGENVWVAPSAPGPGPAPCTGGPKPLSPASSQDKLPPLPPLPNQEENYVTPIGDGPAVDYENQDVASSSWPVILKPKKLPKPPAKLPKPPVGPKPEPKVFNGGLGRKLPVSSAQPLFPTAGLADMTAELQKKLEKRRALEH

SEQ ID NO: 6241 - protein, 210 aa, Homo sapiens
TMASMGLQVMGIALAVLGWLAVMLCCALPMWRVTAFIGSNIVTSQTIWEGLWMNCVVQSTGQMQCKVYDSLLALPQDLQAARALVIISIIVAALGVLLSVVGGKCTNCLEDESAKAKTMIVAGVVFLLAGLMVIVPVSWTAHNIIQDFYNPLVASGQKREMGASLYVGWAASGLLLLGGGLLCCNCPPRTDKPYSAKYSAARSAAASNYV

SEQ ID NO: 6242 - protein, 88 aa, Homo sapiens
SFNPWPPPRNSDFSREEEAAGAVGLGLHRAGRAVGKAGELLCCWASLWPSLPTLRCMKCMYRPEMFIQPIKMEFPYLSVKKKKKKKLE

SEQ ID NO: 6243 - protein, 33 aa, Homo sapiens
DNKLILNAIYVLSLLWHLFRSCSNHCSRALQIK

SEQ ID NO: 6244 - protein, 63 aa, Homo sapiens
LLLLLGMAARIVERRGLESWSNPGLKSGLVIFQLLSWVSFANFLSFISLINTVGHNSYSCIEN

SEQ ID NO: 6245 - protein, 178 aa, Homo sapiens
QLLDKHSAAGFAMAAIPPDSWQPPNVYLETSMGIIVLELYWKHAPKTCKNFAELARRGYYNGTKFHRIIKDFMIQGGDPTGTGRGGASIYGKQFEDELHPDLKFTGAGILAMANAGPDTNGSQFFVTLAPTQWLDGKHTIFGRVCQGIGMVNRVGMVETNSQDRPVDDVKIIKAYPSG

SEQ ID NO: 6246 - protein, 175 aa, Homo sapiens
MDVKTLVQQLYTTLCIEQHQLNKERELIERLEDLKEQLAPLEKVRIEISRKAEKRTTLVLWGGLAYMATQFGILARLTWWEYSWDIMEPVTYFITYGSAMAMYAYFVMTRQEYVYPEARDRQYLLFFHKGAKKSRFDLEKYNQLKDAIAQAEMDLKRLRDPLQVHLPLRQIGEKD

SEQ ID NO: 6247 - protein, 461 aa, Homo sapiens
TRPKLCAGIMITASHNPKQDNGYKVYWDNGAQIISPHDKGISQAIEENLEPWPQAWDDSLIDSSPLLHNPSASINNDYFEDLKKYCFHRSVNRETKVKFVHTSVHGVGHSFVQSAFKAFDLVPPEAVPEQKDPDPEFPTVKYPNPEEGKGVLTLSFALADKTKARIVLANDPDADRLAVAEKQDSGEWRVFSGNELGALLGWWLFTSWKEKNQDRSALKDTYMLSSTVSSKILRAIALKEGFHFEETLTGFKWMGNRAKQLIDQGKTVLFAFEEAIGYMCCPFVLDKDGVSAAVISAELASFLATKNLSLSQQLKAIYVEYGYHITKASYFICHDQETIKKLFENLRNYDGKNNYPKACGKFEISAIRDLTTGYDDSQPDKKAVLPTSKSSQMITFTFANGGVATMRTSGTEPKIKYYAELCAPPGNSDPEQLKKELNELVSAIEEHFFQPQKYNLQPKAD

SEQ ID NO: 6248 - protein, 925 aa, Homo sapiens
ARGEITGRCTAMGPFKSSVFILILHLLEGALSNSLIQLNNNGYEGIVVAIDPNVPEDETLIQQIKDMVTQASLYLFEATGKRFYFKNVAILIPETWKTKADYVRPKLETYKNADVLVAESTPPGNDEPYTEQMGNCGEKGERIHLTPDFIAGKKLAEYGPQGRAFVHEWAHLRWGVFDEYNNDEKFYLSNGRIQAVRCSAGITGTNVVKKCQGGSCYTKRCTFNKVTGLYEKGCEFVLQSRQTEKASIMFAQHVDSIVEFCTEQNHNKEAPNKQNQKCNLRSTWEVIRDSEDFKKTTPMTTQPPNPTFSLLQIGQRIVCLVLDKSGSMATGNRLNRLNQAGQLFLLQTVELGSWVGMVTFDSAAHVQSELIQINSGSDRDTLAKRLPAAASGGTSICSGLRSAFTVIRKKYPTDGSEIVLLTDGEDNTISGCFNEVKQSGAIIHTVALGPSAAQELEELSKMTGGLQTYASDQVQNNGLIDAFGALSSGNGAVSQRSIQLESKGLTLQNSQWMNGTVIVDSTVGKDTLFLITWTTQPPQILLWDPSGQKQGGFVVDKNTKMAYLQIPGIAKVGTWKYSLQASSQTLTLTVTSRASNATLPPITVTSKTNKDTSKFPSPLVVYANIRQGASPILRASVTALIESVNGKTVTLELLDNGAGADATKDDGVYSRYFTTYDTNGRYSVKVRALGGVNAARRRVIPQQSGALYIPGWIENDEIQWNPPRPEINKDDVQHKQVCFSRTSSGGSFVASDVPNAPIPDLFPPGQITDLKAEIHGGSLINLTWTAPGDDYDHGTAHKYIIRISTSILDLRDKFNESLQVNTTALIPKEANSEEVFLFKPENITFENGTDLFIAIQAVDKVDLKSEISNIARVSLFIPPQTPPETPSPDETSAPCPNIHINSTIPGIHILKIMWKWIGELQLSIA

SEQ ID NO: 6249 - protein, 311 aa, Homo sapiens
VLKFLLLQTMDEQSQGMQGPPVPQFQPQKALRPDMGYNTLANFRIEKKIGRGQFSEVYRAACLLDGVPVALKKVQIFDLMDAKARADCIKEIDLLKQLNHPNVIKYYASFIEDNELNIVLELADAGDLSRMIKHFKKQKRLIPERTVWKYFVQLCSALEHMHSRRVMHRDIKPANVFITATGVVKLGDLGLGRFFSSKTTAAHSLVGTPYYMSPERIHENGYNFKSDIWSLGCLLYEMAALQSPFYGDKMNLYSLCKKIEQCDYPPLPSDHYSEELRQLVNMCINPDPEKRPDVTYVYDVAKRMHACTASS

SEQ ID NO: 6250 - protein, 258 aa, Homo sapiens
  MISC_FEATURE (16): Xaa equals any of the naturally occurring L-amino acids
  MISC_FEATURE (220): Xaa equals any of the naturally occurring L-amino acids
  MISC_FEATURE (248): Xaa equals any of the naturally occurring L-amino acids
  MISC_FEATURE (254): Xaa equals any of the naturally occurring L-amino acids
  MISC_FEATURE (258): Xaa equals any of the naturally occurring L-amino acids
GGHLLPGPAAVHCASXVLLHPPPADLCWYCRDWFLKGNLLIIIVSVLIILPLALMKHLGYLGYTSGLSLTCMLFFLVSVIYKKFQLGCAIGHNETAMESEALVGLPSQGLNSSCEAQMFTVDSQMSYTVPIMAFAFVCHPEVLPIYTELCRSTTSTPQALQAQDAGRGQRVHWGHVLHVWAHSNLWIPHLLQQCEGGDAAHVQPEGPAHPLCAPGRAASXVTPHCASRAGSYPPGPGSNCFSQARAFXLATTLXAISX

SEQ ID NO: 6251 - protein, 149 aa, Homo sapiens
VHLLLFSRPYDGKWSKTMVGFGPEDDHFVAELTYNYGVGDYKLGNDFMGITLASSQAVSNARKLEWPLTEVAEGVFETEAPGGYKFYLQNRSLPQSDPVLKVTLAVSDLQKSLNYWCNLLGMKIYEKDEEKQRALLGYADNQVSNLGEE

SEQ ID NO: 6252 - protein, 126 aa, Homo sapiens
  MISC_FEATURE (126): Xaa equals any of the naturally occurring L-amino acids
LSLRTRETPAPPRCEAASQGRVGWRADAAAEEAVRSVWNRTRDRGTMAPQNLSTFCLLLLYLIGAVIAGRDFYKILGVPRSASIKDIKKAYRKLALQLHPDRNPDDPQAQEKFQDLGAAYEVLVRX

SEQ ID NO: 6253 - protein, 384 aa, Homo sapiens
GILAHSLSPTLLSHRCQEECPFGSFGFQCSQRCDCHNGGQCSPTTGACECEPGYKGPRCQERLCPEGLHGPGCTLPCPCDADNTISCHPVTGACTCQPGWSGHHCNESCPVGYYGDGCQLPCTCQNGADCHSITGGCTCAPGFMGEVCAVSCAAGTYGPNCSSICSCNNGGTCSPVDGSCTCKEGWQGLDCTLPCPSGTWGLNCNESCTCANGAACSPIDGSCSCTPGWLGDTCELPCPDGTFGLNCSEHCDCSHADGCDPVTGHCCCLAGWTGIRCDSTCPPGRWGPNCSVSCSCENGGSCSPEDGSCECAPGFRGPLCQRICPPGFYGHGCAQPCPLCVHSSRPCHHISGICECLPGFSGALCNQASKWQKQILIPTCMLKG

SEQ ID NO: 6254 - protein, 159 aa, Homo sapiens
IHMALLRKINQVLLFLLIVTLCVILYKKVHKGTVPKNDADDESETPEELEEEIPVVICAAAGRMGATMAAINSIYSNTDANILFYVVGLRNTLTRIRKWIEHSKLREINFKIVEFNPMVLKGKIRPDSSRPELLQPLNFVRFYLPLLIHQHEESHLFGR

SEQ ID NO: 6255 - protein, 27 aa, Homo sapiens
RQPKCPSTDEWIQKMWYVYTMGTSQPG

SEQ ID NO: 6256 - protein, 77 aa, Homo sapiens
  MISC_FEATURE (62): Xaa equals any of the naturally occurring L-amino acids
DLMILNTGVSPAQALSLPAASHVRHDLLLLAFHHDCEAFPATWNCKSIKPLFFYKWPSLKYXFINSVKWTSTVNWYQ

SEQ ID NO: 6257 - protein, 251 aa, Homo sapiens
  MISC_FEATURE (1): Xaa equals any of the naturally occurring L-amino acids
  MISC_FEATURE (5): Xaa equals any of the naturally occurring L-amino acids
XLVLXSYLGDTIEGTPAGTGPEFPGRPTRPEGSRGCGKQHISDSSWLLDSAGREGRLVAMSQQKCIVIFALVCCFAILVALIFSAVDIMGEDEDGLSEKNCQNKCRIALVENIPEGLNYSENAPFHLSLFQGWMNLLNMAKKSVDIVSSHWDLNHTHPSACQGQRLFEKLLQLTSQNIEIKLVSDVTADSKVLEALKLKGAEVTYMNMTAYNKGRLQSSFWIVDKQHVYIGSAGLDWQSLGQVHILLYSCK

SEQ ID NO: 6258 - protein, 137 aa, Homo sapiens
KGVTEFQQFSDFYILFLFLSNPCLLSPGGKYIFFNVFPAFLPKCVFFFGLLYPASSAVPGIGPSLQKPFQEYLEAQRQKLHHKSEMGTPQGENWLSWMFEKLVVVMVCYFILSIINSMAQSYAKRIQQRLNSEEKTK

SEQ ID NO: 6259 - protein, 125 aa, Homo sapiens
  MISC_FEATURE (2): Xaa equals any of the naturally occurring L-amino acids
AXSWAALHSQVFPALTPKRWTQVRRGTATVGGMAILQVTAGHPLAMAQGPAGHPPTMVQGPAGHPLAMAQGPAGHPPTMVQGPAGLPLAMAQVTHPLVHITEEVEENRTQDGKPERIAQLTWNEA

SEQ ID NO: 6260 - protein, 289 aa, Homo sapiens
  MISC_FEATURE (225): Xaa equals any of the naturally occurring L-amino acids
  MISC_FEATURE (228): Xaa equals any of the naturally occurring L-amino acids
  MISC_FEATURE (229): Xaa equals any of the naturally occurring L-amino acids
GEEQPLAAAPTECLEQVIGGAGDPGTWASFPSPLPGPAPLKGGKTMATNFSDIVKQGYVKMKSRKLGIYRRCWLVFRKSSSKGPQRLEKYPDEKSVCLRGCPKVTEISNVKCVTRLPKETKRQAVAIIFTDDSARTFTCDSELEAEEWYKTLSVECLGSRLNDISLGEPDLLAPGVQCEQTDRFNVFLLPCPNLDVYGECKLQITHENIYLWDIHNPRVKLVSWXLCXXRRYGRDATRFTFEAGRMCDAGEGLYTFQTQEGEQIYQRVHSATLAIAEQHKRVLLEMEKT

SEQ ID NO: 6261 - protein, 147 aa, Homo sapiens
  MISC_FEATURE (2): Xaa equals any of the naturally occurring L-amino acids
RXQAPVRNSRVDPRVRFNQTAQTCMEAASDRLGLGQRRSKTMVGKMWPVLWTLCAVRVTVDAISVETPQDVLRASQGKSVTLPCTYHTSTSSREGLIQWDKLLLTHTERVVIWPFSNKNYIHGELYKNRVSISNNAEQSDASSPLIS

SEQ ID NO: 6262 - protein, 179 aa, Homo sapiens [sequence omitted]

SEQ ID NO: 6263 - protein, 288 aa, Homo sapiens; identical to SEQ ID NO: 4522

SEQ ID NO: 6264 - protein, 165 aa, Homo sapiens
  MISC_FEATURE (158): Xaa equals any of the naturally occurring L-amino acids
GVTRPTRAPRFASAASWPKGGDRGGWRGAARTRSPGAGPVRTAREGRSVGRSRPRDSISARSDNSPFPWRSLRAWHPAGRLKTVVSSIASLDLATISEMSSRSTKDLIKSKWGSKPSNSKSETTLEKLKGEIAHLKTSVDEITSGKGKLTDKERQRFXEKIRVLE

SEQ ID NO: 6265 - protein, 189 aa, Homo sapiens
  MISC_FEATURE (137): Xaa equals any of the naturally occurring L-amino acids
STGPCPSHGQRFESWLSCTCVWPKAKCALLRDDLVLVDSPGTDVTTELDSWIDKFCLDADVFVLVANSESTLMNTEKHFFHKVNERLSKPNIFILNNRWDASASEPEYMEDVRRQHMERCLHFLVEELKVVNALEAXNRIFFVSAKEVLSARKQKAQGMPESGVALAEGFHARLQEFQNFEQIFEVGIL

SEQ ID NO: 6266 - protein, 337 aa, Homo sapiens
RPDLATMRALLARLLLCVLVVSDSKGSNELHQVPSNCDCLNGGTCVSNKYFSNIHWCNCPKKFGGQHCEIDKSKTCYEGNGHFYRGKASTDTMGRPCLPWNSATVLQQTYHAHRSDALQLGLGKHNYCRNPDNRRRPWCYVQVGLKPLVQECMVHDCADGKKPSSPPEELKFQCGQKTLRPRFKIIGGEFTTIENQPWFAAIYRRHRGGSVTYVCGGSLISPCWVISATHCFIDYPKKEDYIVYLGRSRLNSNTQGEMKFEVENLILHKDYSADTLAHHNDIALLKIRSKEGRCAQHPGLYRPSACPRCITIPSLAQAVRSLALEKRILPTISIRSS

SEQ ID NO: 6267 - protein, 89 aa, Homo sapiens
NKKKKKKKKKNSRGGPVPNSPYSESYYNSLAVVLQRRDWENPGVTQLNRLAAHPPFASWRNSEEARTDRLPTVAQPEWRMANCKALIFW

SEQ ID NO: 6268 - protein, 370 aa, Homo sapiens
GTPAGTGPEFPGRPTRPGKLVALVLLGVGLSLVGEMFLAFRERVNASREVEPVEPENCHLIEELESGSEDIDILPSGLAFISSGLKYPGMPNFAPDEPGKIFLMDLNEQNPRAQALEISGGFDKELFNPHGISIFIDKDNTVYLYVVNHPHMKSTVEIFKFEEQQRSLVYLKTIKHELLKSVNDIVVLGPEQFYATRDHYFTNSLLSFFEMILDLRWTYVLFYSPREVKVVAKGFCSANGITVSADQKYVYVADVAAKNIHIMEKHDNWDLTQLKVIQLGTLVDNLTVDPATGDILAGCHPNPMKLLNYNPEDPPGSEVLRIQNVLSEKPRVSTVYANNGSVLQGTSVASVYHGKILIGTVFHKTLYCEL

SEQ ID NO: 6269 - protein, 93 aa, Homo sapiens
  MISC_FEATURE (10): Xaa equals any of the naturally occurring L-amino acids
LMQAISLFSXDRPGVLQHRVVDQLQEQFAITLKSYIECNRPQPAHRFLFLKIMAMLTELRSINAQHTQRLLRIQDIHPFATPLMQELFGITGS

SEQ ID NO: 6270 - protein, 86 aa, Homo sapiens
  MISC_FEATURE (32): Xaa equals any of the naturally occurring L-amino acids
  MISC_FEATURE (53): Xaa equals any of the naturally occurring L-amino acids
  MISC_FEATURE (84): Xaa equals any of the naturally occurring L-amino acids
VIKLICPAAFPVYFQDMARGCVCSLCASVCIXLSSLFPLLPSVHSVNIISCLXLSKCFESLNSCVSILSTIPIAVLHHKSPIGXYP

SEQ ID NO: 6271 - protein, 95 aa, Homo sapiens
  MISC_FEATURE (80): Xaa equals any of the naturally occurring L-amino acids
  MISC_FEATURE (82): Xaa equals any of the naturally occurring L-amino acids
  MISC_FEATURE (94): Xaa equals any of the naturally occurring L-amino acids
ASFLLELLVLPASTTHPCSAEPLGAEWQEPQGCPIWVWLAGSLTSVICFLPFQIMRIKPHQGQHIGEMSFLQHNKCECRXKXDRARQENPCGPXS

SEQ ID NO: 6272 - protein, 127 aa, Homo sapiens
ADNNFTQETAMTMITPSSKLTLTKGNKSWSSTAVAAALELVDPPGCRNSARAWLLQNFLLFLLLLVFSLLCFTLCSCPTVLDIIFCSFQCFFSLVFEVSDDKSSSSEILYSAESSLLISHQRYSSVI

SEQ ID NO: 6273 - protein, 247 aa, Homo sapiens
PENSTSSFLLWGCPPSVVCFTVGSPARRPQCFLRAEMANSGLQLLGFSMALLGWVGLVACTAIPQWQMSSYAGDNIITAQAMYKGLWMDCVTQSTGMMSCKMYDSVLALSAALQATRALMVVSLVLGFLAMFVATMGMKCTRCGGDDKVKKARIAMGGGIIFIVAGLAALVACSWYGHQIVTDFYNPLIPTNIKYEFGPAIFIGWAGSALVILGGALLSCSCPGNESKAGYRAPRSYPKSNSSKEYV

SEQ ID NO: 6274 - protein, 145 aa, Homo sapiens
PDSVFSPAASPTKEIQVKKYKCGLIKPCPANYFAFKICSGAANVVGPTMCFEDRMIMSPVKNNVGRGLNIALVNGTTGAVLGQKAFDMYSGDVMHLVKFLKEIPGGALVLVASYDDPGTKMNDESRKLFSDLGSSYAKQLGFGTV

SEQ ID NO: 6275 - protein, 66 aa, Homo sapiens
LESRSCTPLIFLLKHLKVYIGCQMSNITYFILFSSNLYFTVVQGMKEAQERLTGDAFRKKHLEDEL

SEQ ID NO: 6276 - protein, 134 aa, Homo sapiens
ARGPRGLAPPRPARPPPGGMSYKPNLAAHMPAAALNAAGSVHSPSTSMATSSQYRQLLSDYGPPSLGYTQGTGNSQVPQSKYAELLAIIEELGKEIRPTYAGSKSAMERLKRGIIHARGLVRECLAETERNARS

SEQ ID NO: 6277 - protein, 201 aa, Homo sapiens
  MISC_FEATURE (1): Xaa equals any of the naturally occurring L-amino acids
  MISC_FEATURE (2): Xaa equals any of the naturally occurring L-amino acids
  MISC_FEATURE (10): Xaa equals any of the naturally occurring L-amino acids
  MISC_FEATURE (11): Xaa equals any of the naturally occurring L-amino acids
  MISC_FEATURE (119): Xaa equals any of the naturally occurring L-amino acids
XXLTKGNKSXXLHRGVGRSRTSGSPGLQEFGTSIGTGGFAKVKLACHILTGEMVAIKIMDKNTLGSDLPRIKTEIEALKNLRHQHICQLYHVLETANKIFMVLEYCPGGELFDYIISQXRLSEEETRVVFRQIVSAVAYVHSQGYAHRDLKPENLLFDEYHKLKLIDFGLCAKPKGNKDYHLQTCCGSLAYAAPELIQGKS

SEQ ID NO: 6278 - protein, 355 aa, Homo sapiens
  MISC_FEATURE (233): Xaa equals any of the naturally occurring L-amino acids
  MISC_FEATURE (264): Xaa equals any of the naturally occurring L-amino acids
  MISC_FEATURE (302): Xaa equals any of the naturally occurring L-amino acids
  MISC_FEATURE (305): Xaa equals any of the naturally occurring L-amino acids
  MISC_FEATURE (313): Xaa equals any of the naturally occurring L-amino acids
  MISC_FEATURE (344): Xaa equals any of the naturally occurring L-amino acids
  MISC_FEATURE (352): Xaa equals any of the naturally occurring L-amino acids
RPTRPVQYELWAALPGASGVALACCFVAAAVALRWSGRRTAVARWSGRDRGSERAWRTWTGRRTFRLQNPDLDSEALLALPLPQLVQKLHSRELAPEAVLFTYVGKAWEVNKGTNCVTSYLADCETQLSQAPRQGLLYGVPVSLKECFTYKGQDSTLGLSLNEGVPAECDSVVVHVLKLQGAVPFVHTNVPQSMFSYDCSNPLFGQTVNPWKSSKSPGGSSGGEGALIGSGGXPLGLGTDIGGSIRFPSSFCGICGLKPTGNPXQCVSPWAPWPGTWKSLALVPANPACAKDMFPLGPNVPXLPXKKRSTPSXNPCVWGTMRIDNYTMPSRHEAALLGNKQSLXWGTPASCXSKT

SEQ ID NO: 6279 - protein, 133 aa, Homo sapiens
  MISC_FEATURE (1): Xaa equals any of the naturally occurring L-amino acids
  MISC_FEATURE (18): Xaa equals any of the naturally occurring L-amino acids
XKLTLTKGNKSWSSTAVXSALELVDPPGCRNSARGTFFKMELFEGMRESTKISSLLAELEAIQRNSASQKSVIVSQWTNMLKVVALHLKKHGLTYATIDGSVNPKQRMDLVEAFNHSRGPQVMLISLLAGVLV

SEQ ID NO: 6280 - protein, 466 aa, Homo sapiens
NTVMGRKKKKQLKPWCWYCNRDFDDEKILIQHQKAKHFKCHICHKKLYTGPGLAIHCMQVHKETIDAVPNAIPGRTDIELEIYGMEGIPEKDMDERRRLLEQKTQESQKKKQQDDSDEYDDDDSAASTSFQPQPVQPQQGYIPPMAQPGLPPVPGAPGMPPGIPPLMPGVPPLMPGMPPVMPGMPPGLHHQRKYTQSFCGENIMMPMGGMMPPGPGIPPLMPGMPPGMPPPVPRPGIPPMTQAQAVSAPGILNRPPAPTATVPAPQPPVTKPLFPSAGQAQAAVQGPVGTDFKPLNSTPATTTEPPKPTFPAYTQSTASTTSTTNSTAAKPAASITSKPATLTTTSATSKLIHPDEDISLEERRAQLPKYQRNLPRPGQAPIGNPPVGPIGGMMPPQPGIPQQQGMRPPMPPHGQYGGHHQGMPGYLPGAMPPYGQGPPMVPPYQGGPPRPPMGMRPPVMSQGGRY

SEQ ID NO: 6281 - protein, 111 aa, Homo sapiens
  MISC_FEATURE (70): Xaa equals any of the naturally occurring L-amino acids
  MISC_FEATURE (110): Xaa equals any of the naturally occurring L-amino acids
  MISC_FEATURE (111): Xaa equals any of the naturally occurring L-amino acids
HTALSAFTAIPAVLAAPAMGLELFLDLVSQPSRAVYIFAKKNGIPLELRTVDLVKGGPSPFPRVSTNPVXPQAPACSALSVSPPHSPSPPPAASATRECCGLSGLEGSQXX

SEQ ID NO: 6282 - protein, 670 aa, Homo sapiens
VPSASQVRASLPEPRNSAAAMASNMDREMILADFQACTGIENIDEAITLLEQNNWDLVAAINGVIPQENGILQSEYGGETIPGPAFNPASHPASAPTSSSSSAFRPVMPSRQIVERQPRMLDFRVEYRDRNVDVVLEDTCTVGEIKQILENELQIPVSKMLLKGWKTGDVEDSTVLKSLHLPKNNSLYVLTPDLPPPSSSSHAGALQESLNQNFMLIITHREVQREYNLNFSGSSTIQEVKRNVYDLTSIPVRHQLWEGWPTSATDDSMCLAESGLSYPCHRLTVGRRSSPAQTREQSEEQITDVHMVSDSDGDDFEDATEFGVDDGEVFGMASSALRKSPMMPENAENEGDALLQFTAEFSSRYGDCHPVFFIGSLEAAFQEAFYVKARDRKLLAIYLHHDESVLTNVFCSQMLCAESIVSYLSQNFITWAWDLTKDSNRARFLTMCNRHFGSVVAQTIRTQKTDQFPLFLIIMGKRSSNEVLNVIQGNTTVDELMMRLMAAMEIFTAQQQEDIKDEDEREARENVKREQDEAYRLSLEADRAKREAHEREMAEQFRLEQIRKEQEEEREAIRLSLEQALPPEPKEENAEPVSKLRIRTPSGEFLERRFLASNKLQIVFDFVASKGFPWDEYKLLSTFPRRDVTQLDPNKSLLEVKLFPQETLFLEAKE

SEQ ID NO: 6283 - protein, 496 aa, Homo sapiens
  MISC_FEATURE (4): Xaa equals any of the naturally occurring L-amino acids
PTRXPTRPARGWEAITYLALRKKTKASMHSFPPLLLLLFWGVVSHSFPATLETQEQDVDLVQKYLEKYYNLKNDGRQVEKRRNSGPVVEKLKQMQEFFGLKVTGKPDAETLKVMKQPRCGVPDVAQFVLTEGNPRWEQTHLTYRIENYTPDLPRADVDHAIEKAFQLWSNVTPLTFTKVSEGQADIMISFVRGDHRDNSPFDGPGGNLAHAFQPGPGIGGDAHFDEDERWTNNFREYNLHRVAAHELGHSLGLSHSTDIGALMYPSYTFSGDVQLAQDDIDGIQAIYGRSQNPVQPIGPQTPKACDSKLTFDAITTIRGEVMFFKDRFYMRTNPFYPEVELNFISVFWPQLPNGLEAAYEFADRDEVRFFKGNKYWAVQGQNVLHGYPKDIYSSFGFPRTVKHIDAALSEENTGKTYFFVANKYWRYDEYKRSMDPGYPKMIAHDFPGIGHKVDAVFMKDGFFYFFHGTRQYKFDPKTKRILTLQKANSWFNCRKN

SEQ ID NO: 6284 - protein, 95 aa, Homo sapiens
  MISC_FEATURE (9): Xaa equals any of the naturally occurring L-amino acids
  MISC_FEATURE (13): Xaa equals any of the naturally occurring L-amino acids
  MISC_FEATURE (19): Xaa equals any of the naturally occurring L-amino acids
  MISC_FEATURE (26): Xaa equals any of the naturally occurring L-amino acids
  MISC_FEATURE (33): Xaa equals any of the naturally occurring L-amino acids
RLPRQKSRXKLSXSHVTQXRLIKFFXLFPIIFXMSKLTKRSKGFLGLLTSSVEILVLCGQGKAKAFLFSLCYLEDRKTSCLHPLAVCRITLSLRY

SEQ ID NO: 6285 - protein, 135 aa, Homo sapiens
RPPISSAGHLPGVCKVSTDLLREGAPIEPDPPVSHWKPEAVQYYEDGARIEAAFRNYIHRADARQEEDSYEIFICHANVIRYIVCRALQFPPEGWLRLSLNNGSITHLVIRPNGRVALRTLGDTGFMPPDKITRS

SEQ ID NO: 6286 - protein, 159 aa, Homo sapiens
TSHARFQALHATGSVLAASSLSWNSSSQLLLPEFQGEPPSAPSEYAGLVVRTVLEPVLQGLQGLPPQAQAPALGQALTAIVGAWLDHILTHGIRFRSGVKVEVAGGEWNWEKEGDKWERQEGQVAILYLCLQPAGSAAAQTRLWSGQGVAGRGAVEPVP

SEQ ID NO: 6287 - protein, 87 aa, Homo sapiens
  MISC_FEATURE (7): Xaa equals any of the naturally occurring L-amino acids
AQGAAWXCQSPGPRALLERRQTEAAGPASRRRGEMSDCYTELEKAVIVLVENFYKYVSKYSLVKNKISKSSFREMLQKELNHMLSHC

SEQ ID NO: 6288 - protein, 383 aa, Homo sapiens
HASAHASGALPGLTATPEAMLRFLPDLAFSFLLILALGQAVQFQEYVFLQFLGLDKAPSPQKFQPVPYILKKIFQDREAAATTGVSRDLCYVKELGVRGNVLRFLPDQGFFLYPKKISQASSCLQKLLYFNLSAIKEREQLTLAQLGLDLGPNSYYNLGPELELALFLVQEPHVWGQTTPKPGKMFVLRSVPWPQGAVHFNLLDVAKDWNDNPRKNFGLFLEILVKEDRDSGVNFQPEDTCARLRCSLHASLLVVTLNPDQCHPSRKRRAAIPVPKLSCKNLCHRHQLFINFRDLGWHKWIIAPKGFMANYCHGECPFSLTISLNSSNYAFMQALMHAVDPEIPQAVCIPTKLSPISMLYQDNNDNVILRHYEDMVVDECGCG

SEQ ID NO: 6289 - protein, 70 aa, Homo sapiens
RQRRKGGGNDSRPKWPHLEDTSDDNHCYVCAILFNSAVYVVDKLYEISSLSRYLEVLDVFKSGSRITLCK

SEQ ID NO: 6290 - protein, 112 aa, Homo sapiens
  MISC_FEATURE (32): Xaa equals any of the naturally occurring L-amino acids
  MISC_FEATURE (41): Xaa equals any of the naturally occurring L-amino acids
GTTNIFYVVNSIKLASFGKKKKKKKNSRGGPXPNSPYSESXYNSLAVVLQRRDWENPGVTQLNRLAAHPPFASWRNSEEARTDRPSQQLRSLNGEWQIVSVNILLKFALNFC

SEQ ID NO: 6291 - protein, 64 aa, Homo sapiens
  MISC_FEATURE (28): Xaa equals any of the naturally occurring L-amino acids
NLGTLKKEQDNSYVQGTREITIRSGCLXARQNRTIFLFFQKQIGEISLNSFSQQRTAWRKRVCS

SEQ ID NO: 6292 - protein, 469 aa, Homo sapiens
VRGLSGSCPGCSPLEPGSRGRGAAAWRILRCRRLPEPSPFLTQPNLAQSQPPAPVPVTDPSVTMHPAVFLSLPDLRCSLLLLVTWVFTPVTTEITSLDTENIDEILNNADVALVNFYADWCRFSQMLHPIFEEASDVIKEEFPNENQVVFARVDCDQHSDIAQRYRISKYPTLKLFRNGMMMKREYRGQRSVKALADYIRQQKSDPIQEIRDLAEITTLDRSKRNIIGYFEQKDSDNYRVFERVANILHDDCAFLSAFGDVSKPERYSGDNIIYKPPGHSAPDMVYLGAMTNFDVTYNWIQDKCVPLVREITFENGEELTEEGLPFLILFHMKEDTESLEIFQNEVARQLISEKGTINFLHADCDKFRHPLLHIQKTPADCPVIAIDSFRHMYVFGDFKDVLIPGKLKQFVFDLHSGKLHREFHHGPDPTDTAPGEQAQDVASSPPESSFQKLAPSEYRYTLLRDRDEL

SEQ ID NO: 6293 - protein, 172 aa, Homo sapiens
PRGARQDTEAGSPWCSYRHGPLSSRQDCPRAWQWRQPHRPGHLQDVPPPGIHLQRLSQPGPREALRECPSQWPLIRGRHLCQLRQPQGDSGPAGLGRRDGPSAFCHPARCCHCSRQCPAPGLCAGGVLAALPSSGLWEKGTMDAVGHGHDGASRRVTLGLQGDIKGQGCLLR

SEQ ID NO: 6294 - protein, 140 aa, Homo sapiens
  MISC_FEATURE (80): Xaa equals any of the naturally occurring L-amino acids
PSPPSPPCNTTALGALSTSIMGPRPHAYFGPEASASKFKLLHPDFISYLTERFLKSKLINTHFGDLYMPSTGALMLLTAXHTCDQVSAYGFITSNYWKFSDHYFERKMKPLIFYANHDLSLEAALWRDLHKAGILQLYQR

SEQ ID NO: 6295 - protein, 137 aa, Homo sapiens
  MISC_FEATURE (115): Xaa equals any of the naturally occurring L-amino acids
  MISC_FEATURE (124): Xaa equals any of the naturally occurring L-amino acids
  MISC_FEATURE (132): Xaa equals any of the naturally occurring L-amino acids
  MISC_FEATURE (133): Xaa equals any of the naturally occurring L-amino acids
IYCALLGCMDDYTTDSRGDVGTWVRKAAMTSLMDLTLLLARSQPELIEAHTCERIMCCVAQQASEKIDRFRAHAASVFLTLLHFDSPPIPHVPHRGELEKLFPRSDVASVNWSAXSQAFPRITXPWVATYGXXSWWG

SEQ ID NO: 6296 - protein, 120 aa, Homo sapiens
  MISC_FEATURE (38): Xaa equals any of the naturally occurring L-amino acids
RWGSKSPTALPIFLELTAGVLAFVFKDWIKDQLYFFIXNNIRAYRDDIDLQNLIDFTQEYWQCCGAFGADDWNLNIYFNCTDSNASRERCGVPFSCCTKDPAEDVINTECGYGCQAKTRS

SEQ ID NO: 6297 - protein, 153 aa, Homo sapiens
STHASGSPSPANHGELGSVPGGRRRGCQAPGTRGVCRMPVTRLHEGRFHLRHRHRHGLWLADVHSEEVSIPFAVEPPSGRGCRLCGQLRGDESGVGEMQQPLALPGDRAAPQRQEHRSEKLGELQQGHRGLGAGGVWNTAFMPPDPRPTLPTP

SEQ ID NO: 6298 - protein, 108 aa, Homo sapiens
AKIAKEEIFGPVMQILKFKTIEEVVGRANNSTYGLAAAVFTKDLDKANYLSQALQAGTVWVNCYDVFGAQSPFGGYKMSGSGRELGEYGLQAYTEVKTVTVKVPQKNS

SEQ ID NO: 6299 - protein, 341 aa, Homo sapiens
  MISC_FEATURE (225): Xaa equals any of the naturally occurring L-amino acids
  MISC_FEATURE (231): Xaa equals any of the naturally occurring L-amino acids
  MISC_FEATURE (291): Xaa equals any of the naturally occurring L-amino acids
MNTNWPASVQVSVNATPLTIERGDNKTSHKPLYLKHVCQPGRNTIQITVTACCCSHLFVLQLVHRPSVRSVLQGLLKKRLLPAEHCITKIKRNFSSGTIPGTPGPNGEDGVEQTAIKVSLKCPITFRRIQLPARGHDCRHIQCFDLESYLQLNCERGTWRCPVCNKTALLEGLEVDQYMLGILIYIQNSDYEEITIDPTCSWKPVPVKPDMHIKEEPDGPALKRXRTVSPXHVLMPSVMEMIAALGPGAAPFAPLQPPSVPPPASRQSLGQASLGPTGELAFSPATGVMGXPSMSGAGEAPEPALDLLPELTNPDELLSYLGPPDLPTNNNDDLLSLFENN

SEQ ID NO: 6300 - protein, 235 aa, Homo sapiens
  MISC_FEATURE (7): Xaa equals any of the naturally occurring L-amino acids
  MISC_FEATURE (11): Xaa equals any of the naturally occurring L-amino acids
  MISC_FEATURE (65): Xaa equals any of the naturally occurring L-amino acids
  MISC_FEATURE (156): Xaa equals any of the naturally occurring L-amino acids
  MISC_FEATURE (214): Xaa equals any of the naturally occurring L-amino acids
  MISC_FEATURE (229): Xaa equals any of the naturally occurring L-amino acids
  MISC_FEATURE (233): Xaa equals any of the naturally occurring L-amino acids
AVLCPSXPCQXPTQPPGACCPSCDSCTYHSQVYANGQNFTDADSPCHACHCQDGTVTCSLVDCPXTTCARPQSGPGQCCPRCPDCILEEEVFVDGESFSHPRDPCQECRCQEGHAHCQPRPCPRAPCAHPLPGTCCPNDCSGCAFGGKEYPSGADXPHPSDPCRLCRCLSGNVQCLARRCVPLPCPEPVLLPGECCPEWPKPPSPRPAAHGPGXGPTARPPRKYLFSPXPGDXLG

SEQ ID NO: 6301 - protein, 55 aa, Homo sapiens
  MISC_FEATURE (50): Xaa equals any of the naturally occurring L-amino acids
ADNNFTQETAMTMITPSSKLTLTKGNKSWSSTAVAAALELVDPPGCRNSXRAKLQ

SEQ ID NO: 6302 - protein, 421 aa, Homo sapiens
VGDCCVPYLDPEGTSLLGWLSVSLLSSGEITASSAPRMEPPGRRECPFPSWRFPGLLLAAMVLLLYSFSDACEEPPTFEAMELIGKPKPYYEIGERVDYKCKKGYFYIPPLATHTICDRNHTWLPVSDDACYRETCPYIRDPLNGQAVPANGTYEFGYQMHFICNEGYYLIGEEILYCELKGSVAIWSGKPPICEKVLCTPPPKIKNGKHTFSEVEVFEYLDAVTYSCDPAPGPDPFSLIGESTIYCGDNSVWSRAAPECKVVKCRFPVVENGKQISGFGKKFYYKATVMFECDKGFYLDGSDTIVCDSNSTWDPPVPKCLKVSTSSTTKSPASSASGPRPTYKPPVSNYPGYPKPEEGILDSLDVWVIAVIVIAIVVGVAVICVVPYRYLQRRKKKGKADGGAEYATYQTKSTTPAEQRG

SEQ ID NO: 6303 - protein, 80 aa, Homo sapiens
GHCQGLKPVEQPLAMSPLQYSFMAVIHFAGLKAVGESVQKPLDYYRVNLTGTIQLLEIMKAHGVKNLVFSSSATVYGNPQ

SEQ ID NO: 6304 - protein, 78 aa, Homo sapiens
EADCVCVCVCVCVCVCVCIQTHIFLKCKYSLFKKIIITAKQITSNSFILIYPVFRFSRLAPNFFTDYLNLIQFMYCNV

SEQ ID NO: 6305 - protein, 284 aa, Homo sapiens
  MISC_FEATURE (6): Xaa equals any of the naturally occurring L-amino acids
FSVVDXRKFSAVSGETRGLRVSLSVFQSPGAVVQGLGLVMASPSRRLQTKPVITCFKSVLLIYTFIFWITGVILLAVGIWGKVSLENYFSLLNEKATNVPFVLIATGTVIILLGTFGCFATCRASAWMLKLYAMFLTLVFLVELVAAIVGFVFRHEIKNSFKNNYEKALKQYNSTGDYRSHAVDKIQNTLHCCGVTDYRDWTDTNYYSEKGFPKSCCKLEDCTPQRDADKVNNEGCFIKVMTIIESEMGVVAGISFGVACFQLIGIFLAYCLSRAITNNQYEIV

SEQ ID NO: 6306 - protein, 368 aa, Homo sapiens
KTLSGGGRRQKGWDVSFKFPGHSLIVLYVPADCQCDLTLSSHPSSVPAMSSCNFTHATFVLIGIPGLEKAHFWVGFPLLSMYVVAMFGNCIVVFIVRTERSLHAPMYLFLCMLAAIDLALSTSTMPKILALFWFDSREISFEACLTQMFFIHALSAIESTILLAMAFDRYVAICHPLRHAAVLNNTVTAQIGIVAVVRGSLFFFPLPLLIKRLAFCHSNVLSHSYCVHQDVMKLAYADTLPNVVYGLTAILLVMGVDVMFISLSYFLIIRTVLQLPSKSERAKAFGTCVSHIGVVLAFYVPLIGLSVVHRFGNSLHPIVRVVMGDIYLLLPPVINPIIYGAKTKQIRTRVLAMFKISCDKDLQAVGGK

SEQ ID NO: 6307 - protein, 335 aa, Homo sapiens
  MISC_FEATURE (29): Xaa equals any of the naturally occurring L-amino acids
TSSISYLYNKLPRRRADLFGEELERLLKXKYEGHWYPEKPLKGSGFRCVHIGEMVDPVVELAAKRSGLAVEDVRANVPEELSVWIDPFEVSYQIGEKGAVKVLYLDDSEGCGAPELDKEIKSSFNPDAQVFVPIGSQDSSLSNSPSPSFGQSPSPTFIPRSAQPITFTTASFAATKFGSTKMKKGGGAASGGGVASSGAGGQQPPQQPRMARSPTNSLLKHKSLSLSMHSLNFITANPAPQSQLSPNAKEFVYNGGGSPSLFFDAADGQGSGTPGPFGGSGAGTCNSSSFDMAQVFGGGANSLFLEKTPFVEGLSYNLNTMQYPSQQFQPVVLAN

SEQ ID NO: 6308 - protein, 461 aa, Homo sapiens
QSLNNYLVIPTSAPWCEQLLNMNYSLHLAFVCLSLFTERMCIQGSQFNVEVGRSDKLSLPGFENLTAGYNKFLRPNFGGEPVQIALTLDIASISSISESNMDYTATIYLRQRWMDQRLVFEGNKSFTLDARLVEFLWVPDTYIVESKKSFLHEVTVGNRLIRLFSNGTVLYALRITTTVACNMDLSKYPMDTQTCKLQLESWGYDGNDVEFTWLRGNDSVRGLEHLRLAQYTIERYFTLVTRSQQETGNYTRLVLQFELRRNVLYFILETYVPSTFLVVLSWVSFWISLDSVPARTCIGVTTVLSMTTLMIGSRTSLPNTNCFIKAIDVYLGICFSFVFGALLEYAVAHYSSLQQMAAKDRGTTKEVEEVSITNIINSSISSFKRKISFASIEISSDNVDYSDLTMKTSDKFKFVFREKMGRIVDYFTIQNPSNVDHYSKLLFPLIFMLANVFYWAYYMYF

SEQ ID NO: 6309 - protein, 403 aa, Homo sapiens
  MISC_FEATURE (13): Xaa equals any of the naturally occurring L-amino acids
  MISC_FEATURE (37): Xaa equals any of the naturally occurring L-amino acids
  MISC_FEATURE (56): Xaa equals any of the naturally occurring L-amino acids
  MISC_FEATURE (244): Xaa equals any of the naturally occurring L-amino acids
AGWSPESLAYWPXRSDTEVPPLDLGWTDTGFYRGVSXVTLFTHPPKDEKAPHLKQXVRQMIQQAQKVIAVVMDLFTDGDIFQDIVDAACKRRVPVYIILDEAGVKYFLEMCQDLQLTDFRIRNIRVRSVTGVGFYMPMGRIKGTLSSRFLMVDGDKVATGSYRFTWSSSHVDRNLLLLLTGQNVEPFDTEFRELYAISEEVDLYRQLSLAGRVGLHYSSTVARKLINPKYALVSGCRHPPGEMXRWAARQQREAGGNPEGQEEGASGGESAWRLESFLKDLVTVEQVLPPVEPIPLGELSQKDGRMVSHMHRDLKPKSREAPSRNGMGEAARGEAAPAGRFSSRLFSRRAKRPAAPNGMASSVSTETSEVEFLTGKRPNENSSADISGKTSPSSAKPSNCVIS

SEQ ID NO: 6310 - protein, 775 aa, Homo sapiens
  MISC_FEATURE (2): Xaa equals any of the naturally occurring L-amino acids
  MISC_FEATURE (3): Xaa equals any of the naturally occurring L-amino acids
  MISC_FEATURE (5): Xaa equals any of the naturally occurring L-amino acids
  MISC_FEATURE (6): Xaa equals any of the naturally occurring L-amino acids
QXXYXXPGRPTRPGSSGAKMSFVAGVIRRLDETVVNRIAAGEVIQRPANAIKEMIENCLDAKSTSIQVIVKEGGLKLIQIQDNGTGIRKEDLDIVCERFTTSKLQSFEDLASISTYGFRGEALASISHVAHVTITTKTADGKCAYRASYSDGKLKAPPKPCAGNQGTQITVEDLFYNIATRRKALKNPSEEYGKILEVVGRYSVHNAGISFSVKKQGETVADVRTLPNASTVDNIRSIFGNAVSRELIEIGCEDKTLAFKMNGYISNANYSVKKCIFLLFINHRLVESTSLRKAIETVYAAYLPKNTHPFLYLSLEISPQNVDVNVHPTKHEVHFLHEESILERVQQHIESKLLGSNSSRMYFTQTLLPGLAGPSGEMVKSTTSLTSSSTSGSSDKVYAHQMVRTDSREQKLDAFLQPLSKPLSSQPQAIVTEDKTDISSGRARQQDEEMLELPAPAEVAAKNQSLEGDTTKGTSEMSEKRGPTSSNPRKRHREDSDVEMVEDDSRKEMTAACTPRRRIINLTSVLSLQEEINEQGHEVLREMLHNHSFVGCVNPQWALAQHQTKLYLLNTTKLSEELFYQILIYDFANFGVLRLSEPAPLFDLAMLALDSPESGWTEEDGPKEGLAEYIVEFLKKKAEMLADYFSLEIDEEGNLIGLPLLIDNYVPPLEGLPIFILRLATEVNWDEEKECFESLSKECAMFYSIRKQYISEESTLSGQQSEVPGSIPNSWKWTVEHIVYKALRSHILPPKHFTEDGNILQLANLPDLYKVFERC

SEQ ID NO: 6311 - protein, 159 aa, Homo sapiens
  MISC_FEATURE (13): Xaa equals any of the naturally occurring L-amino acids
  MISC_FEATURE (108): Xaa equals any of the naturally occurring L-amino acids
  MISC_FEATURE (140): Xaa equals any of the naturally occurring L-amino acids
  MISC_FEATURE (149): Xaa equals any of the naturally occurring L-amino acids
AQLVFPSSCLAFXSPLSVFKRFKETTRPFSNECLGTTRPVVPIDSSDFALDIRMPGVTPKQSDTYFCMSMRIPVDEEAFVIDFKPRASMDTVHHMLLFGCNMPSSTGXYWFCDEGTCTDKANDSVCLGEKCFPLPGLPKXCWDSELGGXDWEVNTWYYR

SEQ ID NO: 6312 - protein, 211 aa, Homo sapiens
  MISC_FEATURE (56): Xaa equals any of the naturally occurring L-amino acids
  MISC_FEATURE (57): Xaa equals any of the naturally occurring L-amino acids
  MISC_FEATURE (60): Xaa equals any of the naturally occurring L-amino acids
DSYRESWYACRYRSGIPGSTHASGKGFYSYQSLHEWFRDTDAEFVDIDGKSHLILXXRSXVPIILQWNKSSKKFVPHGDIPNMEDVLAVKSFRMQNTLYLSLTRFIGDSRVMRWNSKQFVEIQALPSRGAMTLQPFSFKDNHYLALGSDYTFSQIYQWDKEKQLFKKFKEIYVQAPRSFTAVSTDRRDFFFASSFKGKTKIFEHIIVDLSL

SEQ ID NO: 6313 - protein, 704 aa, Homo sapiens
  MISC_FEATURE (89): Xaa equals any of the naturally occurring L-amino acids
  MISC_FEATURE (122): Xaa equals any of the naturally occurring L-amino acids
RHPAAHPAGPGEALAAVLKEVCDAWSLTHSERYALQFADGHRRYITENNRAEIKNGSILCLSTAPDLEAEQLLGGLQSNSPEGRREALXRLVPLASDMIFAREVISRNGLQILGTIIEDGDXLGEVLALSLRAFSELMEHGVVSWETLSIPFVRKVVCYVNMNLMDASVPPLALGLLESVTLSSPALGQLVKSEVPLDRLLVHLQVMNQQLQTKAMALLTALLQGASPVERKHMLDYLWQRNLRQFIYKNIIHSAAPMGDEMAHHLYVLQALMLGLLEPRMRTPLDPYSQEQREQLQVLRQAAFEVEGESSGAGLSADRRRSLCAREFRKLGFSNSNPAQDLERVPPGLLALDNMLYFSRNAPSAYSRFVLENSSREDKHECPFARGSIQLTVLLCELLRVGEPCSETAQDFSPMFFGQDQSFHELFCVGIQLLNKTWKEMRATQEDFDKVMQVVREQLARTLALKPTSLELFRTKVNALTYGEVLRLRQTERLHQEGTLAPPILELREKLKPELMGLIRQQRLLRLCEGTLFRKISSRRRQDKLWFCCLSPNHKLLQYGDMEEGASPPTLESLPEQLPVADMRALLTGKDCPHVREKGSGKQNKDLYELAFSISYDRGEEEAYLNFIAPSKREFYLWTDGLSALLGSPMGSEQTRLDLEQLLTMETKLRLLELENVPIPERPPPVPPPPTNFNFCYDCSIAEP

SEQ ID NO: 6314 - protein, 75 aa, Homo sapiens
  MISC_FEATURE (6): Xaa equals any of the naturally occurring L-amino acids
LPLLQXEMCIRDSYRRYACRYRSGIPGSTHASAHASADAWAVTEIIFPYEQTLCVRPVSHMSRACVQVCFWHVPH

SEQ ID NO: 6315 - protein, 238 aa, Homo sapiens
EISHNLGVCYIYLKQFNKAQDQLHNALNLNRHDLTYIMLGKIHLLEGDLDKAIEVYKKAVEFSPENTELLTTLGLLYLQLGIYQKAFEHLGNALTYDPTNYKAILAAGSMMQTHGDFDVALTKYRVVACAVPESPPLWNNIGMCFFGKKKYVAAISCLKRANYLAPFDWKILYNLGLVHLTMQQYASAFHFLSAAINFQPKMGELYMLLAVALTNLEDTENAKRAYAEAVHLDKYALC

SEQ ID NO: 6316 - protein, 345 aa, Homo sapiens
REQKLELHRGGGRSRTSGSPGLQEFGTSNDAASMESLYDLWEFYLPYLYSCISLMGCLLLLLCTPVGLSRMFTVMGHLLVKPTILEDLDEQIYIITLEEEALQRRLNGLSSSVEYNIMELEQELENVKTLKTKLERRKKASAWERNLVYPAVMVLLLIETSISVLLVACNILCLLVDETAMPKGTRGPGIGNASLSTFGFVGAALEIILIFYLMVSSVVGFYSLRFFGNFTPKKDDTTMTKIIGNCVSILVLSSALPVMSRTLGITRFDLLGDFGRFNWLGNFYIVLSYNLLFAIVTTLCLVRKFTSAVREELFKALGLHKLHLPNTSRDSETAKPSVNGHQKAL

SEQ ID NO: 6317 - protein, 404 aa, Homo sapiens
  MISC_FEATURE (1): Xaa equals any of the naturally occurring L-amino acids
  MISC_FEATURE (346): Xaa equals any of the naturally occurring L-amino acids
  MISC_FEATURE (401): Xaa equals any of the naturally occurring L-amino acids
XVRVQTRGSADPAQLRRHPGYKRTASATLSDPAAAAMQPSSLLPLALCLLAAPASALVRIPLHKFTSIRRTMSEVGGSVEDLIAKGPVSKYSQAVPAVTEGPIPEVLKNYMDAQYYGEIGIGTPPQCFTVVFDTGSSNLWVPSIHCKLLDIACWIHHKYNSDKSSTYVKNGTSFDIHYGSGSLSGYLSQDTVSVPCQSASSASALGGVKVERQVFGEATKQPGITFIAAKFDGILGMAYPRISVNNVLPVFDNLMQQKLVDQNIFSFYLSRDPDAQPGGELMLGGTDSKYYKGSLSYLNVTRKAYWQVHLDQVEVASGLTLCKEGCEAIVDTGTSLMVGPVDEVRXLQKAIGAVPLIQGEYMIPCEKVSTLPAITLKLGGKGYKLSPEDYTLKVSQAGKTXCLS

SEQ ID NO: 6318 - protein, 40 aa, Homo sapiens
NPVSTKIQKISWAWWRTPVVPATLEAEAGESLKPRRRRLQ

SEQ ID NO: 6319 - protein, 69 aa, Homo sapiens
  MISC_FEATURE (25): Xaa equals any of the naturally occurring L-amino acids
  MISC_FEATURE (44): Xaa equals any of the naturally occurring L-amino acids
  MISC_FEATURE (51): Xaa equals any of the naturally occurring L-amino acids
  MISC_FEATURE (52): Xaa equals any of the naturally occurring L-amino acids
  MISC_FEATURE (53): Xaa equals any of the naturally occurring L-amino acids
TAHSGCCIEKRMWWTDIEAWKPDRXIAITQKRGDGSLDLLEAVXCPTLQLXXXEKGPERLILITNGPMM

SEQ ID NO: 6320 - protein, 206 aa, Homo sapiens
  MISC_FEATURE (178): Xaa equals any of the naturally occurring L-amino acids
RVDPRVRPRVRPRVRGARRRSSGSGSMSAGGASVPPPPNPAVSFPPPRVTLPAGPDILRTYSGAFVCLEILFGGLVWILVASSNVPLPLLQGWVMFVSVTAFFFSLLFLGMFLSGMVAQIDANWNFLDFAYHFTVFVFYFGAFLLEAAATSLHDLHCNTTITGQPLLSDNQYNINVAXSIFAFMTTACYGCKFGSGFTKMATRNTS

SEQ ID NO: 6321 - protein, 61 aa, Homo sapiens
  MISC_FEATURE (41): Xaa equals any of the naturally occurring L-amino acids
  MISC_FEATURE (53): Xaa equals any of the naturally occurring L-amino acids
  MISC_FEATURE (58): Xaa equals any of the naturally occurring L-amino acids
AFPWDLWPSWRQEPSSPSTDWVLLALALVNLLLSLPAPWAXFLLCHSLGPTVXRGLLXTGT

SEQ ID NO: 6322 - protein, 169 aa, Homo sapiens
  MISC_FEATURE (20): Xaa equals any of the naturally occurring L-amino acids
PSLAVAKIIIIEFNPMYPKXNDIALMKLQFPLTFSGTVRPICLPFFDEELTPATPLWIIGWGFTKQNGGKMSDILLQASVQVIDSTRCNADDAYQGEVTEKMMCAGIPEGGVDTCQGDSGGPLMYQSDQWHVVGIVSWGYGCGGPSTPGVYTKVSAYLNWIYNVWKAEL

SEQ ID NO: 6323 - protein, 86 aa, Homo sapiens
  MISC_FEATURE (71): Xaa equals any of the naturally occurring L-amino acids
RFILKSVHIQHKERKNLTNLKSAVILAHVNTILISWFIYFLMFVSIYIYIYIYIYIYIYIYIYIYIYIYIXIPSSKWPVIACKHFF

SEQ ID NO: 6324 - protein, 106 aa, Homo sapiens
GGYSVDSPTLTRFFTFHFILPFIIAALAALHLLFLHETGSNNPLGITSHSDKITFHPYYTIKDALGLLLFLLSLMTLTLFSPDLLGDPDNYTLANPLNTPPHIKPE

SEQ ID NO: 6325 - protein, 101 aa, Homo sapiens
DYARPKYYFQIEPSSWVAVYNTQVEFGKCSPSLPFFTVDASASFLSLHTHCPTAGFPFSFRAVAVPFLHSHPSQWQPPLPSCILNPTLIICLDFAFLPAVL

SEQ ID NO: 6326 - protein, 132 aa, Homo sapiens
QRHAGETGAATARRESLPQANNPEQLCKQRCINEASWTMKRVLSCVPEPTVVMAARALCMLGLVLALLSSSSAEEYVGLSANQCAVPAKDRVDCGYPHVTPKECNNRGCCFDSRIPGVPWCFKPLQEAECTF

SEQ ID NO: 6327 - protein, 105 aa, Homo sapiens
  MISC_FEATURE (2): Xaa equals any of the naturally occurring L-amino acids
  MISC_FEATURE (6): Xaa equals any of the naturally occurring L-amino acids
LXRLQXPVRNSRVDPRVGVPEPTVVMAARALCMLGLVLALLSSSSAEEYVGLSANQCAVPAKDRVDCGYPHVTPKECNNRGCCFDSRIPGVPWCFKPLQEAECTF

SEQ ID NO: 6328 - protein, 69 aa, Homo sapiens
LLLLLCKGTYIPQYTPVPPTAVSIEGVVADTSPQTVAPSSQDTSGQQQQIAVDTSNEHAPAYSYQQSKP

SEQ ID NO: 6329 - protein, 96 aa, Homo sapiens
TFKFANQFLARKHFCYTNILLSLPKAPPMHSFNKIQSLYFKVILVMKFYMQREKVTETENKSKGKEYYGIKLSKQFWWKVKPVSAPHQGCGPPRHA

SEQ ID NO: 6330 - protein, 285 aa, Homo sapiens
  MISC_FEATURE (280): Xaa equals any of the naturally occurring L-amino acids
GRAPGRRVGLRCARRTSEAAGSGAGPPGPLQGRSGSSWAPRPGRRTEERRKGAGGTRPRPAAAMNSNVENLPPHIIRLVYKEVTTLTADPPDGIKVFPNEEDLTDLQVTIEGPEGTPYAGGLFRMKLLLGKDFPASPPKGYFLTKIFHPNVGANGEICVNVLKRDWTAELGIRHVLLTIKCLLIHPNPESALNEEAGRLLLENYEEYAARARLLTEIHGGAGGPSGRAEAGRALASGTEASSTDPGAPGGPGGAEGPMAKKHAGERDKKLAAKKKTDKKXALRRL

SEQ ID NO: 6331 - protein, 40 aa, Homo sapiens
HERMLNLTDRQVKIWFQNRRMKEKKLNRDRLQYFTGNPLF

SEQ ID NO: 6332 - protein, 118 aa, Homo sapiens
  MISC_FEATURE (7): Xaa equals any of the naturally occurring L-amino acids
  MISC_FEATURE (17): Xaa equals any of the naturally occurring L-amino acids
  MISC_FEATURE (39): Xaa equals any of the naturally occurring L-amino acids
GAERRQXVVKKADMINXNMTHQVQAERDALALSKSPFIXHLYYSLQSANNVYLVMEYLIGGDVKSLLHIYGYFDEEMAVKYISEVALALDYLHRHGIIHRDLKPDNMLISNEGHIKLT

SEQ ID NO: 6333 - protein, 405 aa, Homo sapiens
  MISC_FEATURE (96): Xaa equals any of the naturally occurring L-amino acids
MEAETPSTEVPPDPEPGVPLTPPSQHQEAGAGDLCALCGEHLYVLERLCVNGHFFHRSCFRCHTCEATLWPGGYEQHPGDGHFYCLQHLPQTDHKXEGSDRGPESPELPTPSENSMPPGLSTPTASQEGAGPVPDPSQPTRRQIRLSSPERQRLSSLNLTPDPEMEPPPKPPRSCSALARHALESSFVGWGLPVQSPQALVAMEKEEKESPFSSEEEEEDVPLDSDVEQALQTFAKTSGTMNNYPTWRRTLLRRAKEEEMKRFCKAQTIQRRLNEIEAALRELEAEGVKLELALRRQSSSPEQQKKLWVGQLLQLVDKKNSLVAEEAELMITVQELNLEEKQWQLDQELRGYMNREENLKTAADRQAEDQVLRKLVDLVNQRDALIRFQEERRLSELALGTGAQG

SEQ ID NO: 6334 - protein, 114 aa, Homo sapiens
LIKWKISKECKIIWGESCKMWSFFTTNIFSPSDVYMFYDLKYQTMVCDIMGLPLAQKRLLLSSACLMTIGWSLLSLNFYFLIILVAIRLKRECTWERILKTDQSVKCHVLEKIK

SEQ ID NO: 6335 - protein, 80 aa, Homo sapiens
NTATYPGNMKILFVEPAIFLSAFAMTLTGPLTTQYVYRRIWEETGNYTFSSDSNISECEKNKSSPIFAFQEVRNYNIHSI

SEQ ID NO: 6336 - protein, 34 aa, Homo sapiens
FMIWNSIHPFSGIKTFLDFFRIGSELVYYLAFSF

SEQ ID NO: 6337 - protein, 68 aa, Homo sapiens
  MISC_FEATURE (65): Xaa equals any of the naturally occurring L-amino acids
  MISC_FEATURE (68): Xaa equals any of the naturally occurring L-amino acids
CRLVKASLDEKSATGWPPVCFAMRINLLFVCLKTPISESSVLMFVEHNLIKNIKIFTLAFTLTVXGGX

SEQ ID NO: 6338 - protein, 25 aa, Homo sapiens
GLLLVPNSCRPGDPLVLERPPPRWS

SEQ ID NO: 6339 - protein, 106 aa, Homo sapiens
  MISC_FEATURE (79): Xaa equals any of the naturally occurring L-amino acids
KGVPRAQQGAKSGDIASEHPTCATHVHPPTHTHAHSHAHSHAHSHAHSHAHSHAHSHAHSHAHSHAHTAWTLFPLCPWXHTPSKPLTFISPCVFSKKVYQARPPGG

SEQ ID NO: 6340 - protein, 147 aa, Homo sapiens
NFPLPGGEKQRVAIARAILKDPPVILYDEATSSLDSITEETILGAMKDVVKHRTSIFIAHRLSTVVDADEIIVLDQGKVAERGTHHGLLANPHSIYSEMWHTQSSRVQNHDNPKWEAKKENISKEEERKKLQEEIVNSVKGCGNCSC

SEQ ID NO: 6341 - protein, 176 aa, Homo sapiens
  MISC_FEATURE (167): Xaa equals any of the naturally occurring L-amino acids
CQQLMDLTANLNLLWSAPFQILMAVYLLWQELGPAVLAGVAVLVFVIPINALAATKIKKLKVSLATLCVYFLLDEGNILTATKVFTSMSLFNILRIPLFELPTVISAVVQTKISLGRLEDFLNTEELLPQSIETNYTGDHAIGFTDASFSWDKTGMPVLKEALWLMXLNKPGFKIA

SEQ ID NO: 6342 - protein, 129 aa, Homo sapiens
PAGTGPEFPGRPTRPAKCYHERRKLDFFVLIMASTCTFPEWSLLRPFLVPFQSCPHHPAPLASVHSGPQPRPGLLCSAPTAHHPSCFPEPDPVPPTGNQGCALPCPRSPGLPVLSLLIIINSGFQLQPR

SEQ ID NO: 6343 - protein, 93 aa, Homo sapiens
DFQIDKCTGYVEVQKSITVLQHIYLGNLKHVLLMYQAVCCSQRDPISALGILGENMYKEIVLAHSSKGSDQGHLALRGNLGKVPWRMRLLLKS

SEQ ID NO: 6344 - protein, 76 aa, Homo sapiens
LVRLQVPVRNSRVDPRVRNRERKGQRWKILFYCFDFRHPERVTNFKTLNKVALCWGRNLAILVTLKSRYPFSLESP

SEQ ID NO: 6345 - protein, 349 aa, Homo sapiens
  MISC_FEATURE (340): Xaa equals any of the naturally occurring L-amino acids
RNVQLLTAAETWEPRGPLSSQPPPPSSRAGPPRPRLLLTPRPGARFCGSIILCHYEMSSLGASFVQIKFDDLQFFENCGGGSFGSVYRAKWISQDKEVAVKKLLKIEKEAEILSVLSHRNIIQFYGVILEPPNYGIVTEYASLGSLYDYINSNRSEEMDMDHIMTWATDVAKGMHYLHMEAPVKVIHRDLKSRNVVIAADGVLKICDFGASRFHNHTTHMSLVGTFPWMAPEVIQSLPVSETCDTYSYGVVLWEMLTREVPFKGLEGLQVAWLVVEKNERLTIPSSCPRSFAELLHQCWEADAKKRPSFKQIISILESMSNDTSLLTSVTHSYTTRRSGXAKLRQLLRG

SEQ ID NO: 6346 - protein, 65 aa, Homo sapiens
HFGRPRQADHLRSGVQNQPGQDGETPSLLKIQKKISRAWWHVPVIPATWETEAGELLEPGRRRLQ

SEQ ID NO: 6347 - protein, 104 aa, Homo sapiens
SRDWVTNNTRTKLRDHYSSISPSFHKTAVKMFDIKAWAEYVVEWAAKDPYGFLTTVILALTPLFLASAVLSWKLAKMIEAREKEQKKKQKRQENIAKAKRLKKD

SEQ ID NO: 6348 - protein, 146 aa, Homo sapiens
THWFQRPLRMCLPSQIWAFPVPKHHLGGSLWVLISSHMFTPHVGLPNCPPQGKPFLPTSRKLLVPWPSHTSDLVPLPGPVGFNNLVSSLPRNPLCLECSPPSQPLSHTIFSFLSSTKRWDKPVCTQCLWDNRRRNLEFGWVIKLWN

SEQ ID NO: 6349 - protein, 72 aa, Homo sapiens
  MISC_FEATURE (23): Xaa equals any of the naturally occurring L-amino acids
  MISC_FEATURE (64): Xaa equals any of the naturally occurring L-amino acids
  MISC_FEATURE (65): Xaa equals any of the naturally occurring L-amino acids
SIIPFKCYFQFWGIFFFWSFCCXCSFFTIPKMLQQIFFYRLNVAYPKYLGPEVLGISDFQIRDXXPVYTSLH

SEQ ID NO: 6350 - protein, 385 aa, Homo sapiens
  MISC_FEATURE (176): Xaa equals any of the naturally occurring L-amino acids
  MISC_FEATURE (296): Xaa equals any of the naturally occurring L-amino acids
HLNVDRKRPCSIEDRRNWSLIGRPGAPASGLNRSSGLWLGPDRCRPRSRCSCRVMENPSPAAALGKALCALLLATLGAAGQPLGGESICSARAPAKYSITFTGKWSQTAFPKQYPLFRPPAQWSSLLGAAHSSDYSMWRKNQYVSNGLRDFAERGEAWALMKEIEAAGEALQSVHXVFSAPAVPSGTGQTSAELEVQRRHSLVSFVVRIVPSPDWFVGVDSLDLCDGDRWREQAALDLYPYDAGTDSGFTFSSPNFATIPQDTVTEITSSSPSHPANSFYYPRLKALPPIARVTLXRLRQSPRAFIPPAPVLPSRDNEIVDSASVPETPLDCEVSLWSSWGLCGGHCGRLGTKSRTRYVRVQPANNGSPCPELEEEAECVPDNCV

SEQ ID NO: 6351 - protein, 124 aa, Homo sapiens
RPACPGTGPEFPGRPTRPPTRPPTRPPTRPLCRKMGVPYCIIKGKARLGRLVHRKTCTTVAFTQVNSEDKGALAKLVEAIRTNYNDRYDEIRRHWGGNVLGPKSVARIAKLEKAKAKELATKLG

SEQ ID NO: 6352 - protein, 110 aa, Homo sapiens
  MISC_FEATURE (58): Xaa equals any of the naturally occurring L-amino acids
AWKRRREVKDQSLIGTGSHSGSSLQSDPHFGCSLGPSSGPRSIRLHPPSLFRILSCAXPTPGSRSQTSSHGWSLLPSAVRPPGTQAPGFGRSGVSSRWVSAPTGTCTSCQ

SEQ ID NO: 6353 - protein, 226 aa, Homo sapiens
TEGYGCQKTTEGYGCEKTTEGYGCEKTTEGGSSSFAPRVHGSSFSFPLGREEAMAAMASLGALALLLLSSLSRCSAEACLEPQITPSYYTTSDAVISTETVFIVEISLTCKNRVQNMALYADVGGKQFPVTRGQDVGRYQVSWSLDHKSAHAGTYEVRFFDEESYSLLRKAQRNNEDISIIPPLFTVSVDHRGTWNGPWVSTEVLAAAIGLVIYYLAFSAKSHIQA

SEQ ID NO: 6354 - protein, 235 aa, Homo sapiens
  MISC_FEATURE (185): Xaa equals any of the naturally occurring L-amino acids
SPRPLRFCGGARARRPLSAVARPARSSDPLRSAPLGPAPPVNMIRCGLACERCRWILPLLLLSAIAFDIIALAGRGWLQSSDHGQTSSLWWKCSQEGGGSGSYEEGCQSLMEYAWGRAAAAMLFCGFIILVICFILSFFALCGPQMLVFLRVIGGLLALAAVFQIISLVIYPVKYTQTFTLHANXAVTYIYNWAYGFGWAATIILIGCAFFFCCLPNYEDDLLGNAKPRYFYTSA

SEQ ID NO: 6355 - protein, 88 aa, Homo sapiens
  MISC_FEATURE (88): Xaa equals any of the naturally occurring L-amino acids
GNLHGILRDFYSPLVPDSMKFEIGEALYLGIISSLFSLIAGIILCFSCSSQRNRSNYYDAYQAQPLATRSSPRPGQPPKVKSEFNSYX

SEQ ID NO: 6356 - protein, 105 aa, Homo sapiens
GSVAQSRPAYLSKNSKSLSQPTGLNLHWKPTCWHPRSPTLLAWVGEAKDHPKFTHLSSAASHWASAAPQHQFTGHPSLLALSPNLLSIPRSNLPLRSARNSFRPH

SEQ ID NO: 6357 - protein, 105 aa, Homo sapiens
  MISC_FEATURE (22): Xaa equals any of the naturally occurring L-amino acids
  MISC_FEATURE (28): Xaa equals any of the naturally occurring L-amino acids
  MISC_FEATURE (63): Xaa equals any of the naturally occurring L-amino acids
RCCLPEDGKADIVRAAQDFCQXVAQKQXRPTDLDVDTLASLLSSNGCPDPDLVLKFGPVDSTXGFLPWHIRLTEIVSLPSHLNISYEDFFSALRQYAACEQRLGK

SEQ ID NO: 6358 - protein, 81 aa, Homo sapiens [sequence omitted]

SEQ ID NO: 6359 - protein, 100 aa, Homo sapiens
LKINPSGKKKKKKNSRGGPVPNSPYSESYYNSLAVVLQRRDWENPGVTQLNRLAAHPPFASWRNSEEARTDRPSQQLRSLNGEWQIVSVNILLKFALNFC

SEQ ID NO: 6360 - protein, 231 aa, Homo sapiens
  MISC_FEATURE (3): Xaa equals any of the naturally occurring L-amino acids
  MISC_FEATURE (5): Xaa equals any of the naturally occurring L-amino acids
  MISC_FEATURE (13): Xaa equals any of the naturally occurring L-amino acids
  MISC_FEATURE (17): Xaa equals any of the naturally occurring L-amino acids
  MISC_FEATURE (102): Xaa equals any of the naturally occurring L-amino acids
  MISC_FEATURE (202): Xaa equals any of the naturally occurring L-amino acids
  MISC_FEATURE (203): Xaa equals any of the naturally occurring L-amino acids
  MISC_FEATURE (230): Xaa equals any of the naturally occurring L-amino acids
RDXWXAIPDTIDXTPAXTGPEFPGRPTRPPAPPAMVVSGAPPALGGGCLGTFTSLLLLASTAILNAARIPVPPACGKPQQLNRVVGGEDSTDSEWPWIVSIXKNGTHHCAGSLLTSRWVITAAHCFKDNLNKPYLFSVLLGAWQLGNPGSRSQKVGVAWVEPHPVYSWKEGACADIALVRLERSIQFSERVLPICLPDASIXXPPNTHCWISGWGSIQDGVPLPTLRPCXS

SEQ ID NO: 6361 - protein, 240 aa, Homo sapiens
GFPGTGSGQGIRPTHPRGKPGPSGADRGPHGPRGGRRRLGVAGRASRVDRAHAAAAHTGLGEEFHDVEDAETYKKMLARDERRFRVADQDGDSMATREELTAFLHPEEFPHMRDIVIAETLEDLDRNKDGYVQVEEYIADLYSAEPGEEEPAWVQTERQQFRDFRDLNKDGHLDGSEVGHWVLPPAQDQPLVEANHLLHESDTDKDGRLSKAEILGNWNMFVGSQATNYGEDLTRHHDEL

SEQ ID NO: 6362 - protein, 505 aa, Homo sapiens
HRRGSIPRQQLSPTAFPARNHLSTIPWGLPRTIEELRLDDNRISTISSPSLQGLTSLKRLVLDGNLLNNHGLGDKVFFNLVNLTELSLVRNSLTAAPVNLPGTNLRKLYLQDNHINRVPPNAFSYLRQLYRLDMSNNNLSNLPQGIFDDLDNITQLILRNNPWYCGCKMKWVRDWLQSLPVKVNVRGLMCQAPEKVRGMAIKDLNAELFDCKDSGIVSTIQITTAIPNTVYPAQGQWPAPVTKQPDIKNPKLTKDQQTTGSPSRKTITITVKSVTSDTIHISWKLALPMTALRLSWLKLGHSPAFGSITETIVTGERSEYLVTALEPDSPYKVCMVPMETSNLYLFDETPVCIETETAPLRMYNPTTTLNREQEKEPYKNPNLPLAAIIGGAVALVTIALLALVCWYVHRNGSLFSRNCAYSKGRRRKDDYAEAGTKKDNSILEIRETSFQMLPISNEPISKEEFVIHTIFPPNGMNLYKNNHSESSSNRSYRDSGIPDSDHSHS

SEQ ID NO: 6363 - protein, 719 aa, Homo sapiens
  MISC_FEATURE (250): Xaa equals any of the naturally occurring L-amino acids
  MISC_FEATURE (278): Xaa equals any of the naturally occurring L-amino acids
  MISC_FEATURE (647): Xaa equals any of the naturally occurring L-amino acids
  MISC_FEATURE (650): Xaa equals any of the naturally occurring L-amino acids
TAWPASWTTPPASSMSRDLLFKHYCYPERDPEEVFAFLLRFPHVALFTFDGLDELHSDLDLSRVPDSSCPWEPAHPLVLLANLLSGKLLKGASKLLTARTGIEVPRQFLRKKVLLRGFSPSHLRAYARRMFPERALQDRLLSQLEANPNLCSLCSVPLFCWIIFRCFQHFRAAFEGSPQLPDCTMTLTDVFLLVTEVHLNRMQPSSLVQRNTRSPVETLHAGRDTLCSLGQVAHRGMEKSLFVFTQEEVXASGLQERDMQLGFLRALPELGPGGDQQXYEFFHLTLQAFFTAFFLVLDDRVGTQELLRFFQEWMPPAGAATTSCYPPFLPFQCLQGSGPAREDLFKNKDHFQFTNLFLCGLLSKAKQKLLRHLVPAAALRRKRKALWAHLFSSLRGYLKSLPRVQVESFNQVQAMPTFIWMLRCIYETQSQKVGQLAARGICANYLKLTYCNACSADCSALSFVLHHFPKRLALDLDNNNLNDYGVRELQPCFSRLTVLRLSVNQITDGGVKVLSEELTKYKIVTYLGLYNNQITDVGARYVTKILDECKGLTHLKLGKNKITSEGGKYLALAVKNSKSISEVGMWGNQVGDEGAKAFAEALRNHPSLTTLSLASNGISTEGGKSLARALQQNTSLEILWLTQNELXDEXAESLAEMLKVNQTLKHLWLIQNQITAKGTAQLADALQSNTGITEICLNGNLIKPEEAKVYEDEKRIICF

SEQ ID NO: 6364 - protein, 729 aa, Homo sapiens
  MISC_FEATURE (30): Xaa equals any of the naturally occurring L-amino acids
  MISC_FEATURE (196): Xaa equals any of the naturally occurring L-amino acids
LSPLKLYAQVCRYDLGPYLASLPLDSSLLXQPNLVAPTSQSLITPPQMTNTGNANTPSATLASAASSTMTVTSGVAISTSVATANSTLTTASTSSSSSSNLNSGVSSNKLPSFPPFGSMNSNAAGSMSTQANTVQSGQLGGQQTSALQTAGISGESSSLPTQPHPDVSESTMDRDKVGIPTDGDSHAVTYPPAIVXYIIDPFTYENTDESTNSSSVWTLGLLRCFLEMVQTLPPHIKSTVSVQIIPCQYLLQPVKHEDREIYPQHLKSLAFSAFTQCRRPLPTSTNVKTLTGFGPGLAMETALRSPDRPECIRLYAPPFILAPVKDKQTELGETFGEAGQKYNVLFVGYCLSHDQRWILASCTDLYGELLETCIINIDVPNRARRKKSSARKFGLQKLWEWCLGLVQMSSLPWRVVIGRLGRIGHGELKDWSCLLSRRNLQSLSKRLKDMCRMCGISAADSPSILSACLVAMEPQGSFVIMPDSVSTGSVFGRSTTLNMQTSQLNTPQDTSCTHILVFPTSASVQVASATYTTENLDLAFNPNNDGADGMGIFDLLDTGDDLDPDIINILPASPTGSPVHSPGSHYPHGGDAGKGQSTDRLLSTEPHEEVPNILQQPLALGYFVSTAKAGPLPDWFWSACPQAQYQCPLFLKASLHLHVPSVQSDELLHSKHSHPLDSNQTSDVLRFVLEQYNALSWLTCDPATQDRRSCLPIHFVVLNQLYNFIMNML

SEQ ID NO: 6365 - protein, 552 aa, Homo sapiens
  MISC_FEATURE (47): Xaa equals any of the naturally occurring L-amino acids
VSLTRREGTGPRPRAAGAGARHVHRLGREVAIAERQEGRGGPGRRPXVGRRWGRPARLHLRAHGPRPSVRTGLPSVGRQAAGAAMGRGWGFLFGLLGAVWLLSSGHGEEQPPETAAQRCFCQVSGYLDDCTCDVETIDRFNNYRLFPRLQKLLESDYFRYYKVNLKRPCPFWNDISQCGRRDCAVKPCQSDEVPDGIKSASYKYSEEANNLIEECEQAERLGAVDESLSEETQKAVLQWTKHDDSSDNFCEADDIQSPEAEYVDLLLNPERYTGYKGPDAWKIWNVIYEENCFKPQTIKRPLNPLASGQGTSEENTFYSWLEGLCVEKRAFYRLISGLHASINVHLSARYLLQETWLEKKWGHNITEFQQRFDGILTEGEGPRRLKNLYFLYLIELRALSKVLPFFERPDFQLFTGNKIQDEENKMLLLEILHEIKSFPLHFDENSFFAGDKKEAHKLKEDFRLHFRNISRIMDCVGCFKCRLWGKLQTQGLGTALKILFSEKLIANMPESGPSYEFHLTRQEIVSLFNAFGRISTSVKELENFRNLLQNIH

SEQ ID NO: 6366 - protein, 481 aa, Homo sapiens
ATNRVVAPTPGPGTPAERHADGLALALEPALASPAGAANFLAMVDNLQGDSGRGYYLEMLIGTPPQKLQILVDTGSSNFAVAGTPHSYIDTYFDTERSSTYRSKGFDVTVKYTQGSWTGFVGEDLVTIPKGFNTSFLVNIATIFESENFFLPGIKWNGILGLAYATLAKPSSSLETFFDSLVTQANIPNVFSMQMCGAGLPVAGSGTNGGSLVLGGIEPSLYKGDIWYTPIKEEWYYQIEILKLEIGGQSLNLDCREYNADKAIVDSGTTLLRLPQKVFDAVVEAVARASLIPEFSDGFWTGSQLACWTNSETPWSYFPKISIYLRDENSSRSFRITILPQLYIQPMMGAGLNYECYRFGISPSTNALVIGATVMEGFYVIFDRAQKRVGFAASPCAEIAGAAVSEISGPFSTEDVASNCVPAQSLSEPILWIVSYALMSVCGAILLVLIVLLLLPFRCQRRPRDPEVVNDESSLVRHRWK

SEQ ID NO: 6367 - protein, 441 aa, Homo sapiens
GGSWCRSSPGRDGSPGAKGDRGETGPAGPPGAPGAPGAPGPVGPAGKSGDRGETGPAGPAGPVGPVGARGPAGPQGPRGDKGETGEQGDRGIKGHRGFSGLQGPPGPPGSPGEQGPSGASGPAGPRGPPGSAGAPGKDGLNGLPGPIGPPGPRGRTGDAGPVGPPGPPGPPGPPGPPSAGFDFSFLPQPPQEKAHDGGRYYRADDANVVRDRDLEVDTTLKSLSQQIENIRSPEGSRKNPARTCRDLKMCHSDWKSGEYWIDPNQGCNLDAIKVFCNMETGETCVYPTQPSVAQKNWYISKNPKDKRHVWFGESMTDGFQFEYGGQGSDPADVAIQLTFLRLMSTEASQNITYHCKNSVAYMDQQTGNLKKALLLQGSNEIEIRAEGNSRFTYSVTVDGCTSHTGAWGKTVIEYKTTKTSRLPIIDVAPLDVGAPDQEFGF

SEQ ID NO: 6368 - protein, 458 aa, Homo sapiens
  MISC_FEATURE (45): Xaa equals any of the naturally occurring L-amino acids
RRSPLTAPLTTTNPYSTRLVCPTLGDAEPQPRPRPKHSFNWYCGXRGFCLLQLAPAAGRSCDSAESRRRVLVLTRRAMTVARPSVPAALPLLGELPRLLLLVLLCLPAVWGDCGLPPDVPNAQPALEGRTSFPEDTVITYKCEESFVKIPGEKDSVICLKGSQWSDIEEFCNRSCEVPTRLNSASLKQPYITQNYFPVGTVVEYECRPGYRREPSLSPKLTCLQNLKWSTAVEFCKKKSCPNPGEIRNGQIDVPGGILFGATISFSCNTGYKLFGSTSSFCLISGSSVQWSDPLPECREIYCPAPPQIDNGIIQGERDHYGYRQSVTYACNKGFTMIGEHSIYCTVNNDEGEWSGPPPECRGKSLTSKVPPTVQKPTTVNVPTTEVSPTSQKTTTKTTTPNAQATRSTPVSRTTKHFHETTPNKGSGTTSGTTRLLSGHTCFTLTGLLGTLVTMGLLT

SEQ ID NO: 6369 - protein, 133 aa, Homo sapiens
  MISC_FEATURE (10): Xaa equals any of the naturally occurring L-amino acids
  MISC_FEATURE (13): Xaa equals any of the naturally occurring L-amino acids
  MISC_FEATURE (14): Xaa equals any of the naturally occurring L-amino acids
TNHANVNEGXVPXXMLVANDQMALGAMRAITESGLRVGADISVVGYDDTEDSSCYIPPLTTIKQDFRLLGQTSVDRLLQLSQGQAVKGNQLLPVSLVKRKTTLAPNTQTASPRALADSLMQLARQVSRLESGQ

SEQ ID NO: 6370 - protein, 332 aa, Homo sapiens
  MISC_FEATURE (199): Xaa equals any of the naturally occurring L-amino acids
  MISC_FEATURE (255): Xaa equals any of the naturally occurring L-amino acids
REQKLELHRGGGRSRTSGSPGLQEFGTSRAPASCPSRQEEWGLTSTSVLKREAPAGRDPEEPGDVGAGDPNSDQGLPVLMTQGTEDLKGPGQRCENEPLLDPVGPEPLGPESQSGKGDMVEMATRFGSTLQLDLEKGKESLLEKRLVAEEEEDEEEVEEDGPSSCSEDDYSELLQEITDNLTKKEIQIEKIHLDTSSFXEELPGEKDLAHVVEIYDFEPALKTEDLLATFSEFQEKGFRIQWVDDTHALGIFPCXASAAEALTREFSVLKIRPLTQGTKQSKLKALQRPKLLRLVKERPQTNATVARRLVARALGLQHKKKERPAVRGPLPP

SEQ ID NO: 6371 - protein, 258 aa, Homo sapiens
  MISC_FEATURE (140): Xaa equals any of the naturally occurring L-amino acids
PGRGFQRFFKAVEPKWDLKTDWQIISEIATRMGYPMHYNNTQEIWDELRHLCPDFYGATYEKMGELGFIQWPCRDTSDADQGTSYLFKEKFDTPNGLAQFFTCDWVAPIDKLTDEYPMVLSTVREVGHYSCRSMTGNCAXLAALADEPGYAQINTEDAKRLGIEDEALVWVHSRKGKIITRAQVSDRPNKGAIYMTYQWWIGACNELVTENLSPITKTPEYKYCAVRVEPIADQRAAEQYVIDEYNKLKTRLREAALA

SEQ ID NO: 6372 - protein, 38 aa, Homo sapiens
FCIFLVETGFLHVGQGSPELLTSSDLPASASQVLGLQA

SEQ ID NO: 6373 - protein, 232 aa, Homo sapiens
LPVPGRGRVFFEDLGLRDTVRMAVVPLLLLGGLWSAVGASSLGVVTCGSVVKLLNTRHNVRLHSHDVRYGSGSGQQSVTGVTSVDDSNSYWRIRGKSATVCERGTPIKCGQPIRLTHVNTGRNLHSHHFTSPLSGNQEVSAFGEEGEGDYLDDWTVLCNGPYWVRDGEVRFKHSSTEVLLSVTGEQYGRPISGQKEVHGMAQPSQNNYWKAMEGIFMKPSELLKAEAHHAEL

SEQ ID NO: 6374 - protein, 49 aa, Homo sapiens
  MISC_FEATURE (29): Xaa equals any of the naturally occurring L-amino acids
  MISC_FEATURE (38): Xaa equals any of the naturally occurring L-amino acids
  MISC_FEATURE (43): Xaa equals any of the naturally occurring L-amino acids
  MISC_FEATURE (44): Xaa equals any of the naturally occurring L-amino acids
KDKPQTRRKYLSNTSYKGLVSKIYQELLXHNKEKILKXSKKSXXMYHQR

SEQ ID NO: 6375 - protein, 74 aa, Homo sapiens
EFGTSGYIFLHLQLPHGVLIRLKSNNGYKNTLKSRHGFLLTAMREFLELDLDGPKQLENWTKDIKKKLFSTIGQ

SEQ ID NO: 6376 - protein, 129 aa, Homo sapiens
GRGKSGPGLPQSCLLCAVNGFNTLGENIADNGGVRQAYKAYLKWMAEGGKDQQLPGLDLTHEQLFFINYAQVWCGSYRPEFAIQSIKTDVHSPLKYRVLGSLQNLAAFADTFHCARGTPMHPKERCRVW

SEQ ID NO: 6377 - protein, 469 aa, Homo sapiens
  MISC_FEATURE (15): Xaa equals any of the naturally occurring L-amino acids
  MISC_FEATURE (81): Xaa equals any of the naturally occurring L-amino acids
PVAVGRVRVTAEGRXMVLQTTKGLRLLFDGDAHLLMSIPSPFRGRLCGLCGNFNGNWSDDFVLPNGSAASSVETFGAAWRXPGSSKGCGEGCGPQGCPVCLAEETAPYESNEACGQLRNPQGPFATCQAVLSPSEYFRQCVYDLCAQKGDKAFLCRSLAAYTAACQAAGVAVKPWRTDSFCPLHCPAHSHYSICTRTCQGSCAALSGLTGCTTRCFEGCECDDRFLLSQGVCIPVQDCGCTHNGRYLPVNSSLLTSDCSERCSCSSSSGLTCQAAGCPPGRVCEVKAEARNCWATRGLCVLSVGANLTTFDGARGATTSPGVYELSSRCPGLQNTIPWYRVVAEVQICHGKTEAVGQVHIFFQDGMVTLTPNKGVWVNGLRVDLPAEKLASVSVSRTPDGSLLVRQKAGVQVWLGANGKVAVIVSNDHAGKLCGACGNFDGDQTNDWHDSQEKPAMEKWRAQDFSPCYG

SEQ ID NO: 6378 - protein, 705 aa, Homo sapiens
  MISC_FEATURE (244): Xaa equals any of the naturally occurring L-amino acids
  MISC_FEATURE (337): Xaa equals any of the naturally occurring L-amino acids
REQKLELHRGGGRSRTSGSPGLQEFGTSNCNLEDLDNWTALISASKEGHVHIVEELLKCGVNLEHRDMGGWTALMWACYKGRTDVVELLLSHGANPSVTGLYSVYPIIWAAGRGHADIVHLLLQNGAKVNCSDKYGTTPLVWAARKGHLECVKHLLAMGADVDQEGANSMTALIVAVKGGYTQSVKEILKRNPNVNLTDKDGNTALMIASKEGHTEIVQDLLDAGTYVNIPDRSGDTVLIGAVXGGHVEIVRALLQKYADIDIRGQDNKTALYWAVEKGNATMVRDILQCNPDTEICTKDGETPLIKATKMRNIEVVELLLDKGAKVSAVDKKGDTXLHIAIRGRSRKLAELLLRNPKDGRLLYRPNKAGETPYNIDCSHQKSILTQIFGARHLSPTETDGDMLGYDLYSSALADILSEPTMQPPICVGLYAQWGSGKSFLLKKLEDEMKTFAGQQIEPLFQFSWLIVFLTLLLCGGLGLLFAFTVHPNLGIAVSLSFLALLYIFFIVIYFGGRREGESWNWAWVLSTRLARHIGYLELLLKLMFVNPPELPEQTTKALPVRFLFTDYNRLSSVGGETSLAEMIATLSDACEREFGFLATRLFRVFKTEDTQGKKKKKNSRGGPVPNSPYSESYYNSLAVVLQRRDWENPGVTQLNRLAAHPPFASWRNSEEARTDRPSQQLRSLNGEWQIVSVNILLKFALNFC

SEQ ID NO: 6379 - protein, 294 aa, Homo sapiens
  MISC_FEATURE (234): Xaa equals any of the naturally occurring L-amino acids
  MISC_FEATURE (242): Xaa equals any of the naturally occurring L-amino acids
  MISC_FEATURE (247): Xaa equals any of the naturally occurring L-amino acids
  MISC_FEATURE (249): Xaa equals any of the naturally occurring L-amino acids
  MISC_FEATURE (251): Xaa equals any of the naturally occurring L-amino acids
  MISC_FEATURE (259): Xaa equals any of the naturally occurring L-amino acids
  MISC_FEATURE (272): Xaa equals any of the naturally occurring L-amino acids
  MISC_FEATURE (282): Xaa equals any of the naturally occurring L-amino acids
  MISC_FEATURE (292): Xaa equals any of the naturally occurring L-amino acids
GKLVRLQVPVRNSRVDPRVRPSSWFAHGHPLYTRLPPSALQVLSAQGTQALQAAQRSAQWAINRVAMEIQHRSHECRGSGRPRPQALLQDPPEPGPCGERRPSTANVTRAHGRIVGGSAAPPGAWPWLVRLQLGGQPLCGGVLVAASWVLTAAHCFVGAPNELLWTVTLAEGSRGEQAEEVPVNRILPHPKFDPRTFHNDLALVQLWTPVTRGDRRAPCACPGAPGAPCRNRLXHRGLGRPXRRRAXGXSXERGPCSPXQHRHLPKSPGARXAPQHHALRRXLAAGVDSCQXDS

SEQ ID NO: 6380 - protein, 294 aa, Homo sapiens
  MISC_FEATURE (239): Xaa equals any of the naturally occurring L-amino acids
LSFGPSGRTLPTTTRRMTLKTPWRSLGGSWCTATSSGPPQYPMILSSLLGSGIQLFCMILIVIFVAMLGMLSPSSRGALMTTACFLFMFMGVFGGFSAGRLYRTLKGHRWKKGAFCTATLYPGVVFGICFVLNCFIWGKHSSGAVPFPTMVALLCMWFGISLPLVYLGYYFGFRKQPYDNPVRTNQIPRQIPEQRWYMNRFVGILMAGILPFGAMFIELFFIFSAIWENQFYYLFGFLXLVFIILVVSCSQISIVMVYFQLCAEDYRWWWRNFLVSGGSAFYVLVYAIFYFVNK

SEQ ID NO: 6381 - protein, 944 aa, Homo sapiens
SKKMVFLPLKWSLATMSFLLSSLLALLTVSTPSWCQSTEASPKRSDGTPFPWNKIRLPEYVIPVHYDLLIHANLTTLTFWGTTKVEITASQPTSTIILHSHHLQISRATLRKGAGERLSEEPLQVLEHPPQEQIALLAPEPLLVGLPYTVVIHYAGNLSETFHGFYKSTYRTKEGELRILASTQFEPTAARMAFPCFDEPAFKASFSIKIRREPRHLAISNMPLVKSVTVAEGLIEDHFDVTVKMSTYLVAFIISDFESVSKITKSGVKVSVYAVPDKMNQADYALDAAVTLLEFYEDYFSIPYPLPKQDLAAIPDFQSGAMENWGLTTYRESALLFDAEKSSASSKLGITMTVAHELAHQWFGNLVTMEWWNDLWLNEGFAKFMEFVSVSVTHPELKVGDYFFGKCFDAMEVDALNSSHPVSTPVENPAQIREMFDDVSYDKGACILNMLREYLSADAFKSGIVQYLQKHSYKNTKNEDLWDSMASICPTDGVKGMDGFCSRSQHSSSSSHWHQEGVDVKTMMNTWTLQRGFPLITITVRGRNVHMKQEHYMKGSDGAPDTGYLWHVPLTFITSKSDMVHRFLLKTKTDVLILPEEVEWIKFNVGMNGYYIVHYEDDGWDSLTGLLKGTHTAVSSNDRASLINNAFQLVSIGKLSIEKALDLSLYLKHETEIMPVFQGLNELIPMYKLMEKRDMNEVETQFKAFLIRLLRDLIDKQTWTDEGSVSERMLRSELLLLACVHNYQPCVQRAEGYFRKWKESNGNLSLPVDVTLAVFAVGAQSTEGWDFLYSKYQFSLSSTEKSQIEFALCRTQNKEKLQWLLDESFKGDKIKTQEFPQILTLIGRNPVGYPLAWQFLRKNWNKLVQKFELGSSSIAHMVMGTTNQFSTRTRLEEVKGFFSSLKENGSQLRCVQQTIETIEENIGWMDKNFDKIRVWLQSEKLERM

SEQ ID NO: 6382 - protein, 377 aa, Homo sapiens
  MISC_FEATURE (127): Xaa equals any of the naturally occurring L-amino acids
VRNGSFCSPGSEPPGAARGLAAPRPRCPPGVPLLRAPAAGCQLFGAPSRTQRRERARDKLELRPPRPSPAPLPLPPRGRAPTMLQGPGSLLLLFLASHCCLGSARGLFLFGQPDFSYKRSNCKPIPXNLQLCHGIEYQNMRLPNLLGHETMKEVLEQAGAWIPLVMKQCHPDTKKFLCSLFAPVCLDDLDETIQPCHSLCVQVKDRCAPVMSAFGFPWPDMLECDRFPQDNDLCIPLASSDHLLPATEEAPKVCEACKNKNDDDNDIMETLCKNDFALKIKVKEITYINRDTKIILETKSKTIYKLNGVSERDLKKSVLWLKDSLQCTCEEMNDINAPYLVMGQKQGGELVITSVKRWQKGQREFKRISRSIRKLQC

SEQ ID NO: 6383 - protein, 442 aa, Homo sapiens
  MISC_FEATURE (2): Xaa equals any of the naturally occurring L-amino acids
  MISC_FEATURE (144): Xaa equals any of the naturally occurring L-amino acids
HXPRLPALPPRLLSPSAATMSASAVFILDVKGKPLISRNYKGDVAMSKIEHFMPLLVQREEEGALAPLLSHGQVHFLWIKHSNLYLVATTSKNANASLVYSFLYKTIEVFCEYFKELEEESIRDNFVIVYELLDELMDFGFPQXTDSKILQEYITQQSNKLETGKSRVPPTVTNAVSWRSEGIKYKKNEVFIDVIESVNLLVNANGSVLLSEIVGTIKLKVFLSGMPELRLGLNDRVLFELTGRSKNKSVELEDVKFHQCVRLSRFDNDRTISFIPPDGDFELMSYRLSTQVKPLIWIESVIEKFSHSRVEIMVKAKGQFKKQSVANGVEISVPVPSDADSPRFKTSVGSAKYVPERNVVIWSIKSFPGGKEYLMRAHFGLPSVEKEEVEGRPPIGVKFEIPYFTVSGIQVRYMKIIEKSGYQALPWVRYITQSGDYQLRTS

SEQ ID NO: 6384 - protein, 347 aa, Homo sapiens
EEADAEMEQALHRFGRGLVWLSVAWLSVGRVRVRDDGDTGRGFCRAGPVLTRGPSGDSSPLPLPTSVTAAYKHADGKKIDGRRVLVDVERGRTVKGWRPRRLGGGLGGTRRGGADVNIRHSGRDDTSRYDERPGPSPLPHRDRDRDRERERRERSRERDKERERRRSRSRDRRRRSRSRDKEERRRSRERSKDKDRDRKRRSSRSRERARRERERKEELRGGGGDMAEPSEAGDAPPDDGPPGELGPDGPDGPEEKGRDRDRERRRSHRSERERRRDRDRDRDRDREHKRGERGSERGRDEARGGGGGQDNGLEGLGNDSRDMYMESEGGDGYLAPENGYLMEAAPE

SEQ ID NO: 6385 - protein, 410 aa, Homo sapiens
  MISC_FEATURE (17): Xaa equals any of the naturally occurring L-amino acids
YRSTLQYRSGIPGRPTXRLASPFRPVPMEALGKLKQFDAYPKTLEDFRVKTCGGATVTIVSGLLMLLLFLSELQYYLTTEVHPELYVDKSRGDKLKINIDVLFPHMPCAYLSIDAMDVAGEQQLDVEHNLFKQRLDKDGIPVSSEAERHELGKVEVTVFDPDSLDPDRCESCYGAEAEDIKCCNTCEDVREAYRRRGWAFKNPDTIEQCRREGFSQKMQEQKNEGCQVYGFLEVNKVAGNFHFAPGKSFQQSHVHVHDLQSFGLDNINMTHYIQHLSFGEDYPGIVNPLDHTNVTAPQASMMFQYFVKVVPTVYMKVDGEVLRTNQFSVTRHEKVANGLLGDQGLPGVFVLYELSPMMVKLTEKHRSFTHFLTGVCAIIGGMFTVAGLIDSLIYHSARAIQKKIDLGKTT

SEQ ID NO: 6386 - protein, 539 aa, Homo sapiens
  MISC_FEATURE (2): Xaa equals any of the naturally occurring L-amino acids
  MISC_FEATURE (7): Xaa equals any of the naturally occurring L-amino acids
  MISC_FEATURE (8): Xaa equals any of the naturally occurring L-amino acids
  MISC_FEATURE (11): Xaa equals any of the naturally occurring L-amino acids
IXIFTQXXAMXMITPSFNTTHYRESWYACRYRSGIPGSTHASASTTVPGLSEESTTFYSSPGSTETTAFSHSNTMSIHSQQSTPFPDSPGFTHTVLPATLTTTDIGQESTAFHSSSDATGTTPLPARSTASDLVGEPTTFYISPSPTYTTLFPASSSTSGLTEESTTFHTSPSFTSTIVSTESLETLAPGLCQEGQIWNGKQCVCPQGYVGYQCLSPLESFPVETPEKLNATLGMTVKVTYRNFTEKMNDASSQEYQNFSTLFKNRMDVVLKGDNLPQYRGVNIRRLLNGSIVVKNDVILEADYTLEYEELFENLAEIVKAKIMNETRTTLLDPDSCRKAILCYSEEDTFVDSSVTPGFDFQEQCTQKAAEGYTQFYYVDVLDGKLACVNKCTKGTKSQMNCNLGTCQLQRSGPRCLCPNTNTHWYWGETCEFNIAKSLVYGIVGAVMAVLLLALIILIILFSLSQRKRHREQYDVPQEWRKEGTPGIFQKTAIWEDQNLRESRFGLENAYNNFRPTLETVDSGTELHIQRPEMVASTV

SEQ ID NO: 6387 - protein, 365 aa, Homo sapiens
GRVGSPGGCPWVLPSLPDTQTDLDRPPGRSRTGRPDAAMAELPGPFLCGALLGFLCLSGLAVEVKVPTEPLSTPLGKTAELTCTYSTSVGDSFALEWSFVQPGKPISESHPILYFTNGHLYPTGSKSKRVSLLQNPPTVGVATLKLTDVHPSDTGTYLCQVNNPPDFYTNGLGLINLTVLVPPSNPLCSQSGQTSVGGSTALRCSSSEGAPKPVYNWVRLGTFPTPSPGSMVQDEVSGQLILTNLSLTSSGTYRCVATNQMGSASCELTLSVTEPSQGRVAGALIGVLLGVLLLSVAAFCLVRFQKERGKKPKETYGGSDLREDAIAPGISEHTCMRADSSKGFLERPSSASTVTTTKSKLPMVV

SEQ ID NO: 6388 - protein, 869 aa, Homo sapiens
  MISC_FEATURE (14): Xaa equals any of the naturally occurring L-amino acids
WIPRAAGIRHEVTXASLYLFEATGKRFYFKNVAILIPETWKTKADYVRPKLETYKNADVLVAESTPPGNDEPYTEQMGNCGEKGERIHLTPDFIAGKKLAEYGPQGRAFVHEWAHLRWGVFDEYNNDEKFYLSNGRIQAVRCSAGITGTNVVKKCQGGSCYTKRCTFNKVTGLYEKGCEFVLQSRQTEKASIMFAQHVDSIVEFCTEQNHNKEAPNKQNQKCNLRSTWEVIRDSEDFKKTTPMTTQPPNPTFSLLQIGQRIVCLVLDKSGSMATGNRLNRLNQAGQLFLLQTVELGSWVGMVTFDSAAHVQSELIQINSGSDRDTLAKRLPAAASGGTSICSGLRSAFTVIRKKYPTDGSEIVLLTDGEDNTISGCFNEVKQSGAIIHTVALGPSAAQELEELSKMTGGLQTYASDQVQNNGLIDAFGALSSGNGAVSQRSIQLESKGLTLQNSQWMNGTVIVDSTVGKDTLFLITWTTQPPQILLWDPSGQKQGGFVVDKNTKMAYLQIPGIAKVGTWKYSLQASSQTLTLTVTSRASNATLPPITVTSKTNKDTSKFPSPLVVYANIRQGASPILRASVTALIESVNGKTVTLELLDNGAGADATKDDGVYSRYFTTYDTNGRYSVKVRALGGVNAARRRVIPQQSGALYIPGWIENDEIQWNPPRPEINKDDVQHKQVCFSRTSSGGSFVASDVPNAPIPDLFPPGQITDLKAEIHGGSLINLTWTAPGDDYDHGTAHKYIIRISTSILDLRDKFNESLQVNTTALIPKEANSEEVFLFKPENITFENGTDLFIAIQAVDKVDLKSEISNIARVSLFIPPQTPPETPSPDETSAPCPNIHINSTIPGIHILKIMWKWIGELQLSIA

SEQ ID NO: 6389 - protein, 275 aa, Homo sapiens
PTRPHSSGYLPTMALVLILQLLTLWPLCHTDITPSVPPASYHPKPWLGAQPATVVTPGVNVTLRCRAPQPAWRFGLFKPGEIAPLLFRDVSSELAEFFLEEVTPAQGGSYRCCYRRPDWGPGVWSQPSDVLELLVTEELPRPSLVALPGPVVGPGANVSLRCAGRLRNMSFVLYREGVAAPLQYRHSAQPWADFTLLGARAPGTYSCYYHTPSAPYVLSQRSEVLVISWEDSGSSDYTRGNLVRLGLAGLVLISLGALVTFDWRSQNRAPAGIRP

SEQ ID NO: 6390 - protein, 708 aa, Homo sapiens
  MISC_FEATURE (53): Xaa equals any of the naturally occurring L-amino acids
PRRLLSTSRRCSRRRRLAVRCQAAPSPGARRLACRGAPGRTARPAPPPGSFGXAMGCCSSASSAAQSSKREWKPLEDRSCTDIPWLLLFILFCIGMGFICGFSIATGAAARLVSGYDSYGNICGQKNTKLEAIPNSGMDHTQRKYVFFLDPCNLDLINRKIKSVALCVAACPRQELKTLSDVQKFAEINGSALCSYNLKPSEYTTSPKSSVLCPKLPVPASAPIPFFHRCAPVNISCYAKFAEALITFVSDNSVLHRLISGVMTSKEIILGLCLLSLVLSMILMVIIRYISRVLVWILTILVILGSLGGTGVLWWLYAKQRRSPKETVTPEQLQIAEDNLRALLIYAISATVFTVILFLIMLVMRKRVALTIALFHVAGKVFIHLPLLVFQPFWTFFALVLFWVYWIMTLLFLGTTGSPVQNEQGFVEFKISGPLQYMWWYHVVGLIWISEFILACQQMTVAGAVVTYYFTRDKRNLPFTPILASVNRLIRYHLGTVAKGSFIITLVKIPRMILMYIHSQLKGKENACARCVLKSCICCLWCLEKCLNYLNQNAYTATAINSTNFCTSAKDAFVILVENALRVATINTVGDFMLFLGKVLIVCSTGLAGIMLLNYQQDYTVWVLPLIIVCLFAFLVAHCFLSIYEMVVDVLFLCFAIDTKYNDGSPGREFYMDKVLMEFVENSRKAMKEAGKGGVADSRELKPMLKKR

SEQ ID NO: 6391 - protein, 625 aa, Homo sapiens
  MISC_FEATURE (105): Xaa equals any of the naturally occurring L-amino acids
  MISC_FEATURE (222): Xaa equals any of the naturally occurring L-amino acids
  MISC_FEATURE (231): Xaa equals any of the naturally occurring L-amino acids
  MISC_FEATURE (278): Xaa equals any of the naturally occurring L-amino acids
  MISC_FEATURE (279): Xaa equals any of the naturally occurring L-amino acids
  MISC_FEATURE (440): Xaa equals any of the naturally occurring L-amino acids
AVRLPAAYIKAPGHAEPSSRTRPTTMRSCLWRCRHLSQGVQWSLLLAVLVFFLFALPSFIKEPQTKPSRHQRTENIKERSLQSLAKPKSQAPTRARRTTIYAEPXPENNALNTQTQPKAHTTGDRGKEANQAPPEEQDKVPHTAQRAAWKSPEKEKTMVNTLSPRGQDAGMASGRTEAQSWKSQDTKTTQGNGGQTRKLTASRTVSEKHQGKAATTAKTLIXKSQHRMLAXTGAVSTRTRQKGVTTAVIPPKEKKPQATPPPAPFQSPTTQRNQRLKXXNFKSEPRWDFEEKYSFEIGGLQTTCPDSVKIKASKSLWLQKLFLPNLTLFLDSRHFNQSEWDRLEHFAPPFGFMELNYSLVQKVVTRFPPVPQQQLLLASLPAGSLRCITCAVVGNGGILNNSHMGQEIDSHDYVFRLSGALIKGYEQDVGTRTSFYGFTXFSLTQSLLILGNRGFKNVPLGKDVRYLHFLEGTRDYEWLEALLMNQTVMSKNLFWFRHRPQEAFREALHMDRYLLLHPDFLRYMKNRFLRSKTLDGAHWRIYRPTTGALLLLTALQLCDQVSAYGFITEGHERFSDHYYDTSWKRLIFYINHDFKLEREVWKRLHDEGIIRLYQRPGPGTAKAKN

SEQ ID NO: 6392 - protein, 299 aa, Homo sapiens
QMEKKECPEKSSSSEEELPRRVYRELPCVSETLCDISHFFQEDDETEAEPLLFRAVPECQLSGGDIPSVSEEQESSEGQDSGDICSEENQIVSSYASKVCFEIEEDYKNRQFLGPEGNVDVELIDKSTNRYSVWFPTAGWYLWSATGLGFLVRDEVTVTIAFGSWSQHLALDLQHHEQWLVGGPLFDVTAEPEEAVAEIHLPHFISLQAGEVDVSWFLVAHFKNEGMVLEHPARVEPFYAVLESPSFSLMGILLRIASGTRLSIPITSNTLIYYHPHPEDIKFHLYLVPSDALLTKTLF

SEQ ID NO: 6393 - protein, 273 aa, Homo sapiens
  MISC_FEATURE (210): Xaa equals any of the naturally occurring L-amino acids
ETRVKTSLELLRTQLEPTGTVGNTIMTSQPVPNETIIVLPSNVINFSQAEKPEPTNQGQDSLKKHLHAEIKVIGTIQILCGMMVLSLGIILASASFSPNFTQVTSTLLNSAYPFIGPFFFIISGSLSIATEKRLTKLLVHSSLVGSILSALSALVGFIILSVKQATLNPASLQCELDKNNIPTRSYVSYFYHDSLYTTDCYTAKASLAGXLSLMLICTLLEFCLAVLTAVLRWKQAYSDFPGSVLFLPHSYIGNSGMSSKMTHDCGYEELLTS

SEQ ID NO: 6394 - protein, 166 aa, Homo sapiens
LHPQGRRKMASRSMRLLLLLSCLAKTGVLGDIIMRPSCAPGWFYHKSNCYGYFRKLRNWSDAELECQSYGNGAHLASILSLKEASTIAEYISGYQRSQPIWIGLHDPQKRQQWQWIDGAMYLYRSWSGKSMGGNKHCAEMSSNNNFLTWSSNECNKRQHFLCKYRP

SEQ ID NO: 6395 - protein, 202 aa, Homo sapiens
  MISC_FEATURE (1): Xaa equals any of the naturally occurring L-amino acids
  MISC_FEATURE (7): Xaa equals any of the naturally occurring L-amino acids
XPGRTSXTPHPSRRLTQGRWVRKSRVAMEKIPVSAFLLLVALSYTLARDTTVKPGAKKDTKDSRPKLPQTLSRGWGDQLIWTQTYEEALYKSKTSNKPLMIIHHLDECPHSQALKKVFAENKEIQKLAEQFVLLNLVYETTDKHLSPDGQYVPRIMFVDPSLTVRADITGRYSNRLYAYEPADTALLLDNMKKALKLLKTEL

SEQ ID NO: 6396 - protein, 251 aa, Homo sapiens
RSGSLMAAAAATKILLCLPLLLLLSGWSRAGRADPHSLCYDITVIPKFRPGPRWCAVQGQVDEKTFLHYDCGNKTVTPVSPLGKKLNVTTAWKAQNPVLREVVDILTEQLRDIQLENYTPKEPLTLQARMSCEQKAEGHSSGSWQFSFDGQIFLLFDSEKRMWTTVHPGARKMKEKWENDKVVAMSFHYFSMGDCIGWLEDFLMGMDSTLEPSAGAPLAMSSGTTQLRATATTLILCCLLIILPCFILPGI

SEQ ID NO: 6397 - protein, 241 aa, Homo sapiens
  MISC_FEATURE (205): Xaa equals any of the naturally occurring L-amino acids
RDPPRPVQSGLGAAGTLSWLPPPEQPVLVPRLPAPRPVMTLRPSLLPLHLLLLLLLSAAVCRAEAGLETESPVRTLQVETLVEPPEPCAEPAAFGDTLHIHYTGSLVDGRIIDTSLTRDPLVIELGQKQVIPGLEQSLLDMCVGEKRRAIIPSHLAYGKRGFPPSVPADAVVQYDVELIALIRANYWLKLVKGILPLVGMAMVPXSWASLGITYTERPIDPKSPKRSSRKRNETRAKRNNK

SEQ ID NO: 6398 - protein, 223 aa, Homo sapiens
GFLLHPVYLLRVSFPLPTPAGQSWAPAPEHSRAARVSRLETHDTKEIQVKKYKCGLIKPCPANYFAFKICSGAANVVGPTMCFEDRMIMSPVKNNVGRGLNIALVNGTTGAVLGQKAFDMYSGDVMHLVKFLKEIPGGALVLVASYDDPGTKMNDESRKLFSDLGSSYAKQLGFRDSWVFIGAKDLRGKSPFEQFLKNSPDTNKYEGWPELLEMEGCMPPKPF

SEQ ID NO: 6399 - protein, 268 aa, Homo sapiens
PGSDVAFHFNPRFDGWDKVVFNTLQGGKWGSEERKRSMPFKKGAAFELVFIVLAEHYKVVVNGNPFYEYGHRLPLQMVTHLQVDGDLQLQSINFIGGQPLRPQGPPMMPPYPGPGHCHQQLNSLPTMEGPPTFNPPVPYFGRLQGGLTARRTIIIKGYVPPTGKSFAINFKVGSSGDIALHINPRMGNGTVVRNSLLNGSWGSEEKKITHNPFGPGQFFDLSIRCGLDRFKVYANGQHLFDFAHRLSAFQRVDTLEIQGDVTLSYVQI

SEQ ID NO: 6400 - protein, 279 aa, Homo sapiens
PRVRPRVRWTAAMRLTVLCAVCLLPGSLALPLPQEAGGMSELQWEQAQDYLKRFYLYDSETKNANSLEAKLKEMQKFFGLPITGMLNSRVIEIMQKPRCGVPDVAEYSLFPNSPKWTSKVVTYRIVSYTRDLPHITVDRLVSKALNMWGKEIPLHFRKVVWGTADIMIGFARGAHGDSYPFDGPGNTLAHAFAPGTGLGGDAHFDEDERWTDGSSLGINFLYAATHELGHSLGMGHSSDPNAVMYPTYGNGDPQNFKLSQDDIKGIQKLYGKRSNSRKK

SEQ ID NO: 6401 - protein, 245 aa, Homo sapiens
LQFSREEAGVDLVSPTPLTPPDPGAASATATAPAPAAARRGEAMAKVSVLNVAVLENPSPFHSPFRFEISFECSEALADDLEWKIIYVGSAESEEFDQILDSVLVGPVPAGRHMFVFQADAPNPSLIPETDAVGVTVVLITCTYHGQEFIRVGYYVNNEYLNPELRENPPMKPDFSQLQRNILASNPRVTRFHINWDNNMDRLEAIETQDPSLGCGLPLNCTPIKGLGLPGCIPGLLPENSMDCI

SEQ ID NO: 6402 - protein, 472 aa, Homo sapiens
  MISC_FEATURE (139): Xaa equals any of the naturally occurring L-amino acids
  MISC_FEATURE (164): Xaa equals any of the naturally occurring L-amino acids
LKGEQGERGQWPERALGTGGTLFFLPRGPWADGITQKNAREAAFEKGSHYPRAQTERMELRKYGPGRLAGTVIGGAAQSKSQTKSDSITKEFLPGLYTAPSSPFPPSQVSDHQVLNDAEVAALLENFSSSYDYGENESXSCCTSPPCPQDFSLNFDRAFLPALXSLLFLLGLLGNGAVAAVLLSRRTALSSTDTFLLHLAVADTLLVLTLPLWAVDAAVQWVFGSGLCKVAGALFNINFYAGALLLACISFDRYLNIVHATQLYRRGPPARVTLTCLAVWGLCLLFALPDFIFLSAHHDERLNATHCQYNFPQVGRTALRVLQLVAGFLLPLLVMAYCYAHILAVLLVSRGQRRLRAMRLVVVVVVAFALCWTPYHLVVLVDILMDLGALARNCGRESRVDVAKSVTSGLGYMHCCLNPLLYAFVGVKFRERMWMLLLRLGCPNQRGLQRQPSSSRRDSSWSETSEASYSGL

SEQ ID NO: 6403 - protein, 231 aa, Homo sapiens
AREMAAQQRDCGGAAQLAGPAAEADPLGRFTCPVCLEVYEKPVQVPCGHVFCSACLQECLKPKKPVCGVCRSALAPGVRAVELERQIESTETSCHGCRKNFFLSKIRSHVATCSKYQNYIMEGVKATIKDASLQPRNVPNRYTFPCPYCPEKNFDQEGLVEHCKLFHSTDTKSVVCPICASMPWGDPNYRSANFREHIQRRHRFSYDTFVDYDVDEEDMMNQVLQRSIIDQ

SEQ ID NO: 6404 - protein, 625 aa, Homo sapiens
AVRLPAAYIKAPGHAEPSSRTRPTTMRSCLWRCRHLSQGVQWSLLLAVLVFFLFALPSFIKEPQTKPSRHQRTENIKERSLQSLAKPKSQAPTRARRTTIYAEPVPENNALNTQTQPKAHTTGDRGKEANQAPPEEQDKVPHTAQRAAWKSPEKEKTMVNTLSPRGQDAGMASGRTEAQSWKSQDTKTTQGNGGQTRKLTASRTVSEKHQGKAATTAKTLIPKSQHRMLAPTGAVSTRTRQKGVTTAVIPPKEKKPQATPPPAPFQSPTTQRNQRLKAANFKSEPRWDFEEKYSFEIGGLQTTCPDSVKIKASKSLWLQKLFLPNLTLFLDSRHFNQSEWDRLEHFAPPFGFMELNYSLVQKVVTRFPPVPQQQLLLASLPAGSLRCITCAVVGNGGILNNSHMGQEIDSHDYVFRLSGALIKGYEQDVGTRTSFYGFTAFSLTQSLLILGNRGFKNVPLGKDVRYLHFLEGTRDYEWLEALLMNQTVMSKNLFWFRHRPQEAFREALHMDRYLLLHPDFLRYMKNRFLRSKTLDGAHWRIYRPTTGALLLLTALQLCDQVSAYGFITEGHERFSDHYYDTSWKRLIFYINHDFKLEREVWKRLHDEGIIRLYQRPGPGTAKAKN

SEQ ID NO: 6405 - protein, 165 aa, Homo sapiens
  MISC_FEATURE (1): Xaa equals any of the naturally occurring L-amino acids
  MISC_FEATURE (2): Xaa equals any of the naturally occurring L-amino acids
  MISC_FEATURE (4): Xaa equals any of the naturally occurring L-amino acids
  MISC_FEATURE (5): Xaa equals any of the naturally occurring L-amino acids
  MISC_FEATURE (19): Xaa equals any of the naturally occurring L-amino acids
XXQXXPMITPSSNTTHYRXLLVRLQVPVRNSRVDPRVRFSSDKTALVQYFMLSEQIVYLCLSICSQGGCLQTFDQDIHLIYLVFFFYCCFFLRQRFSLSPRLECCGVILAHCNLRLPGSSNFPASASRVPGTICAHHHAWLIFCIFSRDGVSPCWLGWSRTPNLK

SEQ ID NO: 6406 - protein, 35 aa, Homo sapiens
FQLLGRLRQENCLNPGDGGCSDPRSCQCTPAWVTE

SEQ ID NO: 6407 - protein, 38 aa, Homo sapiens
  MISC_FEATURE (13): Xaa equals any of the naturally occurring L-amino acids
  MISC_FEATURE (21): Xaa equals any of the naturally occurring L-amino acids
  MISC_FEATURE (35): Xaa equals any of the naturally occurring L-amino acids
  MISC_FEATURE (36): Xaa equals any of the naturally occurring L-amino acids
  MISC_FEATURE (37): Xaa equals any of the naturally occurring L-amino acids
IPQMQPGGVQAPXIQQVLAPXPGGISPQTGGIIQXXXI

SEQ ID NO: 6408 - protein, 53 aa, Homo sapiens
NSAELWAEEYAHVVLRKADIDLTKRAGELTEDEVERVITIMQNPRHTRSQTGS

SEQ ID NO: 6409 - protein, 54 aa, Homo sapiens
GVPVPPSLAGIMQRTFAWLLDRVQHLGAPVTLRASYLEIYNEQVSAVEGTQPTP

SEQ ID NO: 6410 - protein, 73 aa, Homo sapiens
GKIDPDQTVIRAESLDGGDTSSTVVESQEGLSGTHVPESSDCCEGFINTFSSNDMDGQDLDYFNIDERAKMAH

SEQ ID NO: 6411 - protein, 101 aa, Homo sapiens
  MISC_FEATURE (3): Xaa equals any of the naturally occurring L-amino acids
  MISC_FEATURE (7): Xaa equals any of the naturally occurring L-amino acids
  MISC_FEATURE (11): Xaa equals any of the naturally occurring L-amino acids
  MISC_FEATURE (15): Xaa equals any of the naturally occurring L-amino acids
  MISC_FEATURE (39): Xaa equals any of the naturally occurring L-amino acids
  MISC_FEATURE (54): Xaa equals any of the naturally occurring L-amino acids
  MISC_FEATURE (55): Xaa equals any of the naturally occurring L-amino acids
  MISC_FEATURE (65): Xaa equals any of the naturally occurring L-amino acids
  MISC_FEATURE (78): Xaa equals any of the naturally occurring L-amino acids
  MISC_FEATURE (87): Xaa equals any of the naturally occurring L-amino acids
  MISC_FEATURE (91): Xaa equals any of the naturally occurring L-amino acids
ESXWKTXHYSXSWYXCRYRSGIPGSTHASAPGTSTNGKXLAATAPTPGIPILQXXPSAPPPKAQXVSPVQAPPPGGSXQLLPGKVLXPLAXPSMSVRGGGA

SEQ ID NO: 6412 - protein, 104 aa, Homo sapiens
  MISC_FEATURE (23): Xaa equals any of the naturally occurring L-amino acids
  MISC_FEATURE (55): Xaa equals any of the naturally occurring L-amino acids
  MISC_FEATURE (75): Xaa equals any of the naturally occurring L-amino acids
  MISC_FEATURE (79): Xaa equals any of the naturally occurring L-amino acids
  MISC_FEATURE (86): Xaa equals any of the naturally occurring L-amino acids
  MISC_FEATURE (91): Xaa equals any of the naturally occurring L-amino acids
  MISC_FEATURE (93): Xaa equals any of the naturally occurring L-amino acids
  MISC_FEATURE (96): Xaa equals any of the naturally occurring L-amino acids
GNYYLKFSVVSDKNHMHFGAITXAMGIRFKSYCSNLVRTLMVDPSQEVQENYNFXLQLQEELLKELRHGEKICDXYNAXMDVVKKXKPELXNXNYXKPRVRDGN

SEQ ID NO: 6413 - protein, 68 aa, Homo sapiens
  MISC_FEATURE (3): Xaa equals any of the naturally occurring L-amino acids
  MISC_FEATURE (5): Xaa equals any of the naturally occurring L-amino acids
  MISC_FEATURE (6): Xaa equals any of the naturally occurring L-amino acids
  MISC_FEATURE (10): Xaa equals any of the naturally occurring L-amino acids
  MISC_FEATURE (14): Xaa equals any of the naturally occurring L-amino acids
  MISC_FEATURE (37): Xaa equals any of the naturally occurring L-amino acids
  MISC_FEATURE (68): Xaa equals any of the naturally occurring L-amino acids
PGXEXXPTVXQVEXAAHSIQVEKAAHSIQVEEGSPQXSRVRRQPTGIQGEEGCPQASRVRKAAHRHPX

SEQ ID NO: 6414 - protein, 88 aa, Homo sapiens
  MISC_FEATURE (68): Xaa equals any of the naturally occurring L-amino acids
  MISC_FEATURE (77): Xaa equals any of the naturally occurring L-amino acids
  MISC_FEATURE (85): Xaa equals any of the naturally occurring L-amino acids
  MISC_FEATURE (88): Xaa equals any of the naturally occurring L-amino acids
VEDPLRSCCLVAADAQEPEGAGSDSGDSPASSCSSSEDSEQRGVGAGGPEEGAPPATSAERTNGGADXAWAFLTFTXTLATRSRXSRX

SEQ ID NO: 6415 - protein, 75 aa, Homo sapiens
  MISC_FEATURE (56): Xaa equals any of the naturally occurring L-amino acids
KFYMNSYFFLDNMLIFIDFTNLQHMGDFGSIHRPGIVVDYQNKSTNVTVAAARGIXRKMMQPFNKPSGTFIKNPN

SEQ ID NO: 6416 - protein, 62 aa, Homo sapiens
  MISC_FEATURE (42): Xaa equals any of the naturally occurring L-amino acids
  MISC_FEATURE (45): Xaa equals any of the naturally occurring L-amino acids
  MISC_FEATURE (52): Xaa equals any of the naturally occurring L-amino acids
  MISC_FEATURE (53): Xaa equals any of the naturally occurring L-amino acids
ALSQITLRKSVESALRQLEREKALLQHKNAEYQRKADHEADXKRXLENDGLXXRILNTHQEK

SEQ ID NO: 6417 - protein, 48 aa, Homo sapiens
RQSQLAQDERVSRSYLALATETVDMFHILPQSNVSPRARFCSMKVWSL

SEQ ID NO: 6418 - protein, 104 aa, Homo sapiens
  MISC_FEATURE (48): Xaa equals any of the naturally occurring L-amino acids
GTSMDVISIDKTGENFRLIYDTKGRFAVHRITPEEAKYKLCKVRKIFXGTKGIPHLVTHDARTIRYPDPLIKVNDTIQIDLETGKITDFIKFDTGNLCMVTWRC

SEQ ID NO: 6419 - protein, 49 aa, Homo sapiens
  MISC_FEATURE (29): Xaa equals any of the naturally occurring L-amino acids
  MISC_FEATURE (48): Xaa equals any of the naturally occurring L-amino acids
TSLPAVFPGQVRRTLFITGLPRDARKETXESHFRDAYPTCKVVDVQLXY

SEQ ID NO: 6420 - protein, 191 aa, Homo sapiens
  MISC_FEATURE (5): Xaa equals any of the naturally occurring L-amino acids
  MISC_FEATURE (121): Xaa equals any of the naturally occurring L-amino acids
  MISC_FEATURE (157): Xaa equals any of the naturally occurring L-amino acids
  MISC_FEATURE (171): Xaa equals any of the naturally occurring L-amino acids
  MISC_FEATURE (176): Xaa equals any of the naturally occurring L-amino acids
  MISC_FEATURE (180): Xaa equals any of the naturally occurring L-amino acids
  MISC_FEATURE (182): Xaa equals any of the naturally occurring L-amino acids
  MISC_FEATURE (191): Xaa equals any of the naturally occurring L-amino acids
GREIXRSFHLVISTEHRPPTMEFGPSWVFLVAILKGVHCEVQLVESGGGLVQPGRSLRLSCTTSGFTFGDYSMSWVRQAPGKGLEWVGFIRSKAHGGTTEYAASVKRQIHHLKEMIPQASXIWQMNSLKPRTQTLLLSRHDYRHTPGYWGQGTLVTXFSGFHQGPSSSPWXPCSRXTSEXQXPGLAGQGLX

SEQ ID NO: 6421 - protein, 54 aa, Homo sapiens
  MISC_FEATURE (12): Xaa equals any of the naturally occurring L-amino acids
GNKSWSSTAVAXALELVDPPGCRNSARGSFQIKNWLPFFVRVSDAATHSAPQNS

SEQ ID NO: 6422 - protein, 53 aa, Homo sapiens
  MISC_FEATURE (1): Xaa equals any of the naturally occurring L-amino acids
  MISC_FEATURE (2): Xaa equals any of the naturally occurring L-amino acids
  MISC_FEATURE (3): Xaa equals any of the naturally occurring L-amino acids
  MISC_FEATURE (5): Xaa equals any of the naturally occurring L-amino acids
  MISC_FEATURE (21): Xaa equals any of the naturally occurring L-amino acids
XXXTXTLTKGNKSWSSTCGAXALELVDPPGCRNSARGGAPVMLSTLQMCCLSH

SEQ ID NO: 6423 - protein, 67 aa, Homo sapiens
  MISC_FEATURE (15): Xaa equals any of the naturally occurring L-amino acids
  MISC_FEATURE (28): Xaa equals any of the naturally occurring L-amino acids
  MISC_FEATURE (35): Xaa equals any of the naturally occurring L-amino acids
TLTKGNKSWSSTAVXAALELVDPPGCRXSARAAAXGPLQPCRIKTRRRKNHQKQGRVEKVQKKDKTQ

SEQ ID NO: 6424 - protein, 50 aa, Homo sapiens
  MISC_FEATURE (1): Xaa equals any of the naturally occurring L-amino acids
  MISC_FEATURE (2): Xaa equals any of the naturally occurring L-amino acids
  MISC_FEATURE (17): Xaa equals any of the naturally occurring L-amino acids
  MISC_FEATURE (18): Xaa equals any of the naturally occurring L-amino acids
XXTLTKGNKSWSSTAVXXALELVDPPGCRNSARGGIVCLLLMNLQWLQND

SEQ ID NO: 6425 - protein, 52 aa, Homo sapiens
  MISC_FEATURE (1): Xaa equals any of the naturally occurring L-amino acids
  MISC_FEATURE (2): Xaa equals any of the naturally occurring L-amino acids
XXTLTKGNKSWSSTAVTAALELVDPPGCRNSARATTGESIHQVTEFLQRGHY

SEQ ID NO: 6426 - protein, 39 aa, Homo sapiens
  MISC_FEATURE (1): Xaa equals any of the naturally occurring L-amino acids
  MISC_FEATURE (4): Xaa equals any of the naturally occurring L-amino acids
  MISC_FEATURE (5): Xaa equals any of the naturally occurring L-amino acids
  MISC_FEATURE (6): Xaa equals any of the naturally occurring L-amino acids
  MISC_FEATURE (11): Xaa equals any of the naturally occurring L-amino acids
XNKXXXSTAVXAALELVDPPGCRNSARAVLFSIMNSWLR

SEQ ID NO: 6427 - protein, 51 aa, Homo sapiens
  MISC_FEATURE (1): Xaa equals any of the naturally occurring L-amino acids
XTLTKGNKSWSSTAVAAALELVDPPGCRNSARGRLMMTFSQVLGKKLKLLL

SEQ ID NO: 6428 - protein, 40 aa, Homo sapiens
  MISC_FEATURE (11): Xaa equals any of the naturally occurring L-amino acids
STLIKGTKSWXSTAVAAALELVDPPGCRNSARDDIETSVI

SEQ ID NO: 6429 - protein, 41 aa, Homo sapiens
  MISC_FEATURE (2): Xaa equals any of the naturally occurring L-amino acids
  MISC_FEATURE (3): Xaa equals any of the naturally occurring L-amino acids
GXXNLTKGNKSWSSTAVAAALELVDPPGCRNSARGLISSHL

SEQ ID NO: 6430 - protein, 37 aa, Homo sapiens
  MISC_FEATURE (1): Xaa equals any of the naturally occurring L-amino acids
  MISC_FEATURE (3): Xaa equals any of the naturally occurring L-amino acids
XSXLTKGNKSWSSTAVAAALELVDPPGCRNSARAFGF

SEQ ID NO: 6431 - protein, 29 aa, Homo sapiens
KNHKPSVLLGFDMSELKNVKHRLNFEYEP

SEQ ID NO: 6432 - protein, 85 aa, Homo sapiens
  MISC_FEATURE (66): Xaa equals any of the naturally occurring L-amino acids
  MISC_FEATURE (82): Xaa equals any of the naturally occurring L-amino acids
  MISC_FEATURE (83): Xaa equals any of the naturally occurring L-amino acids
AIQRTPKIQVYSRHPAENGKSNFLNCYVSGFHPSDIEVDLLKNGERIEKVEHSDLSFSKDWLSISXTTLNSPPLKKMSMPAXXTM

SEQ ID NO: 6433 - protein, 172 aa, Homo sapiens
  MISC_FEATURE (103): Xaa equals any of the naturally occurring L-amino acids
  MISC_FEATURE (124): Xaa equals any of the naturally occurring L-amino acids
  MISC_FEATURE (153): Xaa equals any of the naturally occurring L-amino acids
  MISC_FEATURE (159): Xaa equals any of the naturally occurring L-amino acids
  MISC_FEATURE (170): Xaa equals any of the naturally occurring L-amino acids
  MISC_FEATURE (172): Xaa equals any of the naturally occurring L-amino acids
PQSKVLYITSNPMSLCQASRHQPNVNDLLVHGMPLQPRNLSLMDKLLDLDDKLLMRPGSSTILSTRNWPNRAVEFSTSSLSYTVQSTRRRNPPPRTLHPISTXHSCAETPGSVEEILRGARVPXAPDSLSFSLTDAPELKLICYHLLGTAEVXTCDHCXGHRDKMNPQWXLX

SEQ ID NO: 6434 - protein, 129 aa, Homo sapiens
  MISC_FEATURE (104): Xaa equals any of the naturally occurring L-amino acids
  MISC_FEATURE (105): Xaa equals any of the naturally occurring L-amino acids
  MISC_FEATURE (109): Xaa equals any of the naturally occurring L-amino acids
  MISC_FEATURE (112): Xaa equals any of the naturally occurring L-amino acids
  MISC_FEATURE (124): Xaa equals any of the naturally occurring L-amino acids
  MISC_FEATURE (127): Xaa equals any of the naturally occurring L-amino acids
FGTSIEVRNYSRLKPGYRWERQLVFRSKLTMHTAFNRKDNAHPAEVTALGISKDHSRILVGDSRGRVFSWSVSDQPGRSAADHWVKDEGGDSCSGCSVRFSLTXXRHHXRNXGSALLPEVHRFXSEXNV

SEQ ID NO: 6435 - protein, 118 aa, Homo sapiens
DELSEALLLIKAQKEQKNGDLSFLVKVDSEINKDLERSMRELQATHAETVQELEKTRNMLIMQHKINKDYQMEVEAVTRKMENLQQDYELKVEQYVHLLDIRAARIHKLEEAVSLGSI

SEQ ID NO: 6436 - protein, 51 aa, Homo sapiens
  MISC_FEATURE (5): Xaa equals any of the naturally occurring L-amino acids
  MISC_FEATURE (15): Xaa equals any of the naturally occurring L-amino acids
  MISC_FEATURE (50): Xaa equals any of the naturally occurring L-amino acids
  MISC_FEATURE (51): Xaa equals any of the naturally occurring L-amino acids
ERGGXVNLLKLVPCXYRSGIPGSTHASVQDGATGAGLSAHQARPILRPVXX

SEQ ID NO: 6437 - protein, 108 aa, Homo sapiens
  MISC_FEATURE (34): Xaa equals any of the naturally occurring L-amino acids
  MISC_FEATURE (36): Xaa equals any of the naturally occurring L-amino acids
  MISC_FEATURE (86): Xaa equals any of the naturally occurring L-amino acids
  MISC_FEATURE (97): Xaa equals any of the naturally occurring L-amino acids
  MISC_FEATURE (108): Xaa equals any of the naturally occurring L-amino acids
VALLALLCASASGNAIQARSSSYSGEYGGGGGKXFXHSGNQLDGPITALRVRVNTYYIVGLQVRYGKVWSDYVGGRNGDLEEIFLXPGESVIQVSGXYKWYLKEAGIX

SEQ ID NO: 6438 - protein, 89 aa, Homo sapiens
  MISC_FEATURE (24): Xaa equals any of the naturally occurring L-amino acids
  MISC_FEATURE (48): Xaa equals any of the naturally occurring L-amino acids
  MISC_FEATURE (54): Xaa equals any of the naturally occurring L-amino acids
  MISC_FEATURE (64): Xaa equals any of the naturally occurring L-amino acids
  MISC_FEATURE (66): Xaa equals any of the naturally occurring L-amino acids
  MISC_FEATURE (69): Xaa equals any of the naturally occurring L-amino acids
  MISC_FEATURE (79): Xaa equals any of the naturally occurring L-amino acids
PFSVPQPLAMPFRPGLPPIVESMXVVVETILSFWQPVGRPITALRVRXNTYYIXGLQVAYGQGXEXTIXVCSPTGKPGXKIFSCPPWGN

SEQ ID NO: 6439 - protein, 181 aa, Homo sapiens
  MISC_FEATURE (13): Xaa equals any of the naturally occurring L-amino acids
  MISC_FEATURE (132): Xaa equals any of the naturally occurring L-amino acids
  MISC_FEATURE (164): Xaa equals any of the naturally occurring L-amino acids
  MISC_FEATURE (176): Xaa equals any of the naturally occurring L-amino acids
  MISC_FEATURE (178): Xaa equals any of the naturally occurring L-amino acids
  MISC_FEATURE (181): Xaa equals any of the naturally occurring L-amino acids
FFSIMFTPLDRYXDRNMQINRHQYCALKAMSAVLCCGPVADNVGLSSDGYLYKWLDNILDSLDKKVHQLGCEAVTLLLELNPDQSNLMYWAVDRCYTGSGRVAAGCFKAIANVFQNRDYQCDTVMLLNLILXKAADSSRSIYEVAMQLLQILEPKMFRYAHKLXVQRTEWRTHPVXPXHNX

SEQ ID NO: 6440 - protein, 78 aa, Homo sapiens
  MISC_FEATURE (4): Xaa equals any of the naturally occurring L-amino acids
GRVXGRVGGAVFQIYIIKDLEKLLMIAGEERALCLVDVKKVKQSLAQSHLPAQPDISPNIFEAVKGCHLFGAGQELRT

SEQ ID NO: 6441 - protein, 62 aa, Homo sapiens
  MISC_FEATURE (9): Xaa equals any of the naturally occurring L-amino acids
  MISC_FEATURE (12): Xaa equals any of the naturally occurring L-amino acids
  MISC_FEATURE (16): Xaa equals any of the naturally occurring L-amino acids
  MISC_FEATURE (27): Xaa equals any of the naturally occurring L-amino acids
  MISC_FEATURE (30): Xaa equals any of the naturally occurring L-amino acids
  MISC_FEATURE (32): Xaa equals any of the naturally occurring L-amino acids
  MISC_FEATURE (41): Xaa equals any of the naturally occurring L-amino acids
  MISC_FEATURE (44): Xaa equals any of the naturally occurring L-amino acids
  MISC_FEATURE (45): Xaa equals any of the naturally occurring L-amino acids
  MISC_FEATURE (47): Xaa equals any of the naturally occurring L-amino acids
  MISC_FEATURE (48): Xaa equals any of the naturally occurring L-amino acids
  MISC_FEATURE (49): Xaa equals any of the naturally occurring L-amino acids
  MISC_FEATURE (57): Xaa equals any of the naturally occurring L-amino acids
GFCRSSTLXQHXRVHXGERPYKCDDCXKAXSXSSDLIRHQXTHXXDXXXPGAPAWVXGVGRR

SEQ ID NO: 6442 - protein, 72 aa, Homo sapiens
ELRCSLQLAETEREGGFSPHISPFTAVNDLGHLLGRAGFNTLTVDTDEIQVNYPGMFELMEDLQEQKSRMLT

SEQ ID NO: 6443 - protein, 151 aa, Homo sapiens
  MISC_FEATURE (1): Xaa equals any of the naturally occurring L-amino acids
  MISC_FEATURE (2): Xaa equals any of the naturally occurring L-amino acids
  MISC_FEATURE (6): Xaa equals any of the naturally occurring L-amino acids
  MISC_FEATURE (14): Xaa equals any of the naturally occurring L-amino acids
  MISC_FEATURE (134): Xaa equals any of the naturally occurring L-amino acids
  MISC_FEATURE (136): Xaa equals any of the naturally occurring L-amino acids
  MISC_FEATURE (143): Xaa equals any of the naturally occurring L-amino acids
  MISC_FEATURE (151): Xaa equals any of the naturally occurring L-amino acids
XXKLPXEGPLGRLXVPVRNSRVDPRVRPRVRPRVREFRKAKASSTGSFTAPDPGLKRKSPPEALSGSLPPATTCPASSTPAPTIIPAPAAPGKPASAATVKRKRKSRWGPEEDKVELPPAELVQRDVDASPSPXQXRTSRGSXMRRGSLWX

SEQ ID NO: 6444 - protein, 104 aa, Homo sapiens
  MISC_FEATURE (2): Xaa equals any of the naturally occurring L-amino acids
  MISC_FEATURE (89): Xaa equals any of the naturally occurring L-amino acids
  MISC_FEATURE (92): Xaa equals any of the naturally occurring L-amino acids
  MISC_FEATURE (94): Xaa equals any of the naturally occurring L-amino acids
DXSRYRSGIPGSTHASADACFAFYAYHYRFNGQYSSLALVTYWLFIQVRPGRQAGGRPAVPFQAGEAAAGEDALWGRPKRAEVAWMVPXGLXSXSSGWVVKGGP

SEQ ID NO: 6445 - protein, 83 aa, Homo sapiens
  MISC_FEATURE (83): Xaa equals any of the naturally occurring L-amino acids
GTSACGAGGGAPRGSAVFRAAGLDGALGKALKEQKYDRQLRLWGDHGQEALESAHVCLINATATGTEILKNLVLPGIGSFTIX

SEQ ID NO: 6446 - protein, 26 aa, Homo sapiens
  MISC_FEATURE (24): Xaa equals any of the naturally occurring L-amino acids
TSSAKDVPAGSLRTALNELKRLIXSI

SEQ ID NO: 6447 - protein, 91 aa, Homo sapiens
HGAGNEAETPPAPKLHWDPLPGLDEPGRGQHSGSLGTGQLPLPLLSARPDGARERRWPRQPASTSEPGSPSPRTCAPFTRTQNILKCYCIP

SEQ ID NO: 6448 - protein, 114 aa, Homo sapiens
  MISC_FEATURE (1): Xaa equals any of the naturally occurring L-amino acids
XLMKDQFYAQSSASQRRLPCLAVGGSGYAPEQLSGFWLSWCPRGTGSLLSGGWGFMPRDDRLGCGVAGAQTQMPVAGGPQSGLGLPSGPFPQLHCCPREPRSPGVKDRGGRGQA

SEQ ID NO: 6449 - protein, 64 aa, Homo sapiens
  MISC_FEATURE (3): Xaa equals any of the naturally occurring L-amino acids
  MISC_FEATURE (4): Xaa equals any of the naturally occurring L-amino acids
  MISC_FEATURE (7): Xaa equals any of the naturally occurring L-amino acids
  MISC_FEATURE (16): Xaa equals any of the naturally occurring L-amino acids
TTXXTLXASPSRGRLXGVQGTCLGRCESPLPSHPCPNRWSCCLESEELWCPCFGPGPAPASDRP

SEQ ID NO: 6450 - protein, 81 aa, Homo sapiens
GLGLKHLWKPAVEAYGEFLCMFEENYPETLKRLFVVKAPKLFPVAYNLIKPFLSEDTRKKIMVLGGGSLCQMERMLVLGFS

SEQ ID NO: 6451 - protein, 117 aa, Homo sapiens
  MISC_FEATURE (18): Xaa equals any of the naturally occurring L-amino acids
  MISC_FEATURE (22): Xaa equals any of the naturally occurring L-amino acids
  MISC_FEATURE (24): Xaa equals any of the naturally occurring L-amino acids
ATLDRKVPSPEAFLGKPXSSWXDXAKLHCSDNVDLEEAGKEGGKSREVMRLNKEDMHLFGHYPAHDDFYLVVCSACNQVVKPQVFQSHCAGPATVPPSGSSFSFSDSWARCVHLAPC

SEQ ID NO: 6452 - protein, 70 aa, Homo sapiens
  MISC_FEATURE (5): Xaa equals any of the naturally occurring L-amino acids
  MISC_FEATURE (15): Xaa equals any of the naturally occurring L-amino acids
  MISC_FEATURE (16): Xaa equals any of the naturally occurring L-amino acids
  MISC_FEATURE (20): Xaa equals any of the naturally occurring L-amino acids
  MISC_FEATURE (24): Xaa equals any of the naturally occurring L-amino acids
  MISC_FEATURE (25): Xaa equals any of the naturally occurring L-amino acids
  MISC_FEATURE (30): Xaa equals any of the naturally occurring L-amino acids
  MISC_FEATURE (33): Xaa equals any of the naturally occurring L-amino acids
  MISC_FEATURE (42): Xaa equals any of the naturally occurring L-amino acids
  MISC_FEATURE (49): Xaa equals any of the naturally occurring L-amino acids
  MISC_FEATURE (50): Xaa equals any of the naturally occurring L-amino acids
  MISC_FEATURE (56): Xaa equals any of the naturally occurring L-amino acids
  MISC_FEATURE (59): Xaa equals any of the naturally occurring L-amino acids
  MISC_FEATURE (60): Xaa equals any of the naturally occurring L-amino acids
  MISC_FEATURE (62): Xaa equals any of the naturally occurring L-amino acids
  MISC_FEATURE (65): Xaa equals any of the naturally occurring L-amino acids
VKSGXYVVIEVKVAXXYGIXITCXXYLMTXYQXAPPSPQYRXIICMGAXXNGLPLXYQXXLXALXPNDYT

SEQ ID NO: 6453 - protein, 80 aa, Homo sapiens
  MISC_FEATURE (20): Xaa equals any of the naturally occurring L-amino acids
  MISC_FEATURE (22): Xaa equals any of the naturally occurring L-amino acids
  MISC_FEATURE (23): Xaa equals any of the naturally occurring L-amino acids
  MISC_FEATURE (31): Xaa equals any of the naturally occurring L-amino acids
  MISC_FEATURE (32): Xaa equals any of the naturally occurring L-amino acids
  MISC_FEATURE (36): Xaa equals any of the naturally occurring L-amino acids
  MISC_FEATURE (56): Xaa equals any of the naturally occurring L-amino acids
  MISC_FEATURE (60): Xaa equals any of the naturally occurring L-amino acids
  MISC_FEATURE (64): Xaa equals any of the naturally occurring L-amino acids
  MISC_FEATURE (73): Xaa equals any of the naturally occurring L-amino acids
LFKMQIVACGEGPGLSRERXGXXFSQPGRSXXGAFXMCKGGVQAPGGVLAVSFFLXGDGXGVRXGADALACEXELEKCRC

SEQ ID NO: 6454 - protein, 129 aa, Homo sapiens
KELELYKEELQTKPALLAVNKMDLPDAQDKFHELMSQLQNPKDFLHLFEKNMIPERTVEFQHIIPISAVTGEGIEELKNCIRKSLDEQANQENDALHKKQLLNLWISDTMSSTEPPSKHAVTTSKMDII

SEQ ID NO: 6455 - protein, 135 aa, Homo sapiens
  MISC_FEATURE (11): Xaa equals any of the naturally occurring L-amino acids
  MISC_FEATURE (12): Xaa equals any of the naturally occurring L-amino acids
  MISC_FEATURE (13): Xaa equals any of the naturally occurring L-amino acids
  MISC_FEATURE (24): Xaa equals any of the naturally occurring L-amino acids
  MISC_FEATURE (50): Xaa equals any of the naturally occurring L-amino acids
  MISC_FEATURE (64): Xaa equals any of the naturally occurring L-amino acids
  MISC_FEATURE (66): Xaa equals any of the naturally occurring L-amino acids
  MISC_FEATURE (69): Xaa equals any of the naturally occurring L-amino acids
  MISC_FEATURE (70): Xaa equals any of the naturally occurring L-amino acids
  MISC_FEATURE (98): Xaa equals any of the naturally occurring L-amino acids
  MISC_FEATURE (102): Xaa equals any of the naturally occurring L-amino acids
  MISC_FEATURE (118): Xaa equals any of the naturally occurring L-amino acids
  MISC_FEATURE (126): Xaa equals any of the naturally occurring L-amino acids
  MISC_FEATURE (131): Xaa equals any of the naturally occurring L-amino acids
LRQALIRLTIXXXWYACRYRAGIXGSTHASAGERPFECIECGKAFSNGSXLAQHQRIHTGEKPXVXNVXXKAFSHRGYLIVHQRIHTGERPYECKECXKAFXQYAHLAQHQRVHTGEXPYECKVLXESLQXNCIP

SEQ ID NO: 6456 - protein, 138 aa, Homo sapiens
  MISC_FEATURE (9): Xaa equals any of the naturally occurring L-amino acids
  MISC_FEATURE (12): Xaa equals any of the naturally occurring L-amino acids
  MISC_FEATURE (14): Xaa equals any of the naturally occurring L-amino acids
  MISC_FEATURE (17): Xaa equals any of the naturally occurring L-amino acids
  MISC_FEATURE (18): Xaa equals any of the naturally occurring L-amino acids
  MISC_FEATURE (19): Xaa equals any of the naturally occurring L-amino acids
  MISC_FEATURE (20): Xaa equals any of the naturally occurring L-amino acids
  MISC_FEATURE (21): Xaa equals any of the naturally occurring L-amino acids
  MISC_FEATURE (22): Xaa equals any of the naturally occurring L-amino acids
  MISC_FEATURE (23): Xaa equals any of the naturally occurring L-amino acids
  MISC_FEATURE (25): Xaa equals any of the naturally occurring L-amino acids
  MISC_FEATURE (26): Xaa equals any of the naturally occurring L-amino acids
  MISC_FEATURE (28): Xaa equals any of the naturally occurring L-amino acids
  MISC_FEATURE (29): Xaa equals any of the naturally occurring L-amino acids
  MISC_FEATURE (30): Xaa equals any of the naturally occurring L-amino acids
  MISC_FEATURE (31): Xaa equals any of the naturally occurring L-amino acids
  MISC_FEATURE (34): Xaa equals any of the naturally occurring L-amino acids
  MISC_FEATURE (37): Xaa equals any of the naturally occurring L-amino acids
  MISC_FEATURE (38): Xaa equals any of the naturally occurring L-amino acids
  MISC_FEATURE (40): Xaa equals any of the naturally occurring L-amino acids
  MISC_FEATURE (43): Xaa equals any of the naturally occurring L-amino acids
  MISC_FEATURE (45): Xaa equals any of the naturally occurring L-amino acids
  MISC_FEATURE (49): Xaa equals any of the naturally occurring L-amino acids
  MISC_FEATURE (56): Xaa equals any of the naturally occurring L-amino acids
  MISC_FEATURE (70): Xaa equals any of the naturally occurring L-amino acids
  MISC_FEATURE (71): Xaa equals any of the naturally occurring L-amino acids
  MISC_FEATURE (120): Xaa equals any of the naturally occurring L-amino acids
  MISC_FEATURE (121): Xaa equals any of the naturally occurring L-amino acids
  MISC_FEATURE (122): Xaa equals any of the naturally occurring L-amino acids
  MISC_FEATURE (128): Xaa equals any of the naturally occurring L-amino acids
KWLPPKFPXKRXGXLIXXXXXXXIXXPXXXXYGXAWXXPXWNXPXFCPXINVLLAXNLSPRPLPRKVPPXXVGGNLVAILTAANLKSVNLVANFNTLFVLVQISIMVVFIFLVVQGLHKXXXLAPSGXFSRLSARTRT

SEQ ID NO: 6457 - protein, 197 aa, Homo sapiens
  MISC_FEATURE (141): Xaa equals any of the naturally occurring L-amino acids
  MISC_FEATURE (162): Xaa equals any of the naturally occurring L-amino acids
  MISC_FEATURE (164): Xaa equals any of the naturally occurring L-amino acids
  MISC_FEATURE (181): Xaa equals any of the naturally occurring L-amino acids
  MISC_FEATURE (189): Xaa equals any of the naturally occurring L-amino acids
  MISC_FEATURE (190): Xaa equals any of the naturally occurring L-amino acids
  MISC_FEATURE (193): Xaa equals any of the naturally occurring L-amino acids
  MISC_FEATURE (194): Xaa equals any of the naturally occurring L-amino acids
ADAWVLVVFKAPRADSHGPGCRPPLCPGLVAYVDLDERAIDALREFNEEGALSVLQQFKESDLSHVQNKSAFLCGVMKTYRQREKQGSKVQESTKGPDEAKIKALLERTGYTLDVTTGQRKYGGPSPDSVYSGVQPGIGTXVFVGKIPRDLYEDELVPLFEXAXPIWDLRLMMDPLSGRIXGMHLSPSXXKEXXRKP

SEQ ID NO: 6458 - protein, 65 aa, Homo sapiens
YTLLELELPRLLAPDLPSNGSSLKDLKWTHSNYRASKESCIVIFRHYLPGSGVGNLRACCLPWMW

SEQ ID NO: 6459 - protein, 60 aa, Homo sapiens
  MISC_FEATURE (12): Xaa equals any of the naturally occurring L-amino acids
  MISC_FEATURE (25): Xaa equals any of the naturally occurring L-amino acids
  MISC_FEATURE (33): Xaa equals any of the naturally occurring L-amino acids
  MISC_FEATURE (36): Xaa equals any of the naturally occurring L-amino acids
  MISC_FEATURE (49): Xaa equals any of the naturally occurring L-amino acids
  MISC_FEATURE (51): Xaa equals any of the naturally occurring L-amino acids
IWHEATPTGGGXMARTWKPTLVILXIKRAGRCXRWXPNENKVAVGNGSXEXSIWYFQQGE

SEQ ID NO: 6460 - protein, 82 aa, Homo sapiens
  MISC_FEATURE (3): Xaa equals any of the naturally occurring L-amino acids
DFXQMLQEIQEVKTPEELETFMLKHGENIIDTLGAEVDRLEKELKVRCIHKNNIMIMAAIFLSTYSTADTKCIHHMHALTHS

SEQ ID NO: 6461 - protein, 164 aa, Homo sapiens
  MISC_FEATURE (1): Xaa equals any of the naturally occurring L-amino acids
  MISC_FEATURE (11): Xaa equals any of the naturally occurring L-amino acids
  MISC_FEATURE (22): Xaa equals any of the naturally occurring L-amino acids
  MISC_FEATURE (47): Xaa equals any of the naturally occurring L-amino acids
  MISC_FEATURE (51): Xaa equals any of the naturally occurring L-amino acids
  MISC_FEATURE (64): Xaa equals any of the naturally occurring L-amino acids
  MISC_FEATURE (65): Xaa equals any of the naturally occurring L-amino acids
  MISC_FEATURE (79): Xaa equals any of the naturally occurring L-amino acids
  MISC_FEATURE (92): Xaa equals any of the naturally occurring L-amino acids
  MISC_FEATURE (107): Xaa equals any of the naturally occurring L-amino acids
  MISC_FEATURE (110): Xaa equals any of the naturally occurring L-amino acids
  MISC_FEATURE (123): Xaa equals any of the naturally occurring L-amino acids
XHHLYRAYSFXMGCWPKNGLLXMNKGLSLQHIGRPHTGIDDCKKHCXHHEXTRLSRLHLQADIXXVLIGPRQDGARQGXCLAHPKSSSPSPXGKKENGILCVQNVPXACXLCPWRWLFPCKGXALGPSGTKLFSPHPTLISPSITPPLRAGLGEPGSPLSLFTG

SEQ ID NO: 6462 - protein, 107 aa, Homo sapiens
  MISC_FEATURE (66): Xaa equals any of the naturally occurring L-amino acids
VVSKVCVWPGVHPLPSSPAPEHSCSARPHSSALLPIPTRRRCPGPVCAAHVDWEGRAGAGLGARAXAVFSFLHSRRAGGWGCFPARPQGQAPWGFIRGLEGWGQKQA

SEQ ID NO: 6463 - protein, 114 aa, Homo sapiens
  MISC_FEATURE (87): Xaa equals any of the naturally occurring L-amino acids
  MISC_FEATURE (96): Xaa equals any of the naturally occurring L-amino acids
  MISC_FEATURE (99): Xaa equals any of the naturally occurring L-amino acids
  MISC_FEATURE (100): Xaa equals any of the naturally occurring L-amino acids
  MISC_FEATURE (103): Xaa equals any of the naturally occurring L-amino acids
  MISC_FEATURE (108): Xaa equals any of the naturally occurring L-amino acids
  MISC_FEATURE (110): Xaa equals any of the naturally occurring L-amino acids
EGKGLEGPLDLINYIDVAQQDGKLPFVPPEEEFIMGVSKYGIKVSTSDQYDVLHRHALYLIIRMVCYDDGLGAGKSLLALKTTDASXEEYRLWVYXVQXXGTXTSHLXGXIHRF

SEQ ID NO: 6464 - protein, 95 aa, Homo sapiens
  MISC_FEATURE (75): Xaa equals any of the naturally occurring L-amino acids
  MISC_FEATURE (80): Xaa equals any of the naturally occurring L-amino acids
  MISC_FEATURE (81): Xaa equals any of the naturally occurring L-amino acids
  MISC_FEATURE (82): Xaa equals any of the naturally occurring L-amino acids
LLGPGKPWSPSPQPPPRAHRSSPWAPSSKSTSGGTRALGCLVKDYFPEPVRFLGNSGALTSGVSHLPGCSYSPQXSTPSXXXLTVPSQKLGDQKL

SEQ ID NO: 6465 - protein, 108 aa, Homo sapiens
  MISC_FEATURE (25): Xaa equals any of the naturally occurring L-amino acids
  MISC_FEATURE (92): Xaa equals any of the naturally occurring L-amino acids
APFRGPKDRARKLAEVGSHEKVGQXPCCVRLEQAWEEGGILYLQTELCGPSLQQHCEAWGASLPEAQVWGYLRDTLLALAHLHSQGLVHLDXQACQHLPGAPGPLQAG

SEQ ID NO: 6466 - protein, 21 aa, Homo sapiens
GGLNQTQLRKILAYSSITHIG

SEQ ID NO: 6467 - protein, 128 aa, Homo sapiens
RRAMADEELEALRRQRLAELQAKHGDPGDAAQQEAKHREAEMRNSILAQVLDQSARARLSNLALVKPEKTKAVENYLIQMARYGQLSEKVSEQGLIEILKKVSQQTEKTTTVKVSVPRCLWQMKRWIL

SEQ ID NO: 6468 - protein, 163 aa, Homo sapiens
EVTTFQLAVLFAWNQRPREKISFENLKLATELPDAELRRTLWSLVAFPKLKRQVLLYEPQVNSPKDFTEGTLFSVNQEFSLIKNAKVQKRGKINLIGRLQLTTERMREEENEGIVQLRILRTQEAIIQIMKMRKKISNAQLQTELVEILKNMFLPQKEMIKVQ

SEQ ID NO: 6469 - protein, 175 aa, Homo sapiens
  MISC_FEATURE (148): Xaa equals any of the naturally occurring L-amino acids
  MISC_FEATURE (167): Xaa equals any of the naturally occurring L-amino acids
  MISC_FEATURE (169): Xaa equals any of the naturally occurring L-amino acids
DDRLREERAHALKTKEKLAQTATASSAAVGSGPPPEAEQAWPQSSGEEELQLQLALAMSKEEADQPPSCGPEDDAQLQLALSLSREEHDKEERIRRGDDLRLQMAIEESKRETGGKEESSLMDLADVFTGPASARPQTPGGAHTHGLXPSHGLPNLDPWGGPPVPSXAXSPGEGS

SEQ ID NO: 6470 - protein, 71 aa, Homo sapiens
  MISC_FEATURE (2): Xaa equals any of the naturally occurring L-amino acids
AXASDLNDIYEEEPFNFQMVYNEFQKFVQRKAHSVYNFEKPVVMKAFEHLQQLELIKPMERTSGNSQRESS

SEQ ID NO: 6471 - protein, 76 aa, Homo sapiens
  MISC_FEATURE (65): Xaa equals any of the naturally occurring L-amino acids
  MISC_FEATURE (66): Xaa equals any of the naturally occurring L-amino acids
  MISC_FEATURE (74): Xaa equals any of the naturally occurring L-amino acids
LVPNSARVWTNPQIKLSLTEKDEGQEECSFLVALMQKDRRKLKRFGANVLTIGYAIYNCPNKNKXXNKNPPNPXSL

SEQ ID NO: 6472 - protein, 127 aa, Homo sapiens
  MISC_FEATURE (1): Xaa equals any of the naturally occurring L-amino acids
  MISC_FEATURE (4): Xaa equals any of the naturally occurring L-amino acids
  MISC_FEATURE (5): Xaa equals any of the naturally occurring L-amino acids
  MISC_FEATURE (108): Xaa equals any of the naturally occurring L-amino acids
  MISC_FEATURE (115): Xaa equals any of the naturally occurring L-amino acids
XTTXXGKAGTPAGTGPEFPGRPTRPKALKRGSLLGCFIDTRSAAESEARTPFGLIKGHAYSVTGIDQVSFRGQRIELIRIRNPWGQVEWNGSWSDSSPEWRSVVQLSXSVCVTLXWMMGNSGWHLRT

SEQ ID NO: 6473 - protein, 152 aa, Homo sapiens
  MISC_FEATURE (134): Xaa equals any of the naturally occurring L-amino acids
  MISC_FEATURE (146): Xaa equals any of the naturally occurring L-amino acids
VLTLQGDALSQADVNLKMPRNNQLLHFAFREDKQWKLQQIQDARNHVSQAIYLLTSRDQSYQFKTGAEVLKLMDAVMLQLTRARNRLTTPATLTLPEIAASGLTRMFAPALPSDLLVNVYINLNKLCLTVYQLXALQPNFTKNFAXWGRGAA

SEQ ID NO: 6474 - protein, 59 aa, Homo sapiens
  MISC_FEATURE (4): Xaa equals any of the naturally occurring L-amino acids
  MISC_FEATURE (10): Xaa equals any of the naturally occurring L-amino acids
  MISC_FEATURE (24): Xaa equals any of the naturally occurring L-amino acids
  MISC_FEATURE (27): Xaa equals any of the naturally occurring L-amino acids
  MISC_FEATURE (28): Xaa equals any of the naturally occurring L-amino acids
  MISC_FEATURE (31): Xaa equals any of the naturally occurring L-amino acids
  MISC_FEATURE (42): Xaa equals any of the naturally occurring L-amino acids
  MISC_FEATURE (49): Xaa equals any of the naturally occurring L-amino acids
SRRXMAVLSXEYGFVLLTGAASFXMVXXLAXNVSKARKKYKXEWTLPLXFSHTQFLFFY

SEQ ID NO: 6475 - protein, 99 aa, Homo sapiens
  MISC_FEATURE (5): Xaa equals any of the naturally occurring L-amino acids
  MISC_FEATURE (15): Xaa equals any of the naturally occurring L-amino acids
  MISC_FEATURE (21): Xaa equals any of the naturally occurring L-amino acids
  MISC_FEATURE (51): Xaa equals any of the naturally occurring L-amino acids
  MISC_FEATURE (54): Xaa equals any of the naturally occurring L-amino acids
  MISC_FEATURE (60): Xaa equals any of the naturally occurring L-amino acids
  MISC_FEATURE (66): Xaa equals any of the naturally occurring L-amino acids
  MISC_FEATURE (74): Xaa equals any of the naturally occurring L-amino acids
  MISC_FEATURE (75): Xaa equals any of the naturally occurring L-amino acids
  MISC_FEATURE (77): Xaa equals any of the naturally occurring L-amino acids
  MISC_FEATURE (90): Xaa equals any of the naturally occurring L-amino acids
  MISC_FEATURE (93): Xaa equals any of the naturally occurring L-amino acids
  MISC_FEATURE (96): Xaa equals any of the naturally occurring L-amino acids
  MISC_FEATURE (98): Xaa equals any of the naturally occurring L-amino acids
AHASXLPSLRPEAAXQLLRSXPKVCVTVLPPDESGRPRRSFSELYTLSLQXPSXRGAPDXVQDEVXGVTLLSTXXQXLHLCLQDGGKSSXAWXSGXGXD

SEQ ID NO: 6476 - protein, 44 aa, Homo sapiens
  MISC_FEATURE (4): Xaa equals any of the naturally occurring L-amino acids
PTRXEPQKVSTLGKSNVIVTGANFTRASNITMILKGTSTCDKDV

SEQ ID NO: 6477 - protein, 177 aa, Homo sapiens
  MISC_FEATURE (2): Xaa equals any of the naturally occurring L-amino acids
  MISC_FEATURE (5): Xaa equals any of the naturally occurring L-amino acids
  MISC_FEATURE (72): Xaa equals any of the naturally occurring L-amino acids
  MISC_FEATURE (89): Xaa equals any of the naturally occurring L-amino acids
  MISC_FEATURE (115): Xaa equals any of the naturally occurring L-amino acids
  MISC_FEATURE (125): Xaa equals any of the naturally occurring L-amino acids
  MISC_FEATURE (144): Xaa equals any of the naturally occurring L-amino acids
  MISC_FEATURE (153): Xaa equals any of the naturally occurring L-amino acids
  MISC_FEATURE (154): Xaa equals any of the naturally occurring L-amino acids
  MISC_FEATURE (157): Xaa equals any of the naturally occurring L-amino acids
  MISC_FEATURE (167): Xaa equals any of the naturally occurring L-amino acids
  MISC_FEATURE (168): Xaa equals any of the naturally occurring L-amino acids
GXTTXHYRESWYACRYRSGIPGSTHASADAWVGMQLDRASSSLYVAFSTCVIKVPLGRCERHGKCKKTCIAXRDPYCGWIKEGGACSHXSPNSRLTFEQDIEHGNTDGLGDCHNXFVALNGHSSXLLPSTTTSDSTAQEGYETXGGMLDWKHXXDSXDSTDPLGARXXHNHQRQEGS

SEQ ID NO: 6478 - protein, 99 aa, Homo sapiens
MGAVQQFNLDVIQCELFASSEPVPGFQGDTLQLAFIDLRQLLDLFMVWDWSTYLADYGQPASKYLRVNPNTALTLLEKMKDTSKKNNIFAQFRKNDRDK

SEQ ID NO: 6479 - protein, 30 aa, Homo sapiens
IQVSVLTDQVEAQGEKIRDLEFCLKSTERS

SEQ ID NO: 6480 - protein, 116 aa, Homo sapiens
KLPLKAKMGKEKTHINIVVIGHVDSGKSTTTGHLIYKCGGIDKRTIEKFEKEAAEMGKGSFKYAWVLDKLKAERERGITIDISLWKFETSKYYVTIIDAPGHRDFIKNMITGTSQA

SEQ ID NO: 6481 - protein, 37 aa, Homo sapiens
EKPYGIVEKKSRIFPGDTILETGEVIPPMKEFPDQHH

SEQ ID NO: 6482 - protein, 89 aa, Homo sapiens
  MISC_FEATURE (63): Xaa equals any of the naturally occurring L-amino acids
  MISC_FEATURE (70): Xaa equals any of the naturally occurring L-amino acids
  MISC_FEATURE (74): Xaa equals any of the naturally occurring L-amino acids
  MISC_FEATURE (79): Xaa equals any of the naturally occurring L-amino acids
  MISC_FEATURE (81): Xaa equals any of the naturally occurring L-amino acids
AGADGGSAACSWKFRLGCLLGAMESDFYLRYYVGHKGKFGHEFLEFEFRPDGKLRYANSAAAXSMCSGFXGHGXTGQSXEXLRVWQWNF

SEQ ID NO: 6483 - protein, 96 aa, Homo sapiens
  MISC_FEATURE (2): Xaa equals any of the naturally occurring L-amino acids
  MISC_FEATURE (90): Xaa equals any of the naturally occurring L-amino acids
AXQRAVYDEQGTVDEDSPVLTQDRDWEAYWRLLFKKISLEDIQAFEKTYKGSEEELADIKQAYLDFKGDMDQIMESVLCVQYTEEPRMKXYHSASY

SEQ ID NO: 6484 - protein, 99 aa, Homo sapiens
  MISC_FEATURE (31): Xaa equals any of the naturally occurring L-amino acids
  MISC_FEATURE (55): Xaa equals any of the naturally occurring L-amino acids
  MISC_FEATURE (56): Xaa equals any of the naturally occurring L-amino acids
  MISC_FEATURE (69): Xaa equals any of the naturally occurring L-amino acids
  MISC_FEATURE (77): Xaa equals any of the naturally occurring L-amino acids
  MISC_FEATURE (88): Xaa equals any of the naturally occurring L-amino acids
  MISC_FEATURE (95): Xaa equals any of the naturally occurring L-amino acids
KESTLHLVLRLRGGMQIFVKTLTGKTITLEXEPSDTIENVEAKIQDKEGIPPDQXXLIFAGKQLENGRXLSDYHIQXDPPCTWCSVSXVGCKSSXRPDW

SEQ ID NO: 6485 - protein, 64 aa, Homo sapiens
  MISC_FEATURE (27): Xaa equals any of the naturally occurring L-amino acids
  MISC_FEATURE (34): Xaa equals any of the naturally occurring L-amino acids
  MISC_FEATURE (36): Xaa equals any of the naturally occurring L-amino acids
  MISC_FEATURE (42): Xaa equals any of the naturally occurring L-amino acids
  MISC_FEATURE (52): Xaa equals any of the naturally occurring L-amino acids
  MISC_FEATURE (60): Xaa equals any of the naturally occurring L-amino acids
GKLVRLQVPGRNSRVDPRVRGSELSGXISSACDXEXNMERRXITISKSEYSXHSSLASKXDVEQ

SEQ ID NO: 6486 - protein, 82 aa, Homo sapiens
  MISC_FEATURE (32): Xaa equals any of the naturally occurring L-amino acids
  MISC_FEATURE (63): Xaa equals any of the naturally occurring L-amino acids
  MISC_FEATURE (67): Xaa equals any of the naturally occurring L-amino acids
  MISC_FEATURE (75): Xaa equals any of the naturally occurring L-amino acids
  MISC_FEATURE (76): Xaa equals any of the naturally occurring L-amino acids
AFLASGPYLTHQQKVLRLYKRALRHLESWCVXRDKYRYFACLMRARFEEHKNEKDMAKATQLXNEAXGKNSGTAXXTAIHLP

SEQ ID NO: 6487 - protein, 48 aa, Homo sapiens
ALLLGKKGIEKNLGIGKVSSFEEKMISDAIPELKASIKKGEDFVKTLK

SEQ ID NO: 6488 - protein, 158 aa, Homo sapiens
  MISC_FEATURE (45): Xaa equals any of the naturally occurring L-amino acids
  MISC_FEATURE (108): Xaa equals any of the naturally occurring L-amino acids
  MISC_FEATURE (150): Xaa equals any of the naturally occurring L-amino acids
RVLADITKSLTNPTPIQQQLRRFTEHNSSPNVSGSLSSGLQKIFXDPTDSDLHKLKSPSQDNTDSYFRGKTLLLVQQASSQSMTYSEKDERESSLPNGRSVSLMDLQXTHAAQVEHASVMLDVPIRLTGSQLSITQVASIKQLRETQSTXQSAPQVRR

SEQ ID NO: 6489 - protein, 69 aa, Homo sapiens
  MISC_FEATURE (2): Xaa equals any of the naturally occurring L-amino acids
  MISC_FEATURE (3): Xaa equals any of the naturally occurring L-amino acids
  MISC_FEATURE (6): Xaa equals any of the naturally occurring L-amino acids
  MISC_FEATURE (9): Xaa equals any of the naturally occurring L-amino acids
  MISC_FEATURE (10): Xaa equals any of the naturally occurring L-amino acids
  MISC_FEATURE (22): Xaa equals any of the naturally occurring L-amino acids
  MISC_FEATURE (32): Xaa equals any of the naturally occurring L-amino acids
  MISC_FEATURE (34): Xaa equals any of the naturally occurring L-amino acids
  MISC_FEATURE (54): Xaa equals any of the naturally occurring L-amino acids
  MISC_FEATURE (62): Xaa equals any of the naturally occurring L-amino acids
  MISC_FEATURE (63): Xaa equals any of the naturally occurring L-amino acids
TXXLSXAFXXEDPGLRTRACDXIHSSIVATYXQXTGRRSTTSTTGKTLELPNLXRLAAHAPXXSWRNKG

SEQ ID NO: 6490 - protein, 62 aa, Homo sapiens
  MISC_FEATURE (62): Xaa equals any of the naturally occurring L-amino acids
SGHSNYMVDWYQQRPGKGPRFVMRVGTSGVVGPRGDGIPDRFSVLASGLSRDLTITNIQERX

SEQ ID NO: 6491 - protein, 62 aa, Homo sapiens
  MISC_FEATURE (8): Xaa equals any of the naturally occurring L-amino acids
  MISC_FEATURE (26): Xaa equals any of the naturally occurring L-amino acids
  MISC_FEATURE (34): Xaa equals any of the naturally occurring L-amino acids
  MISC_FEATURE (40): Xaa equals any of the naturally occurring L-amino acids
  MISC_FEATURE (45): Xaa equals any of the naturally occurring L-amino acids
  MISC_FEATURE (54): Xaa equals any of the naturally occurring L-amino acids
  MISC_FEATURE (59): Xaa equals any of the naturally occurring L-amino acids
IKRVSLLXNPPTVGGGTLKLTDVHPXILEPTSAXSTTHPXFYPNXFGANPTLLXLFPPXYPL

SEQ ID NO: 6492 - protein, 118 aa, Homo sapiens
PTGPDPAGKEGEGGQAQCSREHAGDPWFQSPAGAATKPALKSEEKTPIKKPGDGRKVTFFEPGSGDENGTSNKEDEFRMPYLSHQQLPAGILPMVPEVAQAVGVSQGHHTKDFTRAAP

SEQ ID NO: 6493 - protein, 96 aa, Homo sapiens
  MISC_FEATURE (1): Xaa equals any of the naturally occurring L-amino acids
  MISC_FEATURE (2): Xaa equals any of the naturally occurring L-amino acids
  MISC_FEATURE (4): Xaa equals any of the naturally occurring L-amino acids
  MISC_FEATURE (21): Xaa equals any of the naturally occurring L-amino acids
  MISC_FEATURE (22): Xaa equals any of the naturally occurring L-amino acids
  MISC_FEATURE (23): Xaa equals any of the naturally occurring L-amino acids
  MISC_FEATURE (28): Xaa equals any of the naturally occurring L-amino acids
  MISC_FEATURE (34): Xaa equals any of the naturally occurring L-amino acids
  MISC_FEATURE (35): Xaa equals any of the naturally occurring L-amino acids
  MISC_FEATURE (49): Xaa equals any of the naturally occurring L-amino acids
  MISC_FEATURE (50): Xaa equals any of the naturally occurring L-amino acids
  MISC_FEATURE (55): Xaa equals any of the naturally occurring L-amino acids
  MISC_FEATURE (61): Xaa equals any of the naturally occurring L-amino acids
  MISC_FEATURE (74): Xaa equals any of the naturally occurring L-amino acids
  MISC_FEATURE (77): Xaa equals any of the naturally occurring L-amino acids
  MISC_FEATURE (86): Xaa equals any of the naturally occurring L-amino acids
XXGXPAGTRSGIPGSTHAPFXXXGAALXAGGIWXXIDGASFLKIFGPLXXSAMQXVNVGYXLIAAGVVVFALGXLGXYGAKTESKXALVTYFYILL

SEQ ID NO: 6494 - protein, 83 aa, Homo sapiens
  MISC_FEATURE (53): Xaa equals any of the naturally occurring L-amino acids
ASIASTSWRHFAEVAYIVEGDFTGVLLPELVVSIVLLLSKNAGLMQEAGAVPXLGGLLEHLDRFNHLAPGKERDDHEELACLA

SEQ ID NO: 6495 - protein, 94 aa, Homo sapiens
  MISC_FEATURE (4): Xaa equals any of the naturally occurring L-amino acids
  MISC_FEATURE (20): Xaa equals any of the naturally occurring L-amino acids
  MISC_FEATURE (36): Xaa equals any of the naturally occurring L-amino acids
  MISC_FEATURE (74): Xaa equals any of the naturally occurring L-amino acids
  MISC_FEATURE (82): Xaa equals any of the naturally occurring L-amino acids
  MISC_FEATURE (93): Xaa equals any of the naturally occurring L-amino acids
  MISC_FEATURE (94): Xaa equals any of the naturally occurring L-amino acids
FNYXLDCLGNGRTECHCGAXNCSGFLGVRPKSACAXTNEEKAKNAKLKQKRRKIKTEPKHMHEDYCFQCGDGGXLVMCDKKXCPKYTTFLLPXX

SEQ ID NO: 6496 - protein, 36 aa, Homo sapiens
  MISC_FEATURE (23): Xaa equals any of the naturally occurring L-amino acids
GKRRDDGLSAAARKQRDSEIMQXKQKKANEKKEEPK

SEQ ID NO: 6497 - protein, 69 aa, Homo sapiens
  MISC_FEATURE (45): Xaa equals any of the naturally occurring L-amino acids
RRQVGAAAVAMTRGNQRELTRQKNMKKQSDSVKGKRRDDGLSAAXRKQRDSEIMQQKQKKANEKKEEPK

SEQ ID NO: 6498 - protein, 119 aa, Homo sapiens
  MISC_FEATURE (3): Xaa equals any of the naturally occurring L-amino acids
RKXLIQRLLMKDPKKRLGCGPRDADEIKEHLFFQKINWDDLAAKKVPAPFKPVIRDELDVSNFAEEFTEMDPTYSPAALPQSSEEAVSGLFFVAPSILFKRNAAVIDPLQFHMGVERLE

SEQ ID NO: 6499 - protein, 88 aa, Homo sapiens
QRFFGEVLLYFQMSQSDDRDSKRDSLEEGELRDHRMEITIRNSPYRREDSMEDISPQLPLLTRTSCPSCLHLSVPLEWMAGGEVEADS

SEQ ID NO: 6500 - protein, 153 aa, Homo sapiens
  MISC_FEATURE (46): Xaa equals any of the naturally occurring L-amino acids
ELSSVVSSSGTEGASSLEKKEVPGVDFSITQFVRNLGLEHLMDIFXREQITLDVLVEMGHKELKEIGINAYGHRHKLIKGVERLISGQQGLNPYLTLNTSGSGTILIDLSPDDKEFQSVEEEMQSTVREHRDGGHAGGIFNRYNILKIQKVCN

SEQ ID NO: 6501 - protein, 129 aa, Homo sapiens
  MISC_FEATURE (7): Xaa equals any of the naturally occurring L-amino acids
  MISC_FEATURE (9): Xaa equals any of the naturally occurring L-amino acids
  MISC_FEATURE (112): Xaa equals any of the naturally occurring L-amino acids
  MISC_FEATURE (116): Xaa equals any of the naturally occurring L-amino acids
  MISC_FEATURE (119): Xaa equals any of the naturally occurring L-amino acids
  MISC_FEATURE (121): Xaa equals any of the naturally occurring L-amino acids
VQSGAEXKXSGESLSISCQVSGYTLTSYWINWVRQMPGKGLEWMGRLDPSDSFINYNPSFEGHISISADKFISTAYLKWNTLEASDTAMYYCALSGRQQLVPVYWGQGTQVXRLLXNPXQXQRLSAEPL

SEQ ID NO: 6502 - protein, 86 aa, Homo sapiens
  MISC_FEATURE (2): Xaa equals any of the naturally occurring L-amino acids
  MISC_FEATURE (27): Xaa equals any of the naturally occurring L-amino acids
  MISC_FEATURE (29): Xaa equals any of the naturally occurring L-amino acids
  MISC_FEATURE (40): Xaa equals any of the naturally occurring L-amino acids
  MISC_FEATURE (43): Xaa equals any of the naturally occurring L-amino acids
  MISC_FEATURE (54): Xaa equals any of the naturally occurring L-amino acids
  MISC_FEATURE (55): Xaa equals any of the naturally occurring L-amino acids
  MISC_FEATURE (64): Xaa equals any of the naturally occurring L-amino acids
  MISC_FEATURE (66): Xaa equals any of the naturally occurring L-amino acids
  MISC_FEATURE (68): Xaa equals any of the naturally occurring L-amino acids
  MISC_FEATURE (73): Xaa equals any of the naturally occurring L-amino acids
  MISC_FEATURE (75): Xaa equals any of the naturally occurring L-amino acids
  MISC_FEATURE (76): Xaa equals any of the naturally occurring L-amino acids
  MISC_FEATURE (77): Xaa equals any of the naturally occurring L-amino acids
  MISC_FEATURE (78): Xaa equals any of the naturally occurring L-amino acids
  MISC_FEATURE (79): Xaa equals any of the naturally occurring L-amino acids
  MISC_FEATURE (82): Xaa equals any of the naturally occurring L-amino acids
  MISC_FEATURE (84): Xaa equals any of the naturally occurring L-amino acids
LXKFSVRFKENSVAVKVVQGPAGGDNXKXRYKKKGSHCLXVTXQLGGGTMQRWXXLPPEPALIXLXPXFFGGXFXXXXXGGXGXGV

SEQ ID NO: 6503 - protein, 31 aa, Homo sapiens
  MISC_FEATURE (7): Xaa equals any of the naturally occurring L-amino acids
  MISC_FEATURE (10): Xaa equals any of the naturally occurring L-amino acids
  MISC_FEATURE (23): Xaa equals any of the naturally occurring L-amino acids
  MISC_FEATURE (26): Xaa equals any of the naturally occurring L-amino acids
FHKAYAXLVXSWHSLTPVSSDHXFSXWRIYH

SEQ ID NO: 6504 - protein, 135 aa, Homo sapiens
WERLPSLALKASSLDLATAALTVMLDSVTHSTFLPNASFCDPLMSWTDLFSNEEYYPAFEHQTACDSYWTSVHPEYWTKRHVWEWLQFCCDQYKLDTNCISFCNFNISGLQLCSMTQEEFVEAAGLCGEYLYFQF

SEQ ID NO: 6505 - protein, 131 aa, Homo sapiens
  MISC_FEATURE (16): Xaa equals any of the naturally occurring L-amino acids
  MISC_FEATURE (108): Xaa equals any of the naturally occurring L-amino acids
PTLTKGNKSWSSTAVXAALELVDPPGCRNSARGKLNKMDGSRKEEEEDSTFTNISLADDIDHSSRILYPRPKSLLPKMMNADMDDLSARVDAVKEENLKLKSENQVLXQYIENLMSASSVFQTTDTKSKRK

SEQ ID NO: 6506 - protein, 44 aa, Homo sapiens
INIHKCYFLFLYFIFFSPFQILGVWLTYRYRNQKDPRANPSAFL

SEQ ID NO: 6507 - protein, 129 aa, Homo sapiens
  MISC_FEATURE (2): Xaa equals any of the naturally occurring L-amino acids
  MISC_FEATURE (16): Xaa equals any of the naturally occurring L-amino acids
  MISC_FEATURE (17): Xaa equals any of the naturally occurring L-amino acids
  MISC_FEATURE (53): Xaa equals any of the naturally occurring L-amino acids
  MISC_FEATURE (56): Xaa equals any of the naturally occurring L-amino acids
  MISC_FEATURE (80): Xaa equals any of the naturally occurring L-amino acids
  MISC_FEATURE (83): Xaa equals any of the naturally occurring L-amino acids
  MISC_FEATURE (89): Xaa equals any of the naturally occurring L-amino acids
  MISC_FEATURE (93): Xaa equals any of the naturally occurring L-amino acids
  MISC_FEATURE (105): Xaa equals any of the naturally occurring L-amino acids
  MISC_FEATURE (111): Xaa equals any of the naturally occurring L-amino acids
  MISC_FEATURE (112): Xaa equals any of the naturally occurring L-amino acids
  MISC_FEATURE (113): Xaa equals any of the naturally occurring L-amino acids
  MISC_FEATURE (119): Xaa equals any of the naturally occurring L-amino acids
WXESGLPAVAATLKLXXPPGCMNSARGLLRTLHGARHMVRDAPEIPQGGSPAXCSXFRPNPELTEALTTSFVRRLFWGSXGAXTPLAEXLRTXSASSSDPVSAPXSLTAEXXXQPSSYXGTPRFLRIPE

SEQ ID NO: 6508 - protein, 104 aa, Homo sapiens
PRVREDEQFPSIPALVHSYMTGRRPLSQATGAVVSRPVTWQGPLRRSFSEDTLMDGPARIEPIRARKWSNSQPADLAHMGQSREDPAGMEASTMPISALPRTSS

SEQ ID NO: 6509 - protein, 190 aa, Homo sapiens
  MISC_FEATURE (57): Xaa equals any of the naturally occurring L-amino acids
  MISC_FEATURE (120): Xaa equals any of the naturally occurring L-amino acids
  MISC_FEATURE (123): Xaa equals any of the naturally occurring L-amino acids
  MISC_FEATURE (174): Xaa equals any of the naturally occurring L-amino acids
  MISC_FEATURE (181): Xaa equals any of the naturally occurring L-amino acids
  MISC_FEATURE (185): Xaa equals any of the naturally occurring L-amino acids
  MISC_FEATURE (186): Xaa equals any of the naturally occurring L-amino acids
  MISC_FEATURE (187): Xaa equals any of the naturally occurring L-amino acids
ASGTWNAPAGWCPGVLSPLLPTSAGPVSSCAQCGPVSAPAALSPPHAGSRPGHRAVXCFPTAAGTARHTQGLGRAGGHTAWLSCSWSPASPRRPGGSISQEARSPPGGWAQPRQMDEKTXKAXEMALSLTRAVAGGDEQVAMKCAIWLAEQRVPLSVQLKPEVSPTQDIRFLMXQNGHSSXIQPXXXQGG

SEQ ID NO: 6510 - protein, 86 aa, Homo sapiens
  MISC_FEATURE (1): Xaa equals any of the naturally occurring L-amino acids
  MISC_FEATURE (9): Xaa equals any of the naturally occurring L-amino acids
  MISC_FEATURE (34): Xaa equals any of the naturally occurring L-amino acids
  MISC_FEATURE (36): Xaa equals any of the naturally occurring L-amino acids
  MISC_FEATURE (49): Xaa equals any of the naturally occurring L-amino acids
  MISC_FEATURE (53): Xaa equals any of the naturally occurring L-amino acids
  MISC_FEATURE (67): Xaa equals any of the naturally occurring L-amino acids
  MISC_FEATURE (69): Xaa equals any of the naturally occurring L-amino acids
  MISC_FEATURE (72): Xaa equals any of the naturally occurring L-amino acids
  MISC_FEATURE (74): Xaa equals any of the naturally occurring L-amino acids
XIPILNPFXIRLTIGKAGTPAGTGPEFPGRPTRXAXKQAGQKKKQGHDXKAAXKAALIYTCTVCRTXMXDPXTXKQHFESKHPKTP

SEQ ID NO: 6511 - protein, 103 aa, Homo sapiens
  MISC_FEATURE (99): Xaa equals any of the naturally occurring L-amino acids
QMRVKDPTKALPEKAKRSKRPTVPHDEDSSDDIAVGLTCQHVSHAISVNHVKRAIAENLWSVCSECLKERGFYDGQLVLTSDIWLCLKCGFQGCGKNSXSQHS

SEQ ID NO: 6512 - protein, 92 aa, Homo sapiens
ILKVGAPAGTGPEFPGISTPSFSSYYKGGFEQKMSRREAGLILGVSPSAGKAKIRTAHRRVMILNHPDKGGSPYVAAKINEAKDLLETTTKH

SEQ ID NO: 6513 - protein, 147 aa, Homo sapiens
  MISC_FEATURE (136): Xaa equals any of the naturally occurring L-amino acids
WIPRAAGIRHEEESMNESHPRKCAESFEMWDDRDSHCRRPKFEGHPPESWKWILAPVILYICERILRFYRSQQKVVITKVVMHPSKVLELQMNKRGFSMEVGQYIFVNCPSISLLGMASFYFDLCSRGRFLLHSYXSSRGLDRKSIR

SEQ ID NO: 6514 - protein, 137 aa, Homo sapiens
EGNRSDVTSVKDAKIAVYSCPFDGMITETKGTVLIKTAEELMNFSKGEENLMDAQVKAIADTGANVVVTGGKVADMALHYANKYNIMLVRLNSKWDLRRLCKTVGATALPRLTPPVLEEMGHCDSVYSPEVWRYSGG

SEQ ID NO: 6515 - protein, 109 aa, Homo sapiens
  MISC_FEATURE (4): Xaa equals any of the naturally occurring L-amino acids
  MISC_FEATURE (6): Xaa equals any of the naturally occurring L-amino acids
  MISC_FEATURE (30): Xaa equals any of the naturally occurring L-amino acids
  MISC_FEATURE (42): Xaa equals any of the naturally occurring L-amino acids
  MISC_FEATURE (48): Xaa equals any of the naturally occurring L-amino acids
  MISC_FEATURE (57): Xaa equals any of the naturally occurring L-amino acids
  MISC_FEATURE (61): Xaa equals any of the naturally occurring L-amino acids
  MISC_FEATURE (99): Xaa equals any of the naturally occurring L-amino acids
  MISC_FEATURE (108): Xaa equals any of the naturally occurring L-amino acids
LQLXSXGGKKRPLGFNPAPFGPKGFNPRGXPPGKNFSPGGGXRNPQTXPFPRGPGGXPETXFGKKPPIGGPRALPVSQRETFSPTPKRTWFWGFLNPGXPTKTRVCPXA

SEQ ID NO: 6516 - protein, 133 aa, Homo sapiens
  MISC_FEATURE (32): Xaa equals any of the naturally occurring L-amino acids
  MISC_FEATURE (132): Xaa equals any of the naturally occurring L-amino acids
AAAEHRRGRKKDEVREGAGFLEPQGSTELSKXVPVNWEPPQPLPFPKYLRCYRCLLETKELGCLLGSDICLTPAGSSCITLHKKNSSGSDVMVSDCRSKEQMSDCSNTRTSPVSGFWIFSQYCFLDFCNDPXN

SEQ ID NO: 6517 - protein, 45 aa, Homo sapiens
SCTMPSSIITLKNGIQNMLQFYIPEVEGVEQVMDDESDEKEANSP

SEQ ID NO: 6518 - protein, 72 aa, Homo sapiens
  MISC_FEATURE (13): Xaa equals any of the naturally occurring L-amino acids
  MISC_FEATURE (63): Xaa equals any of the naturally occurring L-amino acids
SAPKAPATPGAQXAPDVRLLYVLAIAALGGLCLILASSLLYVACLREGRRGRRRKYSLGRANXGRRICGATA

SEQ ID NO: 6519 - protein, 35 aa, Homo sapiens
  MISC_FEATURE (5): Xaa equals any of the naturally occurring L-amino acids
SGVSXFSNPVQYWEIQPSTFRCVYVRSAIQLGNYK

SEQ ID NO: 6520 - protein, 115 aa, Homo sapiens
  MISC_FEATURE (12): Xaa equals any of the naturally occurring L-amino acids
  MISC_FEATURE (40): Xaa equals any of the naturally occurring L-amino acids
  MISC_FEATURE (70): Xaa equals any of the naturally occurring L-amino acids
  MISC_FEATURE (72): Xaa equals any of the naturally occurring L-amino acids
  MISC_FEATURE (77): Xaa equals any of the naturally occurring L-amino acids
  MISC_FEATURE (78): Xaa equals any of the naturally occurring L-amino acids
  MISC_FEATURE (109): Xaa equals any of the naturally occurring L-amino acids
NSARASALKQYXRSLPEPLMTYELHGDFIVPAKSGSPESXVNAIHFLVHKLPEKNKEMLDILVKHLTNVXNXSKQNXXTVANLGVVFGPTLMRPQEETVAALMDFEVSXYCCGKS

SEQ ID NO: 6521 - protein, 129 aa, Homo sapiens
  MISC_FEATURE (103): Xaa equals any of the naturally occurring L-amino acids
  MISC_FEATURE (118): Xaa equals any of the naturally occurring L-amino acids
TGNKMQDPNADTEWNDILRKKGILPPKESLKELEEEAEEEQRILQQSVVKTYEDMTLEELEDHEDEFNEEDERAIEMYRRRRLAEWKATKLKNKFGEVLEISXKDYVQEVTKAGEGLXVILHLYNQGIP

SEQ ID NO: 6522 - protein, 110 aa, Homo sapiens
  MISC_FEATURE (96): Xaa equals any of the naturally occurring L-amino acids
  MISC_FEATURE (101): Xaa equals any of the naturally occurring L-amino acids
FEKYMLTVQYFSIIFPLFYRANVKPRNSTPPSLARNPAPGVLTNKRKTYTESYIARPDGDCASSLNGGNIKGIEGHSPGNLPKFCHECGTKYPVEXAKFCXECGIRRMIL

SEQ ID NO: 6523 - protein, 75 aa, Homo sapiens
VPAAGTPRANQPGFRKHLGLLEKKKDYKLRADDYRKKQEYLRALRKKALEKNPDEFYYKMTRVKLQDGFHVIEGD

SEQ ID NO: 6524 - protein, 70 aa, Homo sapiens
  MISC_FEATURE (1): Xaa equals any of the naturally occurring L-amino acids
  MISC_FEATURE (5): Xaa equals any of the naturally occurring L-amino acids
  MISC_FEATURE (6): Xaa equals any of the naturally occurring L-amino acids
  MISC_FEATURE (10): Xaa equals any of the naturally occurring L-amino acids
  MISC_FEATURE (24): Xaa equals any of the naturally occurring L-amino acids
XVFEXXAPGXYKFYLQNRSLPQSXPVLKVTLAVSDLQKSLNYWCYLLGMKIYEKYYKSYRACLGFLKNPC

SEQ ID NO: 6525 - protein, 122 aa, Homo sapiens
  MISC_FEATURE (77): Xaa equals any of the naturally occurring L-amino acids
  MISC_FEATURE (81): Xaa equals any of the naturally occurring L-amino acids
  MISC_FEATURE (99): Xaa equals any of the naturally occurring L-amino acids
  MISC_FEATURE (103): Xaa equals any of the naturally occurring L-amino acids
  MISC_FEATURE (116): Xaa equals any of the naturally occurring L-amino acids
  MISC_FEATURE (122): Xaa equals any of the naturally occurring L-amino acids
SWYPCRYRSGIPGSTHASVELNELLLDKNQEPQWRETARWIKFEEDVDEDAHDSEAKVASLRGMELQGCASTQVESXNNQXEQKQVRLPESRLTPWEVXFIGXEKEERDRLHLKAXEELNQX

SEQ ID NO: 6526 - protein, 47 aa, Homo sapiens
  MISC_FEATURE (15): Xaa equals any of the naturally occurring L-amino acids
  MISC_FEATURE (43): Xaa equals any of the naturally occurring L-amino acids
PRVRPRVRENEYQAXSVPPTRLLIKEPSKRVGHFRGLQNWKAXSFTM

SEQ ID NO: 6527 - protein, 48 aa, Homo sapiens
  MISC_FEATURE (3): Xaa equals any of the naturally occurring L-amino acids
  MISC_FEATURE (4): Xaa equals any of the naturally occurring L-amino acids
  MISC_FEATURE (6): Xaa equals any of the naturally occurring L-amino acids
GGXXGXPLYLHLLMSLHRARLESSSTGSSFPADSAKPVPLAVVSLDSR

SEQ ID NO: 6528 - protein, 31 aa, Homo sapiens
GNKSWSSTAVTTALELVDPPGCRNSAEQNQW

SEQ ID NO: 6529 - protein, 40 aa, Homo sapiens
  MISC_FEATURE (2): Xaa equals any of the naturally occurring L-amino acids
  MISC_FEATURE (3): Xaa equals any of the naturally occurring L-amino acids
AXXTLTKGNKSWSSTAVTAALELVDPPGCRNSARGYTGNG

SEQ ID NO: 6530 - protein, 59 aa, Homo sapiens
  MISC_FEATURE (1): Xaa equals any of the naturally occurring L-amino acids
  MISC_FEATURE (2): Xaa equals any of the naturally occurring L-amino acids
  MISC_FEATURE (4): Xaa equals any of the naturally occurring L-amino acids
  MISC_FEATURE (19): Xaa equals any of the naturally occurring L-amino acids
XXHXTLTKGNKSWSSTAVXSALELVDPPGCRNSARSARAKDTNLVFPGIEQQAFQDCHP

SEQ ID NO: 6531 - protein, 66 aa, Homo sapiens
  MISC_FEATURE (3): Xaa equals any of the naturally occurring L-amino acids
  MISC_FEATURE (4): Xaa equals any of the naturally occurring L-amino acids
  MISC_FEATURE (47): Xaa equals any of the naturally occurring L-amino acids
  MISC_FEATURE (52): Xaa equals any of the naturally occurring L-amino acids
  MISC_FEATURE (57): Xaa equals any of the naturally occurring L-amino acids
  MISC_FEATURE (65): Xaa equals any of the naturally occurring L-amino acids
GFXXLTRITLTKGNKSWSSTAVAAALELVDPPGCRNSARALSRPFSXCPRAXTAPRXRRWNARTXG

SEQ ID NO: 6532 - protein, 41 aa, Homo sapiens
  MISC_FEATURE (26): Xaa equals any of the naturally occurring L-amino acids
  MISC_FEATURE (33): Xaa equals any of the naturally occurring L-amino acids
  MISC_FEATURE (35): Xaa equals any of the naturally occurring L-amino acids
  MISC_FEATURE (38): Xaa equals any of the naturally occurring L-amino acids
  MISC_FEATURE (39): Xaa equals any of the naturally occurring L-amino acids
GTRGGPVPNSPYNESYYNSLAVVLQXRDWENPXTXPSXXGP

SEQ ID NO: 6533 - protein, 68 aa, Homo sapiens
  MISC_FEATURE (2): Xaa equals any of the naturally occurring L-amino acids
  MISC_FEATURE (7): Xaa equals any of the naturally occurring L-amino acids
  MISC_FEATURE (56): Xaa equals any of the naturally occurring L-amino acids
  MISC_FEATURE (65): Xaa equals any of the naturally occurring L-amino acids
  MISC_FEATURE (66): Xaa equals any of the naturally occurring L-amino acids
  MISC_FEATURE (67): Xaa equals any of the naturally occurring L-amino acids
RXQKLAXPPQVAAALELVDPPGCRNSARAARAARGGARYPIRPIVSRITIHWPSFXNVVTGKTQXXXI

SEQ ID NO: 6534 - protein, 36 aa, Homo sapiens
  MISC_FEATURE (14): Xaa equals any of the naturally occurring L-amino acids
  MISC_FEATURE (34): Xaa equals any of the naturally occurring L-amino acids
  MISC_FEATURE (35): Xaa equals any of the naturally occurring L-amino acids
  MISC_FEATURE (36): Xaa equals any of the naturally occurring L-amino acids
LVPKGGPVPNSPYXESYYNSLAVVLQRRDWEKPXXX

SEQ ID NO: 6535 - protein, 33 aa, Homo sapiens
  MISC_FEATURE (31): Xaa equals any of the naturally occurring L-amino acids
  MISC_FEATURE (32): Xaa equals any of the naturally occurring L-amino acids
  MISC_FEATURE (33): Xaa equals any of the naturally occurring L-amino acids
AARGGPGTNSPYSESYYNSLAVVLNVVTGPXXX

SEQ ID NO: 6536 - protein, 54 aa, Homo sapiens
  MISC_FEATURE (52): Xaa equals any of the naturally occurring L-amino acids
  MISC_FEATURE (53): Xaa equals any of the naturally occurring L-amino acids
  MISC_FEATURE (54): Xaa equals any of the naturally occurring L-amino acids
LTLTKGNKSWSSTAVAAALELVGARYPIRPIVSRITIHWPSFYNVVTGKTQXXX

SEQ ID NO: 6537 - protein, 69 aa, Homo sapiens
  MISC_FEATURE (22): Xaa equals any of the naturally occurring L-amino acids
  MISC_FEATURE (42): Xaa equals any of the naturally occurring L-amino acids
  MISC_FEATURE (58): Xaa equals any of the naturally occurring L-amino acids
  MISC_FEATURE (60): Xaa equals any of the naturally occurring L-amino acids
  MISC_FEATURE (61): Xaa equals any of the naturally occurring L-amino acids
  MISC_FEATURE (63): Xaa equals any of the naturally occurring L-amino acids
  MISC_FEATURE (65): Xaa equals any of the naturally occurring L-amino acids
DSPLRKVPSLKGNKSGSSTAVXVVLQLVDPPGCRNSVRARDXPMKSGGWFIHWKCCVXAXXKXTXTSEE

SEQ ID NO: 6538 - protein, 36 aa, Homo sapiens
  MISC_FEATURE (16): Xaa equals any of the naturally occurring L-amino acids
  MISC_FEATURE (30): Xaa equals any of the naturally occurring L-amino acids
  MISC_FEATURE (35): Xaa equals any of the naturally occurring L-amino acids
GTSGTRGGPVPNSPYXESYYNSLAVVLQRXDWETXK

SEQ ID NO: 6539 - protein, 68 aa, Homo sapiens
  MISC_FEATURE (3): Xaa equals any of the naturally occurring L-amino acids
  MISC_FEATURE (68): Xaa equals any of the naturally occurring L-amino acids
PSXKRNKSWSSTAVAAALELVDPPGCRNSARAARAARGGARYPIRPIVSRITIHWPSFYNVVIPPKKX

SEQ ID NO: 6540 - protein, 33 aa, Homo sapiens
  MISC_FEATURE (13): Xaa equals any of the naturally occurring L-amino acids
  MISC_FEATURE (32): Xaa equals any of the naturally occurring L-amino acids
GTRGGPVPNSPYXESYYNSLAVVLQRRDWENXN

SEQ ID NO: 6541 - protein, 36 aa, Homo sapiens
  MISC_FEATURE (16): Xaa equals any of the naturally occurring L-amino acids
  MISC_FEATURE (20): Xaa equals any of the naturally occurring L-amino acids
  MISC_FEATURE (36): Xaa equals any of the naturally occurring L-amino acids
GTSGTRGGPVPNSPYXESYXNSLAVVLQRRDWENPX

SEQ ID NO: 6542 - protein, 61 aa, Homo sapiens
  MISC_FEATURE (2): Xaa equals any of the naturally occurring L-amino acids
  MISC_FEATURE (5): Xaa equals any of the naturally occurring L-amino acids
  MISC_FEATURE (6): Xaa equals any of the naturally occurring L-amino acids
  MISC_FEATURE (30): Xaa equals any of the naturally occurring L-amino acids
  MISC_FEATURE (38): Xaa equals any of the naturally occurring L-amino acids
  MISC_FEATURE (45): Xaa equals any of the naturally occurring L-amino acids
  MISC_FEATURE (50): Xaa equals any of the naturally occurring L-amino acids
GXIWXXSTKKWRFALELVDPPGCRNPARAXTRGGPVPXSPYSESXYNSLXVVLQRRDWENP

SEQ ID NO: 6543 - protein, 49 aa, Homo sapiens
  MISC_FEATURE (6): Xaa equals any of the naturally occurring L-amino acids
  MISC_FEATURE (11): Xaa equals any of the naturally occurring L-amino acids
  MISC_FEATURE (16): Xaa equals any of the naturally occurring L-amino acids
  MISC_FEATURE (34): Xaa equals any of the naturally occurring L-amino acids
  MISC_FEATURE (37): Xaa equals any of the naturally occurring L-amino acids
  MISC_FEATURE (38): Xaa equals any of the naturally occurring L-amino acids
  MISC_FEATURE (49): Xaa equals any of the naturally occurring L-amino acids
SKVSSXIKGTXGPAPXKVAFALELVDPPGCRNPXRAXXGGARFPIRPIX

SEQ ID NO: 6544 - protein, 41 aa, Homo sapiens
  MISC_FEATURE (13): Xaa equals any of the naturally occurring L-amino acids
  MISC_FEATURE (34): Xaa equals any of the naturally occurring L-amino acids
  MISC_FEATURE (38): Xaa equals any of the naturally occurring L-amino acids
  MISC_FEATURE (40): Xaa equals any of the naturally occurring L-amino acids
  MISC_FEATURE (41): Xaa equals any of the naturally occurring L-amino acids
GTRGGPVPNSPYXESYYNSLAVVLQRLDWENPNXFLCXFXX

SEQ ID NO: 6545 - protein, 36 aa, Homo sapiens
  MISC_FEATURE (16): Xaa equals any of the naturally occurring L-amino acids
GTSGTRGGPVPNSPYXESYYNSLAVVLQRRDWENPK

SEQ ID NO: 6546 - protein, 40 aa, Homo sapiens
  MISC_FEATURE (1): Xaa equals any of the naturally occurring L-amino acids
  MISC_FEATURE (4): Xaa equals any of the naturally occurring L-amino acids
  MISC_FEATURE (17): Xaa equals any of the naturally occurring L-amino acids
  MISC_FEATURE (37): Xaa equals any of the naturally occurring L-amino acids
  MISC_FEATURE (38): Xaa equals any of the naturally occurring L-amino acids
XGTXGTRGGPVPNSPYXESYYNSLAVVLQRRDWENPXXFP

SEQ ID NO: 6547 - protein, 62 aa, Homo sapiens
  MISC_FEATURE (5): Xaa equals any of the naturally occurring L-amino acids
  MISC_FEATURE (10): Xaa equals any of the naturally occurring L-amino acids
  MISC_FEATURE (38): Xaa equals any of the naturally occurring L-amino acids
  MISC_FEATURE (55): Xaa equals any of the naturally occurring L-amino acids
LKAPXGTRGXRRSISSGSPGLQEFGTSGPRGGPVPSSXFSESYYNSLAVVLQRRXWENPCLL

SEQ ID NO: 6548 - protein, 80 aa, Homo sapiens
  MISC_FEATURE (3): Xaa equals any of the naturally occurring L-amino acids
  MISC_FEATURE (6): Xaa equals any of the naturally occurring L-amino acids
  MISC_FEATURE (9): Xaa equals any of the naturally occurring L-amino acids
  MISC_FEATURE (15): Xaa equals any of the naturally occurring L-amino acids
  MISC_FEATURE (30): Xaa equals any of the naturally occurring L-amino acids
  MISC_FEATURE (76): Xaa equals any of the naturally occurring L-amino acids
  MISC_FEATURE (77): Xaa equals any of the naturally occurring L-amino acids
  MISC_FEATURE (78): Xaa equals any of the naturally occurring L-amino acids
  MISC_FEATURE (79): Xaa equals any of the naturally occurring L-amino acids
RRXGEXCSXINPQIXGKKIWSSTAVADALXLVDPPGCRNSARAARGGARYPIRPIVSRITIHWPSFYNVVTGKTQXXXXG

SEQ ID NO: 6549 - protein, 48 aa, Homo sapiens
  MISC_FEATURE (1): Xaa equals any of the naturally occurring L-amino acids
  MISC_FEATURE (3): Xaa equals any of the naturally occurring L-amino acids
  MISC_FEATURE (11): Xaa equals any of the naturally occurring L-amino acids
  MISC_FEATURE (16): Xaa equals any of the naturally occurring L-amino acids
  MISC_FEATURE (46): Xaa equals any of the naturally occurring L-amino acids
  MISC_FEATURE (47): Xaa equals any of the naturally occurring L-amino acids
  MISC_FEATURE (48): Xaa equals any of the naturally occurring L-amino acids
XGXEGYIRLAXQLTLXNGNKTWSSTAVAAALELVDPPGCRNSARGXXX

SEQ ID NO: 6550 - protein, 107 aa, Homo sapiens
  MISC_FEATURE (2): Xaa equals any of the naturally occurring L-amino acids
  MISC_FEATURE (17): Xaa equals any of the naturally occurring L-amino acids
  MISC_FEATURE (64): Xaa equals any of the naturally occurring L-amino acids
  MISC_FEATURE (95): Xaa equals any of the naturally occurring L-amino acids
  MISC_FEATURE (100): Xaa equals any of the naturally occurring L-amino acids
  MISC_FEATURE (102): Xaa equals any of the naturally occurring L-amino acids
FXSPGCRNSISSLSIPXTSRGGPVPNSPYSESYYNSLAVVLQRRDWENPGVTQLNRLAAQSPFXQLGVISEEARTDRPSQQLRSLNGEWDAPCSXALSAXVXWLPAV

SEQ ID NO: 6551 - protein, 68 aa, Homo sapiens
  MISC_FEATURE (1): Xaa equals any of the naturally occurring L-amino acids
  MISC_FEATURE (4): Xaa equals any of the naturally occurring L-amino acids
XKVXATRTKGNKSWSSTAVAAALELVDPPGCRNSARDFQVDFSASSKTDCFFSGLTLCGFFFFSLNLI

SEQ ID NO: 6552 - protein, 110 aa, Homo sapiens
  MISC_FEATURE (7): Xaa equals any of the naturally occurring L-amino acids
  MISC_FEATURE (12): Xaa equals any of the naturally occurring L-amino acids
  MISC_FEATURE (39): Xaa equals any of the naturally occurring L-amino acids
  MISC_FEATURE (42): Xaa equals any of the naturally occurring L-amino acids
  MISC_FEATURE (60): Xaa equals any of the naturally occurring L-amino acids
  MISC_FEATURE (66): Xaa equals any of the naturally occurring L-amino acids
  MISC_FEATURE (67): Xaa equals any of the naturally occurring L-amino acids
  MISC_FEATURE (73): Xaa equals any of the naturally occurring L-amino acids
  MISC_FEATURE (74): Xaa equals any of the naturally occurring L-amino acids
  MISC_FEATURE (84): Xaa equals any of the naturally occurring L-amino acids
  MISC_FEATURE (89): Xaa equals any of the naturally occurring L-amino acids
TAAAAAXELGDXPGCRNSISSLSIPSTSRGGPVPNSPYXESXYNSLAVGLQRRDWENPGXTQLNRXXGHPPFXXWRNSEEARTXRLPTXAQPEWRMGRALYGALSRGGCG

SEQ ID NO: 6553 - protein, 166 aa, Homo sapiens
  MISC_FEATURE (86): Xaa equals any of the naturally occurring L-amino acids
  MISC_FEATURE (97): Xaa equals any of the naturally occurring L-amino acids
  MISC_FEATURE (103): Xaa equals any of the naturally occurring L-amino acids
  MISC_FEATURE (116): Xaa equals any of the naturally occurring L-amino acids
  MISC_FEATURE (129): Xaa equals any of the naturally occurring L-amino acids
  MISC_FEATURE (139): Xaa equals any of the naturally occurring L-amino acids
  MISC_FEATURE (140): Xaa equals any of the naturally occurring L-amino acids
  MISC_FEATURE (143): Xaa equals any of the naturally occurring L-amino acids
  MISC_FEATURE (144): Xaa equals any of the naturally occurring L-amino acids
  MISC_FEATURE (145): Xaa equals any of the naturally occurring L-amino acids
  MISC_FEATURE (147): Xaa equals any of the naturally occurring L-amino acids
  MISC_FEATURE (149): Xaa equals any of the naturally occurring L-amino acids
  MISC_FEATURE (153): Xaa equals any of the naturally occurring L-amino acids
  MISC_FEATURE (154): Xaa equals any of the naturally occurring L-amino acids
  MISC_FEATURE (155): Xaa equals any of the naturally occurring L-amino acids
  MISC_FEATURE (158): Xaa equals any of the naturally occurring L-amino acids
  MISC_FEATURE (165): Xaa equals any of the naturally occurring L-amino acids
NSARGFSGSGSGTEFTLTISSLQAEDVAAYSCQQYYSFPFTFGPGTKVDIKRTVAAPSVFIFPPSDEQLKSGTASVVCLLNNFYPXEAKVQWKVDNXLQSGNXQESVTEQDSKDRXTASAAPDGEQSRXGEHKFRLRVXXQGXXXRXKXLTGXXXGEXPLFLFSXP

SEQ ID NO: 6554 - protein, 143 aa, Homo sapiens
  MISC_FEATURE (53): Xaa equals any of the naturally occurring L-amino acids
VKITRVEAEDVGVYYYCMQALQTPFTFGPGTKVDIKRTVAAPSVFIFPPSDEXLKSGTASVVCLLNNFYPREAKVQWKVDNALQSGNSQESVTEQDSKDSTYSLSSTLTLSKADYEKHKVYACEVTHQGLSSPVTKSFNRGEC

SEQ ID NO: 6555 - protein, 157 aa, Homo sapiens
  MISC_FEATURE (28): Xaa equals any of the naturally occurring L-amino acids
  MISC_FEATURE (38): Xaa equals any of the naturally occurring L-amino acids
  MISC_FEATURE (54): Xaa equals any of the naturally occurring L-amino acids
  MISC_FEATURE (71): Xaa equals any of the naturally occurring L-amino acids
  MISC_FEATURE (73): Xaa equals any of the naturally occurring L-amino acids
  MISC_FEATURE (78): Xaa equals any of the naturally occurring L-amino acids
  MISC_FEATURE (102): Xaa equals any of the naturally occurring L-amino acids
  MISC_FEATURE (108): Xaa equals any of the naturally occurring L-amino acids
  MISC_FEATURE (115): Xaa equals any of the naturally occurring L-amino acids
  MISC_FEATURE (117): Xaa equals any of the naturally occurring L-amino acids
  MISC_FEATURE (118): Xaa equals any of the naturally occurring L-amino acids
  MISC_FEATURE (120): Xaa equals any of the naturally occurring L-amino acids
  MISC_FEATURE (133): Xaa equals any of the naturally occurring L-amino acids
  MISC_FEATURE (139): Xaa equals any of the naturally occurring L-amino acids
  MISC_FEATURE (141): Xaa equals any of the naturally occurring L-amino acids
  MISC_FEATURE (145): Xaa equals any of the naturally occurring L-amino acids
  MISC_FEATURE (150): Xaa equals any of the naturally occurring L-amino acids
SCRIRHEVLRGPLLGHTDAVWGLAYSAXHQRLLSCSAXGTLRLWNTTEVAPALXVFNDTKELGIPASVDLXSXDPSHXVSSFSKGYTNIFNMETQQRILTLXSNVIQXPTLPAKXIXXIXLLLFRSTSCSLKXAIQFYXNXSGKXSLHGXPLKLFQF

SEQ ID NO: 6556 - protein, 69 aa, Homo sapiens
KWRLRSAPAEEGEAGGVSVLPVCSTAPASRTPPAHADFPSSARLSLVLVCAPHAPGRLVSHCPARLRWP

SEQ ID NO: 6557 - protein, 89 aa, Homo sapiens
  MISC_FEATURE (5): Xaa equals any of the naturally occurring L-amino acids
  MISC_FEATURE (6): Xaa equals any of the naturally occurring L-amino acids
  MISC_FEATURE (9): Xaa equals any of the naturally occurring L-amino acids
  MISC_FEATURE (16): Xaa equals any of the naturally occurring L-amino acids
  MISC_FEATURE (24): Xaa equals any of the naturally occurring L-amino acids
  MISC_FEATURE (34): Xaa equals any of the naturally occurring L-amino acids
  MISC_FEATURE (35): Xaa equals any of the naturally occurring L-amino acids
  MISC_FEATURE (37): Xaa equals any of the naturally occurring L-amino acids
  MISC_FEATURE (39): Xaa equals any of the naturally occurring L-amino acids
  MISC_FEATURE (75): Xaa equals any of the naturally occurring L-amino acids
  MISC_FEATURE (77): Xaa equals any of the naturally occurring L-amino acids
  MISC_FEATURE (83): Xaa equals any of the naturally occurring L-amino acids
LRADXXKLXHQERTQXLRQAPVGXGYFHLLDHKXXAXCXADFRGHWVLIFFGFTHCPDICPQQLEKLVQVVRELXTXLVFLQXTCLHHC

SEQ ID NO: 6558 - protein, 61 aa, Homo sapiens
  MISC_FEATURE (3): Xaa equals any of the naturally occurring L-amino acids
  MISC_FEATURE (5): Xaa equals any of the naturally occurring L-amino acids
  MISC_FEATURE (9): Xaa equals any of the naturally occurring L-amino acids
  MISC_FEATURE (12): Xaa equals any of the naturally occurring L-amino acids
  MISC_FEATURE (34): Xaa equals any of the naturally occurring L-amino acids
  MISC_FEATURE (48): Xaa equals any of the naturally occurring L-amino acids
  MISC_FEATURE (53): Xaa equals any of the naturally occurring L-amino acids
  MISC_FEATURE (59): Xaa equals any of the naturally occurring L-amino acids
GLXFXGMHXMAXTHWPCPWPALMTRWTVSLRAPXLAQLSDVAMHSLGXAFIYXQTDDIXDV

SEQ ID NO: 6559 - protein, 185 aa, Homo sapiens
  MISC_FEATURE (10): Xaa equals any of the naturally occurring L-amino acids
  MISC_FEATURE (11): Xaa equals any of the naturally occurring L-amino acids
  MISC_FEATURE (19): Xaa equals any of the naturally occurring L-amino acids
  MISC_FEATURE (20): Xaa equals any of the naturally occurring L-amino acids
  MISC_FEATURE (27): Xaa equals any of the naturally occurring L-amino acids
  MISC_FEATURE (29): Xaa equals any of the naturally occurring L-amino acids
  MISC_FEATURE (30): Xaa equals any of the naturally occurring L-amino acids
  MISC_FEATURE (35): Xaa equals any of the naturally occurring L-amino acids
  MISC_FEATURE (63): Xaa equals any of the naturally occurring L-amino acids
  MISC_FEATURE (71): Xaa equals any of the naturally occurring L-amino acids
  MISC_FEATURE (74): Xaa equals any of the naturally occurring L-amino acids
  MISC_FEATURE (96): Xaa equals any of the naturally occurring L-amino acids
  MISC_FEATURE (97): Xaa equals any of the naturally occurring L-amino acids
  MISC_FEATURE (103): Xaa equals any of the naturally occurring L-amino acids
  MISC_FEATURE (108): Xaa equals any of the naturally occurring L-amino acids
  MISC_FEATURE (113): Xaa equals any of the naturally occurring L-amino acids
  MISC_FEATURE (120): Xaa equals any of the naturally occurring L-amino acids
  MISC_FEATURE (125): Xaa equals any of the naturally occurring L-amino acids
  MISC_FEATURE (128): Xaa equals any of the naturally occurring L-amino acids
  MISC_FEATURE (133): Xaa equals any of the naturally occurring L-amino acids
  MISC_FEATURE (137): Xaa equals any of the naturally occurring L-amino acids
  MISC_FEATURE (140): Xaa equals any of the naturally occurring L-amino acids
  MISC_FEATURE (142): Xaa equals any of the naturally occurring L-amino acids
  MISC_FEATURE (145): Xaa equals any of the naturally occurring L-amino acids
  MISC_FEATURE (147): Xaa equals any of the naturally occurring L-amino acids
  MISC_FEATURE (148): Xaa equals any of the naturally occurring L-amino acids
  MISC_FEATURE (150): Xaa equals any of the naturally occurring L-amino acids
  MISC_FEATURE (154): Xaa equals any of the naturally occurring L-amino acids
  MISC_FEATURE (171): Xaa equals any of the naturally occurring L-amino acids
  MISC_FEATURE (181): Xaa equals any of the naturally occurring L-amino acids
MRPEVMSHKXXSAPRHGSXXFLPRKRXTXXRGKVXIFPKDDPSKPVHLTSFLGYKAGMTHIVXEVDRPGSXVNXKEVVEAVTIVETPPMVVVGIVXXMKTPRXLRTFXTVFAXHISDECXRRFYXNWXSSNNXAFTXYCXKXQDXDXXKXLGEXLQQHEKICPVIRVIAHXQDSPASSAPXKKAT

SEQ ID NO: 6560 - protein, 39 aa, Homo sapiens
  MISC_FEATURE (19): Xaa equals any of the naturally occurring L-amino acids
  MISC_FEATURE (26): Xaa equals any of the naturally occurring L-amino acids
  MISC_FEATURE (31): Xaa equals any of the naturally occurring L-amino acids
AAVGFFLGIVWSGAGTQLXFGERPAXKMIGXNSPLLVGL

SEQ ID NO: 6561 - protein, 33 aa, Homo sapiens
  MISC_FEATURE (15): Xaa equals any of the naturally occurring L-amino acids
  MISC_FEATURE (20): Xaa equals any of the naturally occurring L-amino acids
  MISC_FEATURE (25): Xaa equals any of the naturally occurring L-amino acids
  MISC_FEATURE (29): Xaa equals any of the naturally occurring L-amino acids
  MISC_FEATURE (32): Xaa equals any of the naturally occurring L-amino acids
GIPKADITWELPDKXHLKAXVQARXYGNXFLXP

SEQ ID NO: 6562 - protein, 82 aa, Homo sapiens
  MISC_FEATURE (16): Xaa equals any of the naturally occurring L-amino acids
  MISC_FEATURE (17): Xaa equals any of the naturally occurring L-amino acids
  MISC_FEATURE (32): Xaa equals any of the naturally occurring L-amino acids
  MISC_FEATURE (36): Xaa equals any of the naturally occurring L-amino acids
  MISC_FEATURE (39): Xaa equals any of the naturally occurring L-amino acids
  MISC_FEATURE (47): Xaa equals any of the naturally occurring L-amino acids
  MISC_FEATURE (49): Xaa equals any of the naturally occurring L-amino acids
  MISC_FEATURE (58): Xaa equals any of the naturally occurring L-amino acids
  MISC_FEATURE (62): Xaa equals any of the naturally occurring L-amino acids
  MISC_FEATURE (63): Xaa equals any of the naturally occurring L-amino acids
  MISC_FEATURE (66): Xaa equals any of the naturally occurring L-amino acids
CVFQQIYHNYLMCISXXYHNYVMCISTICHSXLICXSKXHAVLALHXNXETIRNHHTXETLXXQCXIISERKLLFCHLYIFM

SEQ ID NO: 6563 - protein, 130 aa, Homo sapiens
  MISC_FEATURE (8): Xaa equals any of the naturally occurring L-amino acids
NPTSLLGXFGYRPPPAVFWRAAAIGPYATLMPVGLQQGPQSDQELEQAPGTARRRGRLTKHTKFVRDMIREVCGFAPYERRAMELLKVSKDKRALKFIKKRVGTHIRAKRKREELSNVLAAMRKAAAKKD

SEQ ID NO: 6564 - protein, 79 aa, Homo sapiens
  MISC_FEATURE (5): Xaa equals any of the naturally occurring L-amino acids
  MISC_FEATURE (10): Xaa equals any of the naturally occurring L-amino acids
  MISC_FEATURE (11): Xaa equals any of the naturally occurring L-amino acids
  MISC_FEATURE (19): Xaa equals any of the naturally occurring L-amino acids
  MISC_FEATURE (21): Xaa equals any of the naturally occurring L-amino acids
  MISC_FEATURE (30): Xaa equals any of the naturally occurring L-amino acids
  MISC_FEATURE (36): Xaa equals any of the naturally occurring L-amino acids
  MISC_FEATURE (41): Xaa equals any of the naturally occurring L-amino acids
  MISC_FEATURE (42): Xaa equals any of the naturally occurring L-amino acids
  MISC_FEATURE (44): Xaa equals any of the naturally occurring L-amino acids
  MISC_FEATURE (61): Xaa equals any of the naturally occurring L-amino acids
  MISC_FEATURE (68): Xaa equals any of the naturally occurring L-amino acids
  MISC_FEATURE (72): Xaa equals any of the naturally occurring L-amino acids
  MISC_FEATURE (75): Xaa equals any of the naturally occurring L-amino acids
SRRSXLGAAXXQSVEERAXEXPSCLGTLRXVSAVWXTNRFXXLXNDVSDPFEGAEGSQRTXKKKPGGXRRLXALXSSCA

SEQ ID NO: 6565 - protein, 69 aa, Homo sapiens
SLDRVSVPMWGTFLSEPLSIEGLVGRYLTNNLMERIPILYRNPLIIRPCGMIIPSGINLSFERLSPSKG

SEQ ID NO: 6566 - protein, 178 aa, Homo sapiens
  MISC_FEATURE (147): Xaa equals any of the naturally occurring L-amino acids
  MISC_FEATURE (165): Xaa equals any of the naturally occurring L-amino acids
  MISC_FEATURE (166): Xaa equals any of the naturally occurring L-amino acids
  MISC_FEATURE (167): Xaa equals any of the naturally occurring L-amino acids
  MISC_FEATURE (169): Xaa equals any of the naturally occurring L-amino acids
ITMDWQSIKIQELMSDDQREAGRIPRTIECELVHDLVDSCVPGDTVTITGIVKVSNAEEGSRNKNDKCMFLLYIEANSISNSKGQKTKSSEDGCKHGMLMEFSLKDLYAIQEIQAEENLFKLIVNSLCPVIFGHEAACNVAPRGVYXCGNTTTTFGLTVTLSKDXXXGXFAFGTWCPW

SEQ ID NO: 6567 - protein, 69 aa, Homo sapiens
  MISC_FEATURE (16): Xaa equals any of the naturally occurring L-amino acids
  MISC_FEATURE (26): Xaa equals any of the naturally occurring L-amino acids
  MISC_FEATURE (51): Xaa equals any of the naturally occurring L-amino acids
  MISC_FEATURE (64): Xaa equals any of the naturally occurring L-amino acids
  MISC_FEATURE (66): Xaa equals any of the naturally occurring L-amino acids
  MISC_FEATURE (69): Xaa equals any of the naturally occurring L-amino acids
RSMTVEPNPFQRKVLXKGFEPADNKXLLRATDGKKKISTVVSSKEVNKFQXAYSNLLRANMDGXKXRDX

SEQ ID NO: 6568 - protein, 24 aa, Homo sapiens
HIPSPAKKVPRLPATAAEPESSCH

SEQ ID NO: 6569 - protein, 178 aa, Homo sapiens
  MISC_FEATURE (145): Xaa equals any of the naturally occurring L-amino acids
  MISC_FEATURE (151): Xaa equals any of the naturally occurring L-amino acids
  MISC_FEATURE (173): Xaa equals any of the naturally occurring L-amino acids
  MISC_FEATURE (176): Xaa equals any of the naturally occurring L-amino acids
  MISC_FEATURE (177): Xaa equals any of the naturally occurring L-amino acids
WRLMSRFNAFKRTNTILHHLRMSKHTDAAEEVLLEKKGCAGVITLNRPKFLNALTLNMIRQIYPQLKKWEQDPETFLIIIKGAGGKAFCAGGDIRVISEAEKAKQKIAPVFFREEYMLNNAVGSCQKPYVALIHGITMGGGVGLXVHGQFXVATEKVSFCYARNCNRTGPLMXGGXXF

SEQ ID NO: 6570 - protein, 86 aa, Homo sapiens
FGRADSERQNQEYQRLMDIKSRLEQEIAIYRSLLEGQEDHSQQFVCLQGPLRQQALGLLLSFGGCLLGRGMGRKGPLPPALLLTCQ

SEQ ID NO: 6571 - protein, 165 aa, Homo sapiens
  MISC_FEATURE (4): Xaa equals any of the naturally occurring L-amino acids
  MISC_FEATURE (6): Xaa equals any of the naturally occurring L-amino acids
  MISC_FEATURE (9): Xaa equals any of the naturally occurring L-amino acids
  MISC_FEATURE (22): Xaa equals any of the naturally occurring L-amino acids
  MISC_FEATURE (25): Xaa equals any of the naturally occurring L-amino acids
THYXGXAGXPAGTGPEFPGRPXRPXEQNRKDAEAWFTSRTEELNREVAGHTEQLQMSRSEVTDLRRTLQGLEIELQSQLSMKAALEDTLAETEARFGAQLAHIQALISGIEAQLGDVRADSERQNQEYQRLMDIKSRLEQEIATYRSLLEGQEDHYNNLSASKVL

SEQ ID NO: 6572 - protein, 180 aa, Homo sapiens
  MISC_FEATURE (3): Xaa equals any of the naturally occurring L-amino acids
  MISC_FEATURE (82): Xaa equals any of the naturally occurring L-amino acids
  MISC_FEATURE (87): Xaa equals any of the naturally occurring L-amino acids
  MISC_FEATURE (89): Xaa equals any of the naturally occurring L-amino acids
DKXETWREVYLQDSFKPLVCISPNASLFDAVSSLIRNKIHRLPVIDPESGNTLYILTHKRILKFLKLFITEFPKPEFMSKSXEKLPXWXLCQYCYGSTTTPVYVALGIFVQHRVSALPVVDEKGRVVDIYSKFDVINLAAEKTYNNLDVSVTKALQHRSHYFEGVLKCYLHETWRPSLTG

SEQ ID NO: 6573 - protein, 65 aa, Homo sapiens
  MISC_FEATURE (4): Xaa equals any of the naturally occurring L-amino acids
  MISC_FEATURE (25): Xaa equals any of the naturally occurring L-amino acids
  MISC_FEATURE (31): Xaa equals any of the naturally occurring L-amino acids
  MISC_FEATURE (43): Xaa equals any of the naturally occurring L-amino acids
  MISC_FEATURE (45): Xaa equals any of the naturally occurring L-amino acids
NSAXVARTIGISVDPRRRNKSTESXQANVQXLKEYRSKLILFXRXPSAPKKGDSSAEELRTGPPS

SEQ ID NO: 6574 - protein, 78 aa, Homo sapiens
  MISC_FEATURE (7): Xaa equals any of the naturally occurring L-amino acids
  MISC_FEATURE (8): Xaa equals any of the naturally occurring L-amino acids
  MISC_FEATURE (17): Xaa equals any of the naturally occurring L-amino acids
  MISC_FEATURE (21): Xaa equals any of the naturally occurring L-amino acids
  MISC_FEATURE (22): Xaa equals any of the naturally occurring L-amino acids
  MISC_FEATURE (26): Xaa equals any of the naturally occurring L-amino acids
  MISC_FEATURE (31): Xaa equals any of the naturally occurring L-amino acids
  MISC_FEATURE (33): Xaa equals any of the naturally occurring L-amino acids
  MISC_FEATURE (36): Xaa equals any of the naturally occurring L-amino acids
  MISC_FEATURE (40): Xaa equals any of the naturally occurring L-amino acids
  MISC_FEATURE (49): Xaa equals any of the naturally occurring L-amino acids
  MISC_FEATURE (50): Xaa equals any of the naturally occurring L-amino acids
  MISC_FEATURE (55): Xaa equals any of the naturally occurring L-amino acids
  MISC_FEATURE (60): Xaa equals any of the naturally occurring L-amino acids
  MISC_FEATURE (67): Xaa equals any of the naturally occurring L-amino acids
  MISC_FEATURE (74): Xaa equals any of the naturally occurring L-amino acids
  MISC_FEATURE (77): Xaa equals any of the naturally occurring L-amino acids
HRNHLGXXHGKISSGGXSHTXXIPMXLVVFXPXLCXKMGXPYCIIKGKXXLATYXSTGSXCTIVRLXTGVLGTXKGXF

SEQ ID NO: 6575 - protein, 58 aa, Homo sapiens
RTAVMPREDRATWKSNYFLKIIQLLDDYPKCFIVGADNVGSKQMQQIPHVPSREGLWC

SEQ ID NO: 6576 - protein, 104 aa, Homo sapiens
  MISC_FEATURE (20): Xaa equals any of the naturally occurring L-amino acids
  MISC_FEATURE (39): Xaa equals any of the naturally occurring L-amino acids
  MISC_FEATURE (48): Xaa equals any of the naturally occurring L-amino acids
  MISC_FEATURE (49): Xaa equals any of the naturally occurring L-amino acids
  MISC_FEATURE (53): Xaa equals any of the naturally occurring L-amino acids
  MISC_FEATURE (62): Xaa equals any of the naturally occurring L-amino acids
  MISC_FEATURE (66): Xaa equals any of the naturally occurring L-amino acids
  MISC_FEATURE (68): Xaa equals any of the naturally occurring L-amino acids
  MISC_FEATURE (70): Xaa equals any of the naturally occurring L-amino acids
  MISC_FEATURE (85): Xaa equals any of the naturally occurring L-amino acids
  MISC_FEATURE (88): Xaa equals any of the naturally occurring L-amino acids
  MISC_FEATURE (90): Xaa equals any of the naturally occurring L-amino acids
NTVLSGGTTMYPGIADRMQXEITALAPSTMKIKIIAPPXRKFSVWDRXXPSWXRCPPSNRFXSASXNXEXIPGPSHPSTRKLLPXGGXNXLILRLQPFSFEKKP

SEQ ID NO: 6577 - protein, 67 aa, Homo sapiens
  MISC_FEATURE (51): Xaa equals any of the naturally occurring L-amino acids
  MISC_FEATURE (58): Xaa equals any of the naturally occurring L-amino acids
  MISC_FEATURE (59): Xaa equals any of the naturally occurring L-amino acids
  MISC_FEATURE (64): Xaa equals any of the naturally occurring L-amino acids
CDPPAKGCQGLFHYGLCVLPFRHLRNSSHAGAFVIVTEEAIAKGIRRNCGXSQVPRPXXGEPGXSLG

SEQ ID NO: 6578 - protein, 111 aa, Homo sapiens
  MISC_FEATURE (2): Xaa equals any of the naturally occurring L-amino acids
  MISC_FEATURE (86): Xaa equals any of the naturally occurring L-amino acids
  MISC_FEATURE (106): Xaa equals any of the naturally occurring L-amino acids
  MISC_FEATURE (107): Xaa equals any of the naturally occurring L-amino acids
  MISC_FEATURE (110): Xaa equals any of the naturally occurring L-amino acids
PXQKGDTGEPGLPGTKGTRGPPGASGYPGNPGLPGIPGQDGPPGPPGIPGCNGTKGERGPLGPPGLPGFAGNPGPPGLPGMKGDPXEILGHVPGMLLKGERRFPEXXGLXA

SEQ ID NO: 6579 - protein, 90 aa, Homo sapiens
  MISC_FEATURE (80): Xaa equals any of the naturally occurring L-amino acids
  MISC_FEATURE (86): Xaa equals any of the naturally occurring L-amino acids
  MISC_FEATURE (89): Xaa equals any of the naturally occurring L-amino acids
  MISC_FEATURE (90): Xaa equals any of the naturally occurring L-amino acids
ASGNVKKALKLMGSNEGEFKAEGNSKFTYTVLEDGCTKHTGEWSKTVFEYRTRKAVRLPIVDIAPYDIGGPDQEFGVDVXPDSLYXPNXX

SEQ ID NO: 6580 - protein, 78 aa, Homo sapiens
  MISC_FEATURE (11): Xaa equals any of the naturally occurring L-amino acids
  MISC_FEATURE (27): Xaa equals any of the naturally occurring L-amino acids
  MISC_FEATURE (43): Xaa equals any of the naturally occurring L-amino acids
  MISC_FEATURE (58): Xaa equals any of the naturally occurring L-amino acids
  MISC_FEATURE (65): Xaa equals any of the naturally occurring L-amino acids
  MISC_FEATURE (70): Xaa equals any of the naturally occurring L-amino acids
  MISC_FEATURE (72): Xaa equals any of the naturally occurring L-amino acids
WAYLFQAAGAXYVVLTTKHHEGFTNWXSPVSWNWNSKDVGPHXDLVGELGTALRKRNXRYGLYHXLLEWXHXLYLLDK

SEQ ID NO: 6581 - protein, 153 aa, Homo sapiens
  MISC_FEATURE (102): Xaa equals any of the naturally occurring L-amino acids
  MISC_FEATURE (104): Xaa equals any of the naturally occurring L-amino acids
  MISC_FEATURE (112): Xaa equals any of the naturally occurring L-amino acids
  MISC_FEATURE (129): Xaa equals any of the naturally occurring L-amino acids
  MISC_FEATURE (139): Xaa equals any of the naturally occurring L-amino acids
DMRPLSNKASALVFFSCRTDMPYRYHSSLGQLNFTGSVIYEAQDVYSGDIISGLRDETNFTVIINPSGVVMWYLYPIKNWRCPSSEELGHVTGCGGTTEPRXWXLGMPRASXEVLCSPGCSVTDPSSQXHLTASLSFQXKPLEIFGHFLWLLA

SEQ ID NO: 6582 - protein, 86 aa, Homo sapiens
  MISC_FEATURE (5): Xaa equals any of the naturally occurring L-amino acids
  MISC_FEATURE (14): Xaa equals any of the naturally occurring L-amino acids
  MISC_FEATURE (41): Xaa equals any of the naturally occurring L-amino acids
  MISC_FEATURE (49): Xaa equals any of the naturally occurring L-amino acids
  MISC_FEATURE (73): Xaa equals any of the naturally occurring L-amino acids
PNHSXYRAIGVSKXCLSGIDVRYLHFLEGTRDYDWLEPLLXNQTVMSIXLFWFRHRPQESFSGSPAHRQVPVXAPRLSPIHEQQVT

SEQ ID NO: 6583 - protein, 80 aa, Homo sapiens
  MISC_FEATURE (26): Xaa equals any of the naturally occurring L-amino acids
YIQSHYQLELQCCIDWTHVTDPLHRXQKLQEEKHKSITEALRRQEQNIKSFEETYDRKLKNELLNFHRLHGVCLALGILI

SEQ ID NO: 6584 - protein, 126 aa, Homo sapiens
  MISC_FEATURE (66): Xaa equals any of the naturally occurring L-amino acids
  MISC_FEATURE (75): Xaa equals any of the naturally occurring L-amino acids
  MISC_FEATURE (96): Xaa equals any of the naturally occurring L-amino acids
  MISC_FEATURE (120): Xaa equals any of the naturally occurring L-amino acids
YALRRHKLMSLIQKEAQGQSGTDQTVGVLSNPTYYMSNDIPYTFHQDNNFLYLCGFQEPDSILVLXSLPGKQLPXHKAILFVPRRDPSRELWDGPXSGTDGAISSNWSRRSLYARRISTXCTKNES

SEQ ID NO: 6585 - protein, 145 aa, Homo sapiens
  MISC_FEATURE (100): Xaa equals any of the naturally occurring L-amino acids
  MISC_FEATURE (123): Xaa equals any of the naturally occurring L-amino acids
  MISC_FEATURE (136): Xaa equals any of the naturally occurring L-amino acids
  MISC_FEATURE (143): Xaa equals any of the naturally occurring L-amino acids
GKFCVQSERQDSAAVGFDYKEKLAKHESQQDYSKGFGGKYGVQKDRMDKNASTFEDVTQVSSAYQKTVPVEAVTSKTSNIRANFENLAKEKEQEDRRKAXAERAQRMAKERQEQEEARKKLGXTSQSQNANAPCVXRTLSQPXEK

SEQ ID NO: 6586 - protein, 76 aa, Homo sapiens
GQCCQELRTSLRNVTLHCTDGSSRAFSYTEVEECGCMGRRCPAPGDTQHSEEAEPEPSQEAESGSWERGVPVSPMH

SEQ ID NO: 6587 - protein, 39 aa, Homo sapiens
LDDWGETCKGCAEKSDYIRKINELMPKYAPKAASARTDL

SEQ ID NO: 6588 - protein, 77 aa, Homo sapiens
  MISC_FEATURE (47): Xaa equals any of the naturally occurring L-amino acids
EFGRGINLETPSMVAGMEFIKVGRAWEDGKVGSACPGIFRWPGVLPXGRVIGEPTESDGRVPHRGPAGGRRGCPRTE

SEQ ID NO: 6589 - protein, 111 aa, Homo sapiens
  MISC_FEATURE (8): Xaa equals any of the naturally occurring L-amino acids
  MISC_FEATURE (9): Xaa equals any of the naturally occurring L-amino acids
  MISC_FEATURE (13): Xaa equals any of the naturally occurring L-amino acids
  MISC_FEATURE (15): Xaa equals any of the naturally occurring L-amino acids
  MISC_FEATURE (22): Xaa equals any of the naturally occurring L-amino acids
  MISC_FEATURE (25): Xaa equals any of the naturally occurring L-amino acids
  MISC_FEATURE (26): Xaa equals any of the naturally occurring L-amino acids
  MISC_FEATURE (30): Xaa equals any of the naturally occurring L-amino acids
  MISC_FEATURE (54): Xaa equals any of the naturally occurring L-amino acids
  MISC_FEATURE (60): Xaa equals any of the naturally occurring L-amino acids
  MISC_FEATURE (88): Xaa equals any of the naturally occurring L-amino acids
KMPKSLKXXQTEXLXNALLQGXPVXXGRCXRQPLTRCIATASGSKLKGQPVRIXPGKSDXRHQPGGSMRTGPTESLIQGLHQSVFRAXKRIGLVLFGKGNTGFPLAGTVRP

SEQ ID NO: 6590 - protein, 131 aa, Homo sapiens
  MISC_FEATURE (13): Xaa equals any of the naturally occurring L-amino acids
  MISC_FEATURE (40): Xaa equals any of the naturally occurring L-amino acids
  MISC_FEATURE (47): Xaa equals any of the naturally occurring L-amino acids
  MISC_FEATURE (55): Xaa equals any of the naturally occurring L-amino acids
  MISC_FEATURE (67): Xaa equals any of the naturally occurring L-amino acids
  MISC_FEATURE (72): Xaa equals any of the naturally occurring L-amino acids
  MISC_FEATURE (73): Xaa equals any of the naturally occurring L-amino acids
  MISC_FEATURE (83): Xaa equals any of the naturally occurring L-amino acids
  MISC_FEATURE (84): Xaa equals any of the naturally occurring L-amino acids
  MISC_FEATURE (89): Xaa equals any of the naturally occurring L-amino acids
  MISC_FEATURE (113): Xaa equals any of the naturally occurring L-amino acids
  MISC_FEATURE (114): Xaa equals any of the naturally occurring L-amino acids
  MISC_FEATURE (119): Xaa equals any of the naturally occurring L-amino acids
  MISC_FEATURE (121): Xaa equals any of the naturally occurring L-amino acids
LTYVRPKGLISMXESRSCDGHLGNFLGARSPDETIFCNDXPLHLLHXWSPDIIPXLVSCRFTKETTXKNFNXXYGTKGNYTSXXWEYSXSIQNSDNDLPVFQGISSFSLKGYXXLMRSXSXKAQPQTWKSG

SEQ ID NO: 6591 - protein, 77 aa, Homo sapiens
  MISC_FEATURE (4): Xaa equals any of the naturally occurring L-amino acids
  MISC_FEATURE (5): Xaa equals any of the naturally occurring L-amino acids
  MISC_FEATURE (15): Xaa equals any of the naturally occurring L-amino acids
  MISC_FEATURE (65): Xaa equals any of the naturally occurring L-amino acids
LAFXXIKLGRYSGLXHGVAYGATRYNYLKPRAEEERRIAAEEKKKQDELKRIARELAEDDSILKXVTLRPTPWTSSG

SEQ ID NO: 6592 - protein, 58 aa, Homo sapiens
PRKLKQTLRTKMNENLFASFIAPTILGLPAAVLIILFPPLLIPTSKYLINNRLITTQQ

SEQ ID NO: 6593 - protein, 118 aa, Homo sapiens
  MISC_FEATURE (58): Xaa equals any of the naturally occurring L-amino acids
  MISC_FEATURE (67): Xaa equals any of the naturally occurring L-amino acids
  MISC_FEATURE (71): Xaa equals any of the naturally occurring L-amino acids
  MISC_FEATURE (109): Xaa equals any of the naturally occurring L-amino acids
  MISC_FEATURE (118): Xaa equals any of the naturally occurring L-amino acids
AGAVIIGFRSKIKNALAHFLPQGTPTPLIPILVIIETISLLIQPIALAVRLTAYITAXHLLMHLIGXATLXISTINLPSTLIIFTILILLTILEIAVALIQSLRFPHFXLSLLPAQQX

SEQ ID NO: 6594 - protein, 84 aa, Homo sapiens
IGVTAVAFNKELDPIQKLFVDKIREYKSKRQTSGGPVDASSEYQQELERELFKLKQMFGNADMNTFPTFKFEDPKFEVIEKPQA

SEQ ID NO: 6595 - protein, 74 aa, Homo sapiens
  MISC_FEATURE (1): Xaa equals any of the naturally occurring L-amino acids
  MISC_FEATURE (7): Xaa equals any of the naturally occurring L-amino acids
  MISC_FEATURE (14): Xaa equals any of the naturally occurring L-amino acids
  MISC_FEATURE (23): Xaa equals any of the naturally occurring L-amino acids
  MISC_FEATURE (36): Xaa equals any of the naturally occurring L-amino acids
  MISC_FEATURE (38): Xaa equals any of the naturally occurring L-amino acids
  MISC_FEATURE (42): Xaa equals any of the naturally occurring L-amino acids
  MISC_FEATURE (43): Xaa equals any of the naturally occurring L-amino acids
  MISC_FEATURE (57): Xaa equals any of the naturally occurring L-amino acids
  MISC_FEATURE (60): Xaa equals any of the naturally occurring L-amino acids
  MISC_FEATURE (67): Xaa equals any of the naturally occurring L-amino acids
XGAVIIXFRSKIKXALAHFLSKXTPTPLIPILVIMXNXILLXXPIALGVSLIAYITXGHXLMHLIGXVPYNINH

SEQ ID NO: 6596 - protein, 92 aa, Homo sapiens
  MISC_FEATURE (76): Xaa equals any of the naturally occurring L-amino acids
REAFQSVVLPAFEKSCQAMFQQINDSFRLGTQEYLQQLESHMKSRKAREQEAREPVLAQQAHILQLLQQGHLNQAXQQALTAADLNLVLVCV

SEQ ID NO: 6597 - protein, 81 aa, Homo sapiens
  MISC_FEATURE (68): Xaa equals any of the naturally occurring L-amino acids
  MISC_FEATURE (78): Xaa equals any of the naturally occurring L-amino acids
  MISC_FEATURE (79): Xaa equals any of the naturally occurring L-amino acids
AVLALLSLSGLEAIQRTPKIQVYSRHPAENGKSNFLNCYVSGFHPSDIEVDLLKNGERIEKSGAFRLXFQQGLVFLSXXLH

SEQ ID NO: 6598 - protein, 154 aa, Homo sapiens
  MISC_FEATURE (13): Xaa equals any of the naturally occurring L-amino acids
  MISC_FEATURE (47): Xaa equals any of the naturally occurring L-amino acids
  MISC_FEATURE (104): Xaa equals any of the naturally occurring L-amino acids
  MISC_FEATURE (108): Xaa equals any of the naturally occurring L-amino acids
  MISC_FEATURE (150): Xaa equals any of the naturally occurring L-amino acids
PQKPLSSTPTGCXWGKTQGLQCLGPGWRHLHAVPTAPPALRHGLLRXMCLPWTRRLGYSAMPQALTLVPSWLPGPPGRTSAARGCGRPSRSWRAAAEAGGPGGXGPAXVGSGAGGRRPAVTGAAPASLVPNSCSPGDPLVLERPPPRWSXSFVP

SEQ ID NO: 6599 - protein, 128 aa, Homo sapiens
VCMSYAFHTPDKLSFILDLMNGGDLHYHLSQHGVFSEADMRFYAAEIILGLEHMHNRFVVYRDLKPANILLDEHGHVRISDLGLACDFSRRSPMPAWAPTGTWLRRSCRRAWPTTAVPTGSLWGACSS

SEQ ID NO: 6600 - protein, 39 aa, Homo sapiens
  MISC_FEATURE (1): Xaa equals any of the naturally occurring L-amino acids
  MISC_FEATURE (10): Xaa equals any of the naturally occurring L-amino acids
  MISC_FEATURE (25): Xaa equals any of the naturally occurring L-amino acids
  MISC_FEATURE (27): Xaa equals any of the naturally occurring L-amino acids
  MISC_FEATURE (36): Xaa equals any of the naturally occurring L-amino acids
  MISC_FEATURE (37): Xaa equals any of the naturally occurring L-amino acids
XPTPVTFGFXPSFFATFAGFPRQAXNXGLPLGFPIXXFT

SEQ ID NO: 6601 - protein, 77 aa, Homo sapiens
  MISC_FEATURE (1): Xaa equals any of the naturally occurring L-amino acids
  MISC_FEATURE (23): Xaa equals any of the naturally occurring L-amino acids
  MISC_FEATURE (33): Xaa equals any of the naturally occurring L-amino acids
XTIGKAGTPAGTGPEFPGVVTRXVTATLASALXPAPFAFFPSFLATFAGFPRQALNRGLPLGFRFSALRHLDPKKLD

SEQ ID NO: 6602 - protein, 49 aa, Homo sapiens
  MISC_FEATURE (42): Xaa equals any of the naturally occurring L-amino acids
  MISC_FEATURE (45): Xaa equals any of the naturally occurring L-amino acids
  MISC_FEATURE (48): Xaa equals any of the naturally occurring L-amino acids
IASGRSRGSKLTYACMRRHSSSIVSPKFNSLAVVLQRRDWEXPKXAQXD

SEQ ID NO: 6603 - protein, 77 aa, Homo sapiens
  MISC_FEATURE (59): Xaa equals any of the naturally occurring L-amino acids
  MISC_FEATURE (64): Xaa equals any of the naturally occurring L-amino acids
  MISC_FEATURE (77): Xaa equals any of the naturally occurring L-amino acids
IASGRSRGSKLTYACMRRHSSSIVSPKFNSLAVVLQRRDWENPGVTQLNRLAAHPPFAXWRNSXEARTDRLPNSCAX

SEQ ID NO: 6604 - protein, 30 aa, Homo sapiens
  MISC_FEATURE (1): Xaa equals any of the naturally occurring L-amino acids
XTHYRESWYACRYRSGIPGSTHASAHASGG

SEQ ID NO: 6605 - protein, 87 aa, Homo sapiens
  MISC_FEATURE (63): Xaa equals any of the naturally occurring L-amino acids
  MISC_FEATURE (65): Xaa equals any of the naturally occurring L-amino acids
  MISC_FEATURE (69): Xaa equals any of the naturally occurring L-amino acids
  MISC_FEATURE (70): Xaa equals any of the naturally occurring L-amino acids
  MISC_FEATURE (72): Xaa equals any of the naturally occurring L-amino acids
IASGRSRGSKLTYACMRRHSSSIVSPKFNSLAVVLQRRDWENPGVTQLNRLAAHPPFASWRNXEXARNXXPXPNRLRSLEWRMGRAL

SEQ ID NO: 6606 - protein, 71 aa, Homo sapiens
  MISC_FEATURE (23): Xaa equals any of the naturally occurring L-amino acids
  MISC_FEATURE (44): Xaa equals any of the naturally occurring L-amino acids
  MISC_FEATURE (63): Xaa equals any of the naturally occurring L-amino acids
  MISC_FEATURE (64): Xaa equals any of the naturally occurring L-amino acids
  MISC_FEATURE (71): Xaa equals any of the naturally occurring L-amino acids
KKKKRAAALEDPSLRTRACRRHXSSIVSPKFNSLGRRLHVVTGXNPAVPQLNPPCRTSPFRKXXIPKGPTX

SEQ ID NO: 6607 - protein, 32 aa, Homo sapiens
  MISC_FEATURE (5): Xaa equals any of the naturally occurring L-amino acids
SGTTXYRESWYACRYRSGIPGSTHASGLWSQC

SEQ ID NO: 6608 - protein, 65 aa, Homo sapiens
  MISC_FEATURE (8): Xaa equals any of the naturally occurring L-amino acids
  MISC_FEATURE (9): Xaa equals any of the naturally occurring L-amino acids
  MISC_FEATURE (25): Xaa equals any of the naturally occurring L-amino acids
  MISC_FEATURE (42): Xaa equals any of the naturally occurring L-amino acids
  MISC_FEATURE (49): Xaa equals any of the naturally occurring L-amino acids
  MISC_FEATURE (62): Xaa equals any of the naturally occurring L-amino acids
  MISC_FEATURE (64): Xaa equals any of the naturally occurring L-amino acids
  MISC_FEATURE (65): Xaa equals any of the naturally occurring L-amino acids
ASSRSRAXXLEDPSLRTRACRRHSXSIVSPKFNSLAVVLQRXDWENPGXTQLKRLAVHSLFXQXX

SEQ ID NO: 6609 - protein, 106 aa, Homo sapiens
  MISC_FEATURE (4): Xaa equals any of the naturally occurring L-amino acids
  MISC_FEATURE (15): Xaa equals any of the naturally occurring L-amino acids
  MISC_FEATURE (30): Xaa equals any of the naturally occurring L-amino acids
  MISC_FEATURE (80): Xaa equals any of the naturally occurring L-amino acids
  MISC_FEATURE (84): Xaa equals any of the naturally occurring L-amino acids
  MISC_FEATURE (97): Xaa equals any of the naturally occurring L-amino acids
  MISC_FEATURE (101): Xaa equals any of the naturally occurring L-amino acids
TSDXTKKKKKGGRSXGSKLTYACMRRHSSXIVSPKFNSLAVVLQRRDWENPGVTQLNRLAAHTPFASWRNSEEARTDRPXQQLXSLNGEWDAPCSGXLSAXGVVVT

SEQ ID NO: 6610 - protein, 70 aa, Homo sapiens
  MISC_FEATURE (1): Xaa equals any of the naturally occurring L-amino acids
  MISC_FEATURE (2): Xaa equals any of the naturally occurring L-amino acids
  MISC_FEATURE (8): Xaa equals any of the naturally occurring L-amino acids
  MISC_FEATURE (12): Xaa equals any of the naturally occurring L-amino acids
  MISC_FEATURE (48): Xaa equals any of the naturally occurring L-amino acids
  MISC_FEATURE (66): Xaa equals any of the naturally occurring L-amino acids
  MISC_FEATURE (69): Xaa equals any of the naturally occurring L-amino acids
  MISC_FEATURE (70): Xaa equals any of the naturally occurring L-amino acids
XXPFGNPXGTTXYRESWYACRYRSGIPGSTHASADAWADAWADAWVKXGYKKLFVLDDREAHNEVXPLXX

SEQ ID NO: 6611 - protein, 69 aa, Homo sapiens
  MISC_FEATURE (9): Xaa equals any of the naturally occurring L-amino acids
  MISC_FEATURE (10): Xaa equals any of the naturally occurring L-amino acids
  MISC_FEATURE (56): Xaa equals any of the naturally occurring L-amino acids
  MISC_FEATURE (64): Xaa equals any of the naturally occurring L-amino acids
  MISC_FEATURE (67): Xaa equals any of the naturally occurring L-amino acids
  MISC_FEATURE (69): Xaa equals any of the naturally occurring L-amino acids
INLCNLKNXXEGGRSRGSKLTYACMRRHSSSIVSPKFNSLAVVLQRRDWENPGVTXLNRLAAHXPFXQX

SEQ ID NO: 6612 - protein, 32 aa, Homo sapiens
  MISC_FEATURE (2): Xaa equals any of the naturally occurring L-amino acids
  MISC_FEATURE (3): Xaa equals any of the naturally occurring L-amino acids
  MISC_FEATURE (30): Xaa equals any of the naturally occurring L-amino acids
  MISC_FEATURE (31): Xaa equals any of the naturally occurring L-amino acids
LXXLWKTPHYRLSWYACRYRSGIPGSTHAXXS

SEQ ID NO: 6613 - protein, 38 aa, Homo sapiens
  MISC_FEATURE (25): Xaa equals any of the naturally occurring L-amino acids
  MISC_FEATURE (28): Xaa equals any of the naturally occurring L-amino acids
  MISC_FEATURE (30): Xaa equals any of the naturally occurring L-amino acids
  MISC_FEATURE (34): Xaa equals any of the naturally occurring L-amino acids
SWYACRYRSGIPGSTHASGESSHYXFSXGXGAGXFKSF

SEQ ID NO: 6614 - protein, 44 aa, Homo sapiens
  MISC_FEATURE (10): Xaa equals any of the naturally occurring L-amino acids
  MISC_FEATURE (36): Xaa equals any of the naturally occurring L-amino acids
  MISC_FEATURE (39): Xaa equals any of the naturally occurring L-amino acids
  MISC_FEATURE (41): Xaa equals any of the naturally occurring L-amino acids
  MISC_FEATURE (44): Xaa equals any of the naturally occurring L-amino acids
NSSGNPHYRXSWYACRYRSGIPGSTHASAHASAHAXEKXRXKKX

SEQ ID NO: 6615 - protein, 43 aa, Homo sapiens
  MISC_FEATURE (1): Xaa equals any of the naturally occurring L-amino acids
  MISC_FEATURE (8): Xaa equals any of the naturally occurring L-amino acids
  MISC_FEATURE (38): Xaa equals any of the naturally occurring L-amino acids
  MISC_FEATURE (40): Xaa equals any of the naturally occurring L-amino acids
  MISC_FEATURE (41): Xaa equals any of the naturally occurring L-amino acids
  MISC_FEATURE (42): Xaa equals any of the naturally occurring L-amino acids
  MISC_FEATURE (43): Xaa equals any of the naturally occurring L-amino acids
XSPASYPXHYRESWYACRYRSGIPGSTHASADAWVDPXIXXXX

SEQ ID NO: 6616 - protein, 57 aa, Homo sapiens
  MISC_FEATURE (25): Xaa equals any of the naturally occurring L-amino acids
  MISC_FEATURE (26): Xaa equals any of the naturally occurring L-amino acids
  MISC_FEATURE (27): Xaa equals any of the naturally occurring L-amino acids
  MISC_FEATURE (42): Xaa equals any of the naturally occurring L-amino acids
  MISC_FEATURE (45): Xaa equals any of the naturally occurring L-amino acids
  MISC_FEATURE (52): Xaa equals any of the naturally occurring L-amino acids
YYRESWYACRYRSGIPGSTHASGQXXXFLWPTSEPVTRKGKXGRXEDPTYEXNVYGL

SEQ ID NO: 6617 - protein, 51 aa, Homo sapiens
  MISC_FEATURE (24): Xaa equals any of the naturally occurring L-amino acids
YPHYRESWYACRYRSGIPGSTHAXAERETISSLQGTIPGNVLIHYGIKAVV

SEQ ID NO: 6618 - protein, 34 aa, Homo sapiens
  MISC_FEATURE (2): Xaa equals any of the naturally occurring L-amino acids
  MISC_FEATURE (6): Xaa equals any of the naturally occurring L-amino acids
PXKLLXNTPHYRESWYACRYRSGIPGSTHASGHF

SEQ ID NO: 6619 - protein, 48 aa, Homo sapiens
  MISC_FEATURE (34): Xaa equals any of the naturally occurring L-amino acids
  MISC_FEATURE (43): Xaa equals any of the naturally occurring L-amino acids
  MISC_FEATURE (45): Xaa equals any of the naturally occurring L-amino acids
  MISC_FEATURE (46): Xaa equals any of the naturally occurring L-amino acids
IASGRSRRSKLTYACMRRHSSSILSPKFNSLAVXLQRRDWENXTXXPS

SEQ ID NO: 6620 - protein, 41 aa, Homo sapiens
IASGRSRGSKLTYACMRRHSSSIVSPKFNSLAVVLQRRDWE

SEQ ID NO: 6621 - protein, 45 aa, Homo sapiens
  MISC_FEATURE (20): Xaa equals any of the naturally occurring L-amino acids
  MISC_FEATURE (44): Xaa equals any of the naturally occurring L-amino acids
  MISC_FEATURE (45): Xaa equals any of the naturally occurring L-amino acids
IASGRSRGSKLTYACMRRHXSSIVSPKFNSLAVVLQRRDWETKXX

SEQ ID NO: 6622 - protein, 47 aa, Homo sapiens
  MISC_FEATURE (44): Xaa equals any of the naturally occurring L-amino acids
  MISC_FEATURE (46): Xaa equals any of the naturally occurring L-amino acids
  MISC_FEATURE (47): Xaa equals any of the naturally occurring L-amino acids
IASGRSRGSKLTYACMRRHSSSIVSPKFNSLAVVLQRRDWENPXRXX

SEQ ID NO: 6623 - protein, 46 aa, Homo sapiens
  MISC_FEATURE (2): Xaa equals any of the naturally occurring L-amino acids
  MISC_FEATURE (4): Xaa equals any of the naturally occurring L-amino acids
  MISC_FEATURE (8): Xaa equals any of the naturally occurring L-amino acids
  MISC_FEATURE (12): Xaa equals any of the naturally occurring L-amino acids
  MISC_FEATURE (14): Xaa equals any of the naturally occurring L-amino acids
  MISC_FEATURE (20): Xaa equals any of the naturally occurring L-amino acids
  MISC_FEATURE (24): Xaa equals any of the naturally occurring L-amino acids
  MISC_FEATURE (35): Xaa equals any of the naturally occurring L-amino acids
  MISC_FEATURE (36): Xaa equals any of the naturally occurring L-amino acids
FXIXSGRXRGSXLXYACMRXHSSXIMSPKFNSLAXXLQRRDWENEC

SEQ ID NO: 6624 - protein, 45 aa, Homo sapiens
  MISC_FEATURE (44): Xaa equals any of the naturally occurring L-amino acids
  MISC_FEATURE (45): Xaa equals any of the naturally occurring L-amino acids
IASGRSRGSKLTYACMRRHSSSIVSPKFNSLAVVLQRRDWTPKXX

SEQ ID NO: 6625 - protein, 31 aa, Homo sapiens
  MISC_FEATURE (3): Xaa equals any of the naturally occurring L-amino acids
  MISC_FEATURE (4): Xaa equals any of the naturally occurring L-amino acids
  MISC_FEATURE (11): Xaa equals any of the naturally occurring L-amino acids
DYXXSNTSHYXESWYACRYRSGIPGSTHASA

SEQ ID NO: 6626 - protein, 36 aa, Homo sapiens
  MISC_FEATURE (14): Xaa equals any of the naturally occurring L-amino acids
GGGVGNDYALSNTXHYRESWYACRYRSGIPGSTHAS

SEQ ID NO: 6627 - protein, 46 aa, Homo sapiens
  MISC_FEATURE (3): Xaa equals any of the naturally occurring L-amino acids
  MISC_FEATURE (8): Xaa equals any of the naturally occurring L-amino acids
  MISC_FEATURE (9): Xaa equals any of the naturally occurring L-amino acids
  MISC_FEATURE (12): Xaa equals any of the naturally occurring L-amino acids
  MISC_FEATURE (40): Xaa equals any of the naturally occurring L-amino acids
  MISC_FEATURE (44): Xaa equals any of the naturally occurring L-amino acids
LRXSQIRXXIGXSWYACRYRSGIPGSTHASGVLVVIFFFXPGCXLF

SEQ ID NO: 6628 - protein, 45 aa, Homo sapiens
  MISC_FEATURE (44): Xaa equals any of the naturally occurring L-amino acids
  MISC_FEATURE (45): Xaa equals any of the naturally occurring L-amino acids
IASGRSRGSKLTYACMRRHSSSIVSPKFNSLAVVLQRRDWDPKXX

SEQ ID NO: 6629 - protein, 45 aa, Homo sapiens
  MISC_FEATURE (7): Xaa equals any of the naturally occurring L-amino acids
  MISC_FEATURE (44): Xaa equals any of the naturally occurring L-amino acids
  MISC_FEATURE (45): Xaa equals any of the naturally occurring L-amino acids
IASGRSXGSKLTYACMRRHSSSIVSPKFNSLAVVLQRRDWETQXX

SEQ ID NO: 6630 - protein, 57 aa, Homo sapiens
  MISC_FEATURE (10): Xaa equals any of the naturally occurring L-amino acids
  MISC_FEATURE (53): Xaa equals any of the naturally occurring L-amino acids
  MISC_FEATURE (55): Xaa equals any of the naturally occurring L-amino acids
  MISC_FEATURE (56): Xaa equals any of the naturally occurring L-amino acids
RVGTKTSRGXKRAAALKDPSLRTRACGRHSSSIVSPKFNSLAVVLQRRDWDPXNXXG

SEQ ID NO: 6631 - protein, 42 aa, Homo sapiens
  MISC_FEATURE (31): Xaa equals any of the naturally occurring L-amino acids
  MISC_FEATURE (33): Xaa equals any of the naturally occurring L-amino acids
  MISC_FEATURE (39): Xaa equals any of the naturally occurring L-amino acids
MDISLLKKKKKGGRSRGSKLTYACMRRHSSXIXSPKFNXLAR

SEQ ID NO: 6632 - protein, 77 aa, Homo sapiens
  MISC_FEATURE (2): Xaa equals any of the naturally occurring L-amino acids
  MISC_FEATURE (24): Xaa equals any of the naturally occurring L-amino acids
  MISC_FEATURE (34): Xaa equals any of the naturally occurring L-amino acids
  MISC_FEATURE (56): Xaa equals any of the naturally occurring L-amino acids
  MISC_FEATURE (77): Xaa equals any of the naturally occurring L-amino acids
IXGGRSRGSKLTYACMRRHSSSIXTPKFNSLAVXLQRRDWENPGVTQLNRLAAHPXFASWRNSEEARTDRLANRCAX

SEQ ID NO: 6633 - protein, 41 aa, Homo sapiens
  MISC_FEATURE (39): Xaa equals any of the naturally occurring L-amino acids
  MISC_FEATURE (40): Xaa equals any of the naturally occurring L-amino acids
  MISC_FEATURE (41): Xaa equals any of the naturally occurring L-amino acids
RIQAYRTRACRRHSSSIVSPKFNSLAVVLQRRDWENPDXXX

SEQ ID NO: 6634 - protein, 35 aa, Homo sapiens
  MISC_FEATURE (11): Xaa equals any of the naturally occurring L-amino acids
  MISC_FEATURE (13): Xaa equals any of the naturally occurring L-amino acids
LRQALIRLTIXIXWYACRYRSGIPGSTHASAHASV

SEQ ID NO: 6635 - protein, 40 aa, Homo sapiens
  MISC_FEATURE (12): Xaa equals any of the naturally occurring L-amino acids
  MISC_FEATURE (13): Xaa equals any of the naturally occurring L-amino acids
LRQALIRLTIGXXWYACRYRSGIPGSTHASAKSDRIVNET

SEQ ID NO: 6636 - protein, 36 aa, Homo sapiens
  MISC_FEATURE (11): Xaa equals any of the naturally occurring L-amino acids
  MISC_FEATURE (13): Xaa equals any of the naturally occurring L-amino acids
LRQALIRLTIXIXWYACRYRSGIPGSTHASEYLLLE

SEQ ID NO: 6637 - protein, 33 aa, Homo sapiens
  MISC_FEATURE (2): Xaa equals any of the naturally occurring L-amino acids
  MISC_FEATURE (14): Xaa equals any of the naturally occurring L-amino acids
PXLRQALIRLTIGXSWYACRYRSGIPGSTHASD

SEQ ID NO: 6638 - protein, 59 aa, Homo sapiens
  MISC_FEATURE (1): Xaa equals any of the naturally occurring L-amino acids
  MISC_FEATURE (5): Xaa equals any of the naturally occurring L-amino acids
  MISC_FEATURE (6): Xaa equals any of the naturally occurring L-amino acids
  MISC_FEATURE (32): Xaa equals any of the naturally occurring L-amino acids
  MISC_FEATURE (34): Xaa equals any of the naturally occurring L-amino acids
  MISC_FEATURE (41): Xaa equals any of the naturally occurring L-amino acids
  MISC_FEATURE (46): Xaa equals any of the naturally occurring L-amino acids
XKGNXXTAMTMITPSSNTTHYRESWYACRYRXGXPGSTHAXAHASXPMTTKGRKKYFLH

SEQ ID NO: 6639 - protein, 61 aa, Homo sapiens
  MISC_FEATURE (24): Xaa equals any of the naturally occurring L-amino acids
  MISC_FEATURE (28): Xaa equals any of the naturally occurring L-amino acids
  MISC_FEATURE (49): Xaa equals any of the naturally occurring L-amino acids
  MISC_FEATURE (53): Xaa equals any of the naturally occurring L-amino acids
  MISC_FEATURE (61): Xaa equals any of the naturally occurring L-amino acids
TIGNLHRITAMTMITPSSNTTHYXESWXACRYRSGIPGSTHASDHFAHXSFLXEHSKKMCX

SEQ ID NO: 6640 - protein, 76 aa, Homo sapiens
  MISC_FEATURE (3): Xaa equals any of the naturally occurring L-amino acids
  MISC_FEATURE (13): Xaa equals any of the naturally occurring L-amino acids
  MISC_FEATURE (18): Xaa equals any of the naturally occurring L-amino acids
  MISC_FEATURE (31): Xaa equals any of the naturally occurring L-amino acids
  MISC_FEATURE (35): Xaa equals any of the naturally occurring L-amino acids
  MISC_FEATURE (37): Xaa equals any of the naturally occurring L-amino acids
  MISC_FEATURE (41): Xaa equals any of the naturally occurring L-amino acids
  MISC_FEATURE (43): Xaa equals any of the naturally occurring L-amino acids
  MISC_FEATURE (53): Xaa equals any of the naturally occurring L-amino acids
  MISC_FEATURE (60): Xaa equals any of the naturally occurring L-amino acids
  MISC_FEATURE (65): Xaa equals any of the naturally occurring L-amino acids
  MISC_FEATURE (67): Xaa equals any of the naturally occurring L-amino acids
  MISC_FEATURE (68): Xaa equals any of the naturally occurring L-amino acids
MGXLPPPFPGKTXLTMIXPSSNTTHYLESWXACRXRXGIPXSXHASGSREEAXATMENKXICALXLXXMLALGTLA

SEQ ID NO: 6641 - protein, 56 aa, Homo sapiens
  MISC_FEATURE (1): Xaa equals any of the naturally occurring L-amino acids
  MISC_FEATURE (4): Xaa equals any of the naturally occurring L-amino acids
  MISC_FEATURE (9): Xaa equals any of the naturally occurring L-amino acids
  MISC_FEATURE (41): Xaa equals any of the naturally occurring L-amino acids
  MISC_FEATURE (53): Xaa equals any of the naturally occurring L-amino acids
  MISC_FEATURE (55): Xaa equals any of the naturally occurring L-amino acids
XGGXLTGNXNNFTQETAMTMITPSSNTTHYRESWYACRYRXGIPGSTHASAWXSXI

SEQ ID NO: 6642 - protein, 44 aa, Homo sapiens
  MISC_FEATURE (43): Xaa equals any of the naturally occurring L-amino acids
  MISC_FEATURE (44): Xaa equals any of the naturally occurring L-amino acids
YDSLFGKVWYACRYRSGIPGSTHASGIFVKNILHYLQNKETRXX

SEQ ID NO: 6643 - protein, 33 aa, Homo sapiens
  MISC_FEATURE (23): Xaa equals any of the naturally occurring L-amino acids
  MISC_FEATURE (28): Xaa equals any of the naturally occurring L-amino acids
TMLRQALIRLTIGKCWYVCRYRXGIPGXTHASG

SEQ ID NO: 6644 - protein, 40 aa, Homo sapiens
  MISC_FEATURE (22): Xaa equals any of the naturally occurring L-amino acids
VSIGNSLTMITPSSNTTHYREXWYACRYRSGIPGSTHASG

SEQ ID NO: 6645 - protein, 52 aa, Homo sapiens
  MISC_FEATURE (45): Xaa equals any of the naturally occurring L-amino acids
  MISC_FEATURE (46): Xaa equals any of the naturally occurring L-amino acids
  MISC_FEATURE (47): Xaa equals any of the naturally occurring L-amino acids
REYSFLLETAITMITPSSNTTHYRESWYACRYRSGIPGSTHASEXXXRTLKN

SEQ ID NO: 6646 - protein, 60 aa, Homo sapiens
  MISC_FEATURE (23): Xaa equals any of the naturally occurring L-amino acids
TVSLGNSLTMITPSSNTTHYREXWYACRYRSGIPGSTHASESFKSWVFRLLCSSCVFNIL

SEQ ID NO: 6647 - protein, 61 aa, Homo sapiens
  MISC_FEATURE (2): Xaa equals any of the naturally occurring L-amino acids
  MISC_FEATURE (4): Xaa equals any of the naturally occurring L-amino acids
  MISC_FEATURE (46): Xaa equals any of the naturally occurring L-amino acids
  MISC_FEATURE (52): Xaa equals any of the naturally occurring L-amino acids
  MISC_FEATURE (59): Xaa equals any of the naturally occurring L-amino acids
  MISC_FEATURE (60): Xaa equals any of the naturally occurring L-amino acids
EXPXFILETAITMITPSSNTTHYRESWYACRYRSGIPGSTHASGPXKIRKHXSYSHVEXXA

SEQ ID NO: 6648 - protein, 44 aa, Homo sapiens
  MISC_FEATURE (2): Xaa equals any of the naturally occurring L-amino acids
  MISC_FEATURE (3): Xaa equals any of the naturally occurring L-amino acids
  MISC_FEATURE (7): Xaa equals any of the naturally occurring L-amino acids
  MISC_FEATURE (14): Xaa equals any of the naturally occurring L-amino acids
AXXPHFXTTHYREXWYACRYRSGIPGSTHASEITFCGHCKINIW

SEQ ID NO: 6649 - protein, 77 aa, Homo sapiens
  MISC_FEATURE (33): Xaa equals any of the naturally occurring L-amino acids
  MISC_FEATURE (55): Xaa equals any of the naturally occurring L-amino acids
IASGRSRGSKLTYACMRRHSSSIVSPKFNSLAXVLQRRDWENPGVTQLNRLAAHXPFAAGVIAKKPAPIGLPTSCAA

SEQ ID NO: 6650 - protein, 64 aa, Homo sapiens
  MISC_FEATURE (3): Xaa equals any of the naturally occurring L-amino acids
  MISC_FEATURE (4): Xaa equals any of the naturally occurring L-amino acids
  MISC_FEATURE (5): Xaa equals any of the naturally occurring L-amino acids
  MISC_FEATURE (6): Xaa equals any of the naturally occurring L-amino acids
  MISC_FEATURE (7): Xaa equals any of the naturally occurring L-amino acids
  MISC_FEATURE (15): Xaa equals any of the naturally occurring L-amino acids
  MISC_FEATURE (28): Xaa equals any of the naturally occurring L-amino acids
  MISC_FEATURE (60): Xaa equals any of the naturally occurring L-amino acids
  MISC_FEATURE (62): Xaa equals any of the naturally occurring L-amino acids
KKXXXXXKKKGGRSXGSKLTYACMRRHXSSIVAPKFNYWPRFTTSDWENPGVTQLNRLGXNXLL

SEQ ID NO: 6651 - protein, 72 aa, Homo sapiens
  MISC_FEATURE (4): Xaa equals any of the naturally occurring L-amino acids
  MISC_FEATURE (8): Xaa equals any of the naturally occurring L-amino acids
  MISC_FEATURE (23): Xaa equals any of the naturally occurring L-amino acids
  MISC_FEATURE (24): Xaa equals any of the naturally occurring L-amino acids
  MISC_FEATURE (25): Xaa equals any of the naturally occurring L-amino acids
  MISC_FEATURE (26): Xaa equals any of the naturally occurring L-amino acids
  MISC_FEATURE (28): Xaa equals any of the naturally occurring L-amino acids
  MISC_FEATURE (29): Xaa equals any of the naturally occurring L-amino acids
  MISC_FEATURE (30): Xaa equals any of the naturally occurring L-amino acids
  MISC_FEATURE (33): Xaa equals any of the naturally occurring L-amino acids
  MISC_FEATURE (38): Xaa equals any of the naturally occurring L-amino acids
  MISC_FEATURE (39): Xaa equals any of the naturally occurring L-amino acids
  MISC_FEATURE (62): Xaa equals any of the naturally occurring L-amino acids
  MISC_FEATURE (70): Xaa equals any of the naturally occurring L-amino acids
YSYXLPYXIFILNKIIWRFLPQXXXXKXXXPSXKGGRXXRSKLTYACMQRHNSSIVSLNSIXWAVVLQRXDW

SEQ ID NO: 6652 - protein, 38 aa, Homo sapiens
  MISC_FEATURE (3): Xaa equals any of the naturally occurring L-amino acids
  MISC_FEATURE (8): Xaa equals any of the naturally occurring L-amino acids
  MISC_FEATURE (9): Xaa equals any of the naturally occurring L-amino acids
  MISC_FEATURE (32): Xaa equals any of the naturally occurring L-amino acids
  MISC_FEATURE (34): Xaa equals any of the naturally occurring L-amino acids
  MISC_FEATURE (36): Xaa equals any of the naturally occurring L-amino acids
RTXFWNTXXYRESWYACRYRSGIPGSTHASGXLXGXGL

SEQ ID NO: 6653 - protein, 80 aa, Homo sapiens
  MISC_FEATURE (3): Xaa equals any of the naturally occurring L-amino acids
  MISC_FEATURE (4): Xaa equals any of the naturally occurring L-amino acids
  MISC_FEATURE (5): Xaa equals any of the naturally occurring L-amino acids
  MISC_FEATURE (8): Xaa equals any of the naturally occurring L-amino acids
  MISC_FEATURE (29): Xaa equals any of the naturally occurring L-amino acids
  MISC_FEATURE (40): Xaa equals any of the naturally occurring L-amino acids
  MISC_FEATURE (44): Xaa equals any of the naturally occurring L-amino acids
  MISC_FEATURE (55): Xaa equals any of the naturally occurring L-amino acids
  MISC_FEATURE (73): Xaa equals any of the naturally occurring L-amino acids
IRXXXLRXDTTHYRESWYACRYRSGIPGXTHASVEICPPXSRPXSSQSNGEGYSXCRRPQALEAATYLNPVPXRILLKPF

SEQ ID NO: 6654 - protein, 58 aa, Homo sapiens
  MISC_FEATURE (2): Xaa equals any of the naturally occurring L-amino acids
  MISC_FEATURE (5): Xaa equals any of the naturally occurring L-amino acids
  MISC_FEATURE (7): Xaa equals any of the naturally occurring L-amino acids
  MISC_FEATURE (42): Xaa equals any of the naturally occurring L-amino acids
  MISC_FEATURE (50): Xaa equals any of the naturally occurring L-amino acids
  MISC_FEATURE (52): Xaa equals any of the naturally occurring L-amino acids
PXAWXLXTQLGTTHYRESWYACRYRSGIPGSTHASGKTWIIXVCCTRGSXGXLTAKND

SEQ ID NO: 6655 - protein, 44 aa, Homo sapiens
  MISC_FEATURE (6): Xaa equals any of the naturally occurring L-amino acids
  MISC_FEATURE (7): Xaa equals any of the naturally occurring L-amino acids
  MISC_FEATURE (8): Xaa equals any of the naturally occurring L-amino acids
  MISC_FEATURE (35): Xaa equals any of the naturally occurring L-amino acids
  MISC_FEATURE (37): Xaa equals any of the naturally occurring L-amino acids
  MISC_FEATURE (39): Xaa equals any of the naturally occurring L-amino acids
FGIQLXXXRLGTTHYRESWYACRYRSGIPGSTHAXDXMXLWLLQ

SEQ ID NO: 6656 - protein, 59 aa, Homo sapiens
  MISC_FEATURE (11): Xaa equals any of the naturally occurring L-amino acids
  MISC_FEATURE (32): Xaa equals any of the naturally occurring L-amino acids
  MISC_FEATURE (36): Xaa equals any of the naturally occurring L-amino acids
  MISC_FEATURE (44): Xaa equals any of the naturally occurring L-amino acids
  MISC_FEATURE (47): Xaa equals any of the naturally occurring L-amino acids
  MISC_FEATURE (58): Xaa equals any of the naturally occurring L-amino acids
TPVGTTHYREXWYACRYRSGIPGSTHASGAEXSGIXLEAGKNQXVLXCGSGQGLERPXP

SEQ ID NO: 6657 - protein, 38 aa, Homo sapiens
  MISC_FEATURE (5): Xaa equals any of the naturally occurring L-amino acids
  MISC_FEATURE (12): Xaa equals any of the naturally occurring L-amino acids
  MISC_FEATURE (32): Xaa equals any of the naturally occurring L-amino acids
  MISC_FEATURE (38): Xaa equals any of the naturally occurring L-amino acids
ICNTXHYRESWXACRYRSGIPGSTHASDSKDXSVDGSX

SEQ ID NO: 6658 - protein, 45 aa, Homo sapiens
  MISC_FEATURE (4): Xaa equals any of the naturally occurring L-amino acids
  MISC_FEATURE (23): Xaa equals any of the naturally occurring L-amino acids
  MISC_FEATURE (26): Xaa equals any of the naturally occurring L-amino acids
  MISC_FEATURE (44): Xaa equals any of the naturally occurring L-amino acids
  MISC_FEATURE (45): Xaa equals any of the naturally occurring L-amino acids
PIFXWKHAMTMITPSSNTTHYRXSWXACRYRAGIPGSTHASGDXX

SEQ ID NO: 6659 - protein, 92 aa, Homo sapiens
  MISC_FEATURE (3): Xaa equals any of the naturally occurring L-amino acids
  MISC_FEATURE (4): Xaa equals any of the naturally occurring L-amino acids
  MISC_FEATURE (11): Xaa equals any of the naturally occurring L-amino acids
  MISC_FEATURE (67): Xaa equals any of the naturally occurring L-amino acids
  MISC_FEATURE (83): Xaa equals any of the naturally occurring L-amino acids
  MISC_FEATURE (85): Xaa equals any of the naturally occurring L-amino acids
YEXXKLLRESXNNFTQETAMTMITPSSNTTHYRESWYACRYRSGIPGSTHASGPSREIPRSLHLVIXTEHRPPTMELGLSWIXLXAMIKGVN

SEQ ID NO: 6660 - protein, 71 aa, Homo sapiens
  MISC_FEATURE (3): Xaa equals any of the naturally occurring L-amino acids
  MISC_FEATURE (4): Xaa equals any of the naturally occurring L-amino acids
  MISC_FEATURE (5): Xaa equals any of the naturally occurring L-amino acids
  MISC_FEATURE (46): Xaa equals any of the naturally occurring L-amino acids
  MISC_FEATURE (68): Xaa equals any of the naturally occurring L-amino acids
  MISC_FEATURE (70): Xaa equals any of the naturally occurring L-amino acids
  MISC_FEATURE (71): Xaa equals any of the naturally occurring L-amino acids
LPXXXNTTHYRESWYACRYRSGIPGSTHASEKKKKKKKKKKKKKKXKKKKKKKKKKKKKKKKKKKKKXGXX

SEQ ID NO: 6661 - protein, 64 aa, Homo sapiens
  MISC_FEATURE (9): Xaa equals any of the naturally occurring L-amino acids
  MISC_FEATURE (13): Xaa equals any of the naturally occurring L-amino acids
  MISC_FEATURE (14): Xaa equals any of the naturally occurring L-amino acids
  MISC_FEATURE (24): Xaa equals any of the naturally occurring L-amino acids
  MISC_FEATURE (46): Xaa equals any of the naturally occurring L-amino acids
  MISC_FEATURE (56): Xaa equals any of the naturally occurring L-amino acids
  MISC_FEATURE (59): Xaa equals any of the naturally occurring L-amino acids
  MISC_FEATURE (61): Xaa equals any of the naturally occurring L-amino acids
NLTQVAAMXMITXXSNTTHYRESXYACRYRSGIPGSTHALRYCGPXAHRFTSPPCXSLXLXMLM

SEQ ID NO: 6662 - protein, 52 aa, Homo sapiens
  MISC_FEATURE (7): Xaa equals any of the naturally occurring L-amino acids
  MISC_FEATURE (8): Xaa equals any of the naturally occurring L-amino acids
  MISC_FEATURE (33): Xaa equals any of the naturally occurring L-amino acids
  MISC_FEATURE (34): Xaa equals any of the naturally occurring L-amino acids
TCSPGKXXTILHRKTAMTMITPSSNTTHYRESXXACRYRSGIPGSTHASGQA

SEQ ID NO: 6663 - protein, 39 aa, Homo sapiens
  MISC_FEATURE (22): Xaa equals any of the naturally occurring L-amino acids
  MISC_FEATURE (31): Xaa equals any of the naturally occurring L-amino acids
  MISC_FEATURE (38): Xaa equals any of the naturally occurring L-amino acids
QETAMTMITPSSNTTHYRDCWXACRYRAGIXGSTHASXR

SEQ ID NO: 6664 - protein, 62 aa, Homo sapiens
  MISC_FEATURE (9): Xaa equals any of the naturally occurring L-amino acids
  MISC_FEATURE (26): Xaa equals any of the naturally occurring L-amino acids
  MISC_FEATURE (27): Xaa equals any of the naturally occurring L-amino acids
  MISC_FEATURE (32): Xaa equals any of the naturally occurring L-amino acids
  MISC_FEATURE (46): Xaa equals any of the naturally occurring L-amino acids
  MISC_FEATURE (56): Xaa equals any of the naturally occurring L-amino acids
  MISC_FEATURE (58): Xaa equals any of the naturally occurring L-amino acids
  MISC_FEATURE (61): Xaa equals any of the naturally occurring L-amino acids
LLDNTLTQXTAMTMITPSSNTTHYRXXWYACXYRSGIPGSTHASVXRLLATCFARXRXTYXT

SEQ ID NO: 6665 - protein, 73 aa, Homo sapiens
  MISC_FEATURE (1): Xaa equals any of the naturally occurring L-amino acids
  MISC_FEATURE (3): Xaa equals any of the naturally occurring L-amino acids
  MISC_FEATURE (4): Xaa equals any of the naturally occurring L-amino acids
  MISC_FEATURE (24): Xaa equals any of the naturally occurring L-amino acids
  MISC_FEATURE (30): Xaa equals any of the naturally occurring L-amino acids
XNXXTQDTAMTMITPSSNTTHYRXSCYACXYRSGIPGSTHASAFGVHKMSGSLNFLSNLECLLHLFNFCKCLK

SEQ ID NO: 6666 - protein, 103 aa, Homo sapiens
  MISC_FEATURE (2): Xaa equals any of the naturally occurring L-amino acids
  MISC_FEATURE (62): Xaa equals any of the naturally occurring L-amino acids
  MISC_FEATURE (100): Xaa equals any of the naturally occurring L-amino acids
  MISC_FEATURE (101): Xaa equals any of the naturally occurring L-amino acids
  MISC_FEATURE (103): Xaa equals any of the naturally occurring L-amino acids
LXCTKKKKKGGRSRGSKLTYACMRRHSSSIVSPKFNSLAVVLQRRDWENPGVTQLNRLAAHXPFASWRNSEEARTDRPSQQLRSLNGEWDAPCSGALSAXXVX

SEQ ID NO: 6667 - protein, 109 aa, Homo sapiens
  MISC_FEATURE (9): Xaa equals any of the naturally occurring L-amino acids
  MISC_FEATURE (50): Xaa equals any of the naturally occurring L-amino acids
  MISC_FEATURE (53): Xaa equals any of the naturally occurring L-amino acids
  MISC_FEATURE (58): Xaa equals any of the naturally occurring L-amino acids
  MISC_FEATURE (94): Xaa equals any of the naturally occurring L-amino acids
  MISC_FEATURE (96): Xaa equals any of the naturally occurring L-amino acids
  MISC_FEATURE (108): Xaa equals any of the naturally occurring L-amino acids
  MISC_FEATURE (109): Xaa equals any of the naturally occurring L-amino acids
IASGRSRGXKLTYACMRRHSSSIVSPKFNSLAVVLQRRDWENPGVTQLNXLAXHPPFXSWRNSEEARTDRPFQQLRSLNGEWDAPCSGALSAAXVXVTRSVTVTLARXX

SEQ ID NO: 6668 - protein, 84 aa, Homo sapiens
  MISC_FEATURE (4): Xaa equals any of the naturally occurring L-amino acids
  MISC_FEATURE (7): Xaa equals any of the naturally occurring L-amino acids
  MISC_FEATURE (34): Xaa equals any of the naturally occurring L-amino acids
  MISC_FEATURE (57): Xaa equals any of the naturally occurring L-amino acids
  MISC_FEATURE (61): Xaa equals any of the naturally occurring L-amino acids
  MISC_FEATURE (63): Xaa equals any of the naturally occurring L-amino acids
KKKXEKXKGGRSRGSKLTYACMRRHSSSIGSPKXNSLAVVLQRRDWENPGVTQLRGXGSTXPXRQLAEERRGAAPIALANSCAA

SEQ ID NO: 6669 - protein, 101 aa, Homo sapiens
  MISC_FEATURE (2): Xaa equals any of the naturally occurring L-amino acids
  MISC_FEATURE (11): Xaa equals any of the naturally occurring L-amino acids
  MISC_FEATURE (21): Xaa equals any of the naturally occurring L-amino acids
  MISC_FEATURE (28): Xaa equals any of the naturally occurring L-amino acids
  MISC_FEATURE (68): Xaa equals any of the naturally occurring L-amino acids
  MISC_FEATURE (76): Xaa equals any of the naturally occurring L-amino acids
  MISC_FEATURE (85): Xaa equals any of the naturally occurring L-amino acids
  MISC_FEATURE (97): Xaa equals any of the naturally occurring L-amino acids
  MISC_FEATURE (101): Xaa equals any of the naturally occurring L-amino acids
KXKKKKGGRSXGSKLTYACMXRHSSSIXSPKFNSLAVVLQRRDWENPGVTQLNRLAAHPPFASWRNSXKARTDRPXQQLRSLNGXMGTRPVTGALSXAGWX

SEQ ID NO: 6670 - protein, 92 aa, Homo sapiens
  MISC_FEATURE (2): Xaa equals any of the naturally occurring L-amino acids
  MISC_FEATURE (3): Xaa equals any of the naturally occurring L-amino acids
  MISC_FEATURE (4): Xaa equals any of the naturally occurring L-amino acids
  MISC_FEATURE (40): Xaa equals any of the naturally occurring L-amino acids
  MISC_FEATURE (49): Xaa equals any of the naturally occurring L-amino acids
  MISC_FEATURE (89): Xaa equals any of the naturally occurring L-amino acids
  MISC_FEATURE (92): Xaa equals any of the naturally occurring L-amino acids
FXXXSGRSRGSKLTYACMRRYSYSIVSPKFNSLAVVLQRXDWENPGVTXLNRLAAHPPFASWCNSEEARTDRPSQQLRKLNGEWDPALXRGX

SEQ ID NO: 6671 - protein, 59 aa, Homo sapiens
  MISC_FEATURE (6): Xaa equals any of the naturally occurring L-amino acids
  MISC_FEATURE (35): Xaa equals any of the naturally occurring L-amino acids
  MISC_FEATURE (48): Xaa equals any of the naturally occurring L-amino acids
  MISC_FEATURE (49): Xaa equals any of the naturally occurring L-amino acids
  MISC_FEATURE (58): Xaa equals any of the naturally occurring L-amino acids
NTKNPXKKKKKKGGRSRGSKLTYACMRRHSSSIVXPKFNSLAVVLQRXXWENPGVTQXN

SEQ ID NO: 6672 - protein, 71 aa, Homo sapiens
IKVITIKKKKKKGGRSRGSKLTYACMRRHSSSIVSPKFNSLAVVLQRRDWENPGVTQLNRLAAHPPFASWP

SEQ ID NO: 6673 - protein, 61 aa, Homo sapiens
  MISC_FEATURE (1): Xaa equals any of the naturally occurring L-amino acids
  MISC_FEATURE (2): Xaa equals any of the naturally occurring L-amino acids
  MISC_FEATURE (5): Xaa equals any of the naturally occurring L-amino acids
  MISC_FEATURE (8): Xaa equals any of the naturally occurring L-amino acids
XXDLXCQXDYRESWYACRYRSGIPGSTHASAQLLRSEPFPLHFLFTQGGAGSGGRKLGGGV

SEQ ID NO: 6674 - protein, 44 aa, Homo sapiens
  MISC_FEATURE (23): Xaa equals any of the naturally occurring L-amino acids
  MISC_FEATURE (28): Xaa equals any of the naturally occurring L-amino acids
  MISC_FEATURE (44): Xaa equals any of the naturally occurring L-amino acids
IASGRSIGSKLTYACMRRHNSSXVSPKXNSLAVVLQRRDWENPX

SEQ ID NO: 6675 - protein, 45 aa, Homo sapiens
  MISC_FEATURE (2): Xaa equals any of the naturally occurring L-amino acids
  MISC_FEATURE (3): Xaa equals any of the naturally occurring L-amino acids
  MISC_FEATURE (10): Xaa equals any of the naturally occurring L-amino acids
  MISC_FEATURE (11): Xaa equals any of the naturally occurring L-amino acids
  MISC_FEATURE (34): Xaa equals any of the naturally occurring L-amino acids
  MISC_FEATURE (35): Xaa equals any of the naturally occurring L-amino acids
  MISC_FEATURE (38): Xaa equals any of the naturally occurring L-amino acids
  MISC_FEATURE (41): Xaa equals any of the naturally occurring L-amino acids
GXXLTFPFMXXHNSSIVSPKFNSLAVVLQRPDWXXKNXRNXKVRR

SEQ ID NO: 6676 - protein, 53 aa, Homo sapiens
  MISC_FEATURE (5): Xaa equals any of the naturally occurring L-amino acids
  MISC_FEATURE (32): Xaa equals any of the naturally occurring L-amino acids
  MISC_FEATURE (39): Xaa equals any of the naturally occurring L-amino acids
  MISC_FEATURE (49): Xaa equals any of the naturally occurring L-amino acids
TSSRXASGRSRGSKLTYACMRRHSSSIVSPKXNSLAVVXQRRDWENPRXSCGS

SEQ ID NO: 6677 - protein, 51 aa, Homo sapiens
  MISC_FEATURE (49): Xaa equals any of the naturally occurring L-amino acids
  MISC_FEATURE (50): Xaa equals any of the naturally occurring L-amino acids
  MISC_FEATURE (51): Xaa equals any of the naturally occurring L-amino acids
TSSSIASGRSRRSKLTYACMRRHSSSIVSPKFNSLAVVLQRRDWEPQKXXX

SEQ ID NO: 6678 - protein, 52 aa, Homo sapiens
  MISC_FEATURE (15): Xaa equals any of the naturally occurring L-amino acids
  MISC_FEATURE (34): Xaa equals any of the naturally occurring L-amino acids
  MISC_FEATURE (35): Xaa equals any of the naturally occurring L-amino acids
  MISC_FEATURE (42): Xaa equals any of the naturally occurring L-amino acids
  MISC_FEATURE (48): Xaa equals any of the naturally occurring L-amino acids
SLRYACMRRHSSSIXSPKFNSLAVVLQRRDWENXXKSCKRGXELNLVXYRRL

SEQ ID NO: 6679 - protein, 46 aa, Homo sapiens
  MISC_FEATURE (4): Xaa equals any of the naturally occurring L-amino acids
  MISC_FEATURE (18): Xaa equals any of the naturally occurring L-amino acids
  MISC_FEATURE (29): Xaa equals any of the naturally occurring L-amino acids
  MISC_FEATURE (33): Xaa equals any of the naturally occurring L-amino acids
LFIXAPKFNSLGPSFTRXDWENPGVTQLXRLGXNPPFANWGITKKA

SEQ ID NO: 6680 - protein, 29 aa, Homo sapiens
  MISC_FEATURE (5): Xaa equals any of the naturally occurring L-amino acids
  MISC_FEATURE (7): Xaa equals any of the naturally occurring L-amino acids
  MISC_FEATURE (10): Xaa equals any of the naturally occurring L-amino acids
  MISC_FEATURE (11): Xaa equals any of the naturally occurring L-amino acids
  MISC_FEATURE (19): Xaa equals any of the naturally occurring L-amino acids
IQFTXRXLQXXDWENPGVXQLNRLAAHPP

SEQ ID NO: 6681 - protein, 158 aa, Homo sapiens
  MISC_FEATURE (5): Xaa equals any of the naturally occurring L-amino acids
  MISC_FEATURE (6): Xaa equals any of the naturally occurring L-amino acids
  MISC_FEATURE (8): Xaa equals any of the naturally occurring L-amino acids
  MISC_FEATURE (11): Xaa equals any of the naturally occurring L-amino acids
  MISC_FEATURE (16): Xaa equals any of the naturally occurring L-amino acids
  MISC_FEATURE (29): Xaa equals any of the naturally occurring L-amino acids
  MISC_FEATURE (31): Xaa equals any of the naturally occurring L-amino acids
  MISC_FEATURE (33): Xaa equals any of the naturally occurring L-amino acids
  MISC_FEATURE (50): Xaa equals any of the naturally occurring L-amino acids
  MISC_FEATURE (52): Xaa equals any of the naturally occurring L-amino acids
  MISC_FEATURE (55): Xaa equals any of the naturally occurring L-amino acids
  MISC_FEATURE (70): Xaa equals any of the naturally occurring L-amino acids
  MISC_FEATURE (78): Xaa equals any of the naturally occurring L-amino acids
  MISC_FEATURE (81): Xaa equals any of the naturally occurring L-amino acids
  MISC_FEATURE (101): Xaa equals any of the naturally occurring L-amino acids
  MISC_FEATURE (104): Xaa equals any of the naturally occurring L-amino acids
  MISC_FEATURE (110): Xaa equals any of the naturally occurring L-amino acids
  MISC_FEATURE (111): Xaa equals any of the naturally occurring L-amino acids
  MISC_FEATURE (118): Xaa equals any of the naturally occurring L-amino acids
  MISC_FEATURE (135): Xaa equals any of the naturally occurring L-amino acids
  MISC_FEATURE (136): Xaa equals any of the naturally occurring L-amino acids
  MISC_FEATURE (139): Xaa equals any of the naturally occurring L-amino acids
  MISC_FEATURE (145): Xaa equals any of the naturally occurring L-amino acids
RGWAXXPXRRXPVEDXHLPRLVSRTPGTXPXYXHSYLGSARERQARSEGXSXGGXLETPSKRSAQIGPRXASYYAWSXPGXYKAGSSQDDQEDACDDALSXYSXLELTRXXSYRGRSXGSKLTYACMRRHSSSIXXPKXNSLAVXLQRRDWENPGVTQ

SEQ ID NO: 6682 - protein, 77 aa, Homo sapiens
  MISC_FEATURE (14): Xaa equals any of the naturally occurring L-amino acids
  MISC_FEATURE (15): Xaa equals any of the naturally occurring L-amino acids
  MISC_FEATURE (34): Xaa equals any of the naturally occurring L-amino acids
  MISC_FEATURE (42): Xaa equals any of the naturally occurring L-amino acids
  MISC_FEATURE (48): Xaa equals any of the naturally occurring L-amino acids
  MISC_FEATURE (68): Xaa equals any of the naturally occurring L-amino acids
SVNVTIKSSKVKKXXKGGRSRGSKLTYACMRRHXSSIVSPKXNSLAGXFTTVVTGKNPGVTQLNRLCXHIPPFRQLA

SEQ ID NO: 6683 - protein, 77 aa, Homo sapiens
  MISC_FEATURE (3): Xaa equals any of the naturally occurring L-amino acids
  MISC_FEATURE (4): Xaa equals any of the naturally occurring L-amino acids
  MISC_FEATURE (9): Xaa equals any of the naturally occurring L-amino acids
  MISC_FEATURE (19): Xaa equals any of the naturally occurring L-amino acids
  MISC_FEATURE (22): Xaa equals any of the naturally occurring L-amino acids
  MISC_FEATURE (36): Xaa equals any of the naturally occurring L-amino acids
  MISC_FEATURE (42): Xaa equals any of the naturally occurring L-amino acids
  MISC_FEATURE (58): Xaa equals any of the naturally occurring L-amino acids
  MISC_FEATURE (61): Xaa equals any of the naturally occurring L-amino acids
  MISC_FEATURE (64): Xaa equals any of the naturally occurring L-amino acids
  MISC_FEATURE (68): Xaa equals any of the naturally occurring L-amino acids
  MISC_FEATURE (74): Xaa equals any of the naturally occurring L-amino acids
QQXXSLNGXWHAPCSGALXAAXVVDTRSVTATLASXLRPLLXLYFPSFLATFSRLSPXKLXNRXASLXGVPILXAFY

SEQ ID NO: 6684 - protein, 90 aa, Homo sapiens
  MISC_FEATURE (38): Xaa equals any of the naturally occurring L-amino acids
  MISC_FEATURE (44): Xaa equals any of the naturally occurring L-amino acids
  MISC_FEATURE (74): Xaa equals any of the naturally occurring L-amino acids
  MISC_FEATURE (83): Xaa equals any of the naturally occurring L-amino acids
  MISC_FEATURE (84): Xaa equals any of the naturally occurring L-amino acids
  MISC_FEATURE (89): Xaa equals any of the naturally occurring L-amino acids
RHSSSIVSPKFNSLAVVLQRRDWENPGVTQLNRLAAHXPFASWXNSEEARTDRTSQQLRSLNGEWDAPCSGALXAAGVVVTRXXTATLXS

SEQ ID NO: 6685 - protein, 63 aa, Homo sapiens
  MISC_FEATURE (7): Xaa equals any of the naturally occurring L-amino acids
  MISC_FEATURE (8): Xaa equals any of the naturally occurring L-amino acids
  MISC_FEATURE (10): Xaa equals any of the naturally occurring L-amino acids
  MISC_FEATURE (11): Xaa equals any of the naturally occurring L-amino acids
CMRRHSXXIXXPKFNSLAVVLQRRDWENPGVTQLNRLAAHPPFASWRNSEEARTDRPSQQLRS

SEQ ID NO: 6686 - protein, 137 aa, Homo sapiens
  MISC_FEATURE (12): Xaa equals any of the naturally occurring L-amino acids
  MISC_FEATURE (36): Xaa equals any of the naturally occurring L-amino acids
  MISC_FEATURE (119): Xaa equals any of the naturally occurring L-amino acids
  MISC_FEATURE (124): Xaa equals any of the naturally occurring L-amino acids
  MISC_FEATURE (132): Xaa equals any of the naturally occurring L-amino acids
  MISC_FEATURE (133): Xaa equals any of the naturally occurring L-amino acids
IKLGNQKKKKKXKGGRSRGSKLTYACMRRHSSSIVXPKFNSLAVVLQRRDWENPGVTQLNRLAAHPPFASWRNSEEARTDRPSQQLRSLNGEWDAPCSGALSAAGVVVTPQRDPLHLPXPYRPXPSLSSLPXXPRSP

SEQ ID NO: 6687 - protein, 92 aa, Homo sapiens
  MISC_FEATURE (37): Xaa equals any of the naturally occurring L-amino acids
  MISC_FEATURE (61): Xaa equals any of the naturally occurring L-amino acids
ENPGGTQLNRLAAHPPFASWRNSEEARTDRPSQQLRXLNGEWDAPCSGALSAAGVVGTRSXTATLAAPSAALSLLPSFSHVGGFPVSSNGAP

SEQ ID NO: 6688 - protein, 47 aa, Homo sapiens
  MISC_FEATURE (6): Xaa equals any of the naturally occurring L-amino acids
  MISC_FEATURE (12): Xaa equals any of the naturally occurring L-amino acids
  MISC_FEATURE (19): Xaa equals any of the naturally occurring L-amino acids
  MISC_FEATURE (35): Xaa equals any of the naturally occurring L-amino acids
  MISC_FEATURE (47): Xaa equals any of the naturally occurring L-amino acids
LIDRSXRYLPLXIILKTLXAMVFNTFNVLHWQRIXDQSLPYHNITYX

SEQ ID NO: 6689 - protein, 147 aa, Homo sapiens
  MISC_FEATURE (36): Xaa equals any of the naturally occurring L-amino acids
  MISC_FEATURE (49): Xaa equals any of the naturally occurring L-amino acids
  MISC_FEATURE (82): Xaa equals any of the naturally occurring L-amino acids
  MISC_FEATURE (83): Xaa equals any of the naturally occurring L-amino acids
  MISC_FEATURE (92): Xaa equals any of the naturally occurring L-amino acids
  MISC_FEATURE (94): Xaa equals any of the naturally occurring L-amino acids
  MISC_FEATURE (120): Xaa equals any of the naturally occurring L-amino acids
  MISC_FEATURE (127): Xaa equals any of the naturally occurring L-amino acids
  MISC_FEATURE (140): Xaa equals any of the naturally occurring L-amino acids
  MISC_FEATURE (145): Xaa equals any of the naturally occurring L-amino acids
TPPYCPKIQSPPYSSQGTTSDASLWTPPQGCPWTQXSPEPRNPPVPWTXVPATLELAAVYQGLSVSPEPCLSLGAPSLLPHXXCQRLQPQTXGXCWSHSAEVVPNSEDQGPGAAFQLSEXSPTQSSXLQFSGCPELWQEXLEGAXLG

SEQ ID NO: 6690 - protein, 172 aa, Homo sapiens
  MISC_FEATURE (10): Xaa equals any of the naturally occurring L-amino acids
  MISC_FEATURE (13): Xaa equals any of the naturally occurring L-amino acids
  MISC_FEATURE (158): Xaa equals any of the naturally occurring L-amino acids
  MISC_FEATURE (159): Xaa equals any of the naturally occurring L-amino acids
  MISC_FEATURE (167): Xaa equals any of the naturally occurring L-amino acids
  MISC_FEATURE (170): Xaa equals any of the naturally occurring L-amino acids
  MISC_FEATURE (172): Xaa equals any of the naturally occurring L-amino acids
FWLAGPKEEXMDXDIPAVKVKEEPRDEEEEAKMKAPPKAARKTPGLPKDVSVAELLRELSLTKEEELLFLQLPDTLPGQPPTQDIKPIKTEVQGEDGQVVLIKQEKDREAKLAENACTLADLTEGQVGKLLIRKSGRVQLLLGKVTLDVDHGNCLLLXXGAGVRGPXRQXDX

SEQ ID NO: 6691 - protein, 55 aa, Homo sapiens
  MISC_FEATURE (46): Xaa equals any of the naturally occurring L-amino acids
  MISC_FEATURE (53): Xaa equals any of the naturally occurring L-amino acids
  MISC_FEATURE (54): Xaa equals any of the naturally occurring L-amino acids
  MISC_FEATURE (55): Xaa equals any of the naturally occurring L-amino acids
IAAARVWRLNRGLSQAALLLLRQPGARGLARSVSTWAPGGFPKGDXGCKGYLXXX

SEQ ID NO: 6692 - protein, 56 aa, Homo sapiens
GLQSNMPKFYCDYCDTYLTHDSPSVRKTHCSGRKHKENVKDYYLLLHSLLLLLQGR

SEQ ID NO: 6693 - protein, 102 aa, Homo sapiens
SFRRPMASASTQPAALSAEQAKVVLAEVIQAFSAPENAVRMDEARDNACNDMGVLKFARLVKSYEAQDPEIASLSGKLKALFLPPMTLPPHGPAAGGSVAAS

SEQ ID NO: 6694 - protein, 97 aa, Homo sapiens
PRVRADINTKWAATRWAKKIEARERKAKMTDFDRFKVMKAKKMRNRIIKNEVKKLQKAALLKASPKKAPGTKGTAAAAAAAAAAAAKVPAKKITAAN

SEQ ID NO: 6695 - protein, 87 aa, Homo sapiens
  MISC_FEATURE (3): Xaa equals any of the naturally occurring L-amino acids
  MISC_FEATURE (14): Xaa equals any of the naturally occurring L-amino acids
NAXISSLGAPGTGXEFPGRPTRPLMEKEFPGFLENQKDPLAVDKIMKDLDQCRDGKVGFQSFFSLIAGLTIACNDYFVVHMKQKGKK

SEQ ID NO: 6696 - protein, 106 aa, Homo sapiens
  MISC_FEATURE (4): Xaa equals any of the naturally occurring L-amino acids
  MISC_FEATURE (28): Xaa equals any of the naturally occurring L-amino acids
  MISC_FEATURE (35): Xaa equals any of the naturally occurring L-amino acids
  MISC_FEATURE (45): Xaa equals any of the naturally occurring L-amino acids
  MISC_FEATURE (46): Xaa equals any of the naturally occurring L-amino acids
  MISC_FEATURE (65): Xaa equals any of the naturally occurring L-amino acids
  MISC_FEATURE (71): Xaa equals any of the naturally occurring L-amino acids
  MISC_FEATURE (96): Xaa equals any of the naturally occurring L-amino acids
  MISC_FEATURE (98): Xaa equals any of the naturally occurring L-amino acids
  MISC_FEATURE (102): Xaa equals any of the naturally occurring L-amino acids
  MISC_FEATURE (106): Xaa equals any of the naturally occurring L-amino acids
TIGXGGTPAGTGPEFPGRPTLSSAFPLXTSTLIQXKYDPSLKPLXXSYDQATSLRILNNGHAFNXELDDSXDKAVLKGGPLDGTNRWIKLHFNWGXLXGQRXKTYX

SEQ ID NO: 6697 - protein, 110 aa, Homo sapiens
  MISC_FEATURE (13): Xaa equals any of the naturally occurring L-amino acids
  MISC_FEATURE (27): Xaa equals any of the naturally occurring L-amino acids
  MISC_FEATURE (37): Xaa equals any of the naturally occurring L-amino acids
  MISC_FEATURE (57): Xaa equals any of the naturally occurring L-amino acids
  MISC_FEATURE (59): Xaa equals any of the naturally occurring L-amino acids
  MISC_FEATURE (85): Xaa equals any of the naturally occurring L-amino acids
  MISC_FEATURE (86): Xaa equals any of the naturally occurring L-amino acids
  MISC_FEATURE (97): Xaa equals any of the naturally occurring L-amino acids
  MISC_FEATURE (103): Xaa equals any of the naturally occurring L-amino acids
SSRLAFPKATEEXKASKPHHEWPSGTXFARTGDPNSXALPPWPQFNQAETISGNQPXAXGRTKFQGGLDAILVKNPPQQNTTWPXXQKNRKGPGGTXEGRPKXFLGLGQT

SEQ ID NO: 6698 - protein, 129 aa, Homo sapiens
GFNDELEAFKERVRGRAKLRIEKAMKEYEEEERKKRLGPGGLDPVEVYESLPEELQKCFDVKDVQMLQDAISKMDPTDAKYHMQRCIDSGLWVPNSKAKRRPRRERRQVLGTHYWKLFPRRAMRRMSSV

SEQ ID NO: 6699 - protein, 177 aa, Homo sapiens
  MISC_FEATURE (163): Xaa equals any of the naturally occurring L-amino acids
GFIIDDSVLYSGASLNDVYLHQHDKYRYDRYHLIRNRKMSDIMFEWVTQNIMNGRGVNRLDDVNRPKSPEIKNDIRLFRQELRDAAYHFQGDADNDQLSVTPLVGLGKSSLLNKTIFHLMPCAEQKLTICTPYFNLPAILVRNIIQLLREGKKVEIIVGDKTXNDFYIPEDEPFKII

SEQ ID NO: 6700 - protein, 93 aa, Homo sapiens
  MISC_FEATURE (7): Xaa equals any of the naturally occurring L-amino acids
  MISC_FEATURE (11): Xaa equals any of the naturally occurring L-amino acids
HELVRLXGGCXLLRCIPALDSLTPANEDQKIGIEIIKRTLKIPAMTIAKNAGVEGSLIVEKIMQSSSEVGYDAMAGDFVKYGGKRESLTQQRL

SEQ ID NO: 6701 - protein, 105 aa, Homo sapiens
  MISC_FEATURE (10): Xaa equals any of the naturally occurring L-amino acids
  MISC_FEATURE (30): Xaa equals any of the naturally occurring L-amino acids
  MISC_FEATURE (45): Xaa equals any of the naturally occurring L-amino acids
  MISC_FEATURE (58): Xaa equals any of the naturally occurring L-amino acids
  MISC_FEATURE (71): Xaa equals any of the naturally occurring L-amino acids
  MISC_FEATURE (84): Xaa equals any of the naturally occurring L-amino acids
  MISC_FEATURE (91): Xaa equals any of the naturally occurring L-amino acids
  MISC_FEATURE (105): Xaa equals any of the naturally occurring L-amino acids
GVTFPVPQSXDSLLRAVGPCPQQLGTQTTXERESQASNTKVTRDXPKSCDKTTHAHRXRPELLGGPQLLFXQNPRHAMISRPLXHMRGGDXSHEDPEASQLDVDX

SEQ ID NO: 6702 - protein, 113 aa, Homo sapiens
  MISC_FEATURE (50): Xaa equals any of the naturally occurring L-amino acids
  MISC_FEATURE (92): Xaa equals any of the naturally occurring L-amino acids
  MISC_FEATURE (108): Xaa equals any of the naturally occurring L-amino acids
RRVSPGKNFPPGGVPGTPQTGRFSGAPGGGKRGPSLRKKKGGGPAQFGPXSPKPQFRGQGPGISPWVLLGIQPGGWGERGETPSGRSPCRGXAPLGGGRTTSKLLETXSPECL

SEQ ID NO: 6703 - protein, 215 aa, Homo sapiens
  MISC_FEATURE (116): Xaa equals any of the naturally occurring L-amino acids
  MISC_FEATURE (122): Xaa equals any of the naturally occurring L-amino acids
  MISC_FEATURE (127): Xaa equals any of the naturally occurring L-amino acids
  MISC_FEATURE (141): Xaa equals any of the naturally occurring L-amino acids
  MISC_FEATURE (151): Xaa equals any of the naturally occurring L-amino acids
  MISC_FEATURE (152): Xaa equals any of the naturally occurring L-amino acids
  MISC_FEATURE (155): Xaa equals any of the naturally occurring L-amino acids
  MISC_FEATURE (158): Xaa equals any of the naturally occurring L-amino acids
  MISC_FEATURE (194): Xaa equals any of the naturally occurring L-amino acids
  MISC_FEATURE (208): Xaa equals any of the naturally occurring L-amino acids
EFSYELSKVEGKTGTPEKPLSDLGLLSYRSYWSQTILEILMGLKSESGERPQITINEISEITSIKKEDVISTLQYLNLINYYKGQYILTLSEDIVDGHERAMLKRLLRIRLQVSAXIPRDWXKKGGXGDQTLATGIAQDGXQGLGGLNSPXXAPXWKXPTKATFKGKMGLEGQVQKRDRTRALAGGPTGWPNTXAKLPGLRPTFKGQXGPKAQGF

SEQ ID NO: 6704 - protein, 94 aa, Homo sapiens
GYTRAEYESEAEGVMAGQAFRKFLPLFDRVLVERSAAETVTKGGIMLPEKSQGKVLQATVVAVGSGSKGKGGEIQPVSVKVGDKVLLPEYGGPK

SEQ ID NO: 6705 - protein, 112 aa, Homo sapiens
  MISC_FEATURE (14): Xaa equals any of the naturally occurring L-amino acids
  MISC_FEATURE (112): Xaa equals any of the naturally occurring L-amino acids
GSVSPVPVAPLPPXTMGPGPRLLLPLVLCVGLGALVFSSGAEGFRKRGPSVTAKVFFDVRIGDKDVGRIVIGLFGKVVPKTVENFVALATGEKGYGYKGSKFSSCHQGFHDX

SEQ ID NO: 6706 - protein, 41 aa, Homo sapiens
  MISC_FEATURE (28): Xaa equals any of the naturally occurring L-amino acids
  MISC_FEATURE (30): Xaa equals any of the naturally occurring L-amino acids
  MISC_FEATURE (32): Xaa equals any of the naturally occurring L-amino acids
  MISC_FEATURE (33): Xaa equals any of the naturally occurring L-amino acids
  MISC_FEATURE (38): Xaa equals any of the naturally occurring L-amino acids
WRDVSRESTYQGHHTPPVQKGLRYGIIXFXTXXVFFFXGFF

SEQ ID NO: 6707 - protein, 41 aa, Homo sapiens
  MISC_FEATURE (5): Xaa equals any of the naturally occurring L-amino acids
  MISC_FEATURE (33): Xaa equals any of the naturally occurring L-amino acids
WRDVXRESTYQGHHTPPVQKGLRYGIILFITSXIFFFAGFF

SEQ ID NO: 6708 - protein, 93 aa, Homo sapiens
  MISC_FEATURE (7): Xaa equals any of the naturally occurring L-amino acids
  MISC_FEATURE (34): Xaa equals any of the naturally occurring L-amino acids
  MISC_FEATURE (90): Xaa equals any of the naturally occurring L-amino acids
AHHSLIXNNRNQIIQALLITILLGLYFTLLQASXYFESPFTISDGIYGSTFFVATGFHGLHVIIGSTFLTICFIRQLIFHFTSKHHFGFXTAA

SEQ ID NO: 6709 - protein, 41 aa, Homo sapiens
WRDVTRESTYQGHHTPPVQKGLRYGIILFITSEVFFFAGFF

SEQ ID NO: 6710 - protein, 39 aa, Homo sapiens
  MISC_FEATURE (5): Xaa equals any of the naturally occurring L-amino acids
  MISC_FEATURE (20): Xaa equals any of the naturally occurring L-amino acids
  MISC_FEATURE (24): Xaa equals any of the naturally occurring L-amino acids
AGILXTALSLLIRAELGQPXNLLXNEHIYNVIVTAMHLL

SEQ ID NO: 6711 - protein, 40 aa, Homo sapiens
TILPAIILVLIALPSLRILYITDEVNDPSLTIKSIGHQWY

SEQ ID NO: 6712 - protein, 40 aa, Homo sapiens; identical to SEQ ID NO: 6711

SEQ ID NO: 6713 - protein, 64 aa, Homo sapiens
  MISC_FEATURE (60): Xaa equals any of the naturally occurring L-amino acids
AVPTLGLKTDAIPGRLNQTTFTATRPGVYYGQCSEICGANHSFMPIVLELIPLKIFEIGXVFTL

SEQ ID NO: 6714 - protein, 56 aa, Homo sapiens
TYEYTDYGGLIFNSYILPPLFLEPGDLRLLDVDNRVVLPIEAPIRIIITSQDVLHS

SEQ ID NO: 6715 - protein, 45 aa, Homo sapiens
  MISC_FEATURE (22): Xaa equals any of the naturally occurring L-amino acids
  MISC_FEATURE (25): Xaa equals any of the naturally occurring L-amino acids
  MISC_FEATURE (28): Xaa equals any of the naturally occurring L-amino acids
HVTLWFLCFINYLIYQYGTRFXKKXDSXDPYIYTPFGTGPKTALA

SEQ ID NO: 6716 - protein, 63 aa, Homo sapiens
  MISC_FEATURE (4): Xaa equals any of the naturally occurring L-amino acids
HLWXLIEGGAHIYVCGDARNMARDVQNTFYDIVAELGAMEHAQAVDYIKKLMTKGRYSLDVWS

SEQ ID NO: 6717 - protein, 158 aa, Homo sapiens
  MISC_FEATURE (1): Xaa equals any of the naturally occurring L-amino acids
  MISC_FEATURE (8): Xaa equals any of the naturally occurring L-amino acids
  MISC_FEATURE (11): Xaa equals any of the naturally occurring L-amino acids
  MISC_FEATURE (111): Xaa equals any of the naturally occurring L-amino acids
  MISC_FEATURE (112): Xaa equals any of the naturally occurring L-amino acids
  MISC_FEATURE (123): Xaa equals any of the naturally occurring L-amino acids
  MISC_FEATURE (125): Xaa equals any of the naturally occurring L-amino acids
  MISC_FEATURE (129): Xaa equals any of the naturally occurring L-amino acids
  MISC_FEATURE (134): Xaa equals any of the naturally occurring L-amino acids
  MISC_FEATURE (138): Xaa equals any of the naturally occurring L-amino acids
  MISC_FEATURE (140): Xaa equals any of the naturally occurring L-amino acids
  MISC_FEATURE (154): Xaa equals any of the naturally occurring L-amino acids
XPPELHDXAKXPYTEAVIYEIQRFSDLLPMGVPHIVTQHTSFRGYIIPKDTEVFLILSTALHDPHYFEKPDAFNPDHFLDANGALKKTEAFIPFSLGKRICLGEGIARAEXXPLFTTILQNFXMXSPVXPEDIXLTPXEXGVGQKNPPTYQNPXSWPR

SEQ ID NO: 6718 - protein, 89 aa, Homo sapiens
FSAPSRISAWFGPPASTPASTMSIRVTQKSYKVSTSGPRAFSSRSYTSGPGSRISSSSFSRVGKQQLSRWPGRAAMVGPAAWEASPELR

SEQ ID NO: 6719 - protein, 138 aa, Homo sapiens
RSWGATQPGSQAPPRQLSRFSHSFPTRLLSPMAHATLSAAPSNPRLLRVALLLLLLVAASRRAAGASVVTELRCQCLQTLQGIHLKNIQSVNVRSPGPHCAQTEVIATLKNGKKACLNPASPMVQKIIEKILNKGSTN

SEQ ID NO: 6720 - protein, 76 aa, Homo sapiens
  MISC_FEATURE (62): Xaa equals any of the naturally occurring L-amino acids
  MISC_FEATURE (75): Xaa equals any of the naturally occurring L-amino acids
GTFRNDNSAEMCRKCSTGCPRRMVKVKDCTPWSDIECVHKESGNGHNIWVIFVVTLVVPLLXVAVLIVWCCIGSXC

SEQ ID NO: 6721 - protein, 59 aa, Homo sapiens
FIPILVSNYNPKEFESCIQYYLENNWLQHEKAPTEEGKKELLFLSNANPSLLERHCAYL

SEQ ID NO: 6722 - protein, 104 aa, Homo sapiens
  MISC_FEATURE (1): Xaa equals any of the naturally occurring L-amino acids
  MISC_FEATURE (7): Xaa equals any of the naturally occurring L-amino acids
  MISC_FEATURE (18): Xaa equals any of the naturally occurring L-amino acids
  MISC_FEATURE (21): Xaa equals any of the naturally occurring L-amino acids
  MISC_FEATURE (29): Xaa equals any of the naturally occurring L-amino acids
  MISC_FEATURE (34): Xaa equals any of the naturally occurring L-amino acids
  MISC_FEATURE (39): Xaa equals any of the naturally occurring L-amino acids
  MISC_FEATURE (40): Xaa equals any of the naturally occurring L-amino acids
  MISC_FEATURE (85): Xaa equals any of the naturally occurring L-amino acids
  MISC_FEATURE (86): Xaa equals any of the naturally occurring L-amino acids
  MISC_FEATURE (87): Xaa equals any of the naturally occurring L-amino acids
  MISC_FEATURE (91): Xaa equals any of the naturally occurring L-amino acids
  MISC_FEATURE (98): Xaa equals any of the naturally occurring L-amino acids
XRPRSGXPGSTHASDPPXIFXKPAKTSKXPGSFXEELLXXTETVVTEYLNSGNANEAVNGVREMRAPKHFLPEMLSKVIILSLDXXXEDKXKASSLIXLLKQEG

SEQ ID NO: 6723 - protein, 43 aa, Homo sapiens
  MISC_FEATURE (5): Xaa equals any of the naturally occurring L-amino acids
  MISC_FEATURE (9): Xaa equals any of the naturally occurring L-amino acids
  MISC_FEATURE (16): Xaa equals any of the naturally occurring L-amino acids
  MISC_FEATURE (17): Xaa equals any of the naturally occurring L-amino acids
  MISC_FEATURE (37): Xaa equals any of the naturally occurring L-amino acids
ALFNXGSPXLHEFRSXXTLFIVLVNNDEGEWNGPPPXCKRKNL

SEQ ID NO: 6724 - protein, 34 aa, Homo sapiens
MCSLPFQIKITHKNQMPMLMGPPPRSTNFFGFLS

SEQ ID NO: 6725 - protein, 122 aa, Homo sapiens
  MISC_FEATURE (89): Xaa equals any of the naturally occurring L-amino acids
  MISC_FEATURE (107): Xaa equals any of the naturally occurring L-amino acids
  MISC_FEATURE (111): Xaa equals any of the naturally occurring L-amino acids
  MISC_FEATURE (119): Xaa equals any of the naturally occurring L-amino acids
GGDGTVGWVLGALEETRYRLACPEPSVAILPLGTGNDLGRVLRWGAGYSGEDPFSVLLSVDEADAVLMDRWTILLDAHEAGSAENDTAXAEPPKIVQMSNYLWHWHXPGLXLDFTKHRXEEP

SEQ ID NO: 6726 - protein, 83 aa, Homo sapiens
  MISC_FEATURE (1): Xaa equals any of the naturally occurring L-amino acids
  MISC_FEATURE (7): Xaa equals any of the naturally occurring L-amino acids
  MISC_FEATURE (27): Xaa equals any of the naturally occurring L-amino acids
  MISC_FEATURE (30): Xaa equals any of the naturally occurring L-amino acids
  MISC_FEATURE (43): Xaa equals any of the naturally occurring L-amino acids
  MISC_FEATURE (54): Xaa equals any of the naturally occurring L-amino acids
  MISC_FEATURE (59): Xaa equals any of the naturally occurring L-amino acids
  MISC_FEATURE (60): Xaa equals any of the naturally occurring L-amino acids
  MISC_FEATURE (62): Xaa equals any of the naturally occurring L-amino acids
  MISC_FEATURE (80): Xaa equals any of the naturally occurring L-amino acids
XMAEEGXPAPLPPEDAPNAASLAPTPXSPXLEPFNLTSEPSDXALDLSTFLQQXPDAFXXGXPELPKKKPKNPQRKHQGXTRG

SEQ ID NO: 6727 - protein, 69 aa, Homo sapiens
GCTPLFIPKLAGSHCSGAKGGKKSDQSNCSLEPLLQQLSTSYKTMPDVCQASNLLPALRSLNCCLPSSL

SEQ ID NO: 6728 - protein, 106 aa, Homo sapiens
  MISC_FEATURE (2): Xaa equals any of the naturally occurring L-amino acids
  MISC_FEATURE (13): Xaa equals any of the naturally occurring L-amino acids
  MISC_FEATURE (34): Xaa equals any of the naturally occurring L-amino acids
  MISC_FEATURE (37): Xaa equals any of the naturally occurring L-amino acids
  MISC_FEATURE (58): Xaa equals any of the naturally occurring L-amino acids
  MISC_FEATURE (66): Xaa equals any of the naturally occurring L-amino acids
  MISC_FEATURE (73): Xaa equals any of the naturally occurring L-amino acids
  MISC_FEATURE (75): Xaa equals any of the naturally occurring L-amino acids
  MISC_FEATURE (76): Xaa equals any of the naturally occurring L-amino acids
  MISC_FEATURE (91): Xaa equals any of the naturally occurring L-amino acids
  MISC_FEATURE (96): Xaa equals any of the naturally occurring L-amino acids
  MISC_FEATURE (106): Xaa equals any of the naturally occurring L-amino acids
QXKDGDEFNNSIXQLFLAFNMLMDRPLEEAVKIXGAXLKYLPSIINDVKLVFDPVELXVLFCKFIXSIPDNQXVXXKLNCMTKIVESTLFXQSECXEVLLPLLTDX

SEQ ID NO: 6729 - protein, 99 aa, Homo sapiens
  MISC_FEATURE (98): Xaa equals any of the naturally occurring L-amino acids
VAVKMALVASVRVPARVLLRAGARLPGAALGRTERAAGGGDGARRFGSQRVLVEPDAGAGVAVMKFKNPPVNSLSLEFLTELVISLRSWRMTRASAVXF

SEQ ID NO: 6730 - protein, 134 aa, Homo sapiens
  MISC_FEATURE (126): Xaa equals any of the naturally occurring L-amino acids
TPQQKYQRLLHEVQELTTEVEKIKTTVKESATEEKLTPVLLAKQLAALKQQLVASHLEKLLGPDAAINLTDPDGALAKRLLLQLEATKNSKGGSGGKTTGTPPDSSLVTYELHSRPEQDKVLSKLXKVQNLKSA

SEQ ID NO: 6731 - protein, 69 aa, Homo sapiens
  MISC_FEATURE (1): Xaa equals any of the naturally occurring L-amino acids
  MISC_FEATURE (4): Xaa equals any of the naturally occurring L-amino acids
  MISC_FEATURE (12): Xaa equals any of the naturally occurring L-amino acids
XNKXWCSTAVAXALELVDPPGCRNSARGKTSLNLSLNLIFELPSLFMVEGKQFRSLDYEFCETHDSTIT

SEQ ID NO: 6732 - protein, 109 aa, Homo sapiens
  MISC_FEATURE (90): Xaa equals any of the naturally occurring L-amino acids
  MISC_FEATURE (93): Xaa equals any of the naturally occurring L-amino acids
  MISC_FEATURE (94): Xaa equals any of the naturally occurring L-amino acids
  MISC_FEATURE (99): Xaa equals any of the naturally occurring L-amino acids
  MISC_FEATURE (103): Xaa equals any of the naturally occurring L-amino acids
LLPSESPMAHWWWWTACQACDSAAAGHCRAHQACADDEQDVNVIISTYGEGESGPMGNIMIDPVLGTVGFGSGLHGWAFTLKQFAEMYVXKFXXKGEGXLGPXERAKKV

SEQ ID NO: 6733 - protein, 50 aa, Homo sapiens
  MISC_FEATURE (9): Xaa equals any of the naturally occurring L-amino acids
  MISC_FEATURE (13): Xaa equals any of the naturally occurring L-amino acids
  MISC_FEATURE (17): Xaa equals any of the naturally occurring L-amino acids
  MISC_FEATURE (28): Xaa equals any of the naturally occurring L-amino acids
  MISC_FEATURE (35): Xaa equals any of the naturally occurring L-amino acids
  MISC_FEATURE (38): Xaa equals any of the naturally occurring L-amino acids
  MISC_FEATURE (45): Xaa equals any of the naturally occurring L-amino acids
  MISC_FEATURE (46): Xaa equals any of the naturally occurring L-amino acids
KCTITGLTXWDPXCEAXDRGDKFVLRSXYSSCGMXVSXSMISNEXXVNIL

SEQ ID NO: 6734 - protein, 106 aa, Homo sapiens
  MISC_FEATURE (2): Xaa equals any of the naturally occurring L-amino acids
AXAWAPPPLSPWSSCKSARMSQAEFEKAAEEVRHLKTKPSDEEMLFIYGHYKQATVGDINTERPGMLDFTGKAKWDAWNELKGTSKEDAMKAYINKVEELKKKYGI

SEQ ID NO: 6735 - protein, 120 aa, Homo sapiens
  MISC_FEATURE (64): Xaa equals any of the naturally occurring L-amino acids
  MISC_FEATURE (65): Xaa equals any of the naturally occurring L-amino acids
  MISC_FEATURE (71): Xaa equals any of the naturally occurring L-amino acids
  MISC_FEATURE (82): Xaa equals any of the naturally occurring L-amino acids
  MISC_FEATURE (103): Xaa equals any of the naturally occurring L-amino acids
  MISC_FEATURE (104): Xaa equals any of the naturally occurring L-amino acids
  MISC_FEATURE (110): Xaa equals any of the naturally occurring L-amino acids
  MISC_FEATURE (113): Xaa equals any of the naturally occurring L-amino acids
  MISC_FEATURE (114): Xaa equals any of the naturally occurring L-amino acids
AWCRWLVSATCVGTADRKMSSGNAKIGHPAPNFKATAVMPDGQFKDISLSDYKGKYVVFFFYPXXFTFVCXTEIIAFSDRAXEFKKLNCQVIGASVDSHFCHXXWVNTPXKQXXLGPMNI

SEQ ID NO: 6736 - protein, 193 aa, Homo sapiens
  MISC_FEATURE (1): Xaa equals any of the naturally occurring L-amino acids
  MISC_FEATURE (3): Xaa equals any of the naturally occurring L-amino acids
  MISC_FEATURE (21): Xaa equals any of the naturally occurring L-amino acids
  MISC_FEATURE (22): Xaa equals any of the naturally occurring L-amino acids
  MISC_FEATURE (189): Xaa equals any of the naturally occurring L-amino acids
XSXAPAVPVRNSRVDPRVRTXXVVNCFVNNNRQCQCTSVGAQNTVICSKLAAKCLVMKAEMNGSKLGRRAKPEGALQNNDGLYDPDCDESGLFKAKQCNGTSMCWCVNTAGVRRTDKDTEITCSERVRTYWIIIELKHKAREKPYDSKSLRTALQKEITTRYQLDPKFITSILYENNVITIDLVQNSSXKNSE

SEQ ID NO: 6737 - protein, 153 aa, Homo sapiens
  MISC_FEATURE (108): Xaa equals any of the naturally occurring L-amino acids
  MISC_FEATURE (151): Xaa equals any of the naturally occurring L-amino acids
HVVEGTPAGTGSGIPGYLIYLKFKATYDGNHDTFRVEFLVVPVGGLSFLVNHDFSPLEILWTFSIYLESVAILPQLFMISKTGEAETITTHYLFFLGLYRALYLVNWXWRFYFEGFFDLIAVVAGVVQTILYCDFFYLYIQKYSRERSSVXQH

SEQ ID NO: 6738 - protein, 135 aa, Homo sapiens
  MISC_FEATURE (16): Xaa equals any of the naturally occurring L-amino acids
  MISC_FEATURE (18): Xaa equals any of the naturally occurring L-amino acids
  MISC_FEATURE (26): Xaa equals any of the naturally occurring L-amino acids
  MISC_FEATURE (30): Xaa equals any of the naturally occurring L-amino acids
  MISC_FEATURE (41): Xaa equals any of the naturally occurring L-amino acids
  MISC_FEATURE (47): Xaa equals any of the naturally occurring L-amino acids
  MISC_FEATURE (55): Xaa equals any of the naturally occurring L-amino acids
  MISC_FEATURE (71): Xaa equals any of the naturally occurring L-amino acids
  MISC_FEATURE (72): Xaa equals any of the naturally occurring L-amino acids
  MISC_FEATURE (74): Xaa equals any of the naturally occurring L-amino acids
  MISC_FEATURE (75): Xaa equals any of the naturally occurring L-amino acids
  MISC_FEATURE (83): Xaa equals any of the naturally occurring L-amino acids
  MISC_FEATURE (96): Xaa equals any of the naturally occurring L-amino acids
  MISC_FEATURE (99): Xaa equals any of the naturally occurring L-amino acids
  MISC_FEATURE (116): Xaa equals any of the naturally occurring L-amino acids
  MISC_FEATURE (120): Xaa equals any of the naturally occurring L-amino acids
  MISC_FEATURE (122): Xaa equals any of the naturally occurring L-amino acids
PSCGAGHTAGGGRGRXPXSWPPPVEXVTLXDLSQLIIRNCXSFDIHXIHVCLHLXVLLGFPSDGPLVCALXXEXXLRLPPKAXSPFATPSPKSNGXRTXSPRDGAPWPITGPGPVXGTPXFXENPCPLPGWFQET

SEQ ID NO: 6739 - protein, 157 aa, Homo sapiens
  MISC_FEATURE (143): Xaa equals any of the naturally occurring L-amino acids
  MISC_FEATURE (146): Xaa equals any of the naturally occurring L-amino acids
  MISC_FEATURE (149): Xaa equals any of the naturally occurring L-amino acids
  MISC_FEATURE (150): Xaa equals any of the naturally occurring L-amino acids
  MISC_FEATURE (151): Xaa equals any of the naturally occurring L-amino acids
TQPTVCTDAPSLLPLSRLHLRGSWDRRSVANMQLFVRAQELHTFEVTGQETVAQIKAHVASLEGIAPEDQVVLLAGAPLEDEATLGQCGVEALTTLEVAGRMLGGKVHGSLARAGKVRGQTPKVAKQEKKKKKTGRAKRRMQXNRXFVXXXPPLARR

SEQ ID NO: 6740 - protein, 164 aa, Homo sapiens
  MISC_FEATURE (2): Xaa equals any of the naturally occurring L-amino acids
  MISC_FEATURE (13): Xaa equals any of the naturally occurring L-amino acids
  MISC_FEATURE (71): Xaa equals any of the naturally occurring L-amino acids
  MISC_FEATURE (73): Xaa equals any of the naturally occurring L-amino acids
  MISC_FEATURE (97): Xaa equals any of the naturally occurring L-amino acids
  MISC_FEATURE (128): Xaa equals any of the naturally occurring L-amino acids
VXDQITAVRKFIXMGFIDEKRIAIWGWSYGGYVSSLALASGTGLFKCGIAVAPVSSWEYYASVYTERFMGXPXKDDNLEHYKNSTVMARAEYFRNVXYLLIHGTADDNVHFQNSAQIAKALVNAQVDXQAMWYSDQNHGLSGLSTNHLYTHMTHFLKQCFSLSD

SEQ ID NO: 6741 - protein, 26 aa, Homo sapiens
  MISC_FEATURE (2): Xaa equals any of the naturally occurring L-amino acids
  MISC_FEATURE (5): Xaa equals any of the naturally occurring L-amino acids
  MISC_FEATURE (8): Xaa equals any of the naturally occurring L-amino acids
  MISC_FEATURE (24): Xaa equals any of the naturally occurring L-amino acids
  MISC_FEATURE (25): Xaa equals any of the naturally occurring L-amino acids
  MISC_FEATURE (26): Xaa equals any of the naturally occurring L-amino acids
GXGRXQCXNTLQTNAGYLEQVKRXXX

SEQ ID NO: 6742 - protein, 61 aa, Homo sapiens
  MISC_FEATURE (6): Xaa equals any of the naturally occurring L-amino acids
  MISC_FEATURE (12): Xaa equals any of the naturally occurring L-amino acids
  MISC_FEATURE (15): Xaa equals any of the naturally occurring L-amino acids
  MISC_FEATURE (21): Xaa equals any of the naturally occurring L-amino acids
  MISC_FEATURE (23): Xaa equals any of the naturally occurring L-amino acids
  MISC_FEATURE (43): Xaa equals any of the naturally occurring L-amino acids
  MISC_FEATURE (44): Xaa equals any of the naturally occurring L-amino acids
  MISC_FEATURE (50): Xaa equals any of the naturally occurring L-amino acids
SAIASXRYKRFXIRXRIKMQXDXVRSVIQNLTEEQSMVLCAAXXKAGSMXLHQDNSHTPVS

SEQ ID NO: 6743 - protein, 38 aa, Homo sapiens
AFIAKSFYDLSAISLDGEKVDFNTSRGRAVLIENVASL

SEQ ID NO: 6744 - protein, 95 aa, Homo sapiens
  MISC_FEATURE (7): Xaa equals any of the naturally occurring L-amino acids
  MISC_FEATURE (37): Xaa equals any of the naturally occurring L-amino acids
  MISC_FEATURE (47): Xaa equals any of the naturally occurring L-amino acids
  MISC_FEATURE (48): Xaa equals any of the naturally occurring L-amino acids
  MISC_FEATURE (50): Xaa equals any of the naturally occurring L-amino acids
  MISC_FEATURE (82): Xaa equals any of the naturally occurring L-amino acids
  MISC_FEATURE (88): Xaa equals any of the naturally occurring L-amino acids
  MISC_FEATURE (92): Xaa equals any of the naturally occurring L-amino acids
ADEPIPXKELERGVAGAHGLLCLLSDHVDKRILDAAXANLKVISTMXXGXDHLALDEIKKRGIRVGYTPDVLTDTTVELAVXLLLTTXRRLXEAI

SEQ ID NO: 6745 - protein, 32 aa, Homo sapiens
  MISC_FEATURE (11): Xaa equals any of the naturally occurring L-amino acids
  MISC_FEATURE (16): Xaa equals any of the naturally occurring L-amino acids
  MISC_FEATURE (21): Xaa equals any of the naturally occurring L-amino acids
  MISC_FEATURE (22): Xaa equals any of the naturally occurring L-amino acids
AACLADLADRXYKQAXKCLLXXSFDHCDFPEL

SEQ ID NO: 6746 - protein, 97 aa, Homo sapiens
  MISC_FEATURE (28): Xaa equals any of the naturally occurring L-amino acids
  MISC_FEATURE (50): Xaa equals any of the naturally occurring L-amino acids
  MISC_FEATURE (51): Xaa equals any of the naturally occurring L-amino acids
  MISC_FEATURE (59): Xaa equals any of the naturally occurring L-amino acids
  MISC_FEATURE (61): Xaa equals any of the naturally occurring L-amino acids
  MISC_FEATURE (62): Xaa equals any of the naturally occurring L-amino acids
  MISC_FEATURE (65): Xaa equals any of the naturally occurring L-amino acids
  MISC_FEATURE (67): Xaa equals any of the naturally occurring L-amino acids
  MISC_FEATURE (69): Xaa equals any of the naturally occurring L-amino acids
  MISC_FEATURE (76): Xaa equals any of the naturally occurring L-amino acids
  MISC_FEATURE (84): Xaa equals any of the naturally occurring L-amino acids
  MISC_FEATURE (88): Xaa equals any of the naturally occurring L-amino acids
  MISC_FEATURE (90): Xaa equals any of the naturally occurring L-amino acids
  MISC_FEATURE (93): Xaa equals any of the naturally occurring L-amino acids
  MISC_FEATURE (95): Xaa equals any of the naturally occurring L-amino acids
CPWPLKLRCQCLQTLQGIHPKNIQSVNXKSPGPHCAQTEVIATLKNGRKXXLQSCMPHXLXXLSXKXVXQWQIQLXQKGGRKVXWWVXAXREXLXLF

SEQ ID NO: 6747 - protein, 34 aa, Homo sapiens
  MISC_FEATURE (6): Xaa equals any of the naturally occurring L-amino acids
  MISC_FEATURE (17): Xaa equals any of the naturally occurring L-amino acids
  MISC_FEATURE (27): Xaa equals any of the naturally occurring L-amino acids
  MISC_FEATURE (33): Xaa equals any of the naturally occurring L-amino acids
SPGPHXAQTGVIATLKXGRKACLNPAXPIVMKXI

SEQ ID NO: 6748 - protein, 18 aa, Homo sapiens
  MISC_FEATURE (2): Xaa equals any of the naturally occurring L-amino acids
  MISC_FEATURE (7): Xaa equals any of the naturally occurring L-amino acids
RXVAEDXHLWNDSQPLKL

SEQ ID NO: 6749 - protein, 66 aa, Homo sapiens
RGCHSDFLPELLLAPSSKKGKARLSPRSVGVISPYRKQVEKIRYCITKLDRELRGLDDIKDLKVVQ

SEQ ID NO: 6750 - protein, 91 aa, Homo sapiens
  MISC_FEATURE (85): Xaa equals any of the naturally occurring L-amino acids
RHEEFARYTTPEDATPEPGEDPRVTRAKYFIRDEFLRISTASGDGRHYCYPHFTCAVDTENIRRVFNDCRDIIQRMHLRQYELLXEGNPQI

SEQ ID NO: 6751 - protein, 23 aa, Homo sapiens
  MISC_FEATURE (6): Xaa equals any of the naturally occurring L-amino acids
  MISC_FEATURE (21): Xaa equals any of the naturally occurring L-amino acids
  MISC_FEATURE (22): Xaa equals any of the naturally occurring L-amino acids
  MISC_FEATURE (23): Xaa equals any of the naturally occurring L-amino acids
DLYKKXGKLEFLGLDNAGQNXXX

SEQ ID NO: 6752 - protein, 36 aa, Homo sapiens
  MISC_FEATURE (14): Xaa equals any of the naturally occurring L-amino acids
  MISC_FEATURE (29): Xaa equals any of the naturally occurring L-amino acids
  MISC_FEATURE (33): Xaa equals any of the naturally occurring L-amino acids
  MISC_FEATURE (34): Xaa equals any of the naturally occurring L-amino acids
  MISC_FEATURE (35): Xaa equals any of the naturally occurring L-amino acids
AQQGAPCPSRCGEXPACHWLPPDLTEPPXAQLXXXF

SEQ ID NO: 6753 - protein, 80 aa, Homo sapiens
  MISC_FEATURE (6): Xaa equals any of the naturally occurring L-amino acids
  MISC_FEATURE (29): Xaa equals any of the naturally occurring L-amino acids
  MISC_FEATURE (72): Xaa equals any of the naturally occurring L-amino acids
  MISC_FEATURE (78): Xaa equals any of the naturally occurring L-amino acids
TRPDKXVKDLVILLYETALLSSGFSLEDXQTHANRIYRMIKLGLGIDEDDPTADDTSAAVTEEMPPLEGDDXTSRMEXVD

SEQ ID NO: 6754 - protein, 83 aa, Homo sapiens
  MISC_FEATURE (2): Xaa equals any of the naturally occurring L-amino acids
  MISC_FEATURE (67): Xaa equals any of the naturally occurring L-amino acids
  MISC_FEATURE (71): Xaa equals any of the naturally occurring L-amino acids
  MISC_FEATURE (72): Xaa equals any of the naturally occurring L-amino acids
  MISC_FEATURE (82): Xaa equals any of the naturally occurring L-amino acids
GXASPLGPAALRDSEEKLAPGGRGSVNMGKGDPNKPRGKMSSYAFFVQTCRERAQERNTRTLPSISXEFSXXFFGKMEKPFXP

SEQ ID NO: 6755 - protein, 150 aa, Homo sapiens
  MISC_FEATURE (76): Xaa equals any of the naturally occurring L-amino acids
  MISC_FEATURE (101): Xaa equals any of the naturally occurring L-amino acids
  MISC_FEATURE (102): Xaa equals any of the naturally occurring L-amino acids
  MISC_FEATURE (106): Xaa equals any of the naturally occurring L-amino acids
  MISC_FEATURE (111): Xaa equals any of the naturally occurring L-amino acids
  MISC_FEATURE (124): Xaa equals any of the naturally occurring L-amino acids
  MISC_FEATURE (144): Xaa equals any of the naturally occurring L-amino acids
  MISC_FEATURE (145): Xaa equals any of the naturally occurring L-amino acids
LVAALAPMSLPNSSCLLEDKMCEGNKTTMASPQLMPLVVVLSTICLVTVGLNLLVLYAVRSERKLHTVGNLYIVSXSVADLIVGAVVMPMNILYLLMSKWXXGRPXCLFWXSMDYVASTASIFXVFILCIDRYRSVHNPSGTLXXVPKPE

SEQ ID NO: 6756 - protein, 30 aa, Homo sapiens
VLELAGNASKDLKVKRITPRHLQLAIRGDE

SEQ ID NO: 6757 - protein, 128 aa, Homo sapiens
  MISC_FEATURE (118): Xaa equals any of the naturally occurring L-amino acids
  MISC_FEATURE (121): Xaa equals any of the naturally occurring L-amino acids
  MISC_FEATURE (123): Xaa equals any of the naturally occurring L-amino acids
  MISC_FEATURE (126): Xaa equals any of the naturally occurring L-amino acids
ACREEHKKKHPDASVNFSEFSKKCSERWKTMSAKEKGKFEDMAKADKARYEREMKTYIPPKGETKKKFKDPNAPKRPPSAFFLFCSEYRPKIKGEHPGLSIGDVAKKLGEMWNNTAAXDKXLXKKXAA

SEQ ID NO: 6758 - protein, 60 aa, Homo sapiens
  MISC_FEATURE (4): Xaa equals any of the naturally occurring L-amino acids
GTRXELIRPERNTLVVSFVDLEQFNQQLSTTIQEEFYRVYPYLCRALKTFVKDSGRRTYK

SEQ ID NO: 6759 - protein, 105 aa, Homo sapiens
  MISC_FEATURE (1): Xaa equals any of the naturally occurring L-amino acids
  MISC_FEATURE (5): Xaa equals any of the naturally occurring L-amino acids
  MISC_FEATURE (12): Xaa equals any of the naturally occurring L-amino acids
  MISC_FEATURE (18): Xaa equals any of the naturally occurring L-amino acids
  MISC_FEATURE (22): Xaa equals any of the naturally occurring L-amino acids
  MISC_FEATURE (34): Xaa equals any of the naturally occurring L-amino acids
  MISC_FEATURE (35): Xaa equals any of the naturally occurring L-amino acids
  MISC_FEATURE (36): Xaa equals any of the naturally occurring L-amino acids
  MISC_FEATURE (46): Xaa equals any of the naturally occurring L-amino acids
  MISC_FEATURE (60): Xaa equals any of the naturally occurring L-amino acids
XLNRXSSCSSCXMPCSIXERQXSSQPALSLALSXXXRGWYISASAXGDWGGWLNARMLQXCSVKGLSLNQVMVDDAGVPLMGSYIGVMVLLYKPGLTDEPEAVGE

SEQ ID NO: 6760 - protein, 121 aa, Homo sapiens
REQKLELHRGGGRSRTSGSPGLQEFGTSRYNQETPMEICLNGTPALAYLASAPPPLCPSGRTPDLKALLNVVDNARSFIYVAVMNYLPTLEFSHLRAWRQGAPAHQLLGTLGGHPCGPSCS

SEQ ID NO: 6761 - protein, 50 aa, Homo sapiens
  MISC_FEATURE (32): Xaa equals any of the naturally occurring L-amino acids
  MISC_FEATURE (43): Xaa equals any of the naturally occurring L-amino acids
FSLFPLAKSFDDGDYFPVWGTCLGFEELLMLXSGECLLTATGXCLTWQCR

SEQ ID NO: 6762 - protein, 165 aa, Homo sapiens
GAGGGFGSPMDIFDMFFGGGGRMQRERRGKNVVHQLSVTLEDLYNGATRKLALQKNVICDKCEGRGGKKGAVECCPNCRGTGMQIRIHQIGPGMVQQIQSVCMECQGHGERISPKDRCKSCNGRKIVREKKILEVHIDKGMKDGQKITFHGEGDQEPGLEPGDII

SEQ ID NO: 6763 - protein, 57 aa, Homo sapiens
  MISC_FEATURE (1): Xaa equals any of the naturally occurring L-amino acids
  MISC_FEATURE (4): Xaa equals any of the naturally occurring L-amino acids
  MISC_FEATURE (12): Xaa equals any of the naturally occurring L-amino acids
  MISC_FEATURE (14): Xaa equals any of the naturally occurring L-amino acids
  MISC_FEATURE (36): Xaa equals any of the naturally occurring L-amino acids
  MISC_FEATURE (41): Xaa equals any of the naturally occurring L-amino acids
  MISC_FEATURE (44): Xaa equals any of the naturally occurring L-amino acids
  MISC_FEATURE (46): Xaa equals any of the naturally occurring L-amino acids
  MISC_FEATURE (57): Xaa equals any of the naturally occurring L-amino acids
XPTXPLSHMNIXQXFEFHRMIWADLSCLVYRADTQXYQPLXTKXGXKEKFYVLLRGX

SEQ ID NO: 6764 - protein, 28 aa, Homo sapiens
PCKGSIITCSLSRDLYEWLHEGSAVSYF

SEQ ID NO: 6765 - protein, 127 aa, Homo sapiens
  MISC_FEATURE (125): Xaa equals any of the naturally occurring L-amino acids
  MISC_FEATURE (126): Xaa equals any of the naturally occurring L-amino acids
NSGRGDLLYGCYTRPQINTEIVQNVTGPGQRTNMGILFMSKVGLRGDRRSEGDEVLDPLRQALDSSMQSHNLYQHPQRLAFHVSAPVASTVQQASGLLGPLPHLSSFALQPAHSLLPPLGSHGAXXS

SEQ ID NO: 6766 - protein, 61 aa, Homo sapiens
  MISC_FEATURE (59): Xaa equals any of the naturally occurring L-amino acids
SFASLQNVGYLAGDAKILNNINFSLRAGEFKLITGPSGCGKSTLLKIVASLISPTSGTXTV

SEQ ID NO: 6767 - protein, 57 aa, Homo sapiens
  MISC_FEATURE (15): Xaa equals any of the naturally occurring L-amino acids
  MISC_FEATURE (20): Xaa equals any of the naturally occurring L-amino acids
  MISC_FEATURE (24): Xaa equals any of the naturally occurring L-amino acids
  MISC_FEATURE (35): Xaa equals any of the naturally occurring L-amino acids
  MISC_FEATURE (41): Xaa equals any of the naturally occurring L-amino acids
  MISC_FEATURE (49): Xaa equals any of the naturally occurring L-amino acids
  MISC_FEATURE (53): Xaa equals any of the naturally occurring L-amino acids
  MISC_FEATURE (57): Xaa equals any of the naturally occurring L-amino acids
VRNSRVDPRVRSFAXMEVLXWTHXKEQLETLRKLXRREVAXQWLRPAEXDHLXDSLX

SEQ ID NO: 6768 - protein, 38 aa, Homo sapiens
  MISC_FEATURE (1): Xaa equals any of the naturally occurring L-amino acids
  MISC_FEATURE (6): Xaa equals any of the naturally occurring L-amino acids
  MISC_FEATURE (10): Xaa equals any of the naturally occurring L-amino acids
  MISC_FEATURE (35): Xaa equals any of the naturally occurring L-amino acids
XCFTFXGIFXAIILFPFGFICCFALRKRRCPNCGXTFA

SEQ ID NO: 6769 - protein, 43 aa, Homo sapiens
  MISC_FEATURE (4): Xaa equals any of the naturally occurring L-amino acids
  MISC_FEATURE (10): Xaa equals any of the naturally occurring L-amino acids
  MISC_FEATURE (33): Xaa equals any of the naturally occurring L-amino acids
  MISC_FEATURE (38): Xaa equals any of the naturally occurring L-amino acids
TIFXGHSTVXKRCDWHLLHNSLYGSVADDQNLXYGTQXPIQLQ

SEQ ID NO: 6770 - protein, 87 aa, Homo sapiens
GRFAGTGPEFPGRPTRPEDAEDRPPELLFIHGGHTAKISDFSWNPNEPWVICSVSEDNIMQIWQMAENIYNDEESDVTTSELEGQGS

SEQ ID NO: 6771 - protein, 151 aa, Homo sapiens
  MISC_FEATURE (3): Xaa equals any of the naturally occurring L-amino acids
  MISC_FEATURE (31): Xaa equals any of the naturally occurring L-amino acids
  MISC_FEATURE (47): Xaa equals any of the naturally occurring L-amino acids
  MISC_FEATURE (55): Xaa equals any of the naturally occurring L-amino acids
  MISC_FEATURE (57): Xaa equals any of the naturally occurring L-amino acids
  MISC_FEATURE (69): Xaa equals any of the naturally occurring L-amino acids
  MISC_FEATURE (95): Xaa equals any of the naturally occurring L-amino acids
  MISC_FEATURE (100): Xaa equals any of the naturally occurring L-amino acids
  MISC_FEATURE (107): Xaa equals any of the naturally occurring L-amino acids
  MISC_FEATURE (124): Xaa equals any of the naturally occurring L-amino acids
  MISC_FEATURE (128): Xaa equals any of the naturally occurring L-amino acids
  MISC_FEATURE (146): Xaa equals any of the naturally occurring L-amino acids
  MISC_FEATURE (149): Xaa equals any of the naturally occurring L-amino acids
GNXGTPAGTGPEFPGRPTRPPSWDLRASFSXLLQDGVNRHPRPPPGXSPRSLCRXAXGAVRSRGEKARXVSEDLCKVSGYSFTSYWIKWVRQMPXKGLEXMARIDPXDSYTNYSPSFQGHVTIXADKXISTATCSGAAEGLGHRHXLLXQT

SEQ ID NO: 6772 - protein, 80 aa, Homo sapiens
  MISC_FEATURE (16): Xaa equals any of the naturally occurring L-amino acids
  MISC_FEATURE (69): Xaa equals any of the naturally occurring L-amino acids
  MISC_FEATURE (76): Xaa equals any of the naturally occurring L-amino acids
  MISC_FEATURE (80): Xaa equals any of the naturally occurring L-amino acids
SGTASVVCLLNNFYPXEAKVQWKVDNALQSGNSQESVTEQDSKDSTYSLSSTLTLSKADYEKHKVYACXVTHQGLXSPVX

SEQ ID NO: 6773 - protein, 131 aa, Homo sapiens
  MISC_FEATURE (107): Xaa equals any of the naturally occurring L-amino acids
  MISC_FEATURE (109): Xaa equals any of the naturally occurring L-amino acids
  MISC_FEATURE (121): Xaa equals any of the naturally occurring L-amino acids
  MISC_FEATURE (126): Xaa equals any of the naturally occurring L-amino acids
  MISC_FEATURE (127): Xaa equals any of the naturally occurring L-amino acids
LLTMRLPAQLLGLLMLWVSGSSGNIVMTQSPVSLYVTPGEPASISCRSSQTLLHSNGYNYLDWYLQKPGQSPQLLIYLGSNRASGVPDRFSGSGSGTDFTLKITRVXAXDVGGYYYWMQAXQIHSXXALDQ

SEQ ID NO: 6774 - protein, 69 aa, Homo sapiens
  MISC_FEATURE (47): Xaa equals any of the naturally occurring L-amino acids
  MISC_FEATURE (64): Xaa equals any of the naturally occurring L-amino acids
STMAWAPLLLTLLAHCTGSWAIFMLTQPHSVSESPGKTVTISCTRSXGKHCQQLCAVVPAAPGXVPPPL

SEQ ID NO: 6775 - protein, 81 aa, Homo sapiens
  MISC_FEATURE (2): Xaa equals any of the naturally occurring L-amino acids
  MISC_FEATURE (12): Xaa equals any of the naturally occurring L-amino acids
  MISC_FEATURE (13): Xaa equals any of the naturally occurring L-amino acids
  MISC_FEATURE (29): Xaa equals any of the naturally occurring L-amino acids
  MISC_FEATURE (38): Xaa equals any of the naturally occurring L-amino acids
  MISC_FEATURE (44): Xaa equals any of the naturally occurring L-amino acids
  MISC_FEATURE (53): Xaa equals any of the naturally occurring L-amino acids
  MISC_FEATURE (70): Xaa equals any of the naturally occurring L-amino acids
  MISC_FEATURE (73): Xaa equals any of the naturally occurring L-amino acids
GXARGNHGNPSXXLFLLLLWLPDTTGENXLTHFPGTLXFFPGEXATLSCWASXSVYSSYLAWYQQKPGQXPRXLIYGASSR

SEQ ID NO: 6776 - protein, 44 aa, Homo sapiens
  MISC_FEATURE (2): Xaa equals any of the naturally occurring L-amino acids
  MISC_FEATURE (24): Xaa equals any of the naturally occurring L-amino acids
  MISC_FEATURE (28): Xaa equals any of the naturally occurring L-amino acids
  MISC_FEATURE (43): Xaa equals any of the naturally occurring L-amino acids
RXDDPSHSSAASVGDRVTITCPGXSEHXQRCKLDQQTIWKALXS

SEQ ID NO: 6777 - protein, 56 aa, Homo sapiens
  MISC_FEATURE (46): Xaa equals any of the naturally occurring L-amino acids
QSSTLGNVSTMAWALLLLSLLTQGTGSWAQSALTQPRSVSGSPGQXVTISCTGNQQ

SEQ ID NO: 6778 - protein, 74 aa, Homo sapiens
  MISC_FEATURE (18): Xaa equals any of the naturally occurring L-amino acids
  MISC_FEATURE (40): Xaa equals any of the naturally occurring L-amino acids
IRQSRRQRSRVVSTMAWXLLFLTLLTQGTGSWAQSALTQXASVSGSPGTVDHHLLHWEQVVTLVAINYVFWYHQ

SEQ ID NO: 6779 - protein, 169 aa, Homo sapiens
  MISC_FEATURE (32): Xaa equals any of the naturally occurring L-amino acids
  MISC_FEATURE (142): Xaa equals any of the naturally occurring L-amino acids
  MISC_FEATURE (156): Xaa equals any of the naturally occurring L-amino acids
  MISC_FEATURE (157): Xaa equals any of the naturally occurring L-amino acids
  MISC_FEATURE (164): Xaa equals any of the naturally occurring L-amino acids
KAGTPAGTGPEFPGRPTRPLFVVAAATGVLSXLQLVQSGAEVRKPGSSVNISCKASGGTFSRYAVTWVRQAPGQGLEWVGGITPVYGTTHYADNLRGRVTITADKSTNIAYMELKSLKFEDTAMYFCARVHNSYDSSALNWXDPWGQGTLVTVSSXXTKGPSVXPLAPF

SEQ ID NO: 6780 - protein, 82 aa, Homo sapiens
DSSTSYSASFRGHVIISADNSISTAYLQWSSLKASDSAIYFCARPIASVKARLVAPSKDYWGQGTLVTVSSASTKGPSVFPL

SEQ ID NO: 6781 - protein, 141 aa, Homo sapiens
  MISC_FEATURE (5): Xaa equals any of the naturally occurring L-amino acids
  MISC_FEATURE (141): Xaa equals any of the naturally occurring L-amino acids
GSPSXEIPRSFHLVISTEHRPPTMEFGLSWVFLVAILKGVQCEVRLVESGGGLVQPGRSLRLSCTTPGFTFDDYAMNWFRQAPGRGLEWVGFIRSKTYGGTTQYAAAVKGRFTISRDDSKSIVYLQMNSLKTEDTARVLLX

SEQ ID NO: 6782 - protein, 118 aa, Homo sapiens
  MISC_FEATURE (3): Xaa equals any of the naturally occurring L-amino acids
  MISC_FEATURE (44): Xaa equals any of the naturally occurring L-amino acids
  MISC_FEATURE (54): Xaa equals any of the naturally occurring L-amino acids
  MISC_FEATURE (93): Xaa equals any of the naturally occurring L-amino acids
  MISC_FEATURE (111): Xaa equals any of the naturally occurring L-amino acids
IRXSSTPYTFGQGTKLEIKGTLAAPSVFILPPSDEQLKSGTASXVCLLNNFYPXEAKVQWKVDNALQSGNFQVECHRAGQQGQHLQPQQHPDXEQSRLRGNTKFYGCEFTXQGLRLAR

SEQ ID NO: 6783 - protein, 147 aa, Homo sapiens
  MISC_FEATURE (13): Xaa equals any of the naturally occurring L-amino acids
FLNWYQQKPGKAXELLIYAASALRGGVPSRFSGSGSGTDFTLTISSLQPEDFATYFCQQSDDFPFSFGQGTRLEMKRTVAAPSVFIFPPSDEQLKSGTASVVCLLNNFYPREAKVQWKVDNALQSGTPRRVSQSRTARTAPTASAAP

SEQ ID NO: 6784 - protein, 159 aa, Homo sapiens
  MISC_FEATURE (5): Xaa equals any of the naturally occurring L-amino acids
  MISC_FEATURE (82): Xaa equals any of the naturally occurring L-amino acids
  MISC_FEATURE (114): Xaa equals any of the naturally occurring L-amino acids
  MISC_FEATURE (117): Xaa equals any of the naturally occurring L-amino acids
  MISC_FEATURE (118): Xaa equals any of the naturally occurring L-amino acids
  MISC_FEATURE (119): Xaa equals any of the naturally occurring L-amino acids
  MISC_FEATURE (127): Xaa equals any of the naturally occurring L-amino acids
  MISC_FEATURE (130): Xaa equals any of the naturally occurring L-amino acids
  MISC_FEATURE (136): Xaa equals any of the naturally occurring L-amino acids
  MISC_FEATURE (137): Xaa equals any of the naturally occurring L-amino acids
  MISC_FEATURE (138): Xaa equals any of the naturally occurring L-amino acids
  MISC_FEATURE (139): Xaa equals any of the naturally occurring L-amino acids
  MISC_FEATURE (141): Xaa equals any of the naturally occurring L-amino acids
  MISC_FEATURE (150): Xaa equals any of the naturally occurring L-amino acids
  MISC_FEATURE (153): Xaa equals any of the naturally occurring L-amino acids
  MISC_FEATURE (154): Xaa equals any of the naturally occurring L-amino acids
  MISC_FEATURE (158): Xaa equals any of the naturally occurring L-amino acids
  MISC_FEATURE (159): Xaa equals any of the naturally occurring L-amino acids
NSAEXNPSAFFSSCRASQSVSTRFVAWYQQKLGQAPRVLIYSTSSRAPGIPRTGSVAVGLGTELSLLQHQRAWEPEDFAVLXLCNSYRRALGHFSGGGDPRWEIETELWACNHXVFXXXPAILIGAXWKXLGLALXXXXPXGKNFFFPGXGQXXKGRXX

SEQ ID NO: 6785 - protein, 161 aa, Homo sapiens
  MISC_FEATURE (149): Xaa equals any of the naturally occurring L-amino acids
STMAWAPLLLTLLAHCTGSWAIFMLTQPHSVSEPPGKTVTISCTRSSGSIASNYVQWFQQRPGSSPTTVIYEDNQRPSGVPDRFSGSIDSSSNSASLTISGLKTEDEADYYCQSYDSSNVVFGGGTKLTVLGQAQGLPLGHSVPALLLXSFKPTRPHWCVS

SEQ ID NO: 6786 - protein, 64 aa, Homo sapiens
APLTSGVHTFPAVLQSSGLYSLSSVVTVPSSSLGTQTYICNVNHKPSNTKVDKRVEPKSCDKTH

SEQ ID NO: 6787 - protein, 151 aa, Homo sapiens
  MISC_FEATURE (84): Xaa equals any of the naturally occurring L-amino acids
  MISC_FEATURE (87): Xaa equals any of the naturally occurring L-amino acids
  MISC_FEATURE (98): Xaa equals any of the naturally occurring L-amino acids
  MISC_FEATURE (105): Xaa equals any of the naturally occurring L-amino acids
  MISC_FEATURE (123): Xaa equals any of the naturally occurring L-amino acids
  MISC_FEATURE (130): Xaa equals any of the naturally occurring L-amino acids
  MISC_FEATURE (151): Xaa equals any of the naturally occurring L-amino acids
EAALVVPQPWPGPFSSSASSLTAQASVTSYVLTQPPSVSVAPGQTARITCGANNIGIKNVHWYQQKPGQAPVLVVYDDKRPALXDPXRIFWFQLLGTXATLTINXVEPGMKPTITVRCGILVXPRSVRRXDQTYRLINPRLPLGHSVPPFX

SEQ ID NO: 6788 - protein, 134 aa, Homo sapiens
  MISC_FEATURE (114): Xaa equals any of the naturally occurring L-amino acids
  MISC_FEATURE (122): Xaa equals any of the naturally occurring L-amino acids
  MISC_FEATURE (127): Xaa equals any of the naturally occurring L-amino acids
AGGKLCRNISTMAWALLLLTLLTQGTGSWAQSALTQPPSVSGSPGQSVTISCTGTSSDVGGYNRVSWYQQSPGTAPKLMIYEVSNRPSRVPDRFSGSKSGNTGFLDIFWAPSLXTKGELLLXARIKXSKFFFLF

SEQ ID NO: 6789 - protein, 58 aa, Homo sapiens
  MISC_FEATURE (3): Xaa equals any of the naturally occurring L-amino acids
  MISC_FEATURE (5): Xaa equals any of the naturally occurring L-amino acids
  MISC_FEATURE (14): Xaa equals any of the naturally occurring L-amino acids
  MISC_FEATURE (31): Xaa equals any of the naturally occurring L-amino acids
  MISC_FEATURE (34): Xaa equals any of the naturally occurring L-amino acids
GTXLXWFHQRPGQXPRRLLYKISNRELWRPXQIXRQWGQALICTLKISRVEAEDVGIY

SEQ ID NO: 6790 - protein, 36 aa, Homo sapiens
  MISC_FEATURE (3): Xaa equals any of the naturally occurring L-amino acids
  MISC_FEATURE (6): Xaa equals any of the naturally occurring L-amino acids
  MISC_FEATURE (35): Xaa equals any of the naturally occurring L-amino acids
HKXVVXVVQYSCSPGDPVVVERPPPRWSCQLFVPXK

SEQ ID NO: 6791 - protein, 46 aa, Homo sapiens
  MISC_FEATURE (5): Xaa equals any of the naturally occurring L-amino acids
  MISC_FEATURE (9): Xaa equals any of the naturally occurring L-amino acids
  MISC_FEATURE (13): Xaa equals any of the naturally occurring L-amino acids
  MISC_FEATURE (28): Xaa equals any of the naturally occurring L-amino acids
  MISC_FEATURE (35): Xaa equals any of the naturally occurring L-amino acids
  MISC_FEATURE (44): Xaa equals any of the naturally occurring L-amino acids
LGFFXFFFXEMEXVPNSCSPGDPLVLEXPPPRWRXSFGSLLERXQS

SEQ ID NO: 6792 - protein, 35 aa, Homo sapiens
  MISC_FEATURE (1): Xaa equals any of the naturally occurring L-amino acids
  MISC_FEATURE (19): Xaa equals any of the naturally occurring L-amino acids
  MISC_FEATURE (28): Xaa equals any of the naturally occurring L-amino acids
XVPNSCSPGDPLVLERPPXRWSSSFIPXEGVNSKK

SEQ ID NO: 6793 - protein, 32 aa, Homo sapiens
  MISC_FEATURE (1): Xaa equals any of the naturally occurring L-amino acids
  MISC_FEATURE (24): Xaa equals any of the naturally occurring L-amino acids
XDLVPNSCSPGDPLVLERPPPRWXPAFVLLER

SEQ ID NO: 6794 - protein, 37 aa, Homo sapiens
  MISC_FEATURE (5): Xaa equals any of the naturally occurring L-amino acids
  MISC_FEATURE (29): Xaa equals any of the naturally occurring L-amino acids
  MISC_FEATURE (37): Xaa equals any of the naturally occurring L-amino acids
GHGLXLVPNSCSPGDPLVLERPPPRWSSXALFPIIEX

SEQ ID NO: 6795 - protein, 36 aa, Homo sapiens
  MISC_FEATURE (26): Xaa equals any of the naturally occurring L-amino acids
  MISC_FEATURE (27): Xaa equals any of the naturally occurring L-amino acids
  MISC_FEATURE (31): Xaa equals any of the naturally occurring L-amino acids
  MISC_FEATURE (34): Xaa equals any of the naturally occurring L-amino acids
HGLVPNSCSPGDPLVLERPPPRWSSXXCSQXLRXNW

SEQ ID NO: 6796 - protein, 36 aa, Homo sapiens
  MISC_FEATURE (29): Xaa equals any of the naturally occurring L-amino acids
VVSVWGLVPNSCSPGDPLVLERPPPRWSXSFVPLVR

SEQ ID NO: 6797 - protein, 43 aa, Homo sapiens
  MISC_FEATURE (41): Xaa equals any of the naturally occurring L-amino acids
LPLQATCKILGAKDGLVPNSCSPGDPLVLERPPPRWSTSFXPL

SEQ ID NO: 6798 - protein, 49 aa, Homo sapiens
  MISC_FEATURE (1): Xaa equals any of the naturally occurring L-amino acids
  MISC_FEATURE (10): Xaa equals any of the naturally occurring L-amino acids
  MISC_FEATURE (42): Xaa equals any of the naturally occurring L-amino acids
  MISC_FEATURE (46): Xaa equals any of the naturally occurring L-amino acids
XLFFFFFFLXENDFILINLVPNSCSPGDPLVLERASPRWGPXFVAXGAG

SEQ ID NO: 6799 - protein, 31 aa, Homo sapiens
  MISC_FEATURE (31): Xaa equals any of the naturally occurring L-amino acids
TRPEFLQPGGSTSFRAPPRRWSSSFIPREGX

SEQ ID NO: 6800 - protein, 46 aa, Homo sapiens
  MISC_FEATURE (1): Xaa equals any of the naturally occurring L-amino acids
XEDLRLPEGDLGMEIEQKYDCGEEILITVLSAMTEEAAVAIKAMAK

SEQ ID NO: 6801 - protein, 108 aa, Homo sapiens
  MISC_FEATURE (76): Xaa equals any of the naturally occurring L-amino acids
  MISC_FEATURE (82): Xaa equals any of the naturally occurring L-amino acids
  MISC_FEATURE (102): Xaa equals any of the naturally occurring L-amino acids
  MISC_FEATURE (105): Xaa equals any of the naturally occurring L-amino acids
EKMVLLTAVLLLLAAYAGPAQSLGSFVHCEPCDEKALSMCPPSPLGCELVKEPGCGCCMTCALAEGQSCGVYTERXAQGLRXLPRQDEEKPLHALLHGRGVXLNXKSY

SEQ ID NO: 6802 - protein, 53 aa, Homo sapiens
QRPCLWKVLLQAKGSHPSRLQTTDNLLPMSPEEFDEVSRIVGSVEFDSMMNTV

SEQ ID NO: 6803 - protein, 98 aa, Homo sapiens
  MISC_FEATURE (72): Xaa equals any of the naturally occurring L-amino acids
  MISC_FEATURE (74): Xaa equals any of the naturally occurring L-amino acids
  MISC_FEATURE (94): Xaa equals any of the naturally occurring L-amino acids
  MISC_FEATURE (95): Xaa equals any of the naturally occurring L-amino acids
  MISC_FEATURE (96): Xaa equals any of the naturally occurring L-amino acids
ALHSLCGARPPVPVMAMLRVQPEAQAKVDVFREDLCTKTENLLGSYFPKKISELDAFLKEPALNEANLSNLXAXWTSQCLIQSRRKRKRNGRNXXXKE

SEQ ID NO: 6804 - protein, 136 aa, Homo sapiens
  MISC_FEATURE (101): Xaa equals any of the naturally occurring L-amino acids
  MISC_FEATURE (122): Xaa equals any of the naturally occurring L-amino acids
  MISC_FEATURE (128): Xaa equals any of the naturally occurring L-amino acids
  MISC_FEATURE (135): Xaa equals any of the naturally occurring L-amino acids
YTESWYACRYRSGIPGSTHASASGHHSGPSLHAENHTSQTFTQHFLPQSQKMHKEEHEVAVLGAPPSTILPRSTVINIHSETSVPDHVVWSLFNTLFLNWXCLGFIAFAYSVKSRDRKMVGXRDRGPXLCLHRSXA

SEQ ID NO: 6805 - protein, 29 aa, Homo sapiens
  MISC_FEATURE (1): Xaa equals any of the naturally occurring L-amino acids
  MISC_FEATURE (3): Xaa equals any of the naturally occurring L-amino acids
XMXISKPHFEKLFPSQCYLCLLLNNHFLT

SEQ ID NO: 6806 - protein, 48 aa, Homo sapiens
  MISC_FEATURE (14): Xaa equals any of the naturally occurring L-amino acids
  MISC_FEATURE (17): Xaa equals any of the naturally occurring L-amino acids
  MISC_FEATURE (21): Xaa equals any of the naturally occurring L-amino acids
  MISC_FEATURE (26): Xaa equals any of the naturally occurring L-amino acids
FHLIKSLKYQTMRXHEXTWAXNLRYXKPDLDCMAGLRRFTLELQHTYW

SEQ ID NO: 6807 - protein, 60 aa, Homo sapiens
  MISC_FEATURE (30): Xaa equals any of the naturally occurring L-amino acids
  MISC_FEATURE (56): Xaa equals any of the naturally occurring L-amino acids
AMRCMPVWNGQTLTFVQDRPSDKTWTYNRXNVVMPDDGAPFRYSFSALKDRHNALXGELD

SEQ ID NO: 6808 - protein, 109 aa, Homo sapiens
LSRALAVELLDKVNNPDNHAHYTEADDDDFEPHAIIRHTIRSTNRNARAERTASEINFDKLQFEPPLRKETEARDEMGLSSRPKFHVYSGILLLMVQILANHLKTLQYH

SEQ ID NO: 6809 - protein, 69 aa, Homo sapiens
FNLISPSISRYCKKPLTSNCTIQIATPGKGKKSTPKPIPILAAGFCSDKMSLLLVYGSWFQPTIERVVR

SEQ ID NO: 6810 - protein, 54 aa, Homo sapiens
  MISC_FEATURE (8): Xaa equals any of the naturally occurring L-amino acids
  MISC_FEATURE (16): Xaa equals any of the naturally occurring L-amino acids
  MISC_FEATURE (17): Xaa equals any of the naturally occurring L-amino acids
  MISC_FEATURE (46): Xaa equals any of the naturally occurring L-amino acids
  MISC_FEATURE (49): Xaa equals any of the naturally occurring L-amino acids
  MISC_FEATURE (51): Xaa equals any of the naturally occurring L-amino acids
  MISC_FEATURE (54): Xaa equals any of the naturally occurring L-amino acids
AKGELQLXMLEIVHPXXVEKHYREMEEKLALIIQKHWKGSGKGKIXTNXSXLLX

SEQ ID NO: 6811 - protein, 42 aa, Homo sapiens
KILFVCSVKLSLYVCLLQLSPFVYSEFARERNLHVSLLDPTL

SEQ ID NO: 6812 - protein, 174 aa, Homo sapiens
  MISC_FEATURE (168): Xaa equals any of the naturally occurring L-amino acids
  MISC_FEATURE (172): Xaa equals any of the naturally occurring L-amino acids
SDQDLNRMRSELLVPGSQLILGPHESKIPILLIQQPGKVTGEDRLGWGSGWDVLLPKGWGMAFWIPFIYRGVRVGGLKESAVHSQYKRSPNVPGDFPDCPAGMLFAEEQAKNLLEKYKRRPPAKRPNYVKLGTLAPFCCPWEQLTQDWESRVQAYEEPSVASSPNGKXSDLXKI

SEQ ID NO: 6813 - protein, 122 aa, Homo sapiens
  MISC_FEATURE (105): Xaa equals any of the naturally occurring L-amino acids
  MISC_FEATURE (112): Xaa equals any of the naturally occurring L-amino acids
RQVLVLFIDEASQKMSKQQPTQFINPETPGYVGFANLPNQVHRKSVKKGFEFTLMVVGESGLGKSTLINSLFLTDLYPERVIPGAAEKIERTVQIEASTVEIEEXGVKLRLXSGRYPWLWVT

SEQ ID NO: 6814 - protein, 115 aa, Homo sapiens
  MISC_FEATURE (2): Xaa equals any of the naturally occurring L-amino acids
  MISC_FEATURE (63): Xaa equals any of the naturally occurring L-amino acids
  MISC_FEATURE (100): Xaa equals any of the naturally occurring L-amino acids
  MISC_FEATURE (103): Xaa equals any of the naturally occurring L-amino acids
WXPRAAGIRHEGRSGAVDKRAREAGNINQSLLTLGRVITALVERTPHVPYRESKLTRILQDSXGGRTRTSIIATISPASLNLEETLSTLEYAHRAKNILXKPXVNQKLTKKALIK

SEQ ID NO: 6815 - protein, 19 aa, Homo sapiens
  MISC_FEATURE (12): Xaa equals any of the naturally occurring L-amino acids
VWKRHSRMSYLXVPYVTHS

SEQ ID NO: 6816 - protein, 146 aa, Homo sapiens
  MISC_FEATURE (90): Xaa equals any of the naturally occurring L-amino acids
  MISC_FEATURE (105): Xaa equals any of the naturally occurring L-amino acids
  MISC_FEATURE (114): Xaa equals any of the naturally occurring L-amino acids
  MISC_FEATURE (145): Xaa equals any of the naturally occurring L-amino acids
RTTVTEVSRAFSLLCKMATLKEKLIAPVAEEEATVPNNKITVVGVGQVGMACAISILGKSLADELALVDVLEDKLKGEMMDLHHGSLFLXTPKIVADKDYSVTAXSKIVVVTAXVRQQEGESRLNLVQRNVNVFKFIIPQIVKYXS

SEQ ID NO: 6817 - protein, 175 aa, Homo sapiens
  MISC_FEATURE (2): Xaa equals any of the naturally occurring L-amino acids
  MISC_FEATURE (5): Xaa equals any of the naturally occurring L-amino acids
  MISC_FEATURE (6): Xaa equals any of the naturally occurring L-amino acids
  MISC_FEATURE (30): Xaa equals any of the naturally occurring L-amino acids
  MISC_FEATURE (39): Xaa equals any of the naturally occurring L-amino acids
  MISC_FEATURE (40): Xaa equals any of the naturally occurring L-amino acids
  MISC_FEATURE (42): Xaa equals any of the naturally occurring L-amino acids
  MISC_FEATURE (43): Xaa equals any of the naturally occurring L-amino acids
  MISC_FEATURE (44): Xaa equals any of the naturally occurring L-amino acids
  MISC_FEATURE (46): Xaa equals any of the naturally occurring L-amino acids
  MISC_FEATURE (47): Xaa equals any of the naturally occurring L-amino acids
  MISC_FEATURE (48): Xaa equals any of the naturally occurring L-amino acids
  MISC_FEATURE (49): Xaa equals any of the naturally occurring L-amino acids
  MISC_FEATURE (50): Xaa equals any of the naturally occurring L-amino acids
  MISC_FEATURE (51): Xaa equals any of the naturally occurring L-amino acids
  MISC_FEATURE (52): Xaa equals any of the naturally occurring L-amino acids
  MISC_FEATURE (56): Xaa equals any of the naturally occurring L-amino acids
  MISC_FEATURE (74): Xaa equals any of the naturally occurring L-amino acids
  MISC_FEATURE (114): Xaa equals any of the naturally occurring L-amino acids
  MISC_FEATURE (137): Xaa equals any of the naturally occurring L-amino acids
  MISC_FEATURE (142): Xaa equals any of the naturally occurring L-amino acids
  MISC_FEATURE (143): Xaa equals any of the naturally occurring L-amino acids
  MISC_FEATURE (163): Xaa equals any of the naturally occurring L-amino acids
  MISC_FEATURE (171): Xaa equals any of the naturally occurring L-amino acids
LXPAXXGPEFPGRPTRPTSSSSRAAALEDXRLRTQPCQXXAXXXGXXXXXXXAAVXQRRDWENPGVTQLNRLAXHPPFASWRNSEEARTDRPSQQLRSLNGEWDAPCSGALSAXGVVVTRSVTATLASALAPAPFAXFPSFXXTFAGFPRQALNRGLPLGFRXSALRHLDXKKLD

SEQ ID NO: 6818 - protein, 46 aa, Homo sapiens
  MISC_FEATURE (1): Xaa equals any of the naturally occurring L-amino acids
  MISC_FEATURE (2): Xaa equals any of the naturally occurring L-amino acids
  MISC_FEATURE (12): Xaa equals any of the naturally occurring L-amino acids
XXKSWCSTAVAXALELVDPPGCRNSARECQVIVSQPIIFKTETPSN

SEQ ID NO: 6819 - protein, 91 aa, Homo sapiens
  MISC_FEATURE (3): Xaa equals any of the naturally occurring L-amino acids
  MISC_FEATURE (12): Xaa equals any of the naturally occurring L-amino acids
  MISC_FEATURE (72): Xaa equals any of the naturally occurring L-amino acids
  MISC_FEATURE (85): Xaa equals any of the naturally occurring L-amino acids
LLXMRLPAQLLXLLMLWVSGSSGNIVMTQSPLSLPVTPGEPASISCRSSQTLLHSNGYNYLDWYLQKPGQSXQLLIYLGSNRAFXGSLTGF

SEQ ID NO: 6820 - protein, 137 aa, Homo sapiens
  MISC_FEATURE (1): Xaa equals any of the naturally occurring L-amino acids
  MISC_FEATURE (2): Xaa equals any of the naturally occurring L-amino acids
  MISC_FEATURE (28): Xaa equals any of the naturally occurring L-amino acids
XXICELPLKLVRPAGTGPEFPGRPTRPXLSYNKLKNIPTVNENLENYYLEVNQLEKFDIKSFCKILGPLSYSKIKQKLFMSIASQKPVFHRICMNVYVLLTKSLLINICILEQYFMVMFFCVSVFIVSIFYYCLLLP

SEQ ID NO: 6821 - protein, 142 aa, Homo sapiens
  MISC_FEATURE (68): Xaa equals any of the naturally occurring L-amino acids
  MISC_FEATURE (120): Xaa equals any of the naturally occurring L-amino acids
  MISC_FEATURE (122): Xaa equals any of the naturally occurring L-amino acids
  MISC_FEATURE (123): Xaa equals any of the naturally occurring L-amino acids
  MISC_FEATURE (129): Xaa equals any of the naturally occurring L-amino acids
  MISC_FEATURE (138): Xaa equals any of the naturally occurring L-amino acids
PRVRAVMAPRTLLLLLLGALALTQTWAGSHSMRYFTTSVSRPGRGEPRFIAVGYVDDTQFVRFDSDAXSQRMEPRAPWIEQERPEYWDQETRNVKAHSQIDRVDLGTLRGYYNQSEAGSXTXXMMYGCXVGFGRALPXRVPT

SEQ ID NO: 6822 - protein, 130 aa, Homo sapiens
  MISC_FEATURE (4): Xaa equals any of the naturally occurring L-amino acids
  MISC_FEATURE (127): Xaa equals any of the naturally occurring L-amino acids
EACXDLAKEQGPYETYEGSPVSKGILQYDMWNVTPTDLWDWKVLKEKIAKYGIRNSLLIAPMPTASTAQILGNNESIEPYTSNIYTRRDLSGEFQIVNPHLLKDLTERGLWHEEMKNQIIACNGSIXSIP

SEQ ID NO: 6823 - protein, 61 aa, Homo sapiens
  MISC_FEATURE (5): Xaa equals any of the naturally occurring L-amino acids
  MISC_FEATURE (10): Xaa equals any of the naturally occurring L-amino acids
  MISC_FEATURE (56): Xaa equals any of the naturally occurring L-amino acids
  MISC_FEATURE (57): Xaa equals any of the naturally occurring L-amino acids
  MISC_FEATURE (58): Xaa equals any of the naturally occurring L-amino acids
  MISC_FEATURE (61): Xaa equals any of the naturally occurring L-amino acids
TMQAXDNITXARLLQQEVLQNVSDAESCYLVHTLLEFYLKTVFKNYHNRTVEVRDXXXILX

SEQ ID NO: 6824 - protein, 72 aa, Homo sapiens
  MISC_FEATURE (35): Xaa equals any of the naturally occurring L-amino acids
  MISC_FEATURE (47): Xaa equals any of the naturally occurring L-amino acids
  MISC_FEATURE (59): Xaa equals any of the naturally occurring L-amino acids
  MISC_FEATURE (70): Xaa equals any of the naturally occurring L-amino acids
KTQETTSISVTHFLSFLTGFWKLAICMAKTDLSLXHQPDKKGVPRDXILPISDVRASIXAWGQLPLVGTXHH

SEQ ID NO: 6825 - protein, 209 aa, Homo sapiens
  MISC_FEATURE (7): Xaa equals any of the naturally occurring L-amino acids
  MISC_FEATURE (9): Xaa equals any of the naturally occurring L-amino acids
  MISC_FEATURE (191): Xaa equals any of the naturally occurring L-amino acids
  MISC_FEATURE (193): Xaa equals any of the naturally occurring L-amino acids
  MISC_FEATURE (201): Xaa equals any of the naturally occurring L-amino acids
  MISC_FEATURE (206): Xaa equals any of the naturally occurring L-amino acids
GDQPTAXCXCIQRQVPPVPAARAPQSRTRSAQAKLALTMPVKGGTKCIKYLLFGFNFIFWLAGIAVLAIGLWLRFDSQTKSIFEQETNNNNSSFYTGVYILIGAGALMMLVGFLGCCGAVQESQCMLGLFFGFLLVIFAIEIAAAIWGYSHKDEVIKEVQEFYKDTYNKLKTKDEPQRETLKAIHYALNCXGXGWGAWKQXYLKKXWPQ

SEQ ID NO: 6826 - protein, 123 aa, Homo sapiens
  MISC_FEATURE (3): Xaa equals any of the naturally occurring L-amino acids
  MISC_FEATURE (7): Xaa equals any of the naturally occurring L-amino acids
  MISC_FEATURE (8): Xaa equals any of the naturally occurring L-amino acids
  MISC_FEATURE (10): Xaa equals any of the naturally occurring L-amino acids
  MISC_FEATURE (65): Xaa equals any of the naturally occurring L-amino acids
  MISC_FEATURE (66): Xaa equals any of the naturally occurring L-amino acids
  MISC_FEATURE (68): Xaa equals any of the naturally occurring L-amino acids
  MISC_FEATURE (71): Xaa equals any of the naturally occurring L-amino acids
  MISC_FEATURE (74): Xaa equals any of the naturally occurring L-amino acids
  MISC_FEATURE (80): Xaa equals any of the naturally occurring L-amino acids
  MISC_FEATURE (109): Xaa equals any of the naturally occurring L-amino acids
  MISC_FEATURE (114): Xaa equals any of the naturally occurring L-amino acids
  MISC_FEATURE (117): Xaa equals any of the naturally occurring L-amino acids
VEXNSPXXRXLLQILLSFASGGLLGDAFLHLIPHALEPHSHHTLEQPGHGHSHSGQGPILSVGLXXLXGIXAFXDVEKFXRHVKGGHGHSHGHGHAHSHTRGSHGHGRXERSTXEKXISEEED

SEQ ID NO: 6827 - protein, 137 aa, Homo sapiens
  MISC_FEATURE (1): Xaa equals any of the naturally occurring L-amino acids
XDIEFIYTAPSSAVCGVSLDVGGKKEYLIAGKAEGDGKMHITLCDFIVPWDTLSTTQKKSLNHRYQMGCECKITRCPMIPCYISSPDECLWMDWVTEKNINGHQAKFFACIKRSDGSCAWYRGAAPPKQEFLDIEDP

SEQ ID NO: 6828 - protein, 158 aa, Homo sapiens
  MISC_FEATURE (124): Xaa equals any of the naturally occurring L-amino acids
  MISC_FEATURE (135): Xaa equals any of the naturally occurring L-amino acids
  MISC_FEATURE (147): Xaa equals any of the naturally occurring L-amino acids
PRARPAAPAAAPGPLAAATMDAIKKKMQMLKLDKENALDRAEQAEADKKAAEDRSKQLEDELVSLQKKLKGTEDELDKYSEALKDAQEKLELAEKKATDAEADVASLNRRIQLVEEEVWIVPKXRSGNSFAETWXKLEKAADESERXMKVIEKSSPKR

SEQ ID NO: 6829 - protein, 37 aa, Homo sapiens
CKMFACAKLACTPSLIRAGSIVAYRPISASVFISTRS

SEQ ID NO: 6830 - protein, 183 aa, Homo sapiens
  MISC_FEATURE (148): Xaa equals any of the naturally occurring L-amino acids
  MISC_FEATURE (160): Xaa equals any of the naturally occurring L-amino acids
  MISC_FEATURE (172): Xaa equals any of the naturally occurring L-amino acids
  MISC_FEATURE (178): Xaa equals any of the naturally occurring L-amino acids
  MISC_FEATURE (180): Xaa equals any of the naturally occurring L-amino acids
ENVLKTSGKLRENLLHGALEHYVNCLDLVNKRLPYGLAQIGVCFHPVFDTKQIRNGVKSIGEKTEASLVWFTPPRTSNQWLDFWLRHRLQWWRKFAMSPSNFSSSDCQDEEGRKGNKLYYNFPLGKGVNRNPVEPKRSELLHMYPGNXAKLPWPKWTKKXGSLGSSLEMGTXTRGMLXNXMIL

SEQ ID NO: 6831 - protein, 109 aa, Homo sapiens
  MISC_FEATURE (7): Xaa equals any of the naturally occurring L-amino acids
  MISC_FEATURE (9): Xaa equals any of the naturally occurring L-amino acids
  MISC_FEATURE (12): Xaa equals any of the naturally occurring L-amino acids
  MISC_FEATURE (13): Xaa equals any of the naturally occurring L-amino acids
  MISC_FEATURE (15): Xaa equals any of the naturally occurring L-amino acids
  MISC_FEATURE (17): Xaa equals any of the naturally occurring L-amino acids
  MISC_FEATURE (18): Xaa equals any of the naturally occurring L-amino acids
  MISC_FEATURE (29): Xaa equals any of the naturally occurring L-amino acids
  MISC_FEATURE (31): Xaa equals any of the naturally occurring L-amino acids
  MISC_FEATURE (46): Xaa equals any of the naturally occurring L-amino acids
  MISC_FEATURE (49): Xaa equals any of the naturally occurring L-amino acids
  MISC_FEATURE (54): Xaa equals any of the naturally occurring L-amino acids
  MISC_FEATURE (58): Xaa equals any of the naturally occurring L-amino acids
  MISC_FEATURE (61): Xaa equals any of the naturally occurring L-amino acids
  MISC_FEATURE (69): Xaa equals any of the naturally occurring L-amino acids
  MISC_FEATURE (76): Xaa equals any of the naturally occurring L-amino acids
  MISC_FEATURE (87): Xaa equals any of the naturally occurring L-amino acids
  MISC_FEATURE (97): Xaa equals any of the naturally occurring L-amino acids
  MISC_FEATURE (99): Xaa equals any of the naturally occurring L-amino acids
ELLSSRXLXAKXXGXSXXSHRALQGTIAXNXETDMQVLEKLSGKLXERXLKDFXMIRXMKXKLNPQNSXVMPWDPXYYSGVIRAERXNIEPSLYCPXFXLGACMESLNI

SEQ ID NO: 6832 - protein, 144 aa, Homo sapiens
  MISC_FEATURE (3): Xaa equals any of the naturally occurring L-amino acids
  MISC_FEATURE (5): Xaa equals any of the naturally occurring L-amino acids
  MISC_FEATURE (19): Xaa equals any of the naturally occurring L-amino acids
  MISC_FEATURE (21): Xaa equals any of the naturally occurring L-amino acids
  MISC_FEATURE (107): Xaa equals any of the naturally occurring L-amino acids
  MISC_FEATURE (123): Xaa equals any of the naturally occurring L-amino acids
  MISC_FEATURE (131): Xaa equals any of the naturally occurring L-amino acids
  MISC_FEATURE (132): Xaa equals any of the naturally occurring L-amino acids
  MISC_FEATURE (143): Xaa equals any of the naturally occurring L-amino acids
RTXAXGERACRSTLVDPKXVXTVFSLGACMEGLNILLNRLLGISLYAEQPAKGEVWSEDVRKLAVVHESEGLLGYIYCDFFQRADKPHQDCHFTIRGGRLKGRWETXQLPVVSSYAGIFPVPXREFSNFGXXLGMMGKPFPGXG

SEQ ID NO: 6833 - protein, 100 aa, Homo sapiens
  MISC_FEATURE (2): Xaa equals any of the naturally occurring L-amino acids
  MISC_FEATURE (12): Xaa equals any of the naturally occurring L-amino acids
AXSSLWESKPRXGTEASELLPTLDTKAPTGRRTKPWGRLKRRARSPQGQTAKPQSCCGAEHRGPQALRKGRGDPGARERSPRAISRAGRREPRAVHSCGL

SEQ ID NO: 6834 - protein, 109 aa, Homo sapiens
  MISC_FEATURE (92): Xaa equals any of the naturally occurring L-amino acids
  MISC_FEATURE (95): Xaa equals any of the naturally occurring L-amino acids
  MISC_FEATURE (98): Xaa equals any of the naturally occurring L-amino acids
  MISC_FEATURE (107): Xaa equals any of the naturally occurring L-amino acids
FKRETGVDLTKDNMALQRVREAAEKAKCELSSSVQTDINLPYLTMDSSGPKHLNMKLTRAQFEGIVTDLIRRTIAPCQKAMHDAEVILSDIXEVXPVXGMTRMPMFXRL

SEQ ID NO: 6835 - protein, 48 aa, Homo sapiens
  MISC_FEATURE (4): Xaa equals any of the naturally occurring L-amino acids
AREXTKKLREQGSLLGKLVQNGTEPSSLPFLDPNARPLVPEVSIKVQR

SEQ ID NO: 6836 - protein, 69 aa, Homo sapiens
  MISC_FEATURE (7): Xaa equals any of the naturally occurring L-amino acids
  MISC_FEATURE (12): Xaa equals any of the naturally occurring L-amino acids
  MISC_FEATURE (46): Xaa equals any of the naturally occurring L-amino acids
  MISC_FEATURE (55): Xaa equals any of the naturally occurring L-amino acids
  MISC_FEATURE (61): Xaa equals any of the naturally occurring L-amino acids
  MISC_FEATURE (64): Xaa equals any of the naturally occurring L-amino acids
  MISC_FEATURE (67): Xaa equals any of the naturally occurring L-amino acids
TALNNLXPNYAXEKLQQQFNMHVFKLEQEEYMKEDIPWTLIDFYDXQPVFDLIEXKWESWXFWXKNXCF

SEQ ID NO: 6837 - protein, 96 aa, Homo sapiens
  MISC_FEATURE (85): Xaa equals any of the naturally occurring L-amino acids
  MISC_FEATURE (92): Xaa equals any of the naturally occurring L-amino acids
  MISC_FEATURE (94): Xaa equals any of the naturally occurring L-amino acids
CLSWERRGPSSAPPTVWETVPSPLLGSKHLFPVLMESWCLSPSAAQKLCRLLGLGVTDFSRALLTPRIKVGRDYVQKAQTKEQVXGAGGGQXTXRA

SEQ ID NO: 6838 - protein, 39 aa, Homo sapiens
  MISC_FEATURE (12): Xaa equals any of the naturally occurring L-amino acids
  MISC_FEATURE (16): Xaa equals any of the naturally occurring L-amino acids
  MISC_FEATURE (24): Xaa equals any of the naturally occurring L-amino acids
  MISC_FEATURE (32): Xaa equals any of the naturally occurring L-amino acids
LEDLHDLLASLXNNAXDDYLNAMXSEAPMPIXFAMFLTM

SEQ ID NO: 6839 - protein, 136 aa, Homo sapiens
  MISC_FEATURE (134): Xaa equals any of the naturally occurring L-amino acids
KVLMRNLALPEDVRGKCTSLLQLYDASNSEWQLGKTKVFLRESLEQKLEKRREEEVSHAAMVIRAHVLGFLARKQYRKVLYCVVIIQKNYRAFLLRRRFLHLKKAAIVFQKQLRGQIARRVYRQFAGREKGARXKK

SEQ ID NO: 6840 - protein, 69 aa, Homo sapiens
  MISC_FEATURE (30): Xaa equals any of the naturally occurring L-amino acids
  MISC_FEATURE (46): Xaa equals any of the naturally occurring L-amino acids
NSLAKETLEPLSQAAWLLQVKKTTDSDAKXIYERCTSLSAVQIIKXLNSYTPIDDFEKRVTPSFVRKVQ

SEQ ID NO: 6841 - protein, 179 aa, Homo sapiens
GKRYIKALAEENRNVVDGPYAGVMTAYDLKKTLAVLLDNILQRIGKLESKVDNLVVNGTGTNSTNSTTAVPSLVALEKINVADIINGAQEKCVLPPMDGYPHCEGKIKWMKDMWRSDPCYADYGVDGSTCSFFIYLSEVENWCPHLPWRAKNPYEEADHNSLAEILQIFNILYSMMKKA

SEQ ID NO: 6842 - protein, 61 aa, Homo sapiens
ACRDVRRLSLSVMALKEQTIPPSAKYGGRHTVTMIPGDGIGPELMLHVKSVFRHACVTSGL

SEQ ID NO: 6843 - protein, 33 aa, Homo sapiens
QKLAPISIIYQISPSLNVSLLLTLSILSIIAGS

SEQ ID NO: 6844 - protein, 29 aa, Homo sapiens
TITNTTNQYSSLIIIMAIAIKLGIAPFHF

SEQ ID NO: 6845 - protein, 21 aa, Homo sapiens
  MISC_FEATURE (1): Xaa equals any of the naturally occurring L-amino acids
  MISC_FEATURE (21): Xaa equals any of the naturally occurring L-amino acids
XGLNQTQLRKILAYSSITHIX

SEQ ID NO: 6846 - protein, 29 aa, Homo sapiens
TITNTTNQYSSLIIIMAIAIKLGIAPFHF

SEQ ID NO: 6847 - protein, 56 aa, Homo sapiens
  MISC_FEATURE (10): Xaa equals any of the naturally occurring L-amino acids
  MISC_FEATURE (14): Xaa equals any of the naturally occurring L-amino acids
  MISC_FEATURE (35): Xaa equals any of the naturally occurring L-amino acids
  MISC_FEATURE (43): Xaa equals any of the naturally occurring L-amino acids
  MISC_FEATURE (44): Xaa equals any of the naturally occurring L-amino acids
LTPLIPSTLXSLGXLPPLTGFLPKWAIIEEFTTNXSLIIPTIXXHITSLNSNSNYA

SEQ ID NO: 6848 - protein, 53 aa, Homo sapiens
LPQLNGYIEKSTPYECGFDPISPARVPFSIKFFLVAITFLLFDLEIALLLPLP

SEQ ID NO: 6849 - protein, 50 aa, Homo sapiens
  MISC_FEATURE (2): Xaa equals any of the naturally occurring L-amino acids
  MISC_FEATURE (34): Xaa equals any of the naturally occurring L-amino acids
  MISC_FEATURE (49): Xaa equals any of the naturally occurring L-amino acids
SXTGAVILIIAHGLTSSLLFCLANSNYERTHRRXIILSQGLQTLLPLIXF

SEQ ID NO: 6850 - protein, 16 aa, Homo sapiens
  MISC_FEATURE (6): Xaa equals any of the naturally occurring L-amino acids
IIMAIXIKLGIAPFHF

SEQ ID NO: 6851 - protein, 152 aa, Homo sapiens
  MISC_FEATURE (9): Xaa equals any of the naturally occurring L-amino acids
  MISC_FEATURE (27): Xaa equals any of the naturally occurring L-amino acids
  MISC_FEATURE (51): Xaa equals any of the naturally occurring L-amino acids
  MISC_FEATURE (61): Xaa equals any of the naturally occurring L-amino acids
  MISC_FEATURE (70): Xaa equals any of the naturally occurring L-amino acids
  MISC_FEATURE (75): Xaa equals any of the naturally occurring L-amino acids
  MISC_FEATURE (77): Xaa equals any of the naturally occurring L-amino acids
  MISC_FEATURE (87): Xaa equals any of the naturally occurring L-amino acids
  MISC_FEATURE (88): Xaa equals any of the naturally occurring L-amino acids
  MISC_FEATURE (94): Xaa equals any of the naturally occurring L-amino acids
  MISC_FEATURE (101): Xaa equals any of the naturally occurring L-amino acids
  MISC_FEATURE (117): Xaa equals any of the naturally occurring L-amino acids
  MISC_FEATURE (119): Xaa equals any of the naturally occurring L-amino acids
  MISC_FEATURE (123): Xaa equals any of the naturally occurring L-amino acids
  MISC_FEATURE (127): Xaa equals any of the naturally occurring L-amino acids
  MISC_FEATURE (130): Xaa equals any of the naturally occurring L-amino acids
PLSKVPLQXNFQDNQFQGKWYVVGLAXNAILREDKDPQKMYATIYELKEDXSYNVTSVLFXKKKCDYWIXTFVPXCXPGEFTLGNIXXYPGLTXYLVRVVXTTTTSMLWCSSKKFLXTXNSSXSPLXKNXELDFRNLKEKLPPPPPNSPGPP

SEQ ID NO: 6852 - protein, 116 aa, Homo sapiens
  MISC_FEATURE (60): Xaa equals any of the naturally occurring L-amino acids
  MISC_FEATURE (72): Xaa equals any of the naturally occurring L-amino acids
  MISC_FEATURE (97): Xaa equals any of the naturally occurring L-amino acids
  MISC_FEATURE (98): Xaa equals any of the naturally occurring L-amino acids
  MISC_FEATURE (102): Xaa equals any of the naturally occurring L-amino acids
  MISC_FEATURE (108): Xaa equals any of the naturally occurring L-amino acids
  MISC_FEATURE (113): Xaa equals any of the naturally occurring L-amino acids
WGMSCHGLGRTESNRTLLLPWPHLVQHRRPKPGLSPLSPTHLSLPRKKKCDYWIRTFVPXCQPGEFTLGNIXSYPGLTSYLVRMVSTNYNQHAMVFXXKVSXNREVLXEHLLXENQ

SEQ ID NO: 6853 - protein, 70 aa, Homo sapiens
RTGRWGQEMVLLSTLGIVFQGEGPPISSCDTGTMANCERTFIAIKPDGVQRGLVGEIIKRFEQKGSALLV

SEQ ID NO: 6854 - protein, 138 aa, Homo sapiens
  MISC_FEATURE (122): Xaa equals any of the naturally occurring L-amino acids
  MISC_FEATURE (131): Xaa equals any of the naturally occurring L-amino acids
  MISC_FEATURE (132): Xaa equals any of the naturally occurring L-amino acids
LEALFSDVNMQEYPDLIHIYKGFENVIHDKLPLQESEEEEREERSGLQLSLEQGTGENSFRSLTWPPSGSPSHAGTTPPENGLSEHPCETEQINAKRKDTTSDKDDSLGSQQTNEQCAQKAXPTEVCEPIXXPSEIWG

SEQ ID NO: 6855 - protein, 133 aa, Homo sapiens
  MISC_FEATURE (7): Xaa equals any of the naturally occurring L-amino acids
  MISC_FEATURE (128): Xaa equals any of the naturally occurring L-amino acids
VHLTKGXKAGAPPRCGRSRLVDPPGCRNSARDSVLRGCSLEQRSFISVRLLSYLSACRHPMEDSMDMDMSPLRPQNYLFGCELKADKDYHFKVDNDENEHQLSLRTVSLGAGAKDELHIVEAEAMNYXGSPLK

SEQ ID NO: 6856 - protein, 146 aa, Homo sapiens
  MISC_FEATURE (143): Xaa equals any of the naturally occurring L-amino acids
EKSREHEIDGRSISLYYTGEKGQNQDYRGGKNSTWSGESKTLVLSNLSYSATEETLQEVFEKATFIKVPQNQNGKSKGYAFIEFASFEDAKEALNSCNKREIEGRAIRLELQGPRGSPNARSQPSKTLFVKGLSEDTTEETLXGVI

SEQ ID NO: 6857 - protein, 110 aa, Homo sapiens
  MISC_FEATURE (4): Xaa equals any of the naturally occurring L-amino acids
  MISC_FEATURE (44): Xaa equals any of the naturally occurring L-amino acids
  MISC_FEATURE (74): Xaa equals any of the naturally occurring L-amino acids
  MISC_FEATURE (76): Xaa equals any of the naturally occurring L-amino acids
  MISC_FEATURE (88): Xaa equals any of the naturally occurring L-amino acids
  MISC_FEATURE (96): Xaa equals any of the naturally occurring L-amino acids
  MISC_FEATURE (98): Xaa equals any of the naturally occurring L-amino acids
  MISC_FEATURE (102): Xaa equals any of the naturally occurring L-amino acids
  MISC_FEATURE (103): Xaa equals any of the naturally occurring L-amino acids
SGSXFWKALTFMAVGGGLAVAGLPALGFTGAGIAANSVAASLMXWSAILNGGGVPAGGLVATLQSLGAGGSKVXIXNIGALMGYATHXYLDSEEDXEXPAAXXTSSSFLA

SEQ ID NO: 6858 - protein, 87 aa, Homo sapiens
  MISC_FEATURE (28): Xaa equals any of the naturally occurring L-amino acids
  MISC_FEATURE (59): Xaa equals any of the naturally occurring L-amino acids
  MISC_FEATURE (70): Xaa equals any of the naturally occurring L-amino acids
  MISC_FEATURE (80): Xaa equals any of the naturally occurring L-amino acids
HLCAESDSVLRVTRRGEQADHFTQTPLXPGSQVLVRVDWERRFDHMQQHSGQHLITAVXDHLFKLKTTSXELGRFRSAIXLDTPSMT

SEQ ID NO: 6859 - protein, 122 aa, Homo sapiens
  MISC_FEATURE (73): Xaa equals any of the naturally occurring L-amino acids
  MISC_FEATURE (91): Xaa equals any of the naturally occurring L-amino acids
NPALELKRATWLNAEKNGQRPKTQLLPQKTTCQKIPRNNRLMYIHSYQSYVWNNMVSKRIEDYGLNLFQGTSXSKDPSPYIEEDDVIITLXMMWECLAWFRWYLPQALKFKKPTGKCSQLTI

SEQ ID NO: 6860 - protein, 81 aa, Homo sapiens
CTICTATSRVGVIGIGGLGHIAIKLLHAMGCEVTAFSSNPAKEQEVLAMGADKVVNSRDPQALKALAGQFDLIINTVNVSL

SEQ ID NO: 6861 - protein, 48 aa, Homo sapiens
  MISC_FEATURE (2): Xaa equals any of the naturally occurring L-amino acids
  MISC_FEATURE (3): Xaa equals any of the naturally occurring L-amino acids
AXXTENCKILMTKIKEDINKWRNIPCSWIGRLTLLNCHFSPDGSTEST

SEQ ID NO: 6862 - protein, 64 aa, Homo sapiens
  MISC_FEATURE (52): Xaa equals any of the naturally occurring L-amino acids
  MISC_FEATURE (62): Xaa equals any of the naturally occurring L-amino acids
  MISC_FEATURE (64): Xaa equals any of the naturally occurring L-amino acids
AAAAARRDAAEVFLVSDPSGRMVKSSLQRILNSHCFAREKEGDKPSATIHAXRTMPLLSLHXPX

SEQ ID NO: 6863 - protein, 106 aa, Homo sapiens
KQSPELVKKHKKKRVVPKKPPPSPQPTGKIEIKIVRPWAEGTEEGARWLTDEDTRNLKEIFFNILVPGAEEAQKERQRQKELESNYRRVWGSPGGEGTGDLDEFDF

SEQ ID NO: 6864 - protein, 44 aa, Homo sapiens
NRLFRKSCTSLKFLTFTCFFQSYLYQILQGIVFCHSRRVLHRDL

SEQ ID NO: 6865 - protein, 82 aa, Homo sapiens
  MISC_FEATURE (49): Xaa equals any of the naturally occurring L-amino acids
ARAEFGTSGTSKGSCFHRIIPGFMCQGGDFTRHNGTGGKSIYGEKFEDXNFILKHTGPGILSMANAGPNTNGSQFFICTAQD

SEQ ID NO: 6866 - protein, 32 aa, Homo sapiens
  MISC_FEATURE (17): Xaa equals any of the naturally occurring L-amino acids
  MISC_FEATURE (22): Xaa equals any of the naturally occurring L-amino acids
  MISC_FEATURE (23): Xaa equals any of the naturally occurring L-amino acids
  MISC_FEATURE (25): Xaa equals any of the naturally occurring L-amino acids
VNSLPGSPDLVDYTLSXPARAXXTXRTRGGTH

SEQ ID NO: 6867 - protein, 69 aa, Homo sapiens
  MISC_FEATURE (4): Xaa equals any of the naturally occurring L-amino acids
  MISC_FEATURE (34): Xaa equals any of the naturally occurring L-amino acids
  MISC_FEATURE (49): Xaa equals any of the naturally occurring L-amino acids
IGGXIPAGPQCTLVSRAPQTLKMDELLAEMQQTXESNFLQAPQRAPGVXDLALSENWAQSDLQLEMLWM

SEQ ID NO: 6868 - protein, 127 aa, Homo sapiens
  MISC_FEATURE (104): Xaa equals any of the naturally occurring L-amino acids
  MISC_FEATURE (105): Xaa equals any of the naturally occurring L-amino acids
  MISC_FEATURE (111): Xaa equals any of the naturally occurring L-amino acids
LWRVWGAEPRAPVGPLLWRWAQPGAASFEGRRDLFKGVETGRKRPRLGFQGAGNVNRRLACPLTVAPSSPRKMFSSVAHLARANPFNTPHLQLVHDGLGDLRSXXPGPTGXPRRLATCSRRRGRVQL

SEQ ID NO: 6869 - protein, 113 aa, Homo sapiens
  MISC_FEATURE (4): Xaa equals any of the naturally occurring L-amino acids
  MISC_FEATURE (41): Xaa equals any of the naturally occurring L-amino acids
  MISC_FEATURE (72): Xaa equals any of the naturally occurring L-amino acids
  MISC_FEATURE (88): Xaa equals any of the naturally occurring L-amino acids
  MISC_FEATURE (91): Xaa equals any of the naturally occurring L-amino acids
  MISC_FEATURE (101): Xaa equals any of the naturally occurring L-amino acids
  MISC_FEATURE (105): Xaa equals any of the naturally occurring L-amino acids
  MISC_FEATURE (113): Xaa equals any of the naturally occurring L-amino acids
IRHXVKRGLVLRNEKCNENYTTDFIFNLYSEEGKGIFDSRXNVLGHMQQGGSPTPFDRNFATKMGAKAMNWXSGKIKKNYRNGRIFAXTPXPALFLGYLKXLVFXQWLTERQX

SEQ ID NO: 6870 - protein, 70 aa, Homo sapiens
MERGKIQVSTDFAMQNVLLQMGLHVLAVNGMLIREARSYILRCHGCFKTTSDMSRVFCSHCGNKTLKKCP

SEQ ID NO: 6871 - protein, 89 aa, Homo sapiens
  MISC_FEATURE (71): Xaa equals any of the naturally occurring L-amino acids
VAPTGPMAAPGAPAEYGYIRTVLGQQILGQLDSSSLALPSEAKLKLAGSSGRGGQTVKSLRIQEQVQQTLXRKAAAPWATEIFTEPAVF

SEQ ID NO: 6872 - protein, 90 aa, Homo sapiens
  MISC_FEATURE (2): Xaa equals any of the naturally occurring L-amino acids
  MISC_FEATURE (20): Xaa equals any of the naturally occurring L-amino acids
  MISC_FEATURE (27): Xaa equals any of the naturally occurring L-amino acids
  MISC_FEATURE (31): Xaa equals any of the naturally occurring L-amino acids
  MISC_FEATURE (36): Xaa equals any of the naturally occurring L-amino acids
  MISC_FEATURE (42): Xaa equals any of the naturally occurring L-amino acids
  MISC_FEATURE (49): Xaa equals any of the naturally occurring L-amino acids
  MISC_FEATURE (54): Xaa equals any of the naturally occurring L-amino acids
  MISC_FEATURE (69): Xaa equals any of the naturally occurring L-amino acids
  MISC_FEATURE (74): Xaa equals any of the naturally occurring L-amino acids
  MISC_FEATURE (88): Xaa equals any of the naturally occurring L-amino acids
SXRFGTRRGSSHLSQWLNNXFALPFSXMASXLDMSXVVGAGXKHTPDSXNKCSXWGLCHKLHRSLSSPXASGKXLQLHSHHPVPQKRXPI

SEQ ID NO: 6873 - protein, 138 aa, Homo sapiens
SDSDKEWIAALRRKYRSREQTLSSSGESWETLPGKEEREPPQAKVSASTGTSPGPGASASAGAGAGANAGSNGSNYLEEVREPSLQEEQASLEEGEIPWLQYHENDSSSEGDNDSGHELMQPGVFMLDGNTTLKMTSV

SEQ ID NO: 6874 - protein, 159 aa, Homo sapiens
  MISC_FEATURE (3): Xaa equals any of the naturally occurring L-amino acids
  MISC_FEATURE (145): Xaa equals any of the naturally occurring L-amino acids
  MISC_FEATURE (150): Xaa equals any of the naturally occurring L-amino acids
  MISC_FEATURE (154): Xaa equals any of the naturally occurring L-amino acids
VFXQFNGKRCTDAVGDRRQCVPTEPCEDAEDDCGNDFQCSTGRCIKMRLRCNGDNDCGDFSDEDDCESEPRPPCRDRVVEESELALTAGYGINILGMDPLSTPFDNEFYNGLCNRDRDGNTLTYYRRPWNVASLIYETKGEKNFXTEHSXNKLXHLKVS

SEQ ID NO: 6875 - protein, 86 aa, Homo sapiens
KNSSEGNKHHKSTPLLIHCRDGSQQTGIFCALLNLLESAETEEVVDIFQVVKALRKARPGMVSTFEQYQFLYDRHCQHLPCSEWTR

SEQ ID NO: 6876 - protein, 53 aa, Homo sapiens
IRVNAVNPTVVMTSMGQATWSDPHKAKTMLNRIPLGKFAEVEHVVNGILFLLS

SEQ ID NO: 6877 - protein, 34 aa, Homo sapiens
  MISC_FEATURE (3): Xaa equals any of the naturally occurring L-amino acids
  MISC_FEATURE (16): Xaa equals any of the naturally occurring L-amino acids
TMXFFKILRGQDHCGXESEVVAGIPRTDQYWEKI

SEQ ID NO: 6878 - protein, 78 aa, Homo sapiens
  MISC_FEATURE (3): Xaa equals any of the naturally occurring L-amino acids
  MISC_FEATURE (8): Xaa equals any of the naturally occurring L-amino acids
  MISC_FEATURE (29): Xaa equals any of the naturally occurring L-amino acids
  MISC_FEATURE (35): Xaa equals any of the naturally occurring L-amino acids
  MISC_FEATURE (46): Xaa equals any of the naturally occurring L-amino acids
  MISC_FEATURE (51): Xaa equals any of the naturally occurring L-amino acids
  MISC_FEATURE (54): Xaa equals any of the naturally occurring L-amino acids
  MISC_FEATURE (56): Xaa equals any of the naturally occurring L-amino acids
  MISC_FEATURE (57): Xaa equals any of the naturally occurring L-amino acids
  MISC_FEATURE (58): Xaa equals any of the naturally occurring L-amino acids
HIXAPAAXPKATPITTPWPGGNAYIDNLXADGDLXERGIVATRTRXPSGRXPRXTXXXLTQAEVVSWLAKTGKFYFNG

SEQ ID NO: 6879 - protein, 86 aa, Homo sapiens
KRGHYGVQRTELLPGDRDNLAIQTRGGPEKHEVTGWVLVSPLSKEDAGEYECHASNSQGQASASAKITVVDALHEIPVKKGEGAEL

SEQ ID NO: 6880 - protein, 159 aa, Homo sapiens
  MISC_FEATURE (118): Xaa equals any of the naturally occurring L-amino acids
  MISC_FEATURE (120): Xaa equals any of the naturally occurring L-amino acids
  MISC_FEATURE (124): Xaa equals any of the naturally occurring L-amino acids
  MISC_FEATURE (144): Xaa equals any of the naturally occurring L-amino acids
  MISC_FEATURE (150): Xaa equals any of the naturally occurring L-amino acids
  MISC_FEATURE (154): Xaa equals any of the naturally occurring L-amino acids
DREQKSYRGHSKQQHHVTTKDLHLKLNTECSISTDSKGFPKNITNNRGKKRYPDSKDLTMVLKTYDTSFLDFLQKVFGMGNLSLSHGPRDQALQAWLGIPSVFGNLQATAQAPDPGGXSXFLFXPLGDKGRDKVSRVVIHSEQXRQMEIXPKGXPGETK

SEQ ID NO: 6881 - protein, 103 aa, Homo sapiens
  MISC_FEATURE (2): Xaa equals any of the naturally occurring L-amino acids
  MISC_FEATURE (97): Xaa equals any of the naturally occurring L-amino acids
GXWGISPRGAGYTFGQDISETFNHANGLTLVSRAHQLVMEGYNWCHDRNVVTIFSAPNYCYRCGNQAAIMELDDTLKYSFLQFDPAPRRGEPHVTRXTPDYFL

SEQ ID NO: 6882 - protein, 64 aa, Homo sapiens
YIAACLLLYLSDTISPEQAIDSLRDLRGSGAIQTIKQYNYLHEFRDKLAAHLSSRDSQSRSVSR

SEQ ID NO: 6883 - protein, 90 aa, Homo sapiens
  MISC_FEATURE (46): Xaa equals any of the naturally occurring L-amino acids
  MISC_FEATURE (67): Xaa equals any of the naturally occurring L-amino acids
  MISC_FEATURE (82): Xaa equals any of the naturally occurring L-amino acids
  MISC_FEATURE (84): Xaa equals any of the naturally occurring L-amino acids
  MISC_FEATURE (89): Xaa equals any of the naturally occurring L-amino acids
ITHQIRVLRLTWVLVWNVLLVQWERVLKVFHYFESNSEPTTWASIXRHGDATDVRGIIQKIVDSHKXKHCGLLWIPASVPCXQXEGSLXS

SEQ ID NO: 6884 - protein, 76 aa, Homo sapiens
  MISC_FEATURE (51): Xaa equals any of the naturally occurring L-amino acids
RSFQEYMAQMEKKLEEERENLLREHERLLKHKLKVQEEMLKEEFQKKSEQXNKEINQLKEKIESTKNEQVKALKDP

SEQ ID NO: 6885 - protein, 53 aa, Homo sapiens
PRVRLGFFEGSVLFPEPLTWMDKLVVEYANAICQWERNKLQCSDTEQVEADLE

SEQ ID NO: 6886 - protein, 84 aa, Homo sapiens
  MISC_FEATURE (6): Xaa equals any of the naturally occurring L-amino acids
  MISC_FEATURE (40): Xaa equals any of the naturally occurring L-amino acids
GPAQAXFKFPGRQKIHISKKWGFTKFNADEFEDMVAEKRXASQMAVGSSTSPVVGPLGQVAGPALHGGLSNVLAPLLNTSPIKF

SEQ ID NO: 6887 - protein, 58 aa, Homo sapiens
  MISC_FEATURE (2): Xaa equals any of the naturally occurring L-amino acids
  MISC_FEATURE (45): Xaa equals any of the naturally occurring L-amino acids
  MISC_FEATURE (46): Xaa equals any of the naturally occurring L-amino acids
IXSELYVRPDDVHVNIRLVELYRSTKRLKDAVAHCHEARRNIALXXKFRVEFVCCTDP

SEQ ID NO: 6888 - protein, 83 aa, Homo sapiens
  MISC_FEATURE (74): Xaa equals any of the naturally occurring L-amino acids
  MISC_FEATURE (77): Xaa equals any of the naturally occurring L-amino acids
TGVDSGGAARRDMRLSWFRVLTVLSICLSAVATATGAEGKRKLQIGVKKRVDHCPIKSRKGDVLHMHYTGKLEXGTXFDSSLP

SEQ ID NO: 6889 - protein, 102 aa, Homo sapiens
  MISC_FEATURE (13): Xaa equals any of the naturally occurring L-amino acids
  MISC_FEATURE (19): Xaa equals any of the naturally occurring L-amino acids
  MISC_FEATURE (24): Xaa equals any of the naturally occurring L-amino acids
  MISC_FEATURE (32): Xaa equals any of the naturally occurring L-amino acids
  MISC_FEATURE (38): Xaa equals any of the naturally occurring L-amino acids
  MISC_FEATURE (45): Xaa equals any of the naturally occurring L-amino acids
  MISC_FEATURE (46): Xaa equals any of the naturally occurring L-amino acids
  MISC_FEATURE (49): Xaa equals any of the naturally occurring L-amino acids
  MISC_FEATURE (56): Xaa equals any of the naturally occurring L-amino acids
  MISC_FEATURE (59): Xaa equals any of the naturally occurring L-amino acids
  MISC_FEATURE (62): Xaa equals any of the naturally occurring L-amino acids
  MISC_FEATURE (63): Xaa equals any of the naturally occurring L-amino acids
  MISC_FEATURE (65): Xaa equals any of the naturally occurring L-amino acids
  MISC_FEATURE (73): Xaa equals any of the naturally occurring L-amino acids
  MISC_FEATURE (96): Xaa equals any of the naturally occurring L-amino acids
GRDPVRAPAPSNXGGPEPXWRSPXPLSASLHXTSPHPXGLWTTTXXRAXAGRGGAXGPXGPXXGXKICQFKLXLLGESSVGKSSLVLRFFKGQFYXYHESTI

SEQ ID NO: 6890 - protein, 69 aa, Homo sapiens
  MISC_FEATURE (45): Xaa equals any of the naturally occurring L-amino acids
  MISC_FEATURE (49): Xaa equals any of the naturally occurring L-amino acids
ALEMLLAAWGKSSLTIQFVEGQFVDSYDPTIENTFTKLITVKWTXLSCXTCRHSRAKMNILSFPSGHTP

SEQ ID NO: 6891 - protein, 43 aa, Homo sapiens
  MISC_FEATURE (8): Xaa equals any of the naturally occurring L-amino acids
  MISC_FEATURE (10): Xaa equals any of the naturally occurring L-amino acids
  MISC_FEATURE (20): Xaa equals any of the naturally occurring L-amino acids
  MISC_FEATURE (23): Xaa equals any of the naturally occurring L-amino acids
  MISC_FEATURE (35): Xaa equals any of the naturally occurring L-amino acids
  MISC_FEATURE (38): Xaa equals any of the naturally occurring L-amino acids
  MISC_FEATURE (42): Xaa equals any of the naturally occurring L-amino acids
TLRPTQTXNXYYCARHTNQXHPXYRMKRWIDPWGXGTXVTDXS

SEQ ID NO: 6892 - protein, 61 aa, Homo sapiens
  MISC_FEATURE (42): Xaa equals any of the naturally occurring L-amino acids
  MISC_FEATURE (49): Xaa equals any of the naturally occurring L-amino acids
RRIKDFLLTARRKDAKSVKIKKNKDNVKFKVRCSRYLYTLVXTDKEKAXKLKQSLPPRFAQ

SEQ ID NO: 6893 - protein, 103 aa, Homo sapiens
  MISC_FEATURE (20): Xaa equals any of the naturally occurring L-amino acids
  MISC_FEATURE (29): Xaa equals any of the naturally occurring L-amino acids
  MISC_FEATURE (38): Xaa equals any of the naturally occurring L-amino acids
  MISC_FEATURE (46): Xaa equals any of the naturally occurring L-amino acids
  MISC_FEATURE (48): Xaa equals any of the naturally occurring L-amino acids
  MISC_FEATURE (83): Xaa equals any of the naturally occurring L-amino acids
  MISC_FEATURE (91): Xaa equals any of the naturally occurring L-amino acids
  MISC_FEATURE (93): Xaa equals any of the naturally occurring L-amino acids
  MISC_FEATURE (94): Xaa equals any of the naturally occurring L-amino acids
  MISC_FEATURE (100): Xaa equals any of the naturally occurring L-amino acids
QDQGEKENPMRELRIRKLCXNICVGESGXRLTRAAKVXEQLTGQTXVXSKARYTVRSFGIRRNEKIAVHCTVLGAKAEEILEXGLKVREYXLXXNNFSDXGNF

SEQ ID NO: 6894 - protein, 102 aa, Homo sapiens
  MISC_FEATURE (23): Xaa equals any of the naturally occurring L-amino acids
  MISC_FEATURE (52): Xaa equals any of the naturally occurring L-amino acids
  MISC_FEATURE (66): Xaa equals any of the naturally occurring L-amino acids
  MISC_FEATURE (69): Xaa equals any of the naturally occurring L-amino acids
  MISC_FEATURE (72): Xaa equals any of the naturally occurring L-amino acids
  MISC_FEATURE (73): Xaa equals any of the naturally occurring L-amino acids
  MISC_FEATURE (84): Xaa equals any of the naturally occurring L-amino acids
  MISC_FEATURE (100): Xaa equals any of the naturally occurring L-amino acids
FAKMTNTKGKRRGTRYMFSRPFXKHGVVPLATYMRIYKKGDIVHIKGMGTVXKGMPHKCYHGITGXVYXVTXXAVGIVVNKQVXGKILAKRINVRIEHIXHS

SEQ ID NO: 6895 - protein, 155 aa, Homo sapiens
  MISC_FEATURE (1): Xaa equals any of the naturally occurring L-amino acids
XPKAKKEAPAPPKAEAKAKALKAKKAVLKGVHSHKKKKIRTSPTFRRPKTLRLRRQPKYPRKSAPRRNKLDHYAIIKFPLTTESAMKKIEDNNTLVFIVDVKANKHQIKQAVKKLYDIDVAKVNTLIRPDGEKKAYVRLAPDYDALDVANKIGII

SEQ ID NO: 6896 - protein, 37 aa, Homo sapiens
  MISC_FEATURE (4): Xaa equals any of the naturally occurring L-amino acids
  MISC_FEATURE (18): Xaa equals any of the naturally occurring L-amino acids
  MISC_FEATURE (23): Xaa equals any of the naturally occurring L-amino acids
  MISC_FEATURE (24): Xaa equals any of the naturally occurring L-amino acids
  MISC_FEATURE (30): Xaa equals any of the naturally occurring L-amino acids
NLGXWCLSWLGRYSGRKXVIVKXXDDGTSXRPYSHAL

SEQ ID NO: 6897 - protein, 143 aa, Homo sapiens
  MISC_FEATURE (10): Xaa equals any of the naturally occurring L-amino acids
  MISC_FEATURE (136): Xaa equals any of the naturally occurring L-amino acids
  MISC_FEATURE (138): Xaa equals any of the naturally occurring L-amino acids
  MISC_FEATURE (140): Xaa equals any of the naturally occurring L-amino acids
MITPFLIRLXIGKAGTPAGTGPEFPGRPTRPVAAAEGAAAMSAHLQWMVVRNCSSFLIKRNKQTYSTEPNNLKARNSFRYNGLIHRKTVGWSRQPTQSSGGSLTESGTEPATPMCDTSTDVRPSHSTYPKHTPLPXHXAXSPQ

SEQ ID NO: 6898 - protein, 46 aa, Homo sapiens
  MISC_FEATURE (7): Xaa equals any of the naturally occurring L-amino acids
  MISC_FEATURE (9): Xaa equals any of the naturally occurring L-amino acids
  MISC_FEATURE (10): Xaa equals any of the naturally occurring L-amino acids
  MISC_FEATURE (11): Xaa equals any of the naturally occurring L-amino acids
  MISC_FEATURE (13): Xaa equals any of the naturally occurring L-amino acids
  MISC_FEATURE (15): Xaa equals any of the naturally occurring L-amino acids
  MISC_FEATURE (25): Xaa equals any of the naturally occurring L-amino acids
  MISC_FEATURE (34): Xaa equals any of the naturally occurring L-amino acids
  MISC_FEATURE (39): Xaa equals any of the naturally occurring L-amino acids
  MISC_FEATURE (46): Xaa equals any of the naturally occurring L-amino acids
HERKEGXRXXXRXFXHQRMITREYXINIHNRIHXVGFKXRAPRALX

SEQ ID NO: 6899 - protein, 159 aa, Homo sapiens
  MISC_FEATURE (1): Xaa equals any of the naturally occurring L-amino acids
  MISC_FEATURE (2): Xaa equals any of the naturally occurring L-amino acids
  MISC_FEATURE (4): Xaa equals any of the naturally occurring L-amino acids
XXTXTLTKGNKSWSSTAVAAALELVDPPGCRNSARGCLQALRMVQRLTYRRRLSYNTASNKTRLSRTPGNRIVYLYTKKVGKAPKSACGVCPGRLRGVRAVRPKVLMRLSKTKKHVSRAYGGSMCAKCVRDRIKRAFLIEEQKIVVKVLKAQAQSQKAK

SEQ ID NO: 6900 - protein, 65 aa, Homo sapiens
  MISC_FEATURE (7): Xaa equals any of the naturally occurring L-amino acids
  MISC_FEATURE (47): Xaa equals any of the naturally occurring L-amino acids
CTATLGXFAKATFDAISKTYSYLTPDLWKETVFTKSPYQEFTDHLVXTHTRVSVQRTQAPAVATT

SEQ ID NO: 6901 - protein, 120 aa, Homo sapiens
  MISC_FEATURE (2): Xaa equals any of the naturally occurring L-amino acids
VXASKMTKKRRNNGRAKKGRGHVQPIRCTNCARCVPKDKAIKKFVIRNIVEAAAVRDISEASVFDAYVLPKLYVKLHYCVSCAIHSKVVRNRSREARKDRTPPPRFRPAGAAPRPPPKPM

SEQ ID NO: 6902 - protein, 80 aa, Homo sapiens
  MISC_FEATURE (6): Xaa equals any of the naturally occurring L-amino acids
  MISC_FEATURE (12): Xaa equals any of the naturally occurring L-amino acids
  MISC_FEATURE (17): Xaa equals any of the naturally occurring L-amino acids
  MISC_FEATURE (56): Xaa equals any of the naturally occurring L-amino acids
GHHQLXWNHPRXYGHGXRSCRVCSNRHGLIRKYGLNMCRQCFRQYAKDIGFIKLDXMLFLHRIIRGIYSMKNHDNSLYIK

SEQ ID NO: 6903 - protein, 85 aa, Homo sapiens
  MISC_FEATURE (62): Xaa equals any of the naturally occurring L-amino acids
ASEAFSCFKMKLNISFPATGCQKLIEVDDERKLRTFYEKRMATEVAADALGEEWKGYVVRIXGGNDKQGFPMKQGVLTHGRVRCY

SEQ ID NO: 6904 - protein, 98 aa, Homo sapiens
  MISC_FEATURE (46): Xaa equals any of the naturally occurring L-amino acids
FGRGHRTQKEIEQEAAVELSQLRDPQHDLDRVKKPEWVILIGVCTXSWAVYPLANAGRILVVITALAMGHTYDASGQDPDWVLLLFNLEVPHGIEFHQ

SEQ ID NO: 6905 - protein, 40 aa, Homo sapiens
SSGLSSASLSVKAIKEAIDYLTVEGHIYPTVDREHFKSAD

SEQ ID NO: 6906 - protein, 104 aa, Homo sapiens
  MISC_FEATURE (39): Xaa equals any of the naturally occurring L-amino acids
AQASRSRWELPPGAVTMTGELEVKNMDMKPGSTLKITGXIADGTDGFVINLGQGTDKLNLHFNPRFSESTIVCNSLDGSNWGQEQREDHLCFSPRSEVKFTVTF

SEQ ID NO: 6907 - protein, 91 aa, Homo sapiens
  MISC_FEATURE (86): Xaa equals any of the naturally occurring L-amino acids
RQFMGMIIDVFSRYSGSEGSTQTLTKGELKVLMEKELPGFLQSGKDKDAVDKLLKDLDANGDAQVDFSEFIVFVAAITSACHKYFXKAGLK

SEQ ID NO: 6908 - protein, 158 aa, Homo sapiens
  MISC_FEATURE (27): Xaa equals any of the naturally occurring L-amino acids
  MISC_FEATURE (90): Xaa equals any of the naturally occurring L-amino acids
  MISC_FEATURE (91): Xaa equals any of the naturally occurring L-amino acids
  MISC_FEATURE (94): Xaa equals any of the naturally occurring L-amino acids
  MISC_FEATURE (99): Xaa equals any of the naturally occurring L-amino acids
  MISC_FEATURE (101): Xaa equals any of the naturally occurring L-amino acids
  MISC_FEATURE (104): Xaa equals any of the naturally occurring L-amino acids
  MISC_FEATURE (116): Xaa equals any of the naturally occurring L-amino acids
  MISC_FEATURE (119): Xaa equals any of the naturally occurring L-amino acids
  MISC_FEATURE (127): Xaa equals any of the naturally occurring L-amino acids
  MISC_FEATURE (134): Xaa equals any of the naturally occurring L-amino acids
  MISC_FEATURE (138): Xaa equals any of the naturally occurring L-amino acids
  MISC_FEATURE (143): Xaa equals any of the naturally occurring L-amino acids
  MISC_FEATURE (145): Xaa equals any of the naturally occurring L-amino acids
  MISC_FEATURE (146): Xaa equals any of the naturally occurring L-amino acids
  MISC_FEATURE (147): Xaa equals any of the naturally occurring L-amino acids
GTSGNFKGMKIKPGSMGKPSPAFDVKXVDVNGNVLPPGQEGDIGIQVLPNRPFGLFTHYVDNPSKTASTLRGNSISLGTEDIWIKMGISXXFAXADVGXYXLVXDLAPLGGKSPIXTPXFRVPFFKXPTPSRGXVKVXGFKTXFXXXFRAPFKGFRGF

SEQ ID NO: 6909 - protein, 109 aa, Homo sapiens
  MISC_FEATURE (4): Xaa equals any of the naturally occurring L-amino acids
  MISC_FEATURE (11): Xaa equals any of the naturally occurring L-amino acids
  MISC_FEATURE (67): Xaa equals any of the naturally occurring L-amino acids
  MISC_FEATURE (69): Xaa equals any of the naturally occurring L-amino acids
  MISC_FEATURE (83): Xaa equals any of the naturally occurring L-amino acids
  MISC_FEATURE (85): Xaa equals any of the naturally occurring L-amino acids
  MISC_FEATURE (86): Xaa equals any of the naturally occurring L-amino acids
  MISC_FEATURE (96): Xaa equals any of the naturally occurring L-amino acids
  MISC_FEATURE (98): Xaa equals any of the naturally occurring L-amino acids
  MISC_FEATURE (102): Xaa equals any of the naturally occurring L-amino acids
  MISC_FEATURE (104): Xaa equals any of the naturally occurring L-amino acids
VKFXVAEGKQXEIQHKGQAEKKELQHKIDEMEEKEQELQAKIEALQADNDFTNERLTALQEKLTVEXHXTKAVEETKLSKENXTXXKESDFSDTLXPXKENXKXRAVAL

SEQ ID NO: 6910 - protein, 92 aa, Homo sapiens
  MISC_FEATURE (3): Xaa equals any of the naturally occurring L-amino acids
  MISC_FEATURE (4): Xaa equals any of the naturally occurring L-amino acids
  MISC_FEATURE (19): Xaa equals any of the naturally occurring L-amino acids
  MISC_FEATURE (33): Xaa equals any of the naturally occurring L-amino acids
  MISC_FEATURE (34): Xaa equals any of the naturally occurring L-amino acids
  MISC_FEATURE (78): Xaa equals any of the naturally occurring L-amino acids
YFXXWSACRYRSGIPGSIXRVLEMTPQQGDVYXXQVEHTSLDSPVTVEWKAQSDSARSKTLTGAGGFVLGLIICGVGXFMHRRNKKVQRGSA

SEQ ID NO: 6911 - protein, 31 aa, Homo sapiens
  MISC_FEATURE (3): Xaa equals any of the naturally occurring L-amino acids
  MISC_FEATURE (17): Xaa equals any of the naturally occurring L-amino acids
IRXRNRGCCFDSRIPGXPWCFKPLQEAECTF

SEQ ID NO: 6912 - protein, 55 aa, Homo sapiens
GTATQGLSPVHTPGDGRLHKAVSVGPRVHIIEELQIFSSGQPVAESAPGTPTGGL

SEQ ID NO: 6913 - protein, 134 aa, Homo sapiens
  MISC_FEATURE (20): Xaa equals any of the naturally occurring L-amino acids
  MISC_FEATURE (35): Xaa equals any of the naturally occurring L-amino acids
  MISC_FEATURE (111): Xaa equals any of the naturally occurring L-amino acids
  MISC_FEATURE (117): Xaa equals any of the naturally occurring L-amino acids
  MISC_FEATURE (121): Xaa equals any of the naturally occurring L-amino acids
  MISC_FEATURE (127): Xaa equals any of the naturally occurring L-amino acids
  MISC_FEATURE (130): Xaa equals any of the naturally occurring L-amino acids
GYQPENPYPAQPTVVPTVYXVHPAQYYPSPVPQYXPRVLTQASNPVVCTQAKSPSGTVCTSKTKKALCITLTWGLPPGNCAGRWPTLEIHGQQMLQLWDRMRILKFCINPXTGVIAXQLPXGEEKNXCSXFQTS

SEQ ID NO: 6914 - protein, 51 aa, Homo sapiens
  MISC_FEATURE (3): Xaa equals any of the naturally occurring L-amino acids
  MISC_FEATURE (6): Xaa equals any of the naturally occurring L-amino acids
  MISC_FEATURE (23): Xaa equals any of the naturally occurring L-amino acids
  MISC_FEATURE (44): Xaa equals any of the naturally occurring L-amino acids
PQXSLXGTPTEETWPGVTRISEXRTYSFPCYLPQPAHQPRRPGXIRMASTS

SEQ ID NO: 6915 - protein, 89 aa, Homo sapiens
HGNVPLHYACFWGQDQVAEDLVANGALVSICNKYGEMPVDKAKAPLRELLRERAEKMGQNLNRIPYKDTFWKGTTRTRPRESPLWEEGL

SEQ ID NO: 6916 - protein, 111 aa, Homo sapiens
  MISC_FEATURE (3): Xaa equals any of the naturally occurring L-amino acids
  MISC_FEATURE (9): Xaa equals any of the naturally occurring L-amino acids
  MISC_FEATURE (10): Xaa equals any of the naturally occurring L-amino acids
  MISC_FEATURE (15): Xaa equals any of the naturally occurring L-amino acids
  MISC_FEATURE (17): Xaa equals any of the naturally occurring L-amino acids
  MISC_FEATURE (19): Xaa equals any of the naturally occurring L-amino acids
  MISC_FEATURE (28): Xaa equals any of the naturally occurring L-amino acids
  MISC_FEATURE (40): Xaa equals any of the naturally occurring L-amino acids
  MISC_FEATURE (41): Xaa equals any of the naturally occurring L-amino acids
  MISC_FEATURE (63): Xaa equals any of the naturally occurring L-amino acids
CSXTIGEKXXQKEPXGXDXSVPENVLSXDDLTADALANLXXPQIKKVRLLIDEAILKCDAEGXKLEAERFENLREIGNLLHPSVPISNDEVGGCAAAGGCLRSLLSLQGRG

SEQ ID NO: 6917 - protein, 38 aa, Homo sapiens
  MISC_FEATURE (5): Xaa equals any of the naturally occurring L-amino acids
  MISC_FEATURE (16): Xaa equals any of the naturally occurring L-amino acids
  MISC_FEATURE (29): Xaa equals any of the naturally occurring L-amino acids
  MISC_FEATURE (35): Xaa equals any of the naturally occurring L-amino acids
CVAGXDEQSTQMAARXEDDKVTEASSNRXAAIKIXTKS

SEQ ID NO: 6918 - protein, 137 aa, Homo sapiens
LQVPVRNSRVDPRVRRSPAKTIAPQNAPRDESRGRSSFYPDGGDQETAKTGKFLKRFTDEESRVFLLDRGNTRDKEASKEKGSEKGRAEGEWEDQEALDYFSDKESGKQKFNDSEGDDTEETEDYRQFRKSSPRRSG

SEQ ID NO: 6919 - protein, 33 aa, Homo sapiens
  MISC_FEATURE (9): Xaa equals any of the naturally occurring L-amino acids
  MISC_FEATURE (10): Xaa equals any of the naturally occurring L-amino acids
  MISC_FEATURE (19): Xaa equals any of the naturally occurring L-amino acids
  MISC_FEATURE (24): Xaa equals any of the naturally occurring L-amino acids
  MISC_FEATURE (33): Xaa equals any of the naturally occurring L-amino acids
PVSGVPRRXXRIAGKRVCXMESGXAGCFSPKIX

SEQ ID NO: 6920 - protein, 112 aa, Homo sapiens
  MISC_FEATURE (1): Xaa equals any of the naturally occurring L-amino acids
  MISC_FEATURE (3): Xaa equals any of the naturally occurring L-amino acids
  MISC_FEATURE (4): Xaa equals any of the naturally occurring L-amino acids
  MISC_FEATURE (13): Xaa equals any of the naturally occurring L-amino acids
  MISC_FEATURE (29): Xaa equals any of the naturally occurring L-amino acids
  MISC_FEATURE (107): Xaa equals any of the naturally occurring L-amino acids
XTXXSCRYLGQEXPGRPTRPMAEYDLTTXIAHFLDRHLVFPLLEFLSVKEIYNEKELLQGKLDLLSDTNMVDFAMDVYKNLYSDDIPHALREKRTTVVAQLKQASGXNQNQL

SEQ ID NO: 6921 - protein, 114 aa, Homo sapiens
  MISC_FEATURE (102): Xaa equals any of the naturally occurring L-amino acids
  MISC_FEATURE (109): Xaa equals any of the naturally occurring L-amino acids
  MISC_FEATURE (111): Xaa equals any of the naturally occurring L-amino acids
  MISC_FEATURE (114): Xaa equals any of the naturally occurring L-amino acids
NYETIEQKKAYEIAGLLGDIGGQMGLFIGASILTVLELFDYAYEVIKHKLCRRGKCQKEAKRSSADKGVALTWTTSKDTTRCENLRGHPAGMTYAWQHSTLXIRAEGLXRXLLX

SEQ ID NO: 6922 - protein, 81 aa, Homo sapiens
  MISC_FEATURE (9): Xaa equals any of the naturally occurring L-amino acids
  MISC_FEATURE (26): Xaa equals any of the naturally occurring L-amino acids
  MISC_FEATURE (48): Xaa equals any of the naturally occurring L-amino acids
  MISC_FEATURE (53): Xaa equals any of the naturally occurring L-amino acids
  MISC_FEATURE (54): Xaa equals any of the naturally occurring L-amino acids
  MISC_FEATURE (69): Xaa equals any of the naturally occurring L-amino acids
  MISC_FEATURE (75): Xaa equals any of the naturally occurring L-amino acids
YYNGAAVIXHERVQKTFPHPIDKWAXADAQSAIEKQKRRNPLLLPVDXIHPSXXELLGYKMRLPCIPIXCGCTTXYLSLIF

SEQ ID NO: 6923 - protein, 50 aa, Homo sapiens
  MISC_FEATURE (1): Xaa equals any of the naturally occurring L-amino acids
  MISC_FEATURE (10): Xaa equals any of the naturally occurring L-amino acids
  MISC_FEATURE (29): Xaa equals any of the naturally occurring L-amino acids
  MISC_FEATURE (47): Xaa equals any of the naturally occurring L-amino acids
  MISC_FEATURE (49): Xaa equals any of the naturally occurring L-amino acids
XSGYYPGGYXGAPGWPAFPRHPLDPLFGXFAAVAGQDGPIDADEFLXCXT

SEQ ID NO: 6924 - protein, 125 aa, Homo sapiens
  MISC_FEATURE (17): Xaa equals any of the naturally occurring L-amino acids
  MISC_FEATURE (75): Xaa equals any of the naturally occurring L-amino acids
  MISC_FEATURE (79): Xaa equals any of the naturally occurring L-amino acids
  MISC_FEATURE (81): Xaa equals any of the naturally occurring L-amino acids
  MISC_FEATURE (87): Xaa equals any of the naturally occurring L-amino acids
  MISC_FEATURE (95): Xaa equals any of the naturally occurring L-amino acids
  MISC_FEATURE (97): Xaa equals any of the naturally occurring L-amino acids
  MISC_FEATURE (111): Xaa equals any of the naturally occurring L-amino acids
  MISC_FEATURE (117): Xaa equals any of the naturally occurring L-amino acids
RGCLGLGCPLHLHVFAXVSAMLPLLRCVPRVLGSSVAGLRAAAPASPFRQLLQPAPRLCTRPFGLLSVRAGSERXPGLXRXRGPCAXGCGCGSLXTXGDKAFVDYLSDEIXEERKIXKHKTLPKM

SEQ ID NO: 6925 - protein, 124 aa, Homo sapiens
  MISC_FEATURE (5): Xaa equals any of the naturally occurring L-amino acids
  MISC_FEATURE (115): Xaa equals any of the naturally occurring L-amino acids
EKLIXPRTKAIIPVDIGGFPADYSEILDLVERKKDIFNPKKGTYQEKLGRILVLADSAHSFGSSYKGKKIGSVADVTSFSFHAIKNLTTAEGGALTWNLPNNFDNEQIYKELMLXALHGKIRMH

SEQ ID NO: 6926 - protein, 123 aa, Homo sapiens
  MISC_FEATURE (83): Xaa equals any of the naturally occurring L-amino acids
  MISC_FEATURE (87): Xaa equals any of the naturally occurring L-amino acids
  MISC_FEATURE (111): Xaa equals any of the naturally occurring L-amino acids
  MISC_FEATURE (112): Xaa equals any of the naturally occurring L-amino acids
  MISC_FEATURE (121): Xaa equals any of the naturally occurring L-amino acids
MFHFSKLDLETLIIFLIWKRQPKKCTSAYPLQPEDVNLRVISEYQKLFPDIPIGYSGHETGIAISVAAVALGAKVLERHITLXKTWXGSDHSDSLEPGELGEAGAVSASCXXVPWAPQAKXLT

SEQ ID NO: 6927 - protein, 54 aa, Homo sapiens
  MISC_FEATURE (50): Xaa equals any of the naturally occurring L-amino acids
  MISC_FEATURE (51): Xaa equals any of the naturally occurring L-amino acids
  MISC_FEATURE (52): Xaa equals any of the naturally occurring L-amino acids
  MISC_FEATURE (53): Xaa equals any of the naturally occurring L-amino acids
  MISC_FEATURE (54): Xaa equals any of the naturally occurring L-amino acids
GSLQSEDFAVYYCQQYSLWYTFGQGTNLEIKRTVAAPSVFIFPPSDKTIXXXXX

SEQ ID NO: 6928 - protein, 102 aa, Homo sapiens
  MISC_FEATURE (22): Xaa equals any of the naturally occurring L-amino acids
  MISC_FEATURE (43): Xaa equals any of the naturally occurring L-amino acids
  MISC_FEATURE (73): Xaa equals any of the naturally occurring L-amino acids
  MISC_FEATURE (80): Xaa equals any of the naturally occurring L-amino acids
  MISC_FEATURE (89): Xaa equals any of the naturally occurring L-amino acids
  MISC_FEATURE (95): Xaa equals any of the naturally occurring L-amino acids
  MISC_FEATURE (101): Xaa equals any of the naturally occurring L-amino acids
SSDIMESGKTASPKSMPKDAQXMAQILKDMGITEYEPRVINQXLEFAFRYVTTILDDAKIYSSHAKKTSVDAXYVRWHPXPPDHLLLSXPKIFLXLQAKSXL

SEQ ID NO: 6929 - protein, 73 aa, Homo sapiens
  MISC_FEATURE (58): Xaa equals any of the naturally occurring L-amino acids
  MISC_FEATURE (62): Xaa equals any of the naturally occurring L-amino acids
  MISC_FEATURE (63): Xaa equals any of the naturally occurring L-amino acids
VMSHRKFSAPRHGSLGFLPRKRSSRHRGKVKSFPKDDPSKPVHLTAFLGYKAGMTHIXREFXXAGSKVNKRVV

SEQ ID NO: 6930 - protein, 117 aa, Homo sapiens
  MISC_FEATURE (7): Xaa equals any of the naturally occurring L-amino acids
  MISC_FEATURE (9): Xaa equals any of the naturally occurring L-amino acids
  MISC_FEATURE (10): Xaa equals any of the naturally occurring L-amino acids
  MISC_FEATURE (109): Xaa equals any of the naturally occurring L-amino acids
  MISC_FEATURE (111): Xaa equals any of the naturally occurring L-amino acids
  MISC_FEATURE (113): Xaa equals any of the naturally occurring L-amino acids
  MISC_FEATURE (114): Xaa equals any of the naturally occurring L-amino acids
  MISC_FEATURE (116): Xaa equals any of the naturally occurring L-amino acids
SLQRPTXNXXLRTIVKAGTPAGTGPEFPGRPTRPWTADEGVFDNFVLKIRDTKKQSEPLEITLLAPERTRDITGLREATEYEIELYGISKGRRSQTVCSLLFIYSICCXYXTXXFXI

SEQ ID NO: 6931 - protein, 131 aa, Homo sapiens
  MISC_FEATURE (1): Xaa equals any of the naturally occurring L-amino acids
  MISC_FEATURE (5): Xaa equals any of the naturally occurring L-amino acids
  MISC_FEATURE (8): Xaa equals any of the naturally occurring L-amino acids
  MISC_FEATURE (23): Xaa equals any of the naturally occurring L-amino acids
  MISC_FEATURE (52): Xaa equals any of the naturally occurring L-amino acids
  MISC_FEATURE (71): Xaa equals any of the naturally occurring L-amino acids
  MISC_FEATURE (75): Xaa equals any of the naturally occurring L-amino acids
  MISC_FEATURE (88): Xaa equals any of the naturally occurring L-amino acids
  MISC_FEATURE (90): Xaa equals any of the naturally occurring L-amino acids
  MISC_FEATURE (99): Xaa equals any of the naturally occurring L-amino acids
  MISC_FEATURE (102): Xaa equals any of the naturally occurring L-amino acids
  MISC_FEATURE (117): Xaa equals any of the naturally occurring L-amino acids
  MISC_FEATURE (125): Xaa equals any of the naturally occurring L-amino acids
  MISC_FEATURE (131): Xaa equals any of the naturally occurring L-amino acids
XSGLXIGXAGTPAGTGPEFPGRXTRPRTRGPSLGRHPGAHQGNLAFGLHSNXIASPGSPSLGRHLGGTGSXVPGXPCLDRHVAYGGYXTXEDRRPTLSXKSXAYGYQAPSTPSLPVXPAYYPGLXSPDTYX

SEQ ID NO: 6932 - protein, 53 aa, Homo sapiens
VEATCACLLAQGEEAEKEHCSKCLAEQMILEEFGRCLSQILHTEFKSKGLKME

SEQ ID NO: 6933 - protein, 120 aa, Homo sapiens
  MISC_FEATURE (33): Xaa equals any of the naturally occurring L-amino acids
IVTVGGEERVSRKPTAAMRCMCPLYDPNRQLWXELAPLSMPRINHGVLSAEGFLFVFGGQDENKQTLSSGEKYDPDANTWTALPPMNEARHNFGIVEIDGMLYILGGEDGEKELISMECY

SEQ ID NO: 6934 - protein, 43 aa, Homo sapiens
  MISC_FEATURE (38): Xaa equals any of the naturally occurring L-amino acids
SRSPELRTACLQPSSIEILEYSSDSEKEDDLENVLLIXSEPPH

SEQ ID NO: 6935 - protein, 126 aa, Homo sapiens
  MISC_FEATURE (107): Xaa equals any of the naturally occurring L-amino acids
  MISC_FEATURE (118): Xaa equals any of the naturally occurring L-amino acids
  MISC_FEATURE (121): Xaa equals any of the naturally occurring L-amino acids
PTSDPPLGSSPLGRRFRVLSSLRRSPMFEEKASSPSGKMGGEEKPIGAGEEKQKEGGKKKNKEGSGDGGRAELNPWPEYIYTRLEMYNILKAEHDSILAEKKKKRAXALEDPKLTYAXMRXHKFFY

SEQ ID NO: 6936 - protein, 84 aa, Homo sapiens
  MISC_FEATURE (4): Xaa equals any of the naturally occurring L-amino acids
VPVXNSRVDPRVRIPSRTVNRKSTDSPVECMGQEKGEFREIFYIIGAVVFVVIILVIILAISLHKCRKAGVGQSWKENSPLNVS

SEQ ID NO: 6937 - protein, 37 aa, Homo sapiens
  MISC_FEATURE (2): Xaa equals any of the naturally occurring L-amino acids
VXSEYPSIKLVVEWQLQDDKNQSLFCWEIPVQIVSHL

SEQ ID NO: 6938 - protein, 49 aa, Homo sapiens
ASSSGGPLVTVSTPLHQVSPTGLEPSHSLLSTEAKLVSAAGGPLPLSAP

SEQ ID NO: 6939 - protein, 86 aa, Homo sapiens
DLSKHIKTHQNKKGGPGVALSVGTLPLDSGAGSEGSGTATPSALITTNMVAMEAICPEGIARLANSGINVMQVADLQSINISGNGF

SEQ ID NO: 6940 - protein, 54 aa, Homo sapiens
  MISC_FEATURE (14): Xaa equals any of the naturally occurring L-amino acids
  MISC_FEATURE (28): Xaa equals any of the naturally occurring L-amino acids
  MISC_FEATURE (35): Xaa equals any of the naturally occurring L-amino acids
TSTSQEPRWDQSTXPGRARHFFTVTDPXNLLLSGXTAGSFLGTSCRTTGDHPSI

SEQ ID NO: 6941 - protein, 93 aa, Homo sapiens
  MISC_FEATURE (30): Xaa equals any of the naturally occurring L-amino acids
HHADQTLLTCRHQCPRVHHLSAHRPSSCWXLSAAYSGWGNTLSFGADYPDELKCLDAPVLTQAECKASYPGKDYQQHVLCGASLRGGKDSLPA

SEQ ID NO: 6942 - protein, 111 aa, Homo sapiens
  MISC_FEATURE (65): Xaa equals any of the naturally occurring L-amino acids
  MISC_FEATURE (71): Xaa equals any of the naturally occurring L-amino acids
  MISC_FEATURE (78): Xaa equals any of the naturally occurring L-amino acids
  MISC_FEATURE (98): Xaa equals any of the naturally occurring L-amino acids
  MISC_FEATURE (104): Xaa equals any of the naturally occurring L-amino acids
  MISC_FEATURE (107): Xaa equals any of the naturally occurring L-amino acids
NASVRLDNSSSGASVVAIDNKIEQAMDLVKSHLMYAVREEVEVLKEQIKELIEKNSQLEQENNLXKTLASXEQLAQFXAQLQTGSPPATTQSQGTTQXPASQYXRAXDQPH

SEQ ID NO: 6943 - protein, 162 aa, Homo sapiens
  MISC_FEATURE (157): Xaa equals any of the naturally occurring L-amino acids
ENTDYVNASFIDGYRQKDSYIASQGPLLHTIEDFWRMIWEWKSCSIVMLTELEERGQEKCAQYWPSDGLVSYGDITVELKKEEECESYTVRDLLVTNTRENKSRQIRQFHFHGWPEVGIPSDGKGMISIIAAVQKQQQQSGNHPITRALQRPGQEGXGPSVP

SEQ ID NO: 6944 - protein, 95 aa, Homo sapiens
  MISC_FEATURE (85): Xaa equals any of the naturally occurring L-amino acids
VRASQSSFIGTLNMSGIALSRLAQERKAWRKDHPFGFVAVPTKNPDGTMNLMNWECAIPGKKGTPWEGGLFKLRMLFKDDYPSSXPKCKFEPPLF

SEQ ID NO: 6945 - protein, 194 aa, Homo sapiens
  MISC_FEATURE (18): Xaa equals any of the naturally occurring L-amino acids
TPTLTKGNKSWSSTAVQXALELVDPPGCRNSARGQITFPLSPALNIEVEQNGKPSLVDLNEEMQHMDVEESQCLRLCPFLEDHKEDILCGPVWLASGLDLSGHAGMLTLTSPKLVKGMAGGKYRSFLIHVKAVNERGTEEICNGGMRPVVRLPSLKHQSNKGYSLASLLAKVAAGKEKSSNVKNENTSGTRKSE

SEQ ID NO: 6946 - protein, 86 aa, Homo sapiens [sequence omitted]

SEQ ID NO: 6947 - protein, 198 aa, Homo sapiens
  MISC_FEATURE (3): Xaa equals any of the naturally occurring L-amino acids
  MISC_FEATURE (196): Xaa equals any of the naturally occurring L-amino acids
IYXQEKAQSMETLPPGKVRWPDFNQEAYVGGTMVRSGQDPYARNKFNQVESDKLRMDRAIPDTRHDQCQRKQWRVDLPATSVVITFHNEARSALLRTVVSVLKKSPPHLIKEIILVDDYSNDPEDGALLGKIEKVRVLRNDRREGLMRSRVRGADAAQAKVLTFLDSHCECNEHWLEPLLERVAEDRTRVGSPIIXCH

SEQ ID NO: 6948 - protein, 85 aa, Homo sapiens
  MISC_FEATURE (26): Xaa equals any of the naturally occurring L-amino acids
  MISC_FEATURE (69): Xaa equals any of the naturally occurring L-amino acids
  MISC_FEATURE (84): Xaa equals any of the naturally occurring L-amino acids
CFIAILFGSSTISLSDEASRRCSVLXSTLSSQSCKQLRVYLSPLSKEAIDDSPRLLAKLLALKLCYHIXLEVKGCNTENTFFYXD

SEQ ID NO: 6949 - protein, 36 aa, Homo sapiens
  MISC_FEATURE (10): Xaa equals any of the naturally occurring L-amino acids
  MISC_FEATURE (13): Xaa equals any of the naturally occurring L-amino acids
DKKPIRYARXVFXQYQPSHLENLQKAYVHSILCVSE

SEQ ID NO: 6950 - protein, 48 aa, Homo sapiens
  MISC_FEATURE (48): Xaa equals any of the naturally occurring L-amino acids
HEHFPCHLYYFLNYSFSLACLIPHPPKSICLSHAIIFIFMSTAFIEFX

SEQ ID NO: 6951 - protein, 53 aa, Homo sapiens
  MISC_FEATURE (31): Xaa equals any of the naturally occurring L-amino acids
  MISC_FEATURE (44): Xaa equals any of the naturally occurring L-amino acids
LRVKYKLLAAVGGKEPNPKLWGFPLFPREAXGGMNDPKGNEQTXGNPPSATSD

SEQ ID NO: 6952 - protein, 122 aa, Homo sapiens
SRVGSEEQRKAVGDVATVPRDHPAMETRELSLRGRGLASKKDREWTGRGPLSSGPKEDSSRRRESERQGPCAGLLLRLQAGSLPEAVQKHSSAGPTRFLSHVKFRSSVKTHSSPAGVLRDAR

SEQ ID NO: 6953 - protein, 53 aa, Homo sapiens
CFLERNQMCFCGHSHFLFCEFSKLSTIAIHSAIFIVYNLLSLVDKHGSLFLKL

SEQ ID NO: 6954 - protein, 64 aa, Homo sapiens
SPYLLVNVAVLLQNLFQPFSDFKPPVPLPLRENSNHKSLSTSYYLNIDNFQIRELRYLKLRFLF

SEQ ID NO: 6955 - protein, 45 aa, Homo sapiens
DTEGKSWNFHKSLTGAFLWLELAQCDVPELVQRNAFSFAKQNFQE

SEQ ID NO: 6956 - protein, 85 aa, Homo sapiens
GASQSRSGSSVRFPVGLTAGPWGHHPHLPASISETEAWEPPGPPESGRRKPIPGTGPGPFLVRGTLWSIVGQRNLLFNIKRILCP

SEQ ID NO: 6957 - protein, 57 aa, Homo sapiens
TGMNHHAQPHLQFLKKILRSVFFIVYKSFFVITKIHAFGRNTNIQRCSIKLTFYRTF

SEQ ID NO: 6958 - protein, 75 aa, Homo sapiens
AKELIDDYFAFSKIVFNVGIYPIFHRNKVGCSGSNFKCRLVISKCNGTIISLVQETKLLPNLLLFCFFMAYFKLK

SEQ ID NO: 6959 - protein, 61 aa, Homo sapiens
RKHGRTCWWGPSNIQLNLSPPSSPVLCRDGSRLLCGLDISEQPNLAGINPKGTGLRGQELK

SEQ ID NO: 6960 - protein, 94 aa, Homo sapiens
WDQRKRNSLVPGPAHGPAQEEPWEKKESLGAAQEALSIQLQPKETQPFPKSEQVYLHFLSVVTEDGPEPKDKGSLPQPPITEVESQVFSEKLAT

SEQ ID NO: 6961 - protein, 73 aa, Homo sapiens
  MISC_FEATURE (4): Xaa equals any of the naturally occurring L-amino acids
  MISC_FEATURE (5): Xaa equals any of the naturally occurring L-amino acids
  MISC_FEATURE (8): Xaa equals any of the naturally occurring L-amino acids
  MISC_FEATURE (10): Xaa equals any of the naturally occurring L-amino acids
  MISC_FEATURE (12): Xaa equals any of the naturally occurring L-amino acids
  MISC_FEATURE (13): Xaa equals any of the naturally occurring L-amino acids
  MISC_FEATURE (18): Xaa equals any of the naturally occurring L-amino acids
GNKXXVPXVXPXXTMDPXAADSAEQRQREPAGPQVSSDASEISCVFVSSELHRSLTLEPACLPAAVLCILRNQ

SEQ ID NO: 6962 - protein, 116 aa, Homo sapiens
  MISC_FEATURE (2): Xaa equals any of the naturally occurring L-amino acids
  MISC_FEATURE (4): Xaa equals any of the naturally occurring L-amino acids
  MISC_FEATURE (12): Xaa equals any of the naturally occurring L-amino acids
RXHXLELHRGAXALELVDPPGCRNSARAFPLKRRRKREGEQEKKKLPYMSVFLYKKVTPYKETTIQAGARGLGSRGIPGEQSQGIPSKSPTCSEYPTNVSGASAEVAMLNASSIPG

SEQ ID NO: 6963 - protein, 92 aa, Homo sapiens
LSIVCRMDEREAAERQQGHSASSGGRSHLMEENQFKEMPFLYRTPFNSIQEEREAAILRLSKYSRGCPRMAVMPGFWQVPDSITSPASLHQI

SEQ ID NO: 6964 - protein, 95 aa, Homo sapiens
WIPRAAGIRHEGQRWFYPCLLLFFSLRFLRRRLLSRKCAVVILERLEALLATLGPRRAHVMTPTPGERRRCGTHRPTGRVSGGTLIVAGRSGAAV

SEQ ID NO: 6965 - protein, 73 aa, Homo sapiens
  MISC_FEATURE (1): Xaa equals any of the naturally occurring L-amino acids
  MISC_FEATURE (5): Xaa equals any of the naturally occurring L-amino acids
  MISC_FEATURE (15): Xaa equals any of the naturally occurring L-amino acids
XSVFXEEQKMEQLDXRALAPLVMLPATRTCDLVQKRAAVLSSWWQVMYMVRRQRDAMVAGAAVVESTGRHSAW

SEQ ID NO: 6966 - protein, 114 aa, Homo sapiens
HPVLPSVHLADPGGLCPWGRGRRRGDCPRHPHGGLCGLFPGLPDGHIPGDLSRRVRGGQGGAERPVFPVGRRRQGRREQRKAHRAEAHAEGGPAGTGGDRVRGLSRTPVYTHSS

SEQ ID NO: 6967 - protein, 26 aa, Homo sapiens
  MISC_FEATURE (12): Xaa equals any of the naturally occurring L-amino acids
  MISC_FEATURE (13): Xaa equals any of the naturally occurring L-amino acids
  MISC_FEATURE (16): Xaa equals any of the naturally occurring L-amino acids
VLSMFIHKNKSXXYFXSLRMLKKANP

SEQ ID NO: 6968 - protein, 28 aa, Homo sapiens
  MISC_FEATURE (2): Xaa equals any of the naturally occurring L-amino acids
  MISC_FEATURE (3): Xaa equals any of the naturally occurring L-amino acids
  MISC_FEATURE (11): Xaa equals any of the naturally occurring L-amino acids
  MISC_FEATURE (23): Xaa equals any of the naturally occurring L-amino acids
  MISC_FEATURE (26): Xaa equals any of the naturally occurring L-amino acids
WXXGLQEFGRXQKSSLATFVGSXPSXGP

SEQ ID NO: 6969 - protein, 73 aa, Homo sapiens
  MISC_FEATURE (11): Xaa equals any of the naturally occurring L-amino acids
  MISC_FEATURE (15): Xaa equals any of the naturally occurring L-amino acids
  MISC_FEATURE (22): Xaa equals any of the naturally occurring L-amino acids
  MISC_FEATURE (25): Xaa equals any of the naturally occurring L-amino acids
  MISC_FEATURE (34): Xaa equals any of the naturally occurring L-amino acids
  MISC_FEATURE (46): Xaa equals any of the naturally occurring L-amino acids
  MISC_FEATURE (52): Xaa equals any of the naturally occurring L-amino acids
  MISC_FEATURE (65): Xaa equals any of the naturally occurring L-amino acids
  MISC_FEATURE (67): Xaa equals any of the naturally occurring L-amino acids
  MISC_FEATURE (71): Xaa equals any of the naturally occurring L-amino acids
RPASRAGLKAXPLLXKSWPPKXCLXETARTFNFXPAGSDLGWILVXFPLLQXPPPLPRPFFFFFXKXVFYXEI

SEQ ID NO: 6970 - protein, 49 aa, Homo sapiens
PAAPSFAWTLTSFMVLLLQGQPPSSSASKLCNLQPAPVPDCITSDLHWF

SEQ ID NO: 6971 - protein, 73 aa, Homo sapiens
FYASLFLRWSTISENLFATTGYPGKMASQFQIHHLGHPQPILMGSVAVGSGLSWHRTLPLCVIGRETTSCCFG

SEQ ID NO: 6972 - protein, 84 aa, Homo sapiens
  MISC_FEATURE (12): Xaa equals any of the naturally occurring L-amino acids
  MISC_FEATURE (55): Xaa equals any of the naturally occurring L-amino acids
LTNHSYPRYSKXLTQKPNNAYNFFGVKSTSLVVDYQEGLHGRKAECHRNYSLALXVGGCPGVCITATFFFFLNSYKIHEQSNQY

SEQ ID NO: 6973 - protein, 70 aa, Homo sapiens
  MISC_FEATURE (63): Xaa equals any of the naturally occurring L-amino acids
DILNLELFNPKIFMKSLSLEPKPEYSYCLFSKCSGKALPVQSFQNEGETFACLVITRLSAYFXNCILKIG

SEQ ID NO: 6974 - protein, 74 aa, Homo sapiens
RPARSPAEVGSRGLSSPPRAHHRPVSPAAPGRWSTSARVRTRKMVNYAWAGRTEETLVEVRSGPDVQIGRPTWV

SEQ ID NO: 6975 - protein, 38 aa, Homo sapiens
  MISC_FEATURE (15): Xaa equals any of the naturally occurring L-amino acids
  MISC_FEATURE (18): Xaa equals any of the naturally occurring L-amino acids
KAETKPELTPKHVDXVTXMSLFGITLLFMSHILVGSSD

SEQ ID NO: 6976 - protein, 31 aa, Homo sapiens
  MISC_FEATURE (4): Xaa equals any of the naturally occurring L-amino acids
  MISC_FEATURE (9): Xaa equals any of the naturally occurring L-amino acids
NSAXDWSKXCILRDMNVQSLDHEDDRIPRNS

SEQ ID NO: 6977 - protein, 79 aa, Homo sapiens
  MISC_FEATURE (8): Xaa equals any of the naturally occurring L-amino acids
  MISC_FEATURE (15): Xaa equals any of the naturally occurring L-amino acids
  MISC_FEATURE (17): Xaa equals any of the naturally occurring L-amino acids
  MISC_FEATURE (25): Xaa equals any of the naturally occurring L-amino acids
  MISC_FEATURE (27): Xaa equals any of the naturally occurring L-amino acids
  MISC_FEATURE (36): Xaa equals any of the naturally occurring L-amino acids
  MISC_FEATURE (46): Xaa equals any of the naturally occurring L-amino acids
  MISC_FEATURE (52): Xaa equals any of the naturally occurring L-amino acids
  MISC_FEATURE (55): Xaa equals any of the naturally occurring L-amino acids
  MISC_FEATURE (56): Xaa equals any of the naturally occurring L-amino acids
  MISC_FEATURE (57): Xaa equals any of the naturally occurring L-amino acids
  MISC_FEATURE (58): Xaa equals any of the naturally occurring L-amino acids
  MISC_FEATURE (59): Xaa equals any of the naturally occurring L-amino acids
  MISC_FEATURE (60): Xaa equals any of the naturally occurring L-amino acids
  MISC_FEATURE (62): Xaa equals any of the naturally occurring L-amino acids
  MISC_FEATURE (64): Xaa equals any of the naturally occurring L-amino acids
  MISC_FEATURE (65): Xaa equals any of the naturally occurring L-amino acids
  MISC_FEATURE (67): Xaa equals any of the naturally occurring L-amino acids
  MISC_FEATURE (68): Xaa equals any of the naturally occurring L-amino acids
  MISC_FEATURE (69): Xaa equals any of the naturally occurring L-amino acids
  MISC_FEATURE (71): Xaa equals any of the naturally occurring L-amino acids
  MISC_FEATURE (78): Xaa equals any of the naturally occurring L-amino acids
VGLLSFSXEGSLALXVXEDGLIEGXVXSWNPNSCVXGVTLVLHNVXLWWIGXTEXXXXXXFXIXXCXXXSXKSVFEGXQ

SEQ ID NO: 6978 - protein, 115 aa, Homo sapiens
  MISC_FEATURE (64): Xaa equals any of the naturally occurring L-amino acids
  MISC_FEATURE (69): Xaa equals any of the naturally occurring L-amino acids
  MISC_FEATURE (70): Xaa equals any of the naturally occurring L-amino acids
  MISC_FEATURE (81): Xaa equals any of the naturally occurring L-amino acids
  MISC_FEATURE (82): Xaa equals any of the naturally occurring L-amino acids
  MISC_FEATURE (83): Xaa equals any of the naturally occurring L-amino acids
  MISC_FEATURE (89): Xaa equals any of the naturally occurring L-amino acids
  MISC_FEATURE (91): Xaa equals any of the naturally occurring L-amino acids
  MISC_FEATURE (97): Xaa equals any of the naturally occurring L-amino acids
  MISC_FEATURE (100): Xaa equals any of the naturally occurring L-amino acids
  MISC_FEATURE (103): Xaa equals any of the naturally occurring L-amino acids
  MISC_FEATURE (104): Xaa equals any of the naturally occurring L-amino acids
  MISC_FEATURE (108): Xaa equals any of the naturally occurring L-amino acids
  MISC_FEATURE (109): Xaa equals any of the naturally occurring L-amino acids
  MISC_FEATURE (110): Xaa equals any of the naturally occurring L-amino acids
  MISC_FEATURE (113): Xaa equals any of the naturally occurring L-amino acids
  MISC_FEATURE (114): Xaa equals any of the naturally occurring L-amino acids
MLFILPTNLHSSHGITAQTTWQTERQMQSCTDSVGPAGVGHLNRPLLPNSLRWVEQEGLPWPRXHGRKXXFFSRRHVIVGXXXYIILGXPXFLKNSXRVXKIXXKWGXXXKVXXI

SEQ ID NO: 6979 - protein, 63 aa, Homo sapiens
  MISC_FEATURE (59): Xaa equals any of the naturally occurring L-amino acids
KSFLSLYLGLFTFRFFFNVIIFTLWISNFVPFKIRDRRHIQLDLLMTFCWTTFLHECFXALGD

SEQ ID NO: 6980 - protein, 99 aa, Homo sapiens
  MISC_FEATURE (75): Xaa equals any of the naturally occurring L-amino acids
  MISC_FEATURE (89): Xaa equals any of the naturally occurring L-amino acids
  MISC_FEATURE (94): Xaa equals any of the naturally occurring L-amino acids
  MISC_FEATURE (98): Xaa equals any of the naturally occurring L-amino acids
ALPNAGTHSVTRTRFLSVPFLPMLVPFAIDSGLISGKTALCNFLYLLRVQSGGERLRDPGFSWCFIGSDWVMSPXYETNCCGLQKCGQXPLDSXGFSXC

SEQ ID NO: 6981 - protein, 70 aa, Homo sapiens
  MISC_FEATURE (9): Xaa equals any of the naturally occurring L-amino acids
  MISC_FEATURE (16): Xaa equals any of the naturally occurring L-amino acids
  MISC_FEATURE (21): Xaa equals any of the naturally occurring L-amino acids
  MISC_FEATURE (24): Xaa equals any of the naturally occurring L-amino acids
  MISC_FEATURE (30): Xaa equals any of the naturally occurring L-amino acids
  MISC_FEATURE (31): Xaa equals any of the naturally occurring L-amino acids
  MISC_FEATURE (39): Xaa equals any of the naturally occurring L-amino acids
  MISC_FEATURE (43): Xaa equals any of the naturally occurring L-amino acids
  MISC_FEATURE (44): Xaa equals any of the naturally occurring L-amino acids
  MISC_FEATURE (48): Xaa equals any of the naturally occurring L-amino acids
  MISC_FEATURE (54): Xaa equals any of the naturally occurring L-amino acids
  MISC_FEATURE (65): Xaa equals any of the naturally occurring L-amino acids
  MISC_FEATURE (69): Xaa equals any of the naturally occurring L-amino acids
YPWKGFRQXSSSGNSXESRWXSWXMAFSGXXSPGTGCLXYKHXXTHMXEVKKSXFRKHFFNGLNXGGFXF

SEQ ID NO: 6982 - protein, 59 aa, Homo sapiens
  MISC_FEATURE (2): Xaa equals any of the naturally occurring L-amino acids
  MISC_FEATURE (25): Xaa equals any of the naturally occurring L-amino acids
VXLVADLSHALRIRLYKYIWAKPSXAMGMWKRYVGSSVEYQSMMRTFSRPSSGLEFGFQ

SEQ ID NO: 6983 - protein, 59 aa, Homo sapiens
  MISC_FEATURE (7): Xaa equals any of the naturally occurring L-amino acids
  MISC_FEATURE (12): Xaa equals any of the naturally occurring L-amino acids
  MISC_FEATURE (29): Xaa equals any of the naturally occurring L-amino acids
QASLGSXTQWFXFSKCSKRASTNVQVNFXSFCLGIMFATVLLNQSKSFMNQPRFQGLEE

SEQ ID NO: 6984 - protein, 46 aa, Homo sapiens
  MISC_FEATURE (25): Xaa equals any of the naturally occurring L-amino acids
  MISC_FEATURE (27): Xaa equals any of the naturally occurring L-amino acids
  MISC_FEATURE (42): Xaa equals any of the naturally occurring L-amino acids
NSAQLQLLKVRFRLFNPLLMNANMXQXWVGILQVIFISAQRXKTIS

SEQ ID NO: 6985 - protein, 52 aa, Homo sapiens
  MISC_FEATURE (3): Xaa equals any of the naturally occurring L-amino acids
  MISC_FEATURE (47): Xaa equals any of the naturally occurring L-amino acids
FGXNRSGSRTLPSTAEQPAREVEGLGRAPGKEWEMVRIGVGGAKRGXSPRCT

SEQ ID NO: 6986 - protein, 84 aa, Homo sapiens
  MISC_FEATURE (57): Xaa equals any of the naturally occurring L-amino acids
  MISC_FEATURE (66): Xaa equals any of the naturally occurring L-amino acids
  MISC_FEATURE (70): Xaa equals any of the naturally occurring L-amino acids
  MISC_FEATURE (71): Xaa equals any of the naturally occurring L-amino acids
  MISC_FEATURE (76): Xaa equals any of the naturally occurring L-amino acids
  MISC_FEATURE (83): Xaa equals any of the naturally occurring L-amino acids
ASRHQNNVSSEINSGIPPRNMANRRNHKEWGPQGGGWSNDELTTLIIPSKWVHIYQXGGLLLLFAXMLKXXVGCFXGKCPGEXS

SEQ ID NO: 6987 - protein, 65 aa, Homo sapiens
  MISC_FEATURE (5): Xaa equals any of the naturally occurring L-amino acids
  MISC_FEATURE (7): Xaa equals any of the naturally occurring L-amino acids
  MISC_FEATURE (10): Xaa equals any of the naturally occurring L-amino acids
  MISC_FEATURE (14): Xaa equals any of the naturally occurring L-amino acids
  MISC_FEATURE (21): Xaa equals any of the naturally occurring L-amino acids
  MISC_FEATURE (22): Xaa equals any of the naturally occurring L-amino acids
  MISC_FEATURE (23): Xaa equals any of the naturally occurring L-amino acids
  MISC_FEATURE (25): Xaa equals any of the naturally occurring L-amino acids
  MISC_FEATURE (32): Xaa equals any of the naturally occurring L-amino acids
  MISC_FEATURE (35): Xaa equals any of the naturally occurring L-amino acids
  MISC_FEATURE (36): Xaa equals any of the naturally occurring L-amino acids
  MISC_FEATURE (37): Xaa equals any of the naturally occurring L-amino acids
  MISC_FEATURE (39): Xaa equals any of the naturally occurring L-amino acids
  MISC_FEATURE (41): Xaa equals any of the naturally occurring L-amino acids
  MISC_FEATURE (46): Xaa equals any of the naturally occurring L-amino acids
  MISC_FEATURE (47): Xaa equals any of the naturally occurring L-amino acids
  MISC_FEATURE (54): Xaa equals any of the naturally occurring L-amino acids
  MISC_FEATURE (57): Xaa equals any of the naturally occurring L-amino acids
  MISC_FEATURE (60): Xaa equals any of the naturally occurring L-amino acids
  MISC_FEATURE (62): Xaa equals any of the naturally occurring L-amino acids
  MISC_FEATURE (63): Xaa equals any of the naturally occurring L-amino acids
  MISC_FEATURE (64): Xaa equals any of the naturally occurring L-amino acids
EAPRXGXPIXFGGXCCDFQIXXXGXFGIYEEXWGXXXGXGXWGEVXXIFQGGLXKGXKKXKXXXP

SEQ ID NO: 6988 - protein, 60 aa, Homo sapiens
  MISC_FEATURE (3): Xaa equals any of the naturally occurring L-amino acids
  MISC_FEATURE (18): Xaa equals any of the naturally occurring L-amino acids
  MISC_FEATURE (23): Xaa equals any of the naturally occurring L-amino acids
  MISC_FEATURE (25): Xaa equals any of the naturally occurring L-amino acids
  MISC_FEATURE (28): Xaa equals any of the naturally occurring L-amino acids
  MISC_FEATURE (29): Xaa equals any of the naturally occurring L-amino acids
  MISC_FEATURE (31): Xaa equals any of the naturally occurring L-amino acids
  MISC_FEATURE (35): Xaa equals any of the naturally occurring L-amino acids
  MISC_FEATURE (38): Xaa equals any of the naturally occurring L-amino acids
  MISC_FEATURE (40): Xaa equals any of the naturally occurring L-amino acids
  MISC_FEATURE (41): Xaa equals any of the naturally occurring L-amino acids
  MISC_FEATURE (42): Xaa equals any of the naturally occurring L-amino acids
  MISC_FEATURE (43): Xaa equals any of the naturally occurring L-amino acids
  MISC_FEATURE (47): Xaa equals any of the naturally occurring L-amino acids
  MISC_FEATURE (49): Xaa equals any of the naturally occurring L-amino acids
  MISC_FEATURE (50): Xaa equals any of the naturally occurring L-amino acids
  MISC_FEATURE (51): Xaa equals any of the naturally occurring L-amino acids
  MISC_FEATURE (57): Xaa equals any of the naturally occurring L-amino acids
KLXRLLVSGLGFSSRLNXMIPKXVXKMXXFXGGQXGIXGXXXXVQPXRXXXPLPCFXPRG

SEQ ID NO: 6989 - protein, 65 aa, Homo sapiens
  MISC_FEATURE (2): Xaa equals any of the naturally occurring L-amino acids
  MISC_FEATURE (3): Xaa equals any of the naturally occurring L-amino acids
  MISC_FEATURE (8): Xaa equals any of the naturally occurring L-amino acids
  MISC_FEATURE (12): Xaa equals any of the naturally occurring L-amino acids
  MISC_FEATURE (13): Xaa equals any of the naturally occurring L-amino acids
  MISC_FEATURE (22): Xaa equals any of the naturally occurring L-amino acids
  MISC_FEATURE (23): Xaa equals any of the naturally occurring L-amino acids
  MISC_FEATURE (24): Xaa equals any of the naturally occurring L-amino acids
  MISC_FEATURE (27): Xaa equals any of the naturally occurring L-amino acids
  MISC_FEATURE (29): Xaa equals any of the naturally occurring L-amino acids
  MISC_FEATURE (31): Xaa equals any of the naturally occurring L-amino acids
  MISC_FEATURE (34): Xaa equals any of the naturally occurring L-amino acids
  MISC_FEATURE (39): Xaa equals any of the naturally occurring L-amino acids
  MISC_FEATURE (40): Xaa equals any of the naturally occurring L-amino acids
  MISC_FEATURE (43): Xaa equals any of the naturally occurring L-amino acids
  MISC_FEATURE (44): Xaa equals any of the naturally occurring L-amino acids
  MISC_FEATURE (48): Xaa equals any of the naturally occurring L-amino acids
  MISC_FEATURE (52): Xaa equals any of the naturally occurring L-amino acids
  MISC_FEATURE (55): Xaa equals any of the naturally occurring L-amino acids
  MISC_FEATURE (65): Xaa equals any of the naturally occurring L-amino acids
TXXLLEAXKSVXXLTMNWFGPXXXLLXGXAXRLXERGGXXRGXXPDWXRWAXLGXGNRVFALGGX

SEQ ID NO: 6990 - protein, 68 aa, Homo sapiens
  MISC_FEATURE (4): Xaa equals any of the naturally occurring L-amino acids
  MISC_FEATURE (6): Xaa equals any of the naturally occurring L-amino acids
  MISC_FEATURE (8): Xaa equals any of the naturally occurring L-amino acids
  MISC_FEATURE (10): Xaa equals any of the naturally occurring L-amino acids
  MISC_FEATURE (12): Xaa equals any of the naturally occurring L-amino acids
  MISC_FEATURE (14): Xaa equals any of the naturally occurring L-amino acids
  MISC_FEATURE (15): Xaa equals any of the naturally occurring L-amino acids
  MISC_FEATURE (17): Xaa equals any of the naturally occurring L-amino acids
  MISC_FEATURE (25): Xaa equals any of the naturally occurring L-amino acids
  MISC_FEATURE (36): Xaa equals any of the naturally occurring L-amino acids
  MISC_FEATURE (40): Xaa equals any of the naturally occurring L-amino acids
  MISC_FEATURE (42): Xaa equals any of the naturally occurring L-amino acids
  MISC_FEATURE (44): Xaa equals any of the naturally occurring L-amino acids
  MISC_FEATURE (46): Xaa equals any of the naturally occurring L-amino acids
  MISC_FEATURE (48): Xaa equals any of the naturally occurring L-amino acids
  MISC_FEATURE (50): Xaa equals any of the naturally occurring L-amino acids
  MISC_FEATURE (52): Xaa equals any of the naturally occurring L-amino acids
  MISC_FEATURE (55): Xaa equals any of the naturally occurring L-amino acids
  MISC_FEATURE (56): Xaa equals any of the naturally occurring L-amino acids
  MISC_FEATURE (58): Xaa equals any of the naturally occurring L-amino acids
  MISC_FEATURE (60): Xaa equals any of the naturally occurring L-amino acids
  MISC_FEATURE (68): Xaa equals any of the naturally occurring L-amino acids
DFGXGXTXHXVXSXXRXVLHRKVFXMVGSQKNLPRXLMLXVXFXEXLXTXEXDCXXGXGXCWKQQEAX

SEQ ID NO: 6991 - protein, 86 aa, Homo sapiens
  MISC_FEATURE (20): Xaa equals any of the naturally occurring L-amino acids
  MISC_FEATURE (32): Xaa equals any of the naturally occurring L-amino acids
  MISC_FEATURE (39): Xaa equals any of the naturally occurring L-amino acids
  MISC_FEATURE (48): Xaa equals any of the naturally occurring L-amino acids
  MISC_FEATURE (79): Xaa equals any of the naturally occurring L-amino acids
  MISC_FEATURE (82): Xaa equals any of the naturally occurring L-amino acids
FGTGNSTSNPHPGPQLWRRXLGRELASSPSTXKPGDAPXWAGPTKGPXPQGRAPGAGFPREATFPLVHGPGIDAPFGQXPGXSKVG

SEQ ID NO: 6992 - protein, 83 aa, Homo sapiens
  MISC_FEATURE (45): Xaa equals any of the naturally occurring L-amino acids
  MISC_FEATURE (49): Xaa equals any of the naturally occurring L-amino acids
  MISC_FEATURE (53): Xaa equals any of the naturally occurring L-amino acids
  MISC_FEATURE (63): Xaa equals any of the naturally occurring L-amino acids
  MISC_FEATURE (65): Xaa equals any of the naturally occurring L-amino acids
  MISC_FEATURE (67): Xaa equals any of the naturally occurring L-amino acids
  MISC_FEATURE (70): Xaa equals any of the naturally occurring L-amino acids
  MISC_FEATURE (76): Xaa equals any of the naturally occurring L-amino acids
  MISC_FEATURE (81): Xaa equals any of the naturally occurring L-amino acids
RLALRPSDLHIWGQFCLHWFLPLDGTGLRWLRLAAWAFLFKIPWXGHTXKTHXADEENERLRXDXQXLRXLWHRGXFSSPXKS

SEQ ID NO: 6993 - protein, 126 aa, Homo sapiens
  MISC_FEATURE (28): Xaa equals any of the naturally occurring L-amino acids
  MISC_FEATURE (74): Xaa equals any of the naturally occurring L-amino acids
  MISC_FEATURE (87): Xaa equals any of the naturally occurring L-amino acids
  MISC_FEATURE (94): Xaa equals any of the naturally occurring L-amino acids
  MISC_FEATURE (98): Xaa equals any of the naturally occurring L-amino acids
  MISC_FEATURE (100): Xaa equals any of the naturally occurring L-amino acids
  MISC_FEATURE (102): Xaa equals any of the naturally occurring L-amino acids
  MISC_FEATURE (108): Xaa equals any of the naturally occurring L-amino acids
  MISC_FEATURE (110): Xaa equals any of the naturally occurring L-amino acids
  MISC_FEATURE (111): Xaa equals any of the naturally occurring L-amino acids
  MISC_FEATURE (114): Xaa equals any of the naturally occurring L-amino acids
  MISC_FEATURE (122): Xaa equals any of the naturally occurring L-amino acids
  MISC_FEATURE (125): Xaa equals any of the naturally occurring L-amino acids
PFLPFLLHYWYYLIRIVLCFENLFFPQXSLTYFLQTDRIQRKNSPSFIHYEMNFSFEHVILLFCSNGDQRDTGXPPVFSSSFQFWTXKERGLVXIVAXLXLXQACGDXRXXGVXGSRVLVMXNVXF

SEQ ID NO: 6994 - protein, 58 aa, Homo sapiens
  MISC_FEATURE (2): Xaa equals any of the naturally occurring L-amino acids
  MISC_FEATURE (6): Xaa equals any of the naturally occurring L-amino acids
  MISC_FEATURE (9): Xaa equals any of the naturally occurring L-amino acids
  MISC_FEATURE (10): Xaa equals any of the naturally occurring L-amino acids
  MISC_FEATURE (11): Xaa equals any of the naturally occurring L-amino acids
  MISC_FEATURE (14): Xaa equals any of the naturally occurring L-amino acids
  MISC_FEATURE (26): Xaa equals any of the naturally occurring L-amino acids
  MISC_FEATURE (27): Xaa equals any of the naturally occurring L-amino acids
  MISC_FEATURE (30): Xaa equals any of the naturally occurring L-amino acids
  MISC_FEATURE (32): Xaa equals any of the naturally occurring L-amino acids
  MISC_FEATURE (38): Xaa equals any of the naturally occurring L-amino acids
  MISC_FEATURE (40): Xaa equals any of the naturally occurring L-amino acids
  MISC_FEATURE (43): Xaa equals any of the naturally occurring L-amino acids
  MISC_FEATURE (44): Xaa equals any of the naturally occurring L-amino acids
  MISC_FEATURE (51): Xaa equals any of the naturally occurring L-amino acids
  MISC_FEATURE (53): Xaa equals any of the naturally occurring L-amino acids
  MISC_FEATURE (57): Xaa equals any of the naturally occurring L-amino acids
  MISC_FEATURE (58): Xaa equals any of the naturally occurring L-amino acids
IXNFPXCTXXXLAXKGKVKLWLVIQXXLMXPXKLAAKXGXPAXXLVWGQGXPXVPPXX

SEQ ID NO: 6995 - protein, 51 aa, Homo sapiens
  MISC_FEATURE (11): Xaa equals any of the naturally occurring L-amino acids
  MISC_FEATURE (18): Xaa equals any of the naturally occurring L-amino acids
IKHTLIKCAFXINSQCLXFSSGREPALALGESSTAEVKLMRAHQGMLEGGG

SEQ ID NO: 6996 - protein, 84 aa, Homo sapiens
  MISC_FEATURE (19): Xaa equals any of the naturally occurring L-amino acids
  MISC_FEATURE (30): Xaa equals any of the naturally occurring L-amino acids
  MISC_FEATURE (34): Xaa equals any of the naturally occurring L-amino acids
  MISC_FEATURE (40): Xaa equals any of the naturally occurring L-amino acids
  MISC_FEATURE (50): Xaa equals any of the naturally occurring L-amino acids
  MISC_FEATURE (54): Xaa equals any of the naturally occurring L-amino acids
  MISC_FEATURE (55): Xaa equals any of the naturally occurring L-amino acids
  MISC_FEATURE (58): Xaa equals any of the naturally occurring L-amino acids
  MISC_FEATURE (63): Xaa equals any of the naturally occurring L-amino acids
  MISC_FEATURE (64): Xaa equals any of the naturally occurring L-amino acids
  MISC_FEATURE (67): Xaa equals any of the naturally occurring L-amino acids
  MISC_FEATURE (68): Xaa equals any of the naturally occurring L-amino acids
  MISC_FEATURE (69): Xaa equals any of the naturally occurring L-amino acids
  MISC_FEATURE (75): Xaa equals any of the naturally occurring L-amino acids
  MISC_FEATURE (77): Xaa equals any of the naturally occurring L-amino acids
  MISC_FEATURE (78): Xaa equals any of the naturally occurring L-amino acids
  MISC_FEATURE (80): Xaa equals any of the naturally occurring L-amino acids
  MISC_FEATURE (81): Xaa equals any of the naturally occurring L-amino acids
  MISC_FEATURE (83): Xaa equals any of the naturally occurring L-amino acids
RTMMKYGDMFSVPRPAAKXQIQAHSAPSFXGFPXFALRGXFRGGLGPPGXGLQXXVFXPHGLXXGPXXXVFPGAXGXXGXXNXW

SEQ ID NO: 6997 - protein, 132 aa, Homo sapiens
  MISC_FEATURE (3): Xaa equals any of the naturally occurring L-amino acids
  MISC_FEATURE (22): Xaa equals any of the naturally occurring L-amino acids
  MISC_FEATURE (29): Xaa equals any of the naturally occurring L-amino acids
  MISC_FEATURE (60): Xaa equals any of the naturally occurring L-amino acids
  MISC_FEATURE (67): Xaa equals any of the naturally occurring L-amino acids
  MISC_FEATURE (79): Xaa equals any of the naturally occurring L-amino acids
  MISC_FEATURE (80): Xaa equals any of the naturally occurring L-amino acids
  MISC_FEATURE (96): Xaa equals any of the naturally occurring L-amino acids
  MISC_FEATURE (98): Xaa equals any of the naturally occurring L-amino acids
  MISC_FEATURE (102): Xaa equals any of the naturally occurring L-amino acids
  MISC_FEATURE (114): Xaa equals any of the naturally occurring L-amino acids
  MISC_FEATURE (115): Xaa equals any of the naturally occurring L-amino acids
  MISC_FEATURE (116): Xaa equals any of the naturally occurring L-amino acids
  MISC_FEATURE (118): Xaa equals any of the naturally occurring L-amino acids
  MISC_FEATURE (119): Xaa equals any of the naturally occurring L-amino acids
  MISC_FEATURE (120): Xaa equals any of the naturally occurring L-amino acids
  MISC_FEATURE (122): Xaa equals any of the naturally occurring L-amino acids
  MISC_FEATURE (123): Xaa equals any of the naturally occurring L-amino acids
  MISC_FEATURE (124): Xaa equals any of the naturally occurring L-amino acids
  MISC_FEATURE (125): Xaa equals any of the naturally occurring L-amino acids
  MISC_FEATURE (126): Xaa equals any of the naturally occurring L-amino acids
FGXAAWHRPAARGQSPRRCHAXVHRSQCXLCRLGAAGERGRQPGRGTGTPGEPSRPKALXLPQSVSXGLVALLASRNLXXPPLHWVLLALALVNLXLXLPVXWGFFCCVNYCGXXXAXXXLXXXXXDFLDLW

SEQ ID NO: 6998 - protein, 64 aa, Homo sapiens
  MISC_FEATURE (5): Xaa equals any of the naturally occurring L-amino acids
  MISC_FEATURE (12): Xaa equals any of the naturally occurring L-amino acids
  MISC_FEATURE (41): Xaa equals any of the naturally occurring L-amino acids
  MISC_FEATURE (55): Xaa equals any of the naturally occurring L-amino acids
NADVXVPSLSQXTGCPVWRTAQMQLYEHYGKCAGKKRQLVXPTFALVSRASWVVXCKAPGGGIF

SEQ ID NO: 6999 - protein, 30 aa, Homo sapiens
  MISC_FEATURE (16): Xaa equals any of the naturally occurring L-amino acids
  MISC_FEATURE (23): Xaa equals any of the naturally occurring L-amino acids
LYSEDTIFTLGVNSHXKQASTGXKLGEVFE

SEQ ID NO: 7000 - protein, 97 aa, Homo sapiens
  MISC_FEATURE (9): Xaa equals any of the naturally occurring L-amino acids
  MISC_FEATURE (27): Xaa equals any of the naturally occurring L-amino acids
  MISC_FEATURE (32): Xaa equals any of the naturally occurring L-amino acids
  MISC_FEATURE (34): Xaa equals any of the naturally occurring L-amino acids
  MISC_FEATURE (36): Xaa equals any of the naturally occurring L-amino acids
  MISC_FEATURE (45): Xaa equals any of the naturally occurring L-amino acids
  MISC_FEATURE (51): Xaa equals any of the naturally occurring L-amino acids
  MISC_FEATURE (53): Xaa equals any of the naturally occurring L-amino acids
  MISC_FEATURE (57): Xaa equals any of the naturally occurring L-amino acids
  MISC_FEATURE (60): Xaa equals any of the naturally occurring L-amino acids
  MISC_FEATURE (62): Xaa equals any of the naturally occurring L-amino acids
  MISC_FEATURE (73): Xaa equals any of the naturally occurring L-amino acids
  MISC_FEATURE (78): Xaa equals any of the naturally occurring L-amino acids
  MISC_FEATURE (79): Xaa equals any of the naturally occurring L-amino acids
  MISC_FEATURE (80): Xaa equals any of the naturally occurring L-amino acids
  MISC_FEATURE (82): Xaa equals any of the naturally occurring L-amino acids
  MISC_FEATURE (84): Xaa equals any of the naturally occurring L-amino acids
  MISC_FEATURE (86): Xaa equals any of the naturally occurring L-amino acids
  MISC_FEATURE (87): Xaa equals any of the naturally occurring L-amino acids
  MISC_FEATURE (90): Xaa equals any of the naturally occurring L-amino acids
  MISC_FEATURE (92): Xaa equals any of the naturally occurring L-amino acids
  MISC_FEATURE (95): Xaa equals any of the naturally occurring L-amino acids
  MISC_FEATURE (97): Xaa equals any of the naturally occurring L-amino acids
NIFKLIQRXLLLDNSILENNFPTYSIXASKVXQXLXKLRGGFGGXGFFTLXRXFFFXFLXRXLLLGEFAPGGXLFSRXXXFXQXFXXGVXGXPFXEX

SEQ ID NO: 7001 - protein, 43 aa, Homo sapiens
  MISC_FEATURE (3): Xaa equals any of the naturally occurring L-amino acids
  MISC_FEATURE (4): Xaa equals any of the naturally occurring L-amino acids
  MISC_FEATURE (29): Xaa equals any of the naturally occurring L-amino acids
IRXXLPSQMSCRKRFDVMWRSRRVIDGPXLEWKVQIPATQLKR

SEQ ID NO: 7002 - protein, 57 aa, Homo sapiens
  MISC_FEATURE (8): Xaa equals any of the naturally occurring L-amino acids
  MISC_FEATURE (10): Xaa equals any of the naturally occurring L-amino acids
  MISC_FEATURE (14): Xaa equals any of the naturally occurring L-amino acids
  MISC_FEATURE (15): Xaa equals any of the naturally occurring L-amino acids
  MISC_FEATURE (17): Xaa equals any of the naturally occurring L-amino acids
  MISC_FEATURE (25): Xaa equals any of the naturally occurring L-amino acids
  MISC_FEATURE (27): Xaa equals any of the naturally occurring L-amino acids
  MISC_FEATURE (28): Xaa equals any of the naturally occurring L-amino acids
  MISC_FEATURE (30): Xaa equals any of the naturally occurring L-amino acids
  MISC_FEATURE (31): Xaa equals any of the naturally occurring L-amino acids
  MISC_FEATURE (35): Xaa equals any of the naturally occurring L-amino acids
  MISC_FEATURE (36): Xaa equals any of the naturally occurring L-amino acids
  MISC_FEATURE (46): Xaa equals any of the naturally occurring L-amino acids
  MISC_FEATURE (55): Xaa equals any of the naturally occurring L-amino acids
  MISC_FEATURE (56): Xaa equals any of the naturally occurring L-amino acids
LEEWGSGXWXQLIXXFXDFIGEGSXGXXEXXTVVXXCHQPWPQLAXLGFGRKPDXXP

SEQ ID NO: 7003 - protein, 100 aa, Homo sapiens
  MISC_FEATURE (3): Xaa equals any of the naturally occurring L-amino acids
  MISC_FEATURE (20): Xaa equals any of the naturally occurring L-amino acids
  MISC_FEATURE (24): Xaa equals any of the naturally occurring L-amino acids
  MISC_FEATURE (38): Xaa equals any of the naturally occurring L-amino acids
  MISC_FEATURE (45): Xaa equals any of the naturally occurring L-amino acids
  MISC_FEATURE (47): Xaa equals any of the naturally occurring L-amino acids
  MISC_FEATURE (48): Xaa equals any of the naturally occurring L-amino acids
  MISC_FEATURE (49): Xaa equals any of the naturally occurring L-amino acids
  MISC_FEATURE (51): Xaa equals any of the naturally occurring L-amino acids
  MISC_FEATURE (52): Xaa equals any of the naturally occurring L-amino acids
  MISC_FEATURE (53): Xaa equals any of the naturally occurring L-amino acids
  MISC_FEATURE (56): Xaa equals any of the naturally occurring L-amino acids
  MISC_FEATURE (58): Xaa equals any of the naturally occurring L-amino acids
  MISC_FEATURE (59): Xaa equals any of the naturally occurring L-amino acids
  MISC_FEATURE (60): Xaa equals any of the naturally occurring L-amino acids
  MISC_FEATURE (61): Xaa equals any of the naturally occurring L-amino acids
  MISC_FEATURE (62): Xaa equals any of the naturally occurring L-amino acids
  MISC_FEATURE (70): Xaa equals any of the naturally occurring L-amino acids
  MISC_FEATURE (71): Xaa equals any of the naturally occurring L-amino acids
  MISC_FEATURE (73): Xaa equals any of the naturally occurring L-amino acids
  MISC_FEATURE (74): Xaa equals any of the naturally occurring L-amino acids
  MISC_FEATURE (77): Xaa equals any of the naturally occurring L-amino acids
  MISC_FEATURE (78): Xaa equals any of the naturally occurring L-amino acids
  MISC_FEATURE (83): Xaa equals any of the naturally occurring L-amino acids
  MISC_FEATURE (85): Xaa equals any of the naturally occurring L-amino acids
  MISC_FEATURE (87): Xaa equals any of the naturally occurring L-amino acids
  MISC_FEATURE (90): Xaa equals any of the naturally occurring L-amino acids
  MISC_FEATURE (95): Xaa equals any of the naturally occurring L-amino acids
  MISC_FEATURE (96): Xaa equals any of the naturally occurring L-amino acids
  MISC_FEATURE (100): Xaa equals any of the naturally occurring L-amino acids
QMXYMTKETVSNSLNSPLWXDLLXITKLLLFSQKRISXWMVHGNXFXXXGXXXGVXGXXXXXFGGFFGPXXLXXPPXXGGFFXNXPXFGXGGGNXXPRPX

SEQ ID NO: 7004 - protein, 69 aa, Homo sapiens
GRAEPRRAWAVGSGKGSVHSGTPVKPVQPSVSCGHLESTLSLLCPSTPRTVSLSQMEAELNTLRWMMET

SEQ ID NO: 7005 - protein, 63 aa, Homo sapiens
  MISC_FEATURE (9): Xaa equals any of the naturally occurring L-amino acids
  MISC_FEATURE (28): Xaa equals any of the naturally occurring L-amino acids
  MISC_FEATURE (38): Xaa equals any of the naturally occurring L-amino acids
  MISC_FEATURE (62): Xaa equals any of the naturally occurring L-amino acids
FKPDDHNLXMEVVRIFGPQGPENPQCSXGDTLQKNVCXPEKGVGPLVAAATVPVYMGPVKIXG

SEQ ID NO: 7006 - protein, 106 aa, Homo sapiens
  MISC_FEATURE (11): Xaa equals any of the naturally occurring L-amino acids
  MISC_FEATURE (12): Xaa equals any of the naturally occurring L-amino acids
  MISC_FEATURE (14): Xaa equals any of the naturally occurring L-amino acids
  MISC_FEATURE (24): Xaa equals any of the naturally occurring L-amino acids
  MISC_FEATURE (27): Xaa equals any of the naturally occurring L-amino acids
  MISC_FEATURE (28): Xaa equals any of the naturally occurring L-amino acids
  MISC_FEATURE (32): Xaa equals any of the naturally occurring L-amino acids
  MISC_FEATURE (35): Xaa equals any of the naturally occurring L-amino acids
  MISC_FEATURE (68): Xaa equals any of the naturally occurring L-amino acids
  MISC_FEATURE (69): Xaa equals any of the naturally occurring L-amino acids
  MISC_FEATURE (78): Xaa equals any of the naturally occurring L-amino acids
  MISC_FEATURE (80): Xaa equals any of the naturally occurring L-amino acids
  MISC_FEATURE (100): Xaa equals any of the naturally occurring L-amino acids
  MISC_FEATURE (105): Xaa equals any of the naturally occurring L-amino acids
ASPPGNALGLXXRXHMQGSTRRMXVMXXVHRXFLXFLMTHGVLKEWERERPCRGTATRSMNRSAHRRXXWRTSSNNIXQXFGSPCILRLKRRSARKDDGXTHFMXW

SEQ ID NO: 7007 - protein, 73 aa, Homo sapiens
  MISC_FEATURE (14): Xaa equals any of the naturally occurring L-amino acids
  MISC_FEATURE (26): Xaa equals any of the naturally occurring L-amino acids
  MISC_FEATURE (32): Xaa equals any of the naturally occurring L-amino acids
  MISC_FEATURE (47): Xaa equals any of the naturally occurring L-amino acids
  MISC_FEATURE (52): Xaa equals any of the naturally occurring L-amino acids
  MISC_FEATURE (63): Xaa equals any of the naturally occurring L-amino acids
  MISC_FEATURE (66): Xaa equals any of the naturally occurring L-amino acids
  MISC_FEATURE (70): Xaa equals any of the naturally occurring L-amino acids
  MISC_FEATURE (71): Xaa equals any of the naturally occurring L-amino acids
RNSFAWLRPHGLLXMFCPRPFVSHSXQWGWLXLCQAKVQGMEVQLCXKVEPXWDRGSFSSKAXAWXYEWXXRG

SEQ ID NO: 7008 - protein, 115 aa, Homo sapiens
  MISC_FEATURE (11): Xaa equals any of the naturally occurring L-amino acids
  MISC_FEATURE (27): Xaa equals any of the naturally occurring L-amino acids
  MISC_FEATURE (40): Xaa equals any of the naturally occurring L-amino acids
  MISC_FEATURE (72): Xaa equals any of the naturally occurring L-amino acids
  MISC_FEATURE (95): Xaa equals any of the naturally occurring L-amino acids
  MISC_FEATURE (104): Xaa equals any of the naturally occurring L-amino acids
GTSHSKPGSTXTTLSPGSITTSSFAQXFTTPHSQPGSALXTVSPASTTVPGLSEESTTFYSSPGSTETTAFXHSNTSAYPRENGTGNSMMCLKSXRKEGTPGIXPEDGHLGRTRI

SEQ ID NO: 7009 - protein, 80 aa, Homo sapiens
  MISC_FEATURE (10): Xaa equals any of the naturally occurring L-amino acids
  MISC_FEATURE (15): Xaa equals any of the naturally occurring L-amino acids
  MISC_FEATURE (16): Xaa equals any of the naturally occurring L-amino acids
  MISC_FEATURE (22): Xaa equals any of the naturally occurring L-amino acids
  MISC_FEATURE (29): Xaa equals any of the naturally occurring L-amino acids
  MISC_FEATURE (36): Xaa equals any of the naturally occurring L-amino acids
  MISC_FEATURE (41): Xaa equals any of the naturally occurring L-amino acids
  MISC_FEATURE (42): Xaa equals any of the naturally occurring L-amino acids
  MISC_FEATURE (43): Xaa equals any of the naturally occurring L-amino acids
  MISC_FEATURE (68): Xaa equals any of the naturally occurring L-amino acids
  MISC_FEATURE (69): Xaa equals any of the naturally occurring L-amino acids
ARPRPIRHSXHFTRXXFHKHIXILQQHFXMVPAVEXSNVKXXXPPSHIASSTHFFGKLSSACNMLPKXXRKQHWRPVFRN

SEQ ID NO: 7010 - protein, 77 aa, Homo sapiens
LLDAKSVFTKTIQMLLNYQISFPTFGKGVALIPYWDYKLVMVFGKQFGNMHQKLLTFFIHLWPSNFISEHLFYGNYS

SEQ ID NO: 7011 - protein, 33 aa, Homo sapiens
  MISC_FEATURE (15): Xaa equals any of the naturally occurring L-amino acids
  MISC_FEATURE (22): Xaa equals any of the naturally occurring L-amino acids
  MISC_FEATURE (26): Xaa equals any of the naturally occurring L-amino acids
  MISC_FEATURE (32): Xaa equals any of the naturally occurring L-amino acids
TVDYYSQREKSHLTXSLFKLSXPERXKYQRRXN

SEQ ID NO: 7012 - protein, 54 aa, Homo sapiens
  MISC_FEATURE (6): Xaa equals any of the naturally occurring L-amino acids
  MISC_FEATURE (9): Xaa equals any of the naturally occurring L-amino acids
  MISC_FEATURE (43): Xaa equals any of the naturally occurring L-amino acids
  MISC_FEATURE (44): Xaa equals any of the naturally occurring L-amino acids
FENVLXLHXCLDDLLKKQHSAPTKLISSCPASASVSIPALGFXXCLPISHNGSF

SEQ ID NO: 7013 - protein, 67 aa, Homo sapiens
  MISC_FEATURE (57): Xaa equals any of the naturally occurring L-amino acids
  MISC_FEATURE (59): Xaa equals any of the naturally occurring L-amino acids
  MISC_FEATURE (63): Xaa equals any of the naturally occurring L-amino acids
HEVLVHSHHLPSVPQRFTLSLMWDLFPVRCHYFPFPWFTLPHIGKALPIAFGKGKMXKXNVLXSLCV

SEQ ID NO: 7014 - protein, 55 aa, Homo sapiens
  MISC_FEATURE (35): Xaa equals any of the naturally occurring L-amino acids
  MISC_FEATURE (36): Xaa equals any of the naturally occurring L-amino acids
  MISC_FEATURE (44): Xaa equals any of the naturally occurring L-amino acids
  MISC_FEATURE (46): Xaa equals any of the naturally occurring L-amino acids
  MISC_FEATURE (47): Xaa equals any of the naturally occurring L-amino acids
  MISC_FEATURE (50): Xaa equals any of the naturally occurring L-amino acids
RVPNPRHTDFEFYLTGTDMLRLSDWESHLWLLPCXXPNSSRLVXKXXKEXSLGLG

SEQ ID NO: 7015 - protein, 70 aa, Homo sapiens
  MISC_FEATURE (7): Xaa equals any of the naturally occurring L-amino acids
  MISC_FEATURE (17): Xaa equals any of the naturally occurring L-amino acids
  MISC_FEATURE (20): Xaa equals any of the naturally occurring L-amino acids
  MISC_FEATURE (26): Xaa equals any of the naturally occurring L-amino acids
  MISC_FEATURE (31): Xaa equals any of the naturally occurring L-amino acids
  MISC_FEATURE (32): Xaa equals any of the naturally occurring L-amino acids
  MISC_FEATURE (36): Xaa equals any of the naturally occurring L-amino acids
  MISC_FEATURE (45): Xaa equals any of the naturally occurring L-amino acids
  MISC_FEATURE (50): Xaa equals any of the naturally occurring L-amino acids
  MISC_FEATURE (65): Xaa equals any of the naturally occurring L-amino acids
IFVVAFXLGLQNKADFXFQXVPFLPXQVYYXXVLHXVFKKQPTIXTHVTXLCLPQFFGSLATLVXHVGLD

SEQ ID NO: 7016 - protein, 62 aa, Homo sapiens
  MISC_FEATURE (16): Xaa equals any of the naturally occurring L-amino acids
  MISC_FEATURE (40): Xaa equals any of the naturally occurring L-amino acids
  MISC_FEATURE (53): Xaa equals any of the naturally occurring L-amino acids
  MISC_FEATURE (62): Xaa equals any of the naturally occurring L-amino acids
GGTDSLVGGWGHETRXALRKPHCRQTFLDEEALPRVPRFXFFVGIGNECFPSXASFCTFTVX

SEQ ID NO: 7017 - protein, 42 aa, Homo sapiens
  MISC_FEATURE (15): Xaa equals any of the naturally occurring L-amino acids
  MISC_FEATURE (17): Xaa equals any of the naturally occurring L-amino acids
  MISC_FEATURE (21): Xaa equals any of the naturally occurring L-amino acids
  MISC_FEATURE (35): Xaa equals any of the naturally occurring L-amino acids
  MISC_FEATURE (38): Xaa equals any of the naturally occurring L-amino acids
ILFTTGMCGICNYIXFXGPIXGLSFLELIILPYYXICXSGSI

SEQ ID NO: 7018 - protein, 75 aa, Homo sapiens
  MISC_FEATURE (38): Xaa equals any of the naturally occurring L-amino acids
  MISC_FEATURE (44): Xaa equals any of the naturally occurring L-amino acids
GTCVLRLCLHCLLSPTKLSSPPPVTLELCFIFKEEREXGEVTSXTLQHGHQFFWNNLGGSTCFWEKCFGKRFWGG

SEQ ID NO: 7019 - protein, 59 aa, Homo sapiens
  MISC_FEATURE (37): Xaa equals any of the naturally occurring L-amino acids
  MISC_FEATURE (44): Xaa equals any of the naturally occurring L-amino acids
  MISC_FEATURE (45): Xaa equals any of the naturally occurring L-amino acids
  MISC_FEATURE (56): Xaa equals any of the naturally occurring L-amino acids
LGNFLNSKKIFSCSLSHYIWFSAYKSKRIICHSFFKXVFFPNLXXNTNISSNGLPXSAG

SEQ ID NO: 7020 - protein, 86 aa, Homo sapiens
  MISC_FEATURE (21): Xaa equals any of the naturally occurring L-amino acids
GTSTAPSQFYYTAVVSAYKFXSSCPFWPTLALIIILKPGSSIYHAFILEINLGSDTQVRIIYGGWRQVSSNGTVKGEDFSTTLWRG

SEQ ID NO: 7021 - protein, 115 aa, Homo sapiens
  MISC_FEATURE (2): Xaa equals any of the naturally occurring L-amino acids
  MISC_FEATURE (10): Xaa equals any of the naturally occurring L-amino acids
  MISC_FEATURE (90): Xaa equals any of the naturally occurring L-amino acids
  MISC_FEATURE (103): Xaa equals any of the naturally occurring L-amino acids
  MISC_FEATURE (105): Xaa equals any of the naturally occurring L-amino acids
  MISC_FEATURE (109): Xaa equals any of the naturally occurring L-amino acids
  MISC_FEATURE (111): Xaa equals any of the naturally occurring L-amino acids
GXGRPDPSEXQTTAKHGQERKCSQAYATAWWDLTVGSSSRPHLPLPTTTKNSRQFLPGNNVRSQSPETGMGFLESGLDCLLWKTLPRAPXCEAQADQDPSNWXPXKLLXPXLVKI

SEQ ID NO: 7022 - protein, 98 aa, Homo sapiens
  MISC_FEATURE (50): Xaa equals any of the naturally occurring L-amino acids
  MISC_FEATURE (79): Xaa equals any of the naturally occurring L-amino acids
  MISC_FEATURE (92): Xaa equals any of the naturally occurring L-amino acids
  MISC_FEATURE (94): Xaa equals any of the naturally occurring L-amino acids
KIEQQTCLPDFLKHTKSYGVCAISGMQGILDMPGVFGCLTPLERGNGLCXCTVGSWAKDFDLCVPILGQGKVPVSTCRXLGINQRVGRENNXSXCLDT

SEQ ID NO: 7023 - protein, 24 aa, Homo sapiens
  MISC_FEATURE (21): Xaa equals any of the naturally occurring L-amino acids
  MISC_FEATURE (22): Xaa equals any of the naturally occurring L-amino acids
  MISC_FEATURE (24): Xaa equals any of the naturally occurring L-amino acids
HELPSKISFEISILLLSKKKXXFX

SEQ ID NO: 7024 - protein, 27 aa, Homo sapiens
  MISC_FEATURE (8): Xaa equals any of the naturally occurring L-amino acids
  MISC_FEATURE (11): Xaa equals any of the naturally occurring L-amino acids
  MISC_FEATURE (19): Xaa equals any of the naturally occurring L-amino acids
  MISC_FEATURE (23): Xaa equals any of the naturally occurring L-amino acids
  MISC_FEATURE (24): Xaa equals any of the naturally occurring L-amino acids
GRATMNSXLNXLGFPINSXKDIXXFKK

SEQ ID NO: 7025 - protein, 18 aa, Homo sapiens
  MISC_FEATURE (3): Xaa equals any of the naturally occurring L-amino acids
  MISC_FEATURE (9): Xaa equals any of the naturally occurring L-amino acids
  MISC_FEATURE (14): Xaa equals any of the naturally occurring L-amino acids
RGXASMVNXHPLSXNFWN

SEQ ID NO: 7026 - protein, 66 aa, Homo sapiens
  MISC_FEATURE (26): Xaa equals any of the naturally occurring L-amino acids
  MISC_FEATURE (27): Xaa equals any of the naturally occurring L-amino acids
  MISC_FEATURE (31): Xaa equals any of the naturally occurring L-amino acids
  MISC_FEATURE (45): Xaa equals any of the naturally occurring L-amino acids
  MISC_FEATURE (51): Xaa equals any of the naturally occurring L-amino acids
  MISC_FEATURE (52): Xaa equals any of the naturally occurring L-amino acids
  MISC_FEATURE (54): Xaa equals any of the naturally occurring L-amino acids
  MISC_FEATURE (62): Xaa equals any of the naturally occurring L-amino acids
IVQNTLSNKNRVYILLKLIQNISPGXXTFWXLGYTLTNFKPVKSXQSLFSXXMXFNLKFTTXRLPR

SEQ ID NO: 7027 - protein, 46 aa, Homo sapiens
  MISC_FEATURE (11): Xaa equals any of the naturally occurring L-amino acids
  MISC_FEATURE (26): Xaa equals any of the naturally occurring L-amino acids
  MISC_FEATURE (31): Xaa equals any of the naturally occurring L-amino acids
  MISC_FEATURE (33): Xaa equals any of the naturally occurring L-amino acids
  MISC_FEATURE (40): Xaa equals any of the naturally occurring L-amino acids
  MISC_FEATURE (44): Xaa equals any of the naturally occurring L-amino acids
QAFGKSLQILXPPFYKERAGLVICPXPFPGXIXTSTVYCXVLSXFQ

SEQ ID NO: 7028 - protein, 33 aa, Homo sapiens
  MISC_FEATURE (6): Xaa equals any of the naturally occurring L-amino acids
  MISC_FEATURE (11): Xaa equals any of the naturally occurring L-amino acids
  MISC_FEATURE (16): Xaa equals any of the naturally occurring L-amino acids
  MISC_FEATURE (29): Xaa equals any of the naturally occurring L-amino acids
GDTDTXIYCIXGNRGXFPLRLPGNRFLGXMVPE

SEQ ID NO: 7029 - protein, 28 aa, Homo sapiens
  MISC_FEATURE (11): Xaa equals any of the naturally occurring L-amino acids
  MISC_FEATURE (12): Xaa equals any of the naturally occurring L-amino acids
FPVHRPHRGHXXWPGCPSSCGDRSCGRW

SEQ ID NO: 7030 - protein, 31 aa, Homo sapiens
  MISC_FEATURE (3): Xaa equals any of the naturally occurring L-amino acids
  MISC_FEATURE (7): Xaa equals any of the naturally occurring L-amino acids
  MISC_FEATURE (21): Xaa equals any of the naturally occurring L-amino acids
  MISC_FEATURE (23): Xaa equals any of the naturally occurring L-amino acids
  MISC_FEATURE (24): Xaa equals any of the naturally occurring L-amino acids
GRXGTSXGVPSKEATVPDLKXKXXDQIMVTV

SEQ ID NO: 7031 - protein, 25 aa, Homo sapiens
  MISC_FEATURE (2): Xaa equals any of the naturally occurring L-amino acids
  MISC_FEATURE (8): Xaa equals any of the naturally occurring L-amino acids
  MISC_FEATURE (10): Xaa equals any of the naturally occurring L-amino acids
  MISC_FEATURE (19): Xaa equals any of the naturally occurring L-amino acids
  MISC_FEATURE (21): Xaa equals any of the naturally occurring L-amino acids
GXGEAINXLXRFDHIYTKXLXLEIP

SEQ ID NO: 7032 - protein, 74 aa, Homo sapiens
  MISC_FEATURE (4): Xaa equals any of the naturally occurring L-amino acids
  MISC_FEATURE (6): Xaa equals any of the naturally occurring L-amino acids
  MISC_FEATURE (34): Xaa equals any of the naturally occurring L-amino acids
  MISC_FEATURE (51): Xaa equals any of the naturally occurring L-amino acids
  MISC_FEATURE (60): Xaa equals any of the naturally occurring L-amino acids
  MISC_FEATURE (62): Xaa equals any of the naturally occurring L-amino acids
VVCXCXFLPVSCLSVDIKGVLVSLKMTIVSSVSXFHVNLQLGTPLQKRKSXGRMRERKEXKXDCIGPKGFPLIR

SEQ ID NO: 7033 - protein, 44 aa, Homo sapiens
  MISC_FEATURE (17): Xaa equals any of the naturally occurring L-amino acids
  MISC_FEATURE (31): Xaa equals any of the naturally occurring L-amino acids
  MISC_FEATURE (36): Xaa equals any of the naturally occurring L-amino acids
  MISC_FEATURE (42): Xaa equals any of the naturally occurring L-amino acids
  MISC_FEATURE (44): Xaa equals any of the naturally occurring L-amino acids
VDLRGVKEINKGIFVPXFPWKGSQMAIGEMXGMDTXPRAASXWX

SEQ ID NO: 7034 - protein, 17 aa, Homo sapiens
  MISC_FEATURE (5): Xaa equals any of the naturally occurring L-amino acids
  MISC_FEATURE (12): Xaa equals any of the naturally occurring L-amino acids
PVLMXLKVGDQXPGLNV

SEQ ID NO: 7035 - protein, 34 aa, Homo sapiens
  MISC_FEATURE (15): Xaa equals any of the naturally occurring L-amino acids
  MISC_FEATURE (24): Xaa equals any of the naturally occurring L-amino acids
  MISC_FEATURE (28): Xaa equals any of the naturally occurring L-amino acids
  MISC_FEATURE (32): Xaa equals any of the naturally occurring L-amino acids
  MISC_FEATURE (33): Xaa equals any of the naturally occurring L-amino acids
CWGSKWGDGELGSPXSKGVFLETXMFWXQRAXXG

SEQ ID NO: 7036 - protein, 51 aa, Homo sapiens
  MISC_FEATURE (9): Xaa equals any of the naturally occurring L-amino acids
  MISC_FEATURE (28): Xaa equals any of the naturally occurring L-amino acids
  MISC_FEATURE (29): Xaa equals any of the naturally occurring L-amino acids
  MISC_FEATURE (39): Xaa equals any of the naturally occurring L-amino acids
GRNLIKYLXVREAGRTLESYISSEYQMXXLRMSHQILCXKYIGSYLTHYIG

SEQ ID NO: 7037 - protein, 54 aa, Homo sapiens
  MISC_FEATURE (3): Xaa equals any of the naturally occurring L-amino acids
  MISC_FEATURE (18): Xaa equals any of the naturally occurring L-amino acids
  MISC_FEATURE (51): Xaa equals any of the naturally occurring L-amino acids
CLXLRTLRAGYGREKKNXHKNESYSKNTGPKKSFYLKKLKCLSHYKFLGLXFFP

SEQ ID NO: 7038 - protein, 33 aa, Homo sapiens
  MISC_FEATURE (9): Xaa equals any of the naturally occurring L-amino acids
  MISC_FEATURE (16): Xaa equals any of the naturally occurring L-amino acids
  MISC_FEATURE (20): Xaa equals any of the naturally occurring L-amino acids
  MISC_FEATURE (26): Xaa equals any of the naturally occurring L-amino acids
  MISC_FEATURE (27): Xaa equals any of the naturally occurring L-amino acids
LRLVINPWXLFATENXLVLXTLVFSXXPWITWK

SEQ ID NO: 7039 - protein, 78 aa, Homo sapiens
  MISC_FEATURE (5): Xaa equals any of the naturally occurring L-amino acids
  MISC_FEATURE (41): Xaa equals any of the naturally occurring L-amino acids
  MISC_FEATURE (47): Xaa equals any of the naturally occurring L-amino acids
  MISC_FEATURE (53): Xaa equals any of the naturally occurring L-amino acids
  MISC_FEATURE (65): Xaa equals any of the naturally occurring L-amino acids
  MISC_FEATURE (69): Xaa equals any of the naturally occurring L-amino acids
AEVFXTASDKKIVSLWYTPKSSAFKESQTITYLSPLLFPPXQAGFIXVYLGFXSIHRGTDSVLSXILKXYWFIIAHFY

SEQ ID NO: 7040 - protein, 67 aa, Homo sapiens
  MISC_FEATURE (10): Xaa equals any of the naturally occurring L-amino acids
  MISC_FEATURE (46): Xaa equals any of the naturally occurring L-amino acids
  MISC_FEATURE (55): Xaa equals any of the naturally occurring L-amino acids
  MISC_FEATURE (56): Xaa equals any of the naturally occurring L-amino acids
  MISC_FEATURE (59): Xaa equals any of the naturally occurring L-amino acids
TGSFLEWLLXVGAEARPGHPSAWDTPRRRGRFLEVGGLPLALPSLXLHTGGGLEXXTGXLIVKTFLF

SEQ ID NO: 7041 - protein, 25 aa, Homo sapiens
  MISC_FEATURE (3): Xaa equals any of the naturally occurring L-amino acids
  MISC_FEATURE (5): Xaa equals any of the naturally occurring L-amino acids
  MISC_FEATURE (14): Xaa equals any of the naturally occurring L-amino acids
  MISC_FEATURE (22): Xaa equals any of the naturally occurring L-amino acids
VPXVXIPTLFHIFXKCGVFFLXAWF

SEQ ID NO: 7042 - protein, 32 aa, Homo sapiens
  MISC_FEATURE (23): Xaa equals any of the naturally occurring L-amino acids
  MISC_FEATURE (27): Xaa equals any of the naturally occurring L-amino acids
  MISC_FEATURE (30): Xaa equals any of the naturally occurring L-amino acids
GTGRERTSLQFFFFFFFKNWGGXLGFXKGXGP

SEQ ID NO: 7043 - protein, 49 aa, Homo sapiens
  MISC_FEATURE (7): Xaa equals any of the naturally occurring L-amino acids
  MISC_FEATURE (15): Xaa equals any of the naturally occurring L-amino acids
  MISC_FEATURE (18): Xaa equals any of the naturally occurring L-amino acids
  MISC_FEATURE (21): Xaa equals any of the naturally occurring L-amino acids
  MISC_FEATURE (30): Xaa equals any of the naturally occurring L-amino acids
  MISC_FEATURE (41): Xaa equals any of the naturally occurring L-amino acids
ADLSPRXLPYYGREXGLXLLXFSGKESLQXSMSLGSFRRRXEPRLAGRP

SEQ ID NO: 7044 - protein, 17 aa, Homo sapiens
  MISC_FEATURE (10): Xaa equals any of the naturally occurring L-amino acids
  MISC_FEATURE (11): Xaa equals any of the naturally occurring L-amino acids
  MISC_FEATURE (13): Xaa equals any of the naturally occurring L-amino acids
  MISC_FEATURE (14): Xaa equals any of the naturally occurring L-amino acids
  MISC_FEATURE (17): Xaa equals any of the naturally occurring L-amino acids
GTRFFFFFFXXNXXLFX

SEQ ID NO: 7045 - protein, 23 aa, Homo sapiens
  MISC_FEATURE (17): Xaa equals any of the naturally occurring L-amino acids
  MISC_FEATURE (22): Xaa equals any of the naturally occurring L-amino acids
  MISC_FEATURE (23): Xaa equals any of the naturally occurring L-amino acids
AELEFFFFFFQRGGEVXRGLSXX

SEQ ID NO: 7046 - protein, 75 aa, Homo sapiens
HERHEKLRNYTKHSYEISGHQDNQKISQSLPKREKKSHIQRIRNLNGAEILKANFEVRAQRKQELLNSEGKQFLS

SEQ ID NO: 7047 - protein, 88 aa, Homo sapiens
  MISC_FEATURE (1): Xaa equals any of the naturally occurring L-amino acids
  MISC_FEATURE (6): Xaa equals any of the naturally occurring L-amino acids
  MISC_FEATURE (7): Xaa equals any of the naturally occurring L-amino acids
  MISC_FEATURE (15): Xaa equals any of the naturally occurring L-amino acids
  MISC_FEATURE (27): Xaa equals any of the naturally occurring L-amino acids
  MISC_FEATURE (29): Xaa equals any of the naturally occurring L-amino acids
  MISC_FEATURE (33): Xaa equals any of the naturally occurring L-amino acids
  MISC_FEATURE (36): Xaa equals any of the naturally occurring L-amino acids
  MISC_FEATURE (43): Xaa equals any of the naturally occurring L-amino acids
  MISC_FEATURE (48): Xaa equals any of the naturally occurring L-amino acids
  MISC_FEATURE (54): Xaa equals any of the naturally occurring L-amino acids
  MISC_FEATURE (60): Xaa equals any of the naturally occurring L-amino acids
  MISC_FEATURE (65): Xaa equals any of the naturally occurring L-amino acids
  MISC_FEATURE (86): Xaa equals any of the naturally occurring L-amino acids
  MISC_FEATURE (87): Xaa equals any of the naturally occurring L-amino acids
XSQSKXXPGFRSYPXSGYMVLVSIFCXFXYFQXSLXWYYMVKXKLFFXPDQGCXSSPCLXSVPKXVFWQHSLVAAGVVKFGPEKAXXK

SEQ ID NO: 7048 - protein, 48 aa, Homo sapiens
  MISC_FEATURE (44): Xaa equals any of the naturally occurring L-amino acids
GRALFYYSRFNDNRLLCLSFDILQISKCILLHLEGNFVVLRKCXQKMK

SEQ ID NO: 7049 - protein, 99 aa, Homo sapiens
  MISC_FEATURE (56): Xaa equals any of the naturally occurring L-amino acids
  MISC_FEATURE (68): Xaa equals any of the naturally occurring L-amino acids
  MISC_FEATURE (69): Xaa equals any of the naturally occurring L-amino acids
  MISC_FEATURE (72): Xaa equals any of the naturally occurring L-amino acids
  MISC_FEATURE (79): Xaa equals any of the naturally occurring L-amino acids
  MISC_FEATURE (80): Xaa equals any of the naturally occurring L-amino acids
  MISC_FEATURE (85): Xaa equals any of the naturally occurring L-amino acids
  MISC_FEATURE (89): Xaa equals any of the naturally occurring L-amino acids
  MISC_FEATURE (90): Xaa equals any of the naturally occurring L-amino acids
  MISC_FEATURE (93): Xaa equals any of the naturally occurring L-amino acids
  MISC_FEATURE (94): Xaa equals any of the naturally occurring L-amino acids
EDLYYKIHVFTSVHGTFSKIDHMIGHKTSLSKFKKIKIILSTLSEHIGIKIRKQLXKGTLQNHKICAXXTHXLQIKGLXXVLPAXGKQXXAGXXKPGFC

SEQ ID NO: 7050 - protein, 63 aa, Homo sapiens
  MISC_FEATURE (47): Xaa equals any of the naturally occurring L-amino acids
LLSPLLLWKVKFLDPRFNFKIVNLIMSGGNLLKKTLCSTSLVALCLXMTFRLPVQKMEDIKLC

SEQ ID NO: 7051 - protein, 17 aa, Homo sapiens
  MISC_FEATURE (14): Xaa equals any of the naturally occurring L-amino acids
  MISC_FEATURE (16): Xaa equals any of the naturally occurring L-amino acids
  MISC_FEATURE (17): Xaa equals any of the naturally occurring L-amino acids
GREKEWNHVKFSVXPXX

SEQ ID NO: 7052 - protein, 38 aa, Homo sapiens
  MISC_FEATURE (1): Xaa equals any of the naturally occurring L-amino acids
  MISC_FEATURE (4): Xaa equals any of the naturally occurring L-amino acids
  MISC_FEATURE (9): Xaa equals any of the naturally occurring L-amino acids
  MISC_FEATURE (24): Xaa equals any of the naturally occurring L-amino acids
  MISC_FEATURE (35): Xaa equals any of the naturally occurring L-amino acids
XKTXFLGLXLCSLLQDLLCSVNIXCWVQLHAPCCXFTC

SEQ ID NO: 7053 - protein, 69 aa, Homo sapiens
  MISC_FEATURE (35): Xaa equals any of the naturally occurring L-amino acids
  MISC_FEATURE (43): Xaa equals any of the naturally occurring L-amino acids
  MISC_FEATURE (56): Xaa equals any of the naturally occurring L-amino acids
LPQAQPVSRLQLRPLLNSLYVVQSESPSQSTNLLXLLCFKPFXGSYFQLDEVQACXRAVRVTWPDPPLI

SEQ ID NO: 7054 - protein, 55 aa, Homo sapiens
  MISC_FEATURE (2): Xaa equals any of the naturally occurring L-amino acids
  MISC_FEATURE (3): Xaa equals any of the naturally occurring L-amino acids
AXXIRAALELGYMANIFSKFSELNLKFQGYAISKRKSTLSRNIVLANIHYKLSLF

SEQ ID NO: 7055 - protein, 46 aa, Homo sapiens
  MISC_FEATURE (3): Xaa equals any of the naturally occurring L-amino acids
  MISC_FEATURE (35): Xaa equals any of the naturally occurring L-amino acids
  MISC_FEATURE (39): Xaa equals any of the naturally occurring L-amino acids
  MISC_FEATURE (43): Xaa equals any of the naturally occurring L-amino acids
  MISC_FEATURE (46): Xaa equals any of the naturally occurring L-amino acids
SRXIKLQLRGEKWVTPGRIHLGWPSGRTEFTKLTXSLVXGIYXGRX

SEQ ID NO: 7056 - protein, 60 aa, Homo sapiens
  MISC_FEATURE (26): Xaa equals any of the naturally occurring L-amino acids
  MISC_FEATURE (45): Xaa equals any of the naturally occurring L-amino acids
  MISC_FEATURE (59): Xaa equals any of the naturally occurring L-amino acids
KFSAGQTKHICELNVEVIHLKPLLGXFFSTEFSQLSRVGTYHKGXKRVVPRGPVGVGVXP

SEQ ID NO: 7057 - protein, 72 aa, Homo sapiens
  MISC_FEATURE (3): Xaa equals any of the naturally occurring L-amino acids
  MISC_FEATURE (29): Xaa equals any of the naturally occurring L-amino acids
  MISC_FEATURE (30): Xaa equals any of the naturally occurring L-amino acids
  MISC_FEATURE (31): Xaa equals any of the naturally occurring L-amino acids
  MISC_FEATURE (35): Xaa equals any of the naturally occurring L-amino acids
  MISC_FEATURE (36): Xaa equals any of the naturally occurring L-amino acids
  MISC_FEATURE (37): Xaa equals any of the naturally occurring L-amino acids
  MISC_FEATURE (46): Xaa equals any of the naturally occurring L-amino acids
  MISC_FEATURE (48): Xaa equals any of the naturally occurring L-amino acids
  MISC_FEATURE (50): Xaa equals any of the naturally occurring L-amino acids
  MISC_FEATURE (60): Xaa equals any of the naturally occurring L-amino acids
  MISC_FEATURE (71): Xaa equals any of the naturally occurring L-amino acids
TAXCAKLAKGWCIWQGSILIHCHFFFFGXXXSPHXXXEKKPGRKGXEXEXFFPHLALLSXERLGPPVFFPXP

SEQ ID NO: 7058 - protein, 41 aa, Homo sapiens
  MISC_FEATURE (22): Xaa equals any of the naturally occurring L-amino acids
  MISC_FEATURE (34): Xaa equals any of the naturally occurring L-amino acids
MQGVPLNGYWCNPGQKIVVVWXRIMGSRFGETGXELGRTRK

SEQ ID NO: 7059 - protein, 60 aa, Homo sapiens
  MISC_FEATURE (45): Xaa equals any of the naturally occurring L-amino acids
  MISC_FEATURE (56): Xaa equals any of the naturally occurring L-amino acids
IVKLSVTVYTSVSVTLINVSLLLQMHCIGKARGSGIHRTGSQNIXQVIFVQGNGHXYGSS

SEQ ID NO: 7060 - protein, 40 aa, Homo sapiens
  MISC_FEATURE (1): Xaa equals any of the naturally occurring L-amino acids
  MISC_FEATURE (14): Xaa equals any of the naturally occurring L-amino acids
  MISC_FEATURE (20): Xaa equals any of the naturally occurring L-amino acids
XFFGTRRSPRTEAXQGKPLXLPVNKNVVGKMQTVGWIHHL

SEQ ID NO: 7061 - protein, 65 aa, Homo sapiens
  MISC_FEATURE (3): Xaa equals any of the naturally occurring L-amino acids
  MISC_FEATURE (4): Xaa equals any of the naturally occurring L-amino acids
  MISC_FEATURE (19): Xaa equals any of the naturally occurring L-amino acids
  MISC_FEATURE (33): Xaa equals any of the naturally occurring L-amino acids
  MISC_FEATURE (55): Xaa equals any of the naturally occurring L-amino acids
SLXXLSHTHLLTIETGNLXSLLKGYSEATWAVXKTIHKQYGMFVSDNRLGYPLTXWNPASALGSP

SEQ ID NO: 7062 - protein, 50 aa, Homo sapiens
  MISC_FEATURE (34): Xaa equals any of the naturally occurring L-amino acids
KRQVLHQERRLLRRGELSQILLSFYLTDIFSPYXPSNLNNIYWTLLTRFT

SEQ ID NO: 7063 - protein, 34 aa, Homo sapiens
  MISC_FEATURE (9): Xaa equals any of the naturally occurring L-amino acids
  MISC_FEATURE (18): Xaa equals any of the naturally occurring L-amino acids
  MISC_FEATURE (31): Xaa equals any of the naturally occurring L-amino acids
ATFSHVNLXLSSQVQLLXLPVQYLFRTQSSXGVN

SEQ ID NO: 7064 - protein, 53 aa, Homo sapiens
  MISC_FEATURE (13): Xaa equals any of the naturally occurring L-amino acids
  MISC_FEATURE (22): Xaa equals any of the naturally occurring L-amino acids
  MISC_FEATURE (30): Xaa equals any of the naturally occurring L-amino acids
AEPAWPHLLAHGXGCPAEALAXSYWHSSFXRISILTESFCRSCELNYNSKLWK

SEQ ID NO: 7065 - protein, 45 aa, Homo sapiens
  MISC_FEATURE (7): Xaa equals any of the naturally occurring L-amino acids
  MISC_FEATURE (17): Xaa equals any of the naturally occurring L-amino acids
  MISC_FEATURE (35): Xaa equals any of the naturally occurring L-amino acids
  MISC_FEATURE (42): Xaa equals any of the naturally occurring L-amino acids
WKWAENXPFPRLQCVRXKERGKKHNGLMVEDRFIXKKTNPRXASG

SEQ ID NO: 7066 - protein, 20 aa, Homo sapiens
  MISC_FEATURE (5): Xaa equals any of the naturally occurring L-amino acids
  MISC_FEATURE (19): Xaa equals any of the naturally occurring L-amino acids
  MISC_FEATURE (20): Xaa equals any of the naturally occurring L-amino acids
EARKXPLKSLFKSTGQEGXX

SEQ ID NO: 7067 - protein, 103 aa, Homo sapiens
  MISC_FEATURE (14): Xaa equals any of the naturally occurring L-amino acids
  MISC_FEATURE (48): Xaa equals any of the naturally occurring L-amino acids
  MISC_FEATURE (49): Xaa equals any of the naturally occurring L-amino acids
SHCTQPPLFLFKCXVSKPNQPFSTASIIKSTETDVLSLNMNHDIFSYXXFDMNSHTYKNSVYLKGFYENYFRFNFIDEAFTRKETLLYLADVSVQFRIQQNFL

SEQ ID NO: 7068 - protein, 31 aa, Homo sapiens
  MISC_FEATURE (9): Xaa equals any of the naturally occurring L-amino acids
  MISC_FEATURE (25): Xaa equals any of the naturally occurring L-amino acids
  MISC_FEATURE (31): Xaa equals any of the naturally occurring L-amino acids
RVQRPRGRXCLIFSNNSQEARWLQXVKERRX

SEQ ID NO: 7069 - protein, 111 aa, Homo sapiens
  MISC_FEATURE (5): Xaa equals any of the naturally occurring L-amino acids
  MISC_FEATURE (10): Xaa equals any of the naturally occurring L-amino acids
  MISC_FEATURE (14): Xaa equals any of the naturally occurring L-amino acids
  MISC_FEATURE (16): Xaa equals any of the naturally occurring L-amino acids
  MISC_FEATURE (23): Xaa equals any of the naturally occurring L-amino acids
  MISC_FEATURE (34): Xaa equals any of the naturally occurring L-amino acids
  MISC_FEATURE (35): Xaa equals any of the naturally occurring L-amino acids
  MISC_FEATURE (36): Xaa equals any of the naturally occurring L-amino acids
  MISC_FEATURE (38): Xaa equals any of the naturally occurring L-amino acids
  MISC_FEATURE (41): Xaa equals any of the naturally occurring L-amino acids
  MISC_FEATURE (43): Xaa equals any of the naturally occurring L-amino acids
  MISC_FEATURE (64): Xaa equals any of the naturally occurring L-amino acids
  MISC_FEATURE (80): Xaa equals any of the naturally occurring L-amino acids
  MISC_FEATURE (90): Xaa equals any of the naturally occurring L-amino acids
  MISC_FEATURE (94): Xaa equals any of the naturally occurring L-amino acids
  MISC_FEATURE (98): Xaa equals any of the naturally occurring L-amino acids
  MISC_FEATURE (99): Xaa equals any of the naturally occurring L-amino acids
CRLSXLACKXTSRXVXMKLQRSXGAAPPPAKGSXXXKXAEXGXATAGPSREQLKVDLDDLVAAXCLYCGELMIRSIDRPXIDPKRYEVGXAHLXVGGXXPFNGGWAMGSMD

SEQ ID NO: 7070 - protein, 37 aa, Homo sapiens
  MISC_FEATURE (14): Xaa equals any of the naturally occurring L-amino acids
  MISC_FEATURE (16): Xaa equals any of the naturally occurring L-amino acids
  MISC_FEATURE (28): Xaa equals any of the naturally occurring L-amino acids
  MISC_FEATURE (37): Xaa equals any of the naturally occurring L-amino acids
AARGGARYPIRPIXSXITIHWPSFYNVXTGKTQGSPX

SEQ ID NO: 7071 - protein, 78 aa, Homo sapiens
  MISC_FEATURE (6): Xaa equals any of the naturally occurring L-amino acids
  MISC_FEATURE (11): Xaa equals any of the naturally occurring L-amino acids
  MISC_FEATURE (12): Xaa equals any of the naturally occurring L-amino acids
  MISC_FEATURE (14): Xaa equals any of the naturally occurring L-amino acids
  MISC_FEATURE (15): Xaa equals any of the naturally occurring L-amino acids
  MISC_FEATURE (18): Xaa equals any of the naturally occurring L-amino acids
  MISC_FEATURE (20): Xaa equals any of the naturally occurring L-amino acids
  MISC_FEATURE (22): Xaa equals any of the naturally occurring L-amino acids
  MISC_FEATURE (25): Xaa equals any of the naturally occurring L-amino acids
  MISC_FEATURE (27): Xaa equals any of the naturally occurring L-amino acids
  MISC_FEATURE (36): Xaa equals any of the naturally occurring L-amino acids
  MISC_FEATURE (40): Xaa equals any of the naturally occurring L-amino acids
  MISC_FEATURE (42): Xaa equals any of the naturally occurring L-amino acids
  MISC_FEATURE (43): Xaa equals any of the naturally occurring L-amino acids
  MISC_FEATURE (45): Xaa equals any of the naturally occurring L-amino acids
  MISC_FEATURE (51): Xaa equals any of the naturally occurring L-amino acids
  MISC_FEATURE (53): Xaa equals any of the naturally occurring L-amino acids
  MISC_FEATURE (68): Xaa equals any of the naturally occurring L-amino acids
TTSWGXPGFIXXAXXNPXKXFXGFXLXKFFWPFKKXKKIXNXXPXFLKKFXPXLSPPWEIFGLKFNLXFWGGFGGKKF

SEQ ID NO: 7072 - protein, 24 aa, Homo sapiens
  MISC_FEATURE (6): Xaa equals any of the naturally occurring L-amino acids
  MISC_FEATURE (13): Xaa equals any of the naturally occurring L-amino acids
  MISC_FEATURE (18): Xaa equals any of the naturally occurring L-amino acids
AARAAXGGARYPXRPIMXRITIHW

SEQ ID NO: 7073 - protein, 87 aa, Homo sapiens
  MISC_FEATURE (4): Xaa equals any of the naturally occurring L-amino acids
  MISC_FEATURE (69): Xaa equals any of the naturally occurring L-amino acids
  MISC_FEATURE (77): Xaa equals any of the naturally occurring L-amino acids
  MISC_FEATURE (82): Xaa equals any of the naturally occurring L-amino acids
CILXGVGNMVVGMAGAHTTKLLGPDPSGDTSLVPLVNIWVGLLLTVMTAVSVGMVLIHGVTVITTMDTXWWPTGYCXDWLHXMDVIG

SEQ ID NO: 7074 - protein, 84 aa, Homo sapiens
  MISC_FEATURE (3): Xaa equals any of the naturally occurring L-amino acids
  MISC_FEATURE (16): Xaa equals any of the naturally occurring L-amino acids
  MISC_FEATURE (23): Xaa equals any of the naturally occurring L-amino acids
  MISC_FEATURE (39): Xaa equals any of the naturally occurring L-amino acids
  MISC_FEATURE (42): Xaa equals any of the naturally occurring L-amino acids
  MISC_FEATURE (72): Xaa equals any of the naturally occurring L-amino acids
  MISC_FEATURE (74): Xaa equals any of the naturally occurring L-amino acids
  MISC_FEATURE (75): Xaa equals any of the naturally occurring L-amino acids
  MISC_FEATURE (76): Xaa equals any of the naturally occurring L-amino acids
  MISC_FEATURE (77): Xaa equals any of the naturally occurring L-amino acids
PLXGGANLGWDLRLSXGIVRERXFFPKACFLNYPLGVNXTIXTPPHTLPFEQFSQLHLVTSIISPLPKFRFXIXXXXPHPRGKS

SEQ ID NO: 7075 - protein, 51 aa, Homo sapiens
  MISC_FEATURE (2): Xaa equals any of the naturally occurring L-amino acids
  MISC_FEATURE (18): Xaa equals any of the naturally occurring L-amino acids
  MISC_FEATURE (26): Xaa equals any of the naturally occurring L-amino acids
  MISC_FEATURE (28): Xaa equals any of the naturally occurring L-amino acids
  MISC_FEATURE (31): Xaa equals any of the naturally occurring L-amino acids
  MISC_FEATURE (37): Xaa equals any of the naturally occurring L-amino acids
RXDVNCLKSGWAEDLGSXHAIWNTDXPXLAXVGLFLXFHTSPRPLGTSAKL

SEQ ID NO: 7076 - protein, 33 aa, Homo sapiens
  MISC_FEATURE (6): Xaa equals any of the naturally occurring L-amino acids
  MISC_FEATURE (9): Xaa equals any of the naturally occurring L-amino acids
  MISC_FEATURE (10): Xaa equals any of the naturally occurring L-amino acids
  MISC_FEATURE (20): Xaa equals any of the naturally occurring L-amino acids
  MISC_FEATURE (22): Xaa equals any of the naturally occurring L-amino acids
SISLHXWEXXRELHRGGAFXLXLGTSPGCDANI

SEQ ID NO: 7077 - protein, 38 aa, Homo sapiens
  MISC_FEATURE (37): Xaa equals any of the naturally occurring L-amino acids
  MISC_FEATURE (38): Xaa equals any of the naturally occurring L-amino acids
RHEGTRGGPVPNSPYSESYYNSLAVVLQRRDWETQKXX

SEQ ID NO: 7078 - protein, 38 aa, Homo sapiens
  MISC_FEATURE (3): Xaa equals any of the naturally occurring L-amino acids
  MISC_FEATURE (15): Xaa equals any of the naturally occurring L-amino acids
  MISC_FEATURE (17): Xaa equals any of the naturally occurring L-amino acids
  MISC_FEATURE (27): Xaa equals any of the naturally occurring L-amino acids
  MISC_FEATURE (34): Xaa equals any of the naturally occurring L-amino acids
  MISC_FEATURE (36): Xaa equals any of the naturally occurring L-amino acids
RHXGTTGGPVPNSPXSXSYYNSLAVVXQRRDWDXPXLP

SEQ ID NO: 7079 - protein, 75 aa, Homo sapiens
  MISC_FEATURE (36): Xaa equals any of the naturally occurring L-amino acids
  MISC_FEATURE (37): Xaa equals any of the naturally occurring L-amino acids
  MISC_FEATURE (54): Xaa equals any of the naturally occurring L-amino acids
  MISC_FEATURE (63): Xaa equals any of the naturally occurring L-amino acids
  MISC_FEATURE (74): Xaa equals any of the naturally occurring L-amino acids
  MISC_FEATURE (75): Xaa equals any of the naturally occurring L-amino acids
FFYRIVLCLHFTSLSHFQCFAVWVKLIPFQFPNPLXXTAFTPEKTFKVSFPLYXWEFPENFPXNPALGWVFPFXX

SEQ ID NO: 7080 - protein, 54 aa, Homo sapiens
  MISC_FEATURE (5): Xaa equals any of the naturally occurring L-amino acids
  MISC_FEATURE (12): Xaa equals any of the naturally occurring L-amino acids
  MISC_FEATURE (20): Xaa equals any of the naturally occurring L-amino acids
  MISC_FEATURE (24): Xaa equals any of the naturally occurring L-amino acids
  MISC_FEATURE (26): Xaa equals any of the naturally occurring L-amino acids
  MISC_FEATURE (32): Xaa equals any of the naturally occurring L-amino acids
  MISC_FEATURE (43): Xaa equals any of the naturally occurring L-amino acids
  MISC_FEATURE (51): Xaa equals any of the naturally occurring L-amino acids
AWCFXASTTSSXLILIATLXEIWXPXILSDFXVTQLLNCQARXSLGQGNLXENP

SEQ ID NO: 7081 - protein, 34 aa, Homo sapiens
  MISC_FEATURE (22): Xaa equals any of the naturally occurring L-amino acids
  MISC_FEATURE (26): Xaa equals any of the naturally occurring L-amino acids
  MISC_FEATURE (28): Xaa equals any of the naturally occurring L-amino acids
  MISC_FEATURE (32): Xaa equals any of the naturally occurring L-amino acids
  MISC_FEATURE (34): Xaa equals any of the naturally occurring L-amino acids
IDIAVIKKAINGQVVLIIICFXLIYXCXPVHXIX

SEQ ID NO: 7082 - protein, 118 aa, Homo sapiens
  MISC_FEATURE (95): Xaa equals any of the naturally occurring L-amino acids
  MISC_FEATURE (101): Xaa equals any of the naturally occurring L-amino acids
  MISC_FEATURE (104): Xaa equals any of the naturally occurring L-amino acids
  MISC_FEATURE (113): Xaa equals any of the naturally occurring L-amino acids
  MISC_FEATURE (118): Xaa equals any of the naturally occurring L-amino acids
NILGIVGTLSSVFLKPAWFPFASFSVVNTCSLSGGKMGSSSYWCPCSFKLVNQNPSITTFPVSWWDWIWTVLYVCLLLHQSCMGAMIFHASLGLXSIFHEXPLXNEFIFYKFXNSLAX

SEQ ID NO: 7083 - protein, 58 aa, Homo sapiens
  MISC_FEATURE (28): Xaa equals any of the naturally occurring L-amino acids
  MISC_FEATURE (32): Xaa equals any of the naturally occurring L-amino acids
  MISC_FEATURE (46): Xaa equals any of the naturally occurring L-amino acids
  MISC_FEATURE (57): Xaa equals any of the naturally occurring L-amino acids
HLSHKIYERFEFYRSIPKQKTLSLFFFXLKKXNNYFPFCCIVPSKXICAAQIMGWVXP

SEQ ID NO: 7084 - protein, 135 aa, Homo sapiens
  MISC_FEATURE (1): Xaa equals any of the naturally occurring L-amino acids
  MISC_FEATURE (3): Xaa equals any of the naturally occurring L-amino acids
  MISC_FEATURE (5): Xaa equals any of the naturally occurring L-amino acids
  MISC_FEATURE (6): Xaa equals any of the naturally occurring L-amino acids
  MISC_FEATURE (8): Xaa equals any of the naturally occurring L-amino acids
  MISC_FEATURE (9): Xaa equals any of the naturally occurring L-amino acids
  MISC_FEATURE (13): Xaa equals any of the naturally occurring L-amino acids
  MISC_FEATURE (15): Xaa equals any of the naturally occurring L-amino acids
  MISC_FEATURE (16): Xaa equals any of the naturally occurring L-amino acids
  MISC_FEATURE (18): Xaa equals any of the naturally occurring L-amino acids
  MISC_FEATURE (19): Xaa equals any of the naturally occurring L-amino acids
  MISC_FEATURE (21): Xaa equals any of the naturally occurring L-amino acids
  MISC_FEATURE (32): Xaa equals any of the naturally occurring L-amino acids
  MISC_FEATURE (33): Xaa equals any of the naturally occurring L-amino acids
  MISC_FEATURE (34): Xaa equals any of the naturally occurring L-amino acids
  MISC_FEATURE (35): Xaa equals any of the naturally occurring L-amino acids
  MISC_FEATURE (37): Xaa equals any of the naturally occurring L-amino acids
  MISC_FEATURE (47): Xaa equals any of the naturally occurring L-amino acids
  MISC_FEATURE (48): Xaa equals any of the naturally occurring L-amino acids
  MISC_FEATURE (52): Xaa equals any of the naturally occurring L-amino acids
  MISC_FEATURE (56): Xaa equals any of the naturally occurring L-amino acids
  MISC_FEATURE (58): Xaa equals any of the naturally occurring L-amino acids
  MISC_FEATURE (60): Xaa equals any of the naturally occurring L-amino acids
  MISC_FEATURE (67): Xaa equals any of the naturally occurring L-amino acids
  MISC_FEATURE (78): Xaa equals any of the naturally occurring L-amino acids
  MISC_FEATURE (85): Xaa equals any of the naturally occurring L-amino acids
  MISC_FEATURE (94): Xaa equals any of the naturally occurring L-amino acids
  MISC_FEATURE (99): Xaa equals any of the naturally occurring L-amino acids
  MISC_FEATURE (108): Xaa equals any of the naturally occurring L-amino acids
  MISC_FEATURE (110): Xaa equals any of the naturally occurring L-amino acids
  MISC_FEATURE (114): Xaa equals any of the naturally occurring L-amino acids
  MISC_FEATURE (120): Xaa equals any of the naturally occurring L-amino acids
  MISC_FEATURE (121): Xaa equals any of the naturally occurring L-amino acids
  MISC_FEATURE (125): Xaa equals any of the naturally occurring L-amino acids
  MISC_FEATURE (127): Xaa equals any of the naturally occurring L-amino acids
  MISC_FEATURE (131): Xaa equals any of the naturally occurring L-amino acids
  MISC_FEATURE (132): Xaa equals any of the naturally occurring L-amino acids
  MISC_FEATURE (135): Xaa equals any of the naturally occurring L-amino acids
XIXEXXLXXFLIXLXXLXXRXRPFPLGQPKGXXXXRXKKPLGSQIPXXKDLXKTQXRXQXPPLTQRXKFGGGSKRQFXFLGQKFXQFLGNQKKXGLKIXFLKEPSLPXRXIFKXPHIFYXXEKKXTXPLGXXKSX

SEQ ID NO: 7085 - protein, 118 aa, Homo sapiens
  MISC_FEATURE (1): Xaa equals any of the naturally occurring L-amino acids
  MISC_FEATURE (4): Xaa equals any of the naturally occurring L-amino acids
  MISC_FEATURE (10): Xaa equals any of the naturally occurring L-amino acids
  MISC_FEATURE (15): Xaa equals any of the naturally occurring L-amino acids
  MISC_FEATURE (17): Xaa equals any of the naturally occurring L-amino acids
  MISC_FEATURE (20): Xaa equals any of the naturally occurring L-amino acids
  MISC_FEATURE (27): Xaa equals any of the naturally occurring L-amino acids
  MISC_FEATURE (29): Xaa equals any of the naturally occurring L-amino acids
  MISC_FEATURE (30): Xaa equals any of the naturally occurring L-amino acids
  MISC_FEATURE (33): Xaa equals any of the naturally occurring L-amino acids
  MISC_FEATURE (45): Xaa equals any of the naturally occurring L-amino acids
  MISC_FEATURE (49): Xaa equals any of the naturally occurring L-amino acids
  MISC_FEATURE (50): Xaa equals any of the naturally occurring L-amino acids
  MISC_FEATURE (57): Xaa equals any of the naturally occurring L-amino acids
  MISC_FEATURE (63): Xaa equals any of the naturally occurring L-amino acids
  MISC_FEATURE (66): Xaa equals any of the naturally occurring L-amino acids
  MISC_FEATURE (78): Xaa equals any of the naturally occurring L-amino acids
  MISC_FEATURE (79): Xaa equals any of the naturally occurring L-amino acids
  MISC_FEATURE (86): Xaa equals any of the naturally occurring L-amino acids
  MISC_FEATURE (90): Xaa equals any of the naturally occurring L-amino acids
  MISC_FEATURE (98): Xaa equals any of the naturally occurring L-amino acids
  MISC_FEATURE (101): Xaa equals any of the naturally occurring L-amino acids
  MISC_FEATURE (102): Xaa equals any of the naturally occurring L-amino acids
XPGXALCPEXTQQPXTXLNXVGILQNXSXXKLXKPVLKLIPWPGXSIPXXPANDPSXIALNDXPFXTIRQGREGSKTXXPSPFTQXKIQXWGPPKLGXLGXXYRKVTPELTGRGLKIF

SEQ ID NO: 7086 - protein, 41 aa, Homo sapiens
  MISC_FEATURE (1): Xaa equals any of the naturally occurring L-amino acids
  MISC_FEATURE (2): Xaa equals any of the naturally occurring L-amino acids
  MISC_FEATURE (14): Xaa equals any of the naturally occurring L-amino acids
  MISC_FEATURE (18): Xaa equals any of the naturally occurring L-amino acids
  MISC_FEATURE (24): Xaa equals any of the naturally occurring L-amino acids
  MISC_FEATURE (35): Xaa equals any of the naturally occurring L-amino acids
  MISC_FEATURE (40): Xaa equals any of the naturally occurring L-amino acids
XXNDQLLILITMVXIDSXVVGKFXITFLYKHVESXRIQSXY

SEQ ID NO: 7087 - protein, 64 aa, Homo sapiens
  MISC_FEATURE (2): Xaa equals any of the naturally occurring L-amino acids
  MISC_FEATURE (6): Xaa equals any of the naturally occurring L-amino acids
  MISC_FEATURE (18): Xaa equals any of the naturally occurring L-amino acids
  MISC_FEATURE (22): Xaa equals any of the naturally occurring L-amino acids
  MISC_FEATURE (27): Xaa equals any of the naturally occurring L-amino acids
  MISC_FEATURE (42): Xaa equals any of the naturally occurring L-amino acids
  MISC_FEATURE (43): Xaa equals any of the naturally occurring L-amino acids
  MISC_FEATURE (45): Xaa equals any of the naturally occurring L-amino acids
  MISC_FEATURE (51): Xaa equals any of the naturally occurring L-amino acids
  MISC_FEATURE (54): Xaa equals any of the naturally occurring L-amino acids
  MISC_FEATURE (61): Xaa equals any of the naturally occurring L-amino acids
PXLVPXGEIFGDPWGNPXAHRXKSPCXGGSQPWARKTGPPLXXFXKGRRVXISXGISKTLXRKS

SEQ ID NO: 7088 - protein, 34 aa, Homo sapiens
  MISC_FEATURE (9): Xaa equals any of the naturally occurring L-amino acids
  MISC_FEATURE (17): Xaa equals any of the naturally occurring L-amino acids
  MISC_FEATURE (27): Xaa equals any of the naturally occurring L-amino acids
  MISC_FEATURE (28): Xaa equals any of the naturally occurring L-amino acids
VWGKLTFLXQNSKAPSXVKGRPFRVKXXKPRAPS

SEQ ID NO: 7089 - protein, 66 aa, Homo sapiens
  MISC_FEATURE (11): Xaa equals any of the naturally occurring L-amino acids
  MISC_FEATURE (17): Xaa equals any of the naturally occurring L-amino acids
TASSQSPSDDXSGFQWXPRLKLSGFPPTFSPKGEIAMRFATAGSPSVRNLRLCYPWCLGAVFLTVI

SEQ ID NO: 7090 - protein, 77 aa, Homo sapiens
  MISC_FEATURE (1): Xaa equals any of the naturally occurring L-amino acids
  MISC_FEATURE (4): Xaa equals any of the naturally occurring L-amino acids
  MISC_FEATURE (6): Xaa equals any of the naturally occurring L-amino acids
  MISC_FEATURE (7): Xaa equals any of the naturally occurring L-amino acids
  MISC_FEATURE (10): Xaa equals any of the naturally occurring L-amino acids
  MISC_FEATURE (13): Xaa equals any of the naturally occurring L-amino acids
  MISC_FEATURE (15): Xaa equals any of the naturally occurring L-amino acids
  MISC_FEATURE (16): Xaa equals any of the naturally occurring L-amino acids
  MISC_FEATURE (18): Xaa equals any of the naturally occurring L-amino acids
  MISC_FEATURE (26): Xaa equals any of the naturally occurring L-amino acids
  MISC_FEATURE (35): Xaa equals any of the naturally occurring L-amino acids
  MISC_FEATURE (43): Xaa equals any of the naturally occurring L-amino acids
  MISC_FEATURE (44): Xaa equals any of the naturally occurring L-amino acids
  MISC_FEATURE (47): Xaa equals any of the naturally occurring L-amino acids
  MISC_FEATURE (49): Xaa equals any of the naturally occurring L-amino acids
  MISC_FEATURE (51): Xaa equals any of the naturally occurring L-amino acids
  MISC_FEATURE (54): Xaa equals any of the naturally occurring L-amino acids
  MISC_FEATURE (69): Xaa equals any of the naturally occurring L-amino acids
  MISC_FEATURE (70): Xaa equals any of the naturally occurring L-amino acids
  MISC_FEATURE (74): Xaa equals any of the naturally occurring L-amino acids
  MISC_FEATURE (76): Xaa equals any of the naturally occurring L-amino acids
XKHXIXXTQXHPXFXXLXVLNLGTKXLPQFFKKPXELVSPIPXXNWXPXRXKKXGLGPLGLTLGKKGLXXSPKXPXI

SEQ ID NO: 7091 - protein, 55 aa, Homo sapiens
  MISC_FEATURE (4): Xaa equals any of the naturally occurring L-amino acids
  MISC_FEATURE (5): Xaa equals any of the naturally occurring L-amino acids
  MISC_FEATURE (10): Xaa equals any of the naturally occurring L-amino acids
  MISC_FEATURE (22): Xaa equals any of the naturally occurring L-amino acids
  MISC_FEATURE (33): Xaa equals any of the naturally occurring L-amino acids
AKKXXPFLAXRGKKDPKKAFKXNPPPEKTPGTXRLNPLKGNQAFKKRKATNPPVP

SEQ ID NO: 7092 - protein, 151 aa, Homo sapiens
  MISC_FEATURE (3): Xaa equals any of the naturally occurring L-amino acids
  MISC_FEATURE (6): Xaa equals any of the naturally occurring L-amino acids
  MISC_FEATURE (11): Xaa equals any of the naturally occurring L-amino acids
  MISC_FEATURE (17): Xaa equals any of the naturally occurring L-amino acids
  MISC_FEATURE (18): Xaa equals any of the naturally occurring L-amino acids
  MISC_FEATURE (29): Xaa equals any of the naturally occurring L-amino acids
  MISC_FEATURE (32): Xaa equals any of the naturally occurring L-amino acids
  MISC_FEATURE (35): Xaa equals any of the naturally occurring L-amino acids
  MISC_FEATURE (37): Xaa equals any of the naturally occurring L-amino acids
  MISC_FEATURE (38): Xaa equals any of the naturally occurring L-amino acids
  MISC_FEATURE (48): Xaa equals any of the naturally occurring L-amino acids
  MISC_FEATURE (53): Xaa equals any of the naturally occurring L-amino acids
  MISC_FEATURE (64): Xaa equals any of the naturally occurring L-amino acids
  MISC_FEATURE (65): Xaa equals any of the naturally occurring L-amino acids
  MISC_FEATURE (73): Xaa equals any of the naturally occurring L-amino acids
  MISC_FEATURE (74): Xaa equals any of the naturally occurring L-amino acids
  MISC_FEATURE (79): Xaa equals any of the naturally occurring L-amino acids
  MISC_FEATURE (85): Xaa equals any of the naturally occurring L-amino acids
  MISC_FEATURE (88): Xaa equals any of the naturally occurring L-amino acids
  MISC_FEATURE (106): Xaa equals any of the naturally occurring L-amino acids
  MISC_FEATURE (108): Xaa equals any of the naturally occurring L-amino acids
  MISC_FEATURE (113): Xaa equals any of the naturally occurring L-amino acids
  MISC_FEATURE (117): Xaa equals any of the naturally occurring L-amino acids
  MISC_FEATURE (125): Xaa equals any of the naturally occurring L-amino acids
  MISC_FEATURE (131): Xaa equals any of the naturally occurring L-amino acids
  MISC_FEATURE (149): Xaa equals any of the naturally occurring L-amino acids
ALXPCXSSLGXPAPRKXXWGSFRGAPRKXKRXPLXPXXLSSPHGGPFXLKKGXKLPKPPKPFEXXRNFPFPPXXGGGPXPPNFLXKKXFPPLGKDLQIGFGQRPLXIXNKATXGGKXTQKSLGGXTPRPEXAPTRPLAFGNQLGLPNQXIP

SEQ ID NO: 7093 - protein, 46 aa, Homo sapiens
  MISC_FEATURE (8): Xaa equals any of the naturally occurring L-amino acids
  MISC_FEATURE (24): Xaa equals any of the naturally occurring L-amino acids
  MISC_FEATURE (30): Xaa equals any of the naturally occurring L-amino acids
  MISC_FEATURE (31): Xaa equals any of the naturally occurring L-amino acids
  MISC_FEATURE (45): Xaa equals any of the naturally occurring L-amino acids
RHEGGPWXPNSPLSACSSVIYHIXNLGPGXXFSPNRSGCNLGGKXP

SEQ ID NO: 7094 - protein, 25 aa, Homo sapiens
  MISC_FEATURE (5): Xaa equals any of the naturally occurring L-amino acids
  MISC_FEATURE (6): Xaa equals any of the naturally occurring L-amino acids
  MISC_FEATURE (14): Xaa equals any of the naturally occurring L-amino acids
  MISC_FEATURE (17): Xaa equals any of the naturally occurring L-amino acids
  MISC_FEATURE (24): Xaa equals any of the naturally occurring L-amino acids
TKGPXXKKGGLSLXKTXKIWEIKXF

SEQ ID NO: 7095 - protein, 46 aa, Homo sapiens
  MISC_FEATURE (30): Xaa equals any of the naturally occurring L-amino acids
  MISC_FEATURE (34): Xaa equals any of the naturally occurring L-amino acids
  MISC_FEATURE (42): Xaa equals any of the naturally occurring L-amino acids
  MISC_FEATURE (45): Xaa equals any of the naturally occurring L-amino acids
KRGPPLGKKLELHRGGGRSTTNWIPRAAGXLHEXAEWYVWSXSRXK

SEQ ID NO: 7096 - protein, 25 aa, Homo sapiens
  MISC_FEATURE (1): Xaa equals any of the naturally occurring L-amino acids
  MISC_FEATURE (3): Xaa equals any of the naturally occurring L-amino acids
  MISC_FEATURE (8): Xaa equals any of the naturally occurring L-amino acids
  MISC_FEATURE (9): Xaa equals any of the naturally occurring L-amino acids
XRXVGLGXXVVARRWPGWCWRAWPV

SEQ ID NO: 7097 - protein, 116 aa, Homo sapiens
  MISC_FEATURE (8): Xaa equals any of the naturally occurring L-amino acids
  MISC_FEATURE (25): Xaa equals any of the naturally occurring L-amino acids
  MISC_FEATURE (26): Xaa equals any of the naturally occurring L-amino acids
  MISC_FEATURE (30): Xaa equals any of the naturally occurring L-amino acids
  MISC_FEATURE (36): Xaa equals any of the naturally occurring L-amino acids
  MISC_FEATURE (37): Xaa equals any of the naturally occurring L-amino acids
  MISC_FEATURE (38): Xaa equals any of the naturally occurring L-amino acids
  MISC_FEATURE (41): Xaa equals any of the naturally occurring L-amino acids
  MISC_FEATURE (45): Xaa equals any of the naturally occurring L-amino acids
  MISC_FEATURE (49): Xaa equals any of the naturally occurring L-amino acids
  MISC_FEATURE (50): Xaa equals any of the naturally occurring L-amino acids
  MISC_FEATURE (54): Xaa equals any of the naturally occurring L-amino acids
  MISC_FEATURE (62): Xaa equals any of the naturally occurring L-amino acids
  MISC_FEATURE (93): Xaa equals any of the naturally occurring L-amino acids
  MISC_FEATURE (98): Xaa equals any of the naturally occurring L-amino acids
  MISC_FEATURE (99): Xaa equals any of the naturally occurring L-amino acids
  MISC_FEATURE (102): Xaa equals any of the naturally occurring L-amino acids
LVPNSARXLYLMKLLGNGVFPSVTXXISWXHPIIPXXXTTXNFPXGGPXXRVKXCLILEQKXFPWGGSNPLWPIMFGSRWLGPLAWGFLLGNXSLPFXXGTXPCLAIPLFFQSSLW

SEQ ID NO: 7098 - protein, 130 aa, Homo sapiens
  MISC_FEATURE (1): Xaa equals any of the naturally occurring L-amino acids
  MISC_FEATURE (2): Xaa equals any of the naturally occurring L-amino acids
  MISC_FEATURE (5): Xaa equals any of the naturally occurring L-amino acids
  MISC_FEATURE (9): Xaa equals any of the naturally occurring L-amino acids
  MISC_FEATURE (12): Xaa equals any of the naturally occurring L-amino acids
  MISC_FEATURE (13): Xaa equals any of the naturally occurring L-amino acids
  MISC_FEATURE (21): Xaa equals any of the naturally occurring L-amino acids
  MISC_FEATURE (24): Xaa equals any of the naturally occurring L-amino acids
  MISC_FEATURE (32): Xaa equals any of the naturally occurring L-amino acids
  MISC_FEATURE (33): Xaa equals any of the naturally occurring L-amino acids
  MISC_FEATURE (36): Xaa equals any of the naturally occurring L-amino acids
  MISC_FEATURE (40): Xaa equals any of the naturally occurring L-amino acids
  MISC_FEATURE (41): Xaa equals any of the naturally occurring L-amino acids
  MISC_FEATURE (46): Xaa equals any of the naturally occurring L-amino acids
  MISC_FEATURE (47): Xaa equals any of the naturally occurring L-amino acids
  MISC_FEATURE (50): Xaa equals any of the naturally occurring L-amino acids
  MISC_FEATURE (54): Xaa equals any of the naturally occurring L-amino acids
  MISC_FEATURE (55): Xaa equals any of the naturally occurring L-amino acids
  MISC_FEATURE (61): Xaa equals any of the naturally occurring L-amino acids
  MISC_FEATURE (64): Xaa equals any of the naturally occurring L-amino acids
  MISC_FEATURE (70): Xaa equals any of the naturally occurring L-amino acids
  MISC_FEATURE (71): Xaa equals any of the naturally occurring L-amino acids
  MISC_FEATURE (73): Xaa equals any of the naturally occurring L-amino acids
  MISC_FEATURE (80): Xaa equals any of the naturally occurring L-amino acids
  MISC_FEATURE (83): Xaa equals any of the naturally occurring L-amino acids
  MISC_FEATURE (89): Xaa equals any of the naturally occurring L-amino acids
  MISC_FEATURE (97): Xaa equals any of the naturally occurring L-amino acids
  MISC_FEATURE (98): Xaa equals any of the naturally occurring L-amino acids
XXKKXGKKXPSXXLFPQGFKXVWXPKKGFNPXXNLXPFPXXFGETXXLNXGKIXXGGGFFXIWXFPPPKXXLXKKTPPPXFFXGGKKRXFPKKNFGXXIFFLKNLKPPPPFGKTFGGETQTPKPKGPFFK

SEQ ID NO: 7099 - protein, 74 aa, Homo sapiens
  MISC_FEATURE (9): Xaa equals any of the naturally occurring L-amino acids
  MISC_FEATURE (12): Xaa equals any of the naturally occurring L-amino acids
  MISC_FEATURE (15): Xaa equals any of the naturally occurring L-amino acids
  MISC_FEATURE (23): Xaa equals any of the naturally occurring L-amino acids
  MISC_FEATURE (34): Xaa equals any of the naturally occurring L-amino acids
  MISC_FEATURE (41): Xaa equals any of the naturally occurring L-amino acids
TLERSLGLXNIXKIXEWSWALKXTYQEHQENSIXIQYKSYXSRPIISFELEKPNGEPLTQINTLSFSQLGARHL

SEQ ID NO: 7100 - protein, 17 aa, Homo sapiens
  MISC_FEATURE (7): Xaa equals any of the naturally occurring L-amino acids
  MISC_FEATURE (16): Xaa equals any of the naturally occurring L-amino acids
VFFFFFXFEKCNIFPXF

SEQ ID NO: 7101 - protein, 32 aa, Homo sapiens
  MISC_FEATURE (4): Xaa equals any of the naturally occurring L-amino acids
  MISC_FEATURE (8): Xaa equals any of the naturally occurring L-amino acids
  MISC_FEATURE (12): Xaa equals any of the naturally occurring L-amino acids
  MISC_FEATURE (14): Xaa equals any of the naturally occurring L-amino acids
  MISC_FEATURE (32): Xaa equals any of the naturally occurring L-amino acids
ARSXPLLXEQMXAXPPKVAAVLELVDPPGCRX

SEQ ID NO: 7102 - protein, 82 aa, Homo sapiens
  MISC_FEATURE (20): Xaa equals any of the naturally occurring L-amino acids
  MISC_FEATURE (21): Xaa equals any of the naturally occurring L-amino acids
  MISC_FEATURE (23): Xaa equals any of the naturally occurring L-amino acids
  MISC_FEATURE (24): Xaa equals any of the naturally occurring L-amino acids
  MISC_FEATURE (53): Xaa equals any of the naturally occurring L-amino acids
  MISC_FEATURE (60): Xaa equals any of the naturally occurring L-amino acids
  MISC_FEATURE (68): Xaa equals any of the naturally occurring L-amino acids
  MISC_FEATURE (72): Xaa equals any of the naturally occurring L-amino acids
  MISC_FEATURE (82): Xaa equals any of the naturally occurring L-amino acids
FRVILLPKDGKIKSRTKSNXXEXXSISSTYCGITATKALDGKIILSCFLCFKXSPRSNVXGLGTGIIXLQLXLKNSGYHSWX

SEQ ID NO: 7103 - protein, 39 aa, Homo sapiens
  MISC_FEATURE (1): Xaa equals any of the naturally occurring L-amino acids
  MISC_FEATURE (3): Xaa equals any of the naturally occurring L-amino acids
  MISC_FEATURE (4): Xaa equals any of the naturally occurring L-amino acids
  MISC_FEATURE (12): Xaa equals any of the naturally occurring L-amino acids
  MISC_FEATURE (15): Xaa equals any of the naturally occurring L-amino acids
  MISC_FEATURE (35): Xaa equals any of the naturally occurring L-amino acids
  MISC_FEATURE (38): Xaa equals any of the naturally occurring L-amino acids
XLXXSPIIKGTXAGXSTESGGRSRTSGSPGLQEFXTSXI

SEQ ID NO: 7104 - protein, 71 aa, Homo sapiens
RMSYLKGMCHLLCNCIPTRSYINVLRQQHLWSKCQASRGTLVKGSSGLIWICRFLHFCYKIYSPLKLPLVL

SEQ ID NO: 7105 - protein, 56 aa, Homo sapiens
  MISC_FEATURE (3): Xaa equals any of the naturally occurring L-amino acids
  MISC_FEATURE (5): Xaa equals any of the naturally occurring L-amino acids
  MISC_FEATURE (22): Xaa equals any of the naturally occurring L-amino acids
  MISC_FEATURE (41): Xaa equals any of the naturally occurring L-amino acids
  MISC_FEATURE (42): Xaa equals any of the naturally occurring L-amino acids
  MISC_FEATURE (44): Xaa equals any of the naturally occurring L-amino acids
  MISC_FEATURE (46): Xaa equals any of the naturally occurring L-amino acids
CAXAXLLTKGTNSAPPPKVAAXLELVDPPGCRSSPRAAKQXXRXCXCRGVYHAFKK

SEQ ID NO: 7106 - protein, 37 aa, Homo sapiens
  MISC_FEATURE (34): Xaa equals any of the naturally occurring L-amino acids
  MISC_FEATURE (37): Xaa equals any of the naturally occurring L-amino acids
AARAARGGARYPIRPIVSRITIHWPSFYNVVTGXPKX

SEQ ID NO: 7107 - protein, 41 aa, Homo sapiens
  MISC_FEATURE (1): Xaa equals any of the naturally occurring L-amino acids
  MISC_FEATURE (10): Xaa equals any of the naturally occurring L-amino acids
  MISC_FEATURE (27): Xaa equals any of the naturally occurring L-amino acids
  MISC_FEATURE (36): Xaa equals any of the naturally occurring L-amino acids
  MISC_FEATURE (37): Xaa equals any of the naturally occurring L-amino acids
  MISC_FEATURE (38): Xaa equals any of the naturally occurring L-amino acids
XPHQQKELLXSMFGKQPGQGRNSRGNXKMVLFPNPXXXPNV

SEQ ID NO: 7108 - protein, 35 aa, Homo sapiens
  MISC_FEATURE (27): Xaa equals any of the naturally occurring L-amino acids
  MISC_FEATURE (34): Xaa equals any of the naturally occurring L-amino acids
  MISC_FEATURE (35): Xaa equals any of the naturally occurring L-amino acids
AARGGARYPIRPIVSRITIHWPSFYNXVTGKPKXX

SEQ ID NO: 7109 - protein, 43 aa, Homo sapiens
  MISC_FEATURE (1): Xaa equals any of the naturally occurring L-amino acids
  MISC_FEATURE (2): Xaa equals any of the naturally occurring L-amino acids
  MISC_FEATURE (5): Xaa equals any of the naturally occurring L-amino acids
  MISC_FEATURE (29): Xaa equals any of the naturally occurring L-amino acids
  MISC_FEATURE (31): Xaa equals any of the naturally occurring L-amino acids
  MISC_FEATURE (34): Xaa equals any of the naturally occurring L-amino acids
  MISC_FEATURE (36): Xaa equals any of the naturally occurring L-amino acids
  MISC_FEATURE (43): Xaa equals any of the naturally occurring L-amino acids
XXNSXGKVTHWWGALNSGSGGCRIRHELXPXSVXYXHLLPPCX

SEQ ID NO: 7110 - protein, 33 aa, Homo sapiens
  MISC_FEATURE (31): Xaa equals any of the naturally occurring L-amino acids
  MISC_FEATURE (32): Xaa equals any of the naturally occurring L-amino acids
  MISC_FEATURE (33): Xaa equals any of the naturally occurring L-amino acids
ARARYPIRPIVSRITIHWPSFYNVVTGKNPXXX

SEQ ID NO: 7111 - protein, 23 aa, Homo sapiens
  MISC_FEATURE (14): Xaa equals any of the naturally occurring L-amino acids
  MISC_FEATURE (16): Xaa equals any of the naturally occurring L-amino acids
  MISC_FEATURE (19): Xaa equals any of the naturally occurring L-amino acids
  MISC_FEATURE (20): Xaa equals any of the naturally occurring L-amino acids
ARAEFGTRFFFFFXGXLFXXITL

SEQ ID NO: 7112 - protein, 27 aa, Homo sapiens
  MISC_FEATURE (4): Xaa equals any of the naturally occurring L-amino acids
  MISC_FEATURE (7): Xaa equals any of the naturally occurring L-amino acids
  MISC_FEATURE (13): Xaa equals any of the naturally occurring L-amino acids
  MISC_FEATURE (19): Xaa equals any of the naturally occurring L-amino acids
LFIXRDXGAHNCXVDIDLXCENISTLE

SEQ ID NO: 7113 - protein, 85 aa, Homo sapiens
  MISC_FEATURE (8): Xaa equals any of the naturally occurring L-amino acids
  MISC_FEATURE (11): Xaa equals any of the naturally occurring L-amino acids
  MISC_FEATURE (24): Xaa equals any of the naturally occurring L-amino acids
  MISC_FEATURE (27): Xaa equals any of the naturally occurring L-amino acids
  MISC_FEATURE (36): Xaa equals any of the naturally occurring L-amino acids
  MISC_FEATURE (37): Xaa equals any of the naturally occurring L-amino acids
  MISC_FEATURE (46): Xaa equals any of the naturally occurring L-amino acids
  MISC_FEATURE (69): Xaa equals any of the naturally occurring L-amino acids
  MISC_FEATURE (79): Xaa equals any of the naturally occurring L-amino acids
LLLLCNAXRHXPWDHVSFNKHIQXALXELMASKAQXXCFKHSAISXHHLLASICSVGFLPSSLMTGLYXKKLPPETYLXLSLLCL

SEQ ID NO: 7114 - protein, 70 aa, Homo sapiens
  MISC_FEATURE (65): Xaa equals any of the naturally occurring L-amino acids
RSLFHVGKLLAISVSCVYAYVTECLKFLQKLSKQKHTEVHLLGEDIVGLIIYPGTLRNEMEAGNXDGMQI

SEQ ID NO: 7115 - protein, 37 aa, Homo sapiens
  MISC_FEATURE (35): Xaa equals any of the naturally occurring L-amino acids
  MISC_FEATURE (37): Xaa equals any of the naturally occurring L-amino acids
AARAARGGARYPIRPIVSRITIHWPSFYNVVTGKXKX

SEQ ID NO: 7116 - protein, 94 aa, Homo sapiens
  MISC_FEATURE (18): Xaa equals any of the naturally occurring L-amino acids
  MISC_FEATURE (22): Xaa equals any of the naturally occurring L-amino acids
  MISC_FEATURE (33): Xaa equals any of the naturally occurring L-amino acids
  MISC_FEATURE (49): Xaa equals any of the naturally occurring L-amino acids
  MISC_FEATURE (76): Xaa equals any of the naturally occurring L-amino acids
  MISC_FEATURE (81): Xaa equals any of the naturally occurring L-amino acids
  MISC_FEATURE (85): Xaa equals any of the naturally occurring L-amino acids
  MISC_FEATURE (88): Xaa equals any of the naturally occurring L-amino acids
APPCGHHPCRIICENNPXPRHXGQLSFVALEIXGVPPLDPRAHSPSTTXVSAAHQIVPTKKMLCEPICVANRHGEXADFQXRLPXVTXKPELGS

SEQ ID NO: 7117 - protein, 33 aa, Homo sapiens
  MISC_FEATURE (5): Xaa equals any of the naturally occurring L-amino acids
  MISC_FEATURE (10): Xaa equals any of the naturally occurring L-amino acids
  MISC_FEATURE (21): Xaa equals any of the naturally occurring L-amino acids
GVFLXTSGSXGLDECGPSYGXVPHPPPCSPEPP

SEQ ID NO: 7118 - protein, 79 aa, Homo sapiens
  MISC_FEATURE (73): Xaa equals any of the naturally occurring L-amino acids
WCGGSWELCSFGPQTPPESAVCAFIDVPLLCHVLSQAVAAACSALFFILEPDELLTVDSVISFRMPAPCPCSXVFSVLP

SEQ ID NO: 7119 - protein, 27 aa, Homo sapiens
  MISC_FEATURE (3): Xaa equals any of the naturally occurring L-amino acids
  MISC_FEATURE (18): Xaa equals any of the naturally occurring L-amino acids
ISXLVYVNFERLHDFLTXIDLDAVEVV

SEQ ID NO: 7120 - protein, 43 aa, Homo sapiens
  MISC_FEATURE (5): Xaa equals any of the naturally occurring L-amino acids
  MISC_FEATURE (7): Xaa equals any of the naturally occurring L-amino acids
  MISC_FEATURE (22): Xaa equals any of the naturally occurring L-amino acids
  MISC_FEATURE (35): Xaa equals any of the naturally occurring L-amino acids
  MISC_FEATURE (36): Xaa equals any of the naturally occurring L-amino acids
SCRMXLXLKGTKAGSSTASGGXSRTSGSPGLQEFXXSHLPVIR

SEQ ID NO: 7121 - protein, 32 aa, Homo sapiens
  MISC_FEATURE (2): Xaa equals any of the naturally occurring L-amino acids
  MISC_FEATURE (10): Xaa equals any of the naturally occurring L-amino acids
  MISC_FEATURE (12): Xaa equals any of the naturally occurring L-amino acids
  MISC_FEATURE (13): Xaa equals any of the naturally occurring L-amino acids
  MISC_FEATURE (17): Xaa equals any of the naturally occurring L-amino acids
  MISC_FEATURE (30): Xaa equals any of the naturally occurring L-amino acids
KXNGGLDLNXVXXGLGXAPPKKSFFFSELXGS

SEQ ID NO: 7122 - protein, 69 aa, Homo sapiens
  MISC_FEATURE (10): Xaa equals any of the naturally occurring L-amino acids
  MISC_FEATURE (28): Xaa equals any of the naturally occurring L-amino acids
  MISC_FEATURE (30): Xaa equals any of the naturally occurring L-amino acids
  MISC_FEATURE (39): Xaa equals any of the naturally occurring L-amino acids
  MISC_FEATURE (42): Xaa equals any of the naturally occurring L-amino acids
  MISC_FEATURE (43): Xaa equals any of the naturally occurring L-amino acids
  MISC_FEATURE (46): Xaa equals any of the naturally occurring L-amino acids
  MISC_FEATURE (65): Xaa equals any of the naturally occurring L-amino acids
GHSLGKGALXFGSCGKMSPPEREAALNXVXTWAVGLTSXQHXXKGXGGLLPALIKGQNFPPFQKXGLPL

SEQ ID NO: 7123 - protein, 34 aa, Homo sapiens
  MISC_FEATURE (31): Xaa equals any of the naturally occurring L-amino acids
  MISC_FEATURE (32): Xaa equals any of the naturally occurring L-amino acids
  MISC_FEATURE (34): Xaa equals any of the naturally occurring L-amino acids
AARGGARYPIRPIVSRITIHWPSFYNVVTGXXKX

SEQ ID NO: 7124 - protein, 77 aa, Homo sapiens
  MISC_FEATURE (49): Xaa equals any of the naturally occurring L-amino acids
  MISC_FEATURE (77): Xaa equals any of the naturally occurring L-amino acids
VFFSFLQLLDNALPYGWAQKHSKFWGSFLSQFLVEGWGIPVLKRISYAXIVIVILTTRRPALIILSSFLQMFHLGPX

SEQ ID NO: 7125 - protein, 32 aa, Homo sapiens
  MISC_FEATURE (31): Xaa equals any of the naturally occurring L-amino acids
AARGGARYPIRPIVSRITIHWPSFYNVVTDXK

SEQ ID NO: 7126 - protein, 46 aa, Homo sapiens
RYYKGRFIFKLQFLKVIIDSVVHSIVINHWVSSVIFVYQMINFQFR

SEQ ID NO: 7127 - protein, 61 aa, Homo sapiens
  MISC_FEATURE (41): Xaa equals any of the naturally occurring L-amino acids
  MISC_FEATURE (45): Xaa equals any of the naturally occurring L-amino acids
SLIHVRVSEFIHLSEFRNFTLKLNFHYIQAVVEFFSESLIXFLIXKIPIVSSINALIKYCT

SEQ ID NO: 7128 - protein, 32 aa, Homo sapiens
  MISC_FEATURE (31): Xaa equals any of the naturally occurring L-amino acids
  MISC_FEATURE (32): Xaa equals any of the naturally occurring L-amino acids
AARGGARYPIRPIVSRITIHWPSFYNVVTDXX

SEQ ID NO: 7129 - protein, 20 aa, Homo sapiens
  MISC_FEATURE (15): Xaa equals any of the naturally occurring L-amino acids
  MISC_FEATURE (18): Xaa equals any of the naturally occurring L-amino acids
ARVFFFFLGGPKFYXLFXKK

SEQ ID NO: 7130 - protein, 65 aa, Homo sapiens
  MISC_FEATURE (9): Xaa equals any of the naturally occurring L-amino acids
  MISC_FEATURE (36): Xaa equals any of the naturally occurring L-amino acids
  MISC_FEATURE (45): Xaa equals any of the naturally occurring L-amino acids
  MISC_FEATURE (50): Xaa equals any of the naturally occurring L-amino acids
  MISC_FEATURE (51): Xaa equals any of the naturally occurring L-amino acids
  MISC_FEATURE (58): Xaa equals any of the naturally occurring L-amino acids
LGCSFLIIXYITENWTFTFSYLAFPFNPKISVFSSXKRSPFQLWXQPPWXXIKLPLLXFLNIWNL

SEQ ID NO: 7131 - protein, 58 aa, Homo sapiens
  MISC_FEATURE (6): Xaa equals any of the naturally occurring L-amino acids
  MISC_FEATURE (21): Xaa equals any of the naturally occurring L-amino acids
  MISC_FEATURE (36): Xaa equals any of the naturally occurring L-amino acids
  MISC_FEATURE (48): Xaa equals any of the naturally occurring L-amino acids
  MISC_FEATURE (50): Xaa equals any of the naturally occurring L-amino acids
  MISC_FEATURE (53): Xaa equals any of the naturally occurring L-amino acids
  MISC_FEATURE (58): Xaa equals any of the naturally occurring L-amino acids
GSRLEXDLGRRQSLTPIGVRXEDLLHSSSVDNHNGXPRKGLSCFGLLXVXAVXCHSGX

SEQ ID NO: 7132 - protein, 37 aa, Homo sapiens
  MISC_FEATURE (34): Xaa equals any of the naturally occurring L-amino acids
  MISC_FEATURE (35): Xaa equals any of the naturally occurring L-amino acids
  MISC_FEATURE (36): Xaa equals any of the naturally occurring L-amino acids
  MISC_FEATURE (37): Xaa equals any of the naturally occurring L-amino acids
AARGGARYPIRPIVSRITIHWPSFYNVVTGKPNXXXX

SEQ ID NO: 7133 - protein, 38 aa, Homo sapiens
  MISC_FEATURE (24): Xaa equals any of the naturally occurring L-amino acids
LSWTEVCQSRYCITILLVLTVFTXLNGKPTGYFLKLPL

SEQ ID NO: 7134 - protein, 33 aa, Homo sapiens
  MISC_FEATURE (10): Xaa equals any of the naturally occurring L-amino acids
  MISC_FEATURE (13): Xaa equals any of the naturally occurring L-amino acids
  MISC_FEATURE (18): Xaa equals any of the naturally occurring L-amino acids
  MISC_FEATURE (21): Xaa equals any of the naturally occurring L-amino acids
  MISC_FEATURE (23): Xaa equals any of the naturally occurring L-amino acids
  MISC_FEATURE (27): Xaa equals any of the naturally occurring L-amino acids
  MISC_FEATURE (33): Xaa equals any of the naturally occurring L-amino acids
PPPFFLGKFXYPXPPPFXFPXKXKFFXNPRLPX

SEQ ID NO: 7135 - protein, 91 aa, Homo sapiens
  MISC_FEATURE (18): Xaa equals any of the naturally occurring L-amino acids
  MISC_FEATURE (33): Xaa equals any of the naturally occurring L-amino acids
  MISC_FEATURE (34): Xaa equals any of the naturally occurring L-amino acids
  MISC_FEATURE (36): Xaa equals any of the naturally occurring L-amino acids
  MISC_FEATURE (42): Xaa equals any of the naturally occurring L-amino acids
  MISC_FEATURE (58): Xaa equals any of the naturally occurring L-amino acids
  MISC_FEATURE (67): Xaa equals any of the naturally occurring L-amino acids
  MISC_FEATURE (81): Xaa equals any of the naturally occurring L-amino acids
  MISC_FEATURE (90): Xaa equals any of the naturally occurring L-amino acids
MGVLVTAKRLRSVPTPVXFPGRGRLSRRERKAXXGXKVMRGXKEDTETLKVEPVWTQXKESLRISMXEKEKKRISRIVLHXLLVKAPGNXH

SEQ ID NO: 7136 - protein, 64 aa, Homo sapiens
  MISC_FEATURE (19): Xaa equals any of the naturally occurring L-amino acids
ECRPPENQAEDCGVRCPRXVSASSGATSKSSSMNPTETKSLHRGKERNEKLILLMETFAEKNLH

SEQ ID NO: 7137 - protein, 23 aa, Homo sapiens
  MISC_FEATURE (5): Xaa equals any of the naturally occurring L-amino acids
  MISC_FEATURE (7): Xaa equals any of the naturally occurring L-amino acids
  MISC_FEATURE (10): Xaa equals any of the naturally occurring L-amino acids
  MISC_FEATURE (14): Xaa equals any of the naturally occurring L-amino acids
INASXLXTPXLIYXGLNFCLLCA

SEQ ID NO: 7138 - protein, 33 aa, Homo sapiens
  MISC_FEATURE (31): Xaa equals any of the naturally occurring L-amino acids
  MISC_FEATURE (32): Xaa equals any of the naturally occurring L-amino acids
  MISC_FEATURE (33): Xaa equals any of the naturally occurring L-amino acids
GGARYPIRPIVSRITIHWPSFYNVVTGKPKXXX

SEQ ID NO: 7139 - protein, 38 aa, Homo sapiens
  MISC_FEATURE (33): Xaa equals any of the naturally occurring L-amino acids
  MISC_FEATURE (34): Xaa equals any of the naturally occurring L-amino acids
  MISC_FEATURE (37): Xaa equals any of the naturally occurring L-amino acids
  MISC_FEATURE (38): Xaa equals any of the naturally occurring L-amino acids
GTRGGPVPNSPYSESYYNSLAVVLQRRDWVKPXXSFXX

SEQ ID NO: 7140 - protein, 33 aa, Homo sapiens
  MISC_FEATURE (31): Xaa equals any of the naturally occurring L-amino acids
AARGGARYPIRPIVSRITIHWPSFYNVVTGXPK

SEQ ID NO: 7141 - protein, 16 aa, Homo sapiens
  MISC_FEATURE (9): Xaa equals any of the naturally occurring L-amino acids
  MISC_FEATURE (13): Xaa equals any of the naturally occurring L-amino acids
  MISC_FEATURE (16): Xaa equals any of the naturally occurring L-amino acids
GKRPTASIXTCNXSCX

SEQ ID NO: 7142 - protein, 43 aa, Homo sapiens
  MISC_FEATURE (15): Xaa equals any of the naturally occurring L-amino acids
  MISC_FEATURE (18): Xaa equals any of the naturally occurring L-amino acids
  MISC_FEATURE (23): Xaa equals any of the naturally occurring L-amino acids
NLTKGTKLNFHRGGXAVXKLLDXPGLQGIPEQPKMAEVQVLGC

SEQ ID NO: 7143 - protein, 43 aa, Homo sapiens
  MISC_FEATURE (41): Xaa equals any of the naturally occurring L-amino acids
AARGGARYPIRPIVSRITIHWPSFYNVVTGKTQTFSFPLYXPT

SEQ ID NO: 7144 - protein, 78 aa, Homo sapiens
  MISC_FEATURE (39): Xaa equals any of the naturally occurring L-amino acids
  MISC_FEATURE (42): Xaa equals any of the naturally occurring L-amino acids
  MISC_FEATURE (52): Xaa equals any of the naturally occurring L-amino acids
  MISC_FEATURE (57): Xaa equals any of the naturally occurring L-amino acids
  MISC_FEATURE (62): Xaa equals any of the naturally occurring L-amino acids
NPPSGEISLGPSNFQFFNQPKTPTPQNLYFFYFKNPFKXPNXGGPIPPPLFXFEKPXGGGPXFLKFLFWGGFFPGLSL

SEQ ID NO: 7145 - protein, 54 aa, Homo sapiens
  MISC_FEATURE (3): Xaa equals any of the naturally occurring L-amino acids
  MISC_FEATURE (18): Xaa equals any of the naturally occurring L-amino acids
  MISC_FEATURE (20): Xaa equals any of the naturally occurring L-amino acids
  MISC_FEATURE (32): Xaa equals any of the naturally occurring L-amino acids
  MISC_FEATURE (43): Xaa equals any of the naturally occurring L-amino acids
  MISC_FEATURE (48): Xaa equals any of the naturally occurring L-amino acids
  MISC_FEATURE (49): Xaa equals any of the naturally occurring L-amino acids
THXCLTVAELFELLIQCXLXFNRSNPLPYPLXAHVFLTLPGCXNNSPXXWSFPQ

SEQ ID NO: 7146 - protein, 34 aa, Homo sapiens
  MISC_FEATURE (8): Xaa equals any of the naturally occurring L-amino acids
  MISC_FEATURE (21): Xaa equals any of the naturally occurring L-amino acids
  MISC_FEATURE (24): Xaa equals any of the naturally occurring L-amino acids
PPLWPVGXSPEHCAVGPSWSXLLXGTVERPSSSK

SEQ ID NO: 7147 - protein, 82 aa, Homo sapiens
  MISC_FEATURE (2): Xaa equals any of the naturally occurring L-amino acids
  MISC_FEATURE (6): Xaa equals any of the naturally occurring L-amino acids
  MISC_FEATURE (15): Xaa equals any of the naturally occurring L-amino acids
  MISC_FEATURE (23): Xaa equals any of the naturally occurring L-amino acids
  MISC_FEATURE (38): Xaa equals any of the naturally occurring L-amino acids
  MISC_FEATURE (42): Xaa equals any of the naturally occurring L-amino acids
  MISC_FEATURE (48): Xaa equals any of the naturally occurring L-amino acids
  MISC_FEATURE (55): Xaa equals any of the naturally occurring L-amino acids
  MISC_FEATURE (56): Xaa equals any of the naturally occurring L-amino acids
  MISC_FEATURE (58): Xaa equals any of the naturally occurring L-amino acids
  MISC_FEATURE (63): Xaa equals any of the naturally occurring L-amino acids
  MISC_FEATURE (66): Xaa equals any of the naturally occurring L-amino acids
  MISC_FEATURE (67): Xaa equals any of the naturally occurring L-amino acids
  MISC_FEATURE (70): Xaa equals any of the naturally occurring L-amino acids
  MISC_FEATURE (79): Xaa equals any of the naturally occurring L-amino acids
LXGLNXTPRRGGRSXIVDPPGCXNSARAERTSLCYEFXSLHXKVKFSXMILLAVXXRXSVTVXLTXXSWXTSARILSPXSAA

SEQ ID NO: 7148 - protein, 53 aa, Homo sapiens
  MISC_FEATURE (10): Xaa equals any of the naturally occurring L-amino acids
  MISC_FEATURE (13): Xaa equals any of the naturally occurring L-amino acids
  MISC_FEATURE (14): Xaa equals any of the naturally occurring L-amino acids
  MISC_FEATURE (40): Xaa equals any of the naturally occurring L-amino acids
  MISC_FEATURE (44): Xaa equals any of the naturally occurring L-amino acids
  MISC_FEATURE (49): Xaa equals any of the naturally occurring L-amino acids
  MISC_FEATURE (53): Xaa equals any of the naturally occurring L-amino acids
GGGRLGGRGXPAXXLKEKTLKFGGKFSPPRGGAWAKGGKXSRGXNGKGXEKIX

SEQ ID NO: 7149 - protein, 38 aa, Homo sapiens
  MISC_FEATURE (1): Xaa equals any of the naturally occurring L-amino acids
  MISC_FEATURE (16): Xaa equals any of the naturally occurring L-amino acids
  MISC_FEATURE (21): Xaa equals any of the naturally occurring L-amino acids
  MISC_FEATURE (29): Xaa equals any of the naturally occurring L-amino acids
XYWGHIQHSLWLSTPXNRHPXAQELMGLXLRLYARASR

SEQ ID NO: 7150 - protein, 46 aa, Homo sapiens
  MISC_FEATURE (5): Xaa equals any of the naturally occurring L-amino acids
  MISC_FEATURE (7): Xaa equals any of the naturally occurring L-amino acids
  MISC_FEATURE (17): Xaa equals any of the naturally occurring L-amino acids
  MISC_FEATURE (21): Xaa equals any of the naturally occurring L-amino acids
  MISC_FEATURE (44): Xaa equals any of the naturally occurring L-amino acids
LFELXPXWIKTGAPPPXRPLXNNGSPGLQEIRHELRLRVSPLRXRL

SEQ ID NO: 7151 - protein, 34 aa, Homo sapiens
  MISC_FEATURE (4): Xaa equals any of the naturally occurring L-amino acids
  MISC_FEATURE (7): Xaa equals any of the naturally occurring L-amino acids
  MISC_FEATURE (11): Xaa equals any of the naturally occurring L-amino acids
  MISC_FEATURE (27): Xaa equals any of the naturally occurring L-amino acids
  MISC_FEATURE (29): Xaa equals any of the naturally occurring L-amino acids
SLKXITXILSXSIPKTGVRSPKGSTPXYXLLSTT

SEQ ID NO: 7152 - protein, 33 aa, Homo sapiens
  MISC_FEATURE (4): Xaa equals any of the naturally occurring L-amino acids
  MISC_FEATURE (7): Xaa equals any of the naturally occurring L-amino acids
  MISC_FEATURE (11): Xaa equals any of the naturally occurring L-amino acids
  MISC_FEATURE (14): Xaa equals any of the naturally occurring L-amino acids
  MISC_FEATURE (29): Xaa equals any of the naturally occurring L-amino acids
GGGXLLXFRAXGGXKAGLHRRGSRSKTNXSPGL

SEQ ID NO: 7153 - protein, 40 aa, Homo sapiens
  MISC_FEATURE (4): Xaa equals any of the naturally occurring L-amino acids
  MISC_FEATURE (7): Xaa equals any of the naturally occurring L-amino acids
  MISC_FEATURE (9): Xaa equals any of the naturally occurring L-amino acids
  MISC_FEATURE (12): Xaa equals any of the naturally occurring L-amino acids
  MISC_FEATURE (39): Xaa equals any of the naturally occurring L-amino acids
AVAXALXLXDPXGCINSARANVQLPYGSSLNPGSSDTIXL

SEQ ID NO: 7154 - protein, 54 aa, Homo sapiens
  MISC_FEATURE (5): Xaa equals any of the naturally occurring L-amino acids
  MISC_FEATURE (22): Xaa equals any of the naturally occurring L-amino acids
  MISC_FEATURE (34): Xaa equals any of the naturally occurring L-amino acids
  MISC_FEATURE (45): Xaa equals any of the naturally occurring L-amino acids
ATTWXSFQRHSWGLSIGLHSTXILQYRTFNGAVXVLKLYFISKIXMVMHISELS

SEQ ID NO: 7155 - protein, 76 aa, Homo sapiens
  MISC_FEATURE (38): Xaa equals any of the naturally occurring L-amino acids
  MISC_FEATURE (60): Xaa equals any of the naturally occurring L-amino acids
  MISC_FEATURE (70): Xaa equals any of the naturally occurring L-amino acids
SLGDIKVPGNLLVREGERGESCTESKLQRFAEDSSWSXQHSMQLMFIGASYLRFRGNYTXKDRRNSALHXHRTERK

SEQ ID NO: 7156 - protein, 60 aa, Homo sapiens
  MISC_FEATURE (11): Xaa equals any of the naturally occurring L-amino acids
  MISC_FEATURE (13): Xaa equals any of the naturally occurring L-amino acids
  MISC_FEATURE (39): Xaa equals any of the naturally occurring L-amino acids
  MISC_FEATURE (44): Xaa equals any of the naturally occurring L-amino acids
  MISC_FEATURE (47): Xaa equals any of the naturally occurring L-amino acids
  MISC_FEATURE (54): Xaa equals any of the naturally occurring L-amino acids
  MISC_FEATURE (60): Xaa equals any of the naturally occurring L-amino acids
CPSFNGKNWTXRXGGRSRIVDPPGCREFGTSLSSLSLLXGHRLXTLXWQSLTHXRDAQGX

SEQ ID NO: 7157 - protein, 101 aa, Homo sapiens
  MISC_FEATURE (34): Xaa equals any of the naturally occurring L-amino acids
  MISC_FEATURE (43): Xaa equals any of the naturally occurring L-amino acids
  MISC_FEATURE (55): Xaa equals any of the naturally occurring L-amino acids
  MISC_FEATURE (73): Xaa equals any of the naturally occurring L-amino acids
  MISC_FEATURE (78): Xaa equals any of the naturally occurring L-amino acids
  MISC_FEATURE (80): Xaa equals any of the naturally occurring L-amino acids
  MISC_FEATURE (84): Xaa equals any of the naturally occurring L-amino acids
  MISC_FEATURE (88): Xaa equals any of the naturally occurring L-amino acids
  MISC_FEATURE (97): Xaa equals any of the naturally occurring L-amino acids
LRIRFCPVASRESPGHLDYLITITPPIVTQLHTXMFLKILNRXSNPLGNRLSTKXSPPIWLLNLAPSSHFTYXVPVPXKXRMEXPALXPGPRPFYIXAKKK

SEQ ID NO: 7158 - protein, 54 aa, Homo sapiens
  MISC_FEATURE (52): Xaa equals any of the naturally occurring L-amino acids
LHPQVEKMLPEHAAAPIASCLAKTDPGDSHETTVPGCLHSPCYVLGTETVDXPF

SEQ ID NO: 7159 - protein, 22 aa, Homo sapiens
  MISC_FEATURE (1): Xaa equals any of the naturally occurring L-amino acids
  MISC_FEATURE (2): Xaa equals any of the naturally occurring L-amino acids
  MISC_FEATURE (14): Xaa equals any of the naturally occurring L-amino acids
  MISC_FEATURE (18): Xaa equals any of the naturally occurring L-amino acids
  MISC_FEATURE (21): Xaa equals any of the naturally occurring L-amino acids
XXVALLNVYDLFYXLRSXMVXE

SEQ ID NO: 7160 - protein, 34 aa, Homo sapiens
  MISC_FEATURE (34): Xaa equals any of the naturally occurring L-amino acids
AARGGARYPIRPIVSRITIHWPSFYNVVTGTPKX

SEQ ID NO: 7161 - protein, 76 aa, Homo sapiens
  MISC_FEATURE (36): Xaa equals any of the naturally occurring L-amino acids
  MISC_FEATURE (54): Xaa equals any of the naturally occurring L-amino acids
  MISC_FEATURE (70): Xaa equals any of the naturally occurring L-amino acids
SARVHSEYCGSPGKFVHRGYCHFGKTLGCLVRRLQXAEGQTTKGCFRVQLRREXGHQKKEPDWWLYLHPXFKQWRS

SEQ ID NO: 7162 - protein, 34 aa, Homo sapiens
  MISC_FEATURE (7): Xaa equals any of the naturally occurring L-amino acids
  MISC_FEATURE (14): Xaa equals any of the naturally occurring L-amino acids
  MISC_FEATURE (20): Xaa equals any of the naturally occurring L-amino acids
  MISC_FEATURE (24): Xaa equals any of the naturally occurring L-amino acids
  MISC_FEATURE (26): Xaa equals any of the naturally occurring L-amino acids
  MISC_FEATURE (27): Xaa equals any of the naturally occurring L-amino acids
  MISC_FEATURE (30): Xaa equals any of the naturally occurring L-amino acids
QTTLFRXNAPGLTXHGAALXPFTXCXXTQXSKTV

SEQ ID NO: 7163 - protein, 60 aa, Homo sapiens
  MISC_FEATURE (1): Xaa equals any of the naturally occurring L-amino acids
  MISC_FEATURE (15): Xaa equals any of the naturally occurring L-amino acids
  MISC_FEATURE (55): Xaa equals any of the naturally occurring L-amino acids
XTIAHFFLKQPVKQXLISNARLIYLSFWRWVLYSSSSPFHVPPDLLVLFFRYSIXHTFML

SEQ ID NO: 7164 - protein, 46 aa, Homo sapiens
  MISC_FEATURE (22): Xaa equals any of the naturally occurring L-amino acids
  MISC_FEATURE (27): Xaa equals any of the naturally occurring L-amino acids
  MISC_FEATURE (31): Xaa equals any of the naturally occurring L-amino acids
PILCQTWSKSLSSGSNTAAMLXLSHSXLARXEEKKKVCLSLLKDSA

SEQ ID NO: 7165 - protein, 25 aa, Homo sapiens
  MISC_FEATURE (1): Xaa equals any of the naturally occurring L-amino acids
  MISC_FEATURE (10): Xaa equals any of the naturally occurring L-amino acids
XLKDKTDPRXGRSNYGPRLQNSARG

SEQ ID NO: 7166 - protein, 34 aa, Homo sapiens
  MISC_FEATURE (4): Xaa equals any of the naturally occurring L-amino acids
  MISC_FEATURE (34): Xaa equals any of the naturally occurring L-amino acids
AARXGARYPIRPIVSRITIHWPSFYNVVTGIPKX

SEQ ID NO: 7167 - protein, 79 aa, Homo sapiens
  MISC_FEATURE (15): Xaa equals any of the naturally occurring L-amino acids
  MISC_FEATURE (18): Xaa equals any of the naturally occurring L-amino acids
  MISC_FEATURE (19): Xaa equals any of the naturally occurring L-amino acids
  MISC_FEATURE (21): Xaa equals any of the naturally occurring L-amino acids
  MISC_FEATURE (24): Xaa equals any of the naturally occurring L-amino acids
  MISC_FEATURE (25): Xaa equals any of the naturally occurring L-amino acids
  MISC_FEATURE (26): Xaa equals any of the naturally occurring L-amino acids
  MISC_FEATURE (32): Xaa equals any of the naturally occurring L-amino acids
  MISC_FEATURE (37): Xaa equals any of the naturally occurring L-amino acids
  MISC_FEATURE (41): Xaa equals any of the naturally occurring L-amino acids
  MISC_FEATURE (43): Xaa equals any of the naturally occurring L-amino acids
  MISC_FEATURE (44): Xaa equals any of the naturally occurring L-amino acids
  MISC_FEATURE (48): Xaa equals any of the naturally occurring L-amino acids
  MISC_FEATURE (60): Xaa equals any of the naturally occurring L-amino acids
  MISC_FEATURE (72): Xaa equals any of the naturally occurring L-amino acids
  MISC_FEATURE (76): Xaa equals any of the naturally occurring L-amino acids
GAPAPSPGMRILGYXILXXSXATXXXGSGEGXTWDLXCLMXKXXDHCXTSVLLKMSGIRXRDCNCRFVTDTXLSIXSIS

SEQ ID NO: 7168 - protein, 23 aa, Homo sapiens
  MISC_FEATURE (6): Xaa equals any of the naturally occurring L-amino acids
  MISC_FEATURE (7): Xaa equals any of the naturally occurring L-amino acids
  MISC_FEATURE (10): Xaa equals any of the naturally occurring L-amino acids
  MISC_FEATURE (13): Xaa equals any of the naturally occurring L-amino acids
  MISC_FEATURE (15): Xaa equals any of the naturally occurring L-amino acids
  MISC_FEATURE (16): Xaa equals any of the naturally occurring L-amino acids
  MISC_FEATURE (22): Xaa equals any of the naturally occurring L-amino acids
WGHRAXXNQXPKXIXXTHPVPXL

SEQ ID NO: 7169 - protein, 65 aa, Homo sapiens
  MISC_FEATURE (14): Xaa equals any of the naturally occurring L-amino acids
  MISC_FEATURE (15): Xaa equals any of the naturally occurring L-amino acids
  MISC_FEATURE (54): Xaa equals any of the naturally occurring L-amino acids
  MISC_FEATURE (55): Xaa equals any of the naturally occurring L-amino acids
  MISC_FEATURE (58): Xaa equals any of the naturally occurring L-amino acids
AYKKEKEQSQERTXXKCFGTSLFLDFELSNWFSQVKLKNSETWFYESCSYTFLXXGPXLLPRLLT

SEQ ID NO: 7170 - protein, 33 aa, Homo sapiens
  MISC_FEATURE (32): Xaa equals any of the naturally occurring L-amino acids
  MISC_FEATURE (33): Xaa equals any of the naturally occurring L-amino acids
LVSRGGPVPNSPYSESYYNSLAVVLNVVTGTXX

SEQ ID NO: 7171 - protein, 39 aa, Homo sapiens
  MISC_FEATURE (2): Xaa equals any of the naturally occurring L-amino acids
  MISC_FEATURE (6): Xaa equals any of the naturally occurring L-amino acids
  MISC_FEATURE (32): Xaa equals any of the naturally occurring L-amino acids
  MISC_FEATURE (33): Xaa equals any of the naturally occurring L-amino acids
  MISC_FEATURE (35): Xaa equals any of the naturally occurring L-amino acids
YXSITXKGQTDSRGGALEYGPRLQIRRAGVEXXLXPECH

SEQ ID NO: 7172 - protein, 33 aa, Homo sapiens
  MISC_FEATURE (31): Xaa equals any of the naturally occurring L-amino acids
  MISC_FEATURE (32): Xaa equals any of the naturally occurring L-amino acids
  MISC_FEATURE (33): Xaa equals any of the naturally occurring L-amino acids
RHEGGPVPNSPYSESYYNSLAVVLNVVTGPXXX

SEQ ID NO: 7173 - protein, 84 aa, Homo sapiens
  MISC_FEATURE (1): Xaa equals any of the naturally occurring L-amino acids
  MISC_FEATURE (4): Xaa equals any of the naturally occurring L-amino acids
  MISC_FEATURE (6): Xaa equals any of the naturally occurring L-amino acids
  MISC_FEATURE (7): Xaa equals any of the naturally occurring L-amino acids
  MISC_FEATURE (11): Xaa equals any of the naturally occurring L-amino acids
  MISC_FEATURE (34): Xaa equals any of the naturally occurring L-amino acids
  MISC_FEATURE (36): Xaa equals any of the naturally occurring L-amino acids
  MISC_FEATURE (41): Xaa equals any of the naturally occurring L-amino acids
  MISC_FEATURE (48): Xaa equals any of the naturally occurring L-amino acids
  MISC_FEATURE (55): Xaa equals any of the naturally occurring L-amino acids
  MISC_FEATURE (64): Xaa equals any of the naturally occurring L-amino acids
  MISC_FEATURE (83): Xaa equals any of the naturally occurring L-amino acids
XPIXKXXRLCXQDNRLGNSSTRVAKTQTHLLGLXHXIAINXFPCGLLXEEFALLXPSGVPHARXSCPCRPILIYRATRKTICXS

SEQ ID NO: 7174 - protein, 48 aa, Homo sapiens
  MISC_FEATURE (10): Xaa equals any of the naturally occurring L-amino acids
  MISC_FEATURE (16): Xaa equals any of the naturally occurring L-amino acids
  MISC_FEATURE (48): Xaa equals any of the naturally occurring L-amino acids
AARALPRRTXEITVTXSSALVRNREQLRLSPKNLLEGLEKFLPLIPAX

SEQ ID NO: 7175 - protein, 93 aa, Homo sapiens
  MISC_FEATURE (14): Xaa equals any of the naturally occurring L-amino acids
  MISC_FEATURE (35): Xaa equals any of the naturally occurring L-amino acids
  MISC_FEATURE (65): Xaa equals any of the naturally occurring L-amino acids
  MISC_FEATURE (71): Xaa equals any of the naturally occurring L-amino acids
  MISC_FEATURE (79): Xaa equals any of the naturally occurring L-amino acids
  MISC_FEATURE (87): Xaa equals any of the naturally occurring L-amino acids
  MISC_FEATURE (91): Xaa equals any of the naturally occurring L-amino acids
KNQAAGRESLQSRXEVEYTRDQTHDHSSLQTFLGXQQPMPSLGMLPLCCEELILVFHHSGSNMLXPTSLDXPGLTIILXFLFVLSTXSNNXTS

SEQ ID NO: 7176 - protein, 77 aa, Homo sapiens
  MISC_FEATURE (9): Xaa equals any of the naturally occurring L-amino acids
  MISC_FEATURE (32): Xaa equals any of the naturally occurring L-amino acids
  MISC_FEATURE (34): Xaa equals any of the naturally occurring L-amino acids
  MISC_FEATURE (43): Xaa equals any of the naturally occurring L-amino acids
  MISC_FEATURE (50): Xaa equals any of the naturally occurring L-amino acids
  MISC_FEATURE (77): Xaa equals any of the naturally occurring L-amino acids
ENRYSSLSXNNLIPPVQLKYLLGKYYCERRNXYXYILTIRHLXRKHTTLXYLTNWKTHTSGAKLQLRHLFLAVRSIX

SEQ ID NO: 7177 - protein, 51 aa, Homo sapiens
  MISC_FEATURE (4): Xaa equals any of the naturally occurring L-amino acids
  MISC_FEATURE (8): Xaa equals any of the naturally occurring L-amino acids
  MISC_FEATURE (12): Xaa equals any of the naturally occurring L-amino acids
  MISC_FEATURE (16): Xaa equals any of the naturally occurring L-amino acids
  MISC_FEATURE (21): Xaa equals any of the naturally occurring L-amino acids
  MISC_FEATURE (26): Xaa equals any of the naturally occurring L-amino acids
  MISC_FEATURE (28): Xaa equals any of the naturally occurring L-amino acids
  MISC_FEATURE (35): Xaa equals any of the naturally occurring L-amino acids
  MISC_FEATURE (36): Xaa equals any of the naturally occurring L-amino acids
SCRXGTSXIVHXMLVXIEDNXDFRKXLXGCCFYNXXSTERHKPQTSSSPRT

SEQ ID NO: 7178 - protein, 35 aa, Homo sapiens
  MISC_FEATURE (13): Xaa equals any of the naturally occurring L-amino acids
  MISC_FEATURE (20): Xaa equals any of the naturally occurring L-amino acids
  MISC_FEATURE (27): Xaa equals any of the naturally occurring L-amino acids
  MISC_FEATURE (28): Xaa equals any of the naturally occurring L-amino acids
  MISC_FEATURE (30): Xaa equals any of the naturally occurring L-amino acids
GKYHSPSILTKGXKMTMCMXCDATTLXXRXYTKEK

SEQ ID NO: 7179 - protein, 60 aa, Homo sapiens
  MISC_FEATURE (24): Xaa equals any of the naturally occurring L-amino acids
PLYLLHNELTRITCKRAKLRPRNXELLRTLKDTPSMCKYGKIIVSTTTSCDTGVKIIYSL

SEQ ID NO: 7180 - protein, 48 aa, Homo sapiens
PLKDKRTPAGAALTMDPGLQNSARAQTGKTRHNDKHTGCCGDNDQLSV

SEQ ID NO: 7181 - protein, 92 aa, Homo sapiens
  MISC_FEATURE (3): Xaa equals any of the naturally occurring L-amino acids
  MISC_FEATURE (15): Xaa equals any of the naturally occurring L-amino acids
  MISC_FEATURE (19): Xaa equals any of the naturally occurring L-amino acids
  MISC_FEATURE (23): Xaa equals any of the naturally occurring L-amino acids
  MISC_FEATURE (43): Xaa equals any of the naturally occurring L-amino acids
  MISC_FEATURE (44): Xaa equals any of the naturally occurring L-amino acids
  MISC_FEATURE (70): Xaa equals any of the naturally occurring L-amino acids
  MISC_FEATURE (77): Xaa equals any of the naturally occurring L-amino acids
  MISC_FEATURE (81): Xaa equals any of the naturally occurring L-amino acids
  MISC_FEATURE (87): Xaa equals any of the naturally occurring L-amino acids
  MISC_FEATURE (92): Xaa equals any of the naturally occurring L-amino acids
GIXVPSLPVSGLYAXRGLXSADXISDYVYTSSTNCVQLLGFWXXTPLPGHADDPGMPKNALRSPDYVSWXCYMPNLXSATXHMICTXRNDTX

SEQ ID NO: 7182 - protein, 43 aa, Homo sapiens
  MISC_FEATURE (2): Xaa equals any of the naturally occurring L-amino acids
  MISC_FEATURE (3): Xaa equals any of the naturally occurring L-amino acids
  MISC_FEATURE (13): Xaa equals any of the naturally occurring L-amino acids
  MISC_FEATURE (41): Xaa equals any of the naturally occurring L-amino acids
RXXLDSPRGAALXYGSPGCMNSHEHARGPNNSEAGGIPTLXLD

SEQ ID NO: 7183 - protein, 72 aa, Homo sapiens
  MISC_FEATURE (33): Xaa equals any of the naturally occurring L-amino acids
  MISC_FEATURE (50): Xaa equals any of the naturally occurring L-amino acids
  MISC_FEATURE (66): Xaa equals any of the naturally occurring L-amino acids
KVCIEYTSGFFALLFAHCSHVFFIAVSKNILDXYGMLFFSHQLKLLKNIXYICGKDSERSIGVLLXVPNCLL

SEQ ID NO: 7184 - protein, 64 aa, Homo sapiens
EKNISEWGILRKMINTAQEYKKESKSYNMSLLHIYHSSLFCFVLDDAKLRGLAAPSNLSMESDS

SEQ ID NO: 7185 - protein, 89 aa, Homo sapiens
  MISC_FEATURE (46): Xaa equals any of the naturally occurring L-amino acids
  MISC_FEATURE (66): Xaa equals any of the naturally occurring L-amino acids
  MISC_FEATURE (74): Xaa equals any of the naturally occurring L-amino acids
  MISC_FEATURE (80): Xaa equals any of the naturally occurring L-amino acids
  MISC_FEATURE (83): Xaa equals any of the naturally occurring L-amino acids
NPESERGRDDGLQASGPSRGPRSMWLLPSLSVLCVASSSLTGYPAXPSSFSSPTFPKGVLHFYFGXNFSWGENXGWGLPXKPXGTFPAI

SEQ ID NO: 7186 - protein, 64 aa, Homo sapiens
  MISC_FEATURE (38): Xaa equals any of the naturally occurring L-amino acids
  MISC_FEATURE (44): Xaa equals any of the naturally occurring L-amino acids
  MISC_FEATURE (47): Xaa equals any of the naturally occurring L-amino acids
TASGSWDKLGFTLIHNSISSSVFPFPTLRFLCCRWAQXRTHPTXPGXPGGKPGGGAGKNRPNDC

SEQ ID NO: 7187 - protein, 54 aa, Homo sapiens
  MISC_FEATURE (20): Xaa equals any of the naturally occurring L-amino acids
NFEGSLRKPLNWKSLAALSXISVNVSKELMLCYLIKPSTMTDKEMESPEMFEKD

SEQ ID NO: 7188 - protein, 41 aa, Homo sapiens
RMPNKARKSIVTCALRAQYLYLISTEEIFLCNLIFCLVLVL

SEQ ID NO: 7189 - protein, 46 aa, Homo sapiens
  MISC_FEATURE (23): Xaa equals any of the naturally occurring L-amino acids
  MISC_FEATURE (24): Xaa equals any of the naturally occurring L-amino acids
LFFNTCVPVNIMSNHKCLIGWSXXVGEERYRSCLISISCSALKIFI

SEQ ID NO: 7190 - protein, 112 aa, Homo sapiens
  MISC_FEATURE (15): Xaa equals any of the naturally occurring L-amino acids
  MISC_FEATURE (17): Xaa equals any of the naturally occurring L-amino acids
  MISC_FEATURE (28): Xaa equals any of the naturally occurring L-amino acids
  MISC_FEATURE (43): Xaa equals any of the naturally occurring L-amino acids
  MISC_FEATURE (45): Xaa equals any of the naturally occurring L-amino acids
  MISC_FEATURE (51): Xaa equals any of the naturally occurring L-amino acids
  MISC_FEATURE (76): Xaa equals any of the naturally occurring L-amino acids
  MISC_FEATURE (88): Xaa equals any of the naturally occurring L-amino acids
  MISC_FEATURE (92): Xaa equals any of the naturally occurring L-amino acids
  MISC_FEATURE (93): Xaa equals any of the naturally occurring L-amino acids
  MISC_FEATURE (98): Xaa equals any of the naturally occurring L-amino acids
  MISC_FEATURE (108): Xaa equals any of the naturally occurring L-amino acids
  MISC_FEATURE (110): Xaa equals any of the naturally occurring L-amino acids
  MISC_FEATURE (111): Xaa equals any of the naturally occurring L-amino acids
  MISC_FEATURE (112): Xaa equals any of the naturally occurring L-amino acids
DCFVSIPILYSCSWXNXNQALSILPKTXVCDSSFQWLFSIPSXRXPHLSSXLPSSWTVRCLFYSPFSIRVWDGPKXSSSLNNIVLDTXIEHXXLLVAXLHCILVYQIXPXXX

SEQ ID NO: 7191 - protein, 63 aa, Homo sapiens
  MISC_FEATURE (37): Xaa equals any of the naturally occurring L-amino acids
  MISC_FEATURE (41): Xaa equals any of the naturally occurring L-amino acids
  MISC_FEATURE (56): Xaa equals any of the naturally occurring L-amino acids
LDFCMENIQGYISLFLYSREGHLVLCKYVADLSFSDXRAPXLKVFLNAWKENVIFXESNIFIS

SEQ ID NO: 7192 - protein, 18 aa, Homo sapiens
  MISC_FEATURE (2): Xaa equals any of the naturally occurring L-amino acids
  MISC_FEATURE (7): Xaa equals any of the naturally occurring L-amino acids
  MISC_FEATURE (16): Xaa equals any of the naturally occurring L-amino acids
LXFALSXCHGHDSRSXSK

SEQ ID NO: 7193 - protein, 38 aa, Homo sapiens
DIDFWHDRVRRLMKPLPKKTARKLEENCQKHPFQLPKN

SEQ ID NO: 7194 - protein, 35 aa, Homo sapiens
  MISC_FEATURE (34): Xaa equals any of the naturally occurring L-amino acids
  MISC_FEATURE (35): Xaa equals any of the naturally occurring L-amino acids
AARGGARYPIRPIVSRITIHWPSFYNVVTGKPKXX

SEQ ID NO: 7195 - protein, 51 aa, Homo sapiens
  MISC_FEATURE (23): Xaa equals any of the naturally occurring L-amino acids
  MISC_FEATURE (34): Xaa equals any of the naturally occurring L-amino acids
  MISC_FEATURE (48): Xaa equals any of the naturally occurring L-amino acids
CCGLCVTLSHIIQRIMFTFIAKXICLMPNTPSPXAPRPGVSFRKGKGXGLY

SEQ ID NO: 7196 - protein, 33 aa, Homo sapiens
  MISC_FEATURE (23): Xaa equals any of the naturally occurring L-amino acids
  MISC_FEATURE (25): Xaa equals any of the naturally occurring L-amino acids
  MISC_FEATURE (28): Xaa equals any of the naturally occurring L-amino acids
  MISC_FEATURE (33): Xaa equals any of the naturally occurring L-amino acids
KEKGKCHKKLEYLWSLKPWNLLXGXVYXRNPGX

SEQ ID NO: 7197 - protein, 20 aa, Homo sapiens
  MISC_FEATURE (4): Xaa equals any of the naturally occurring L-amino acids
  MISC_FEATURE (12): Xaa equals any of the naturally occurring L-amino acids
  MISC_FEATURE (16): Xaa equals any of the naturally occurring L-amino acids
  MISC_FEATURE (19): Xaa equals any of the naturally occurring L-amino acids
FIYXCCALTVPXIILXYHXV

SEQ ID NO: 7198 - protein, 16 aa, Homo sapiens
  MISC_FEATURE (11): Xaa equals any of the naturally occurring L-amino acids
  MISC_FEATURE (12): Xaa equals any of the naturally occurring L-amino acids
  MISC_FEATURE (13): Xaa equals any of the naturally occurring L-amino acids
ELVSSFFFFFXXXTWI

SEQ ID NO: 7199 - protein, 60 aa, Homo sapiens
  MISC_FEATURE (1): Xaa equals any of the naturally occurring L-amino acids
  MISC_FEATURE (4): Xaa equals any of the naturally occurring L-amino acids
  MISC_FEATURE (8): Xaa equals any of the naturally occurring L-amino acids
  MISC_FEATURE (23): Xaa equals any of the naturally occurring L-amino acids
XSYXFSRXNVLPLTFINSVYIFXQHSKLLESNSFTYFYLLFSLCTALSCIVFQHMRLTAH

SEQ ID NO: 7200 - protein, 24 aa, Homo sapiens
  MISC_FEATURE (6): Xaa equals any of the naturally occurring L-amino acids
  MISC_FEATURE (12): Xaa equals any of the naturally occurring L-amino acids
VNTIPXTRLRGXTCQIVLSLAMYP

SEQ ID NO: 7201 - protein, 36 aa, Homo sapiens
  MISC_FEATURE (13): Xaa equals any of the naturally occurring L-amino acids
  MISC_FEATURE (18): Xaa equals any of the naturally occurring L-amino acids
  MISC_FEATURE (19): Xaa equals any of the naturally occurring L-amino acids
  MISC_FEATURE (34): Xaa equals any of the naturally occurring L-amino acids
  MISC_FEATURE (36): Xaa equals any of the naturally occurring L-amino acids
GELLLQETADFGXKLLLXXSPGGTVPTVSWRNNXLX

SEQ ID NO: 7202 - protein, 33 aa, Homo sapiens
  MISC_FEATURE (8): Xaa equals any of the naturally occurring L-amino acids
  MISC_FEATURE (11): Xaa equals any of the naturally occurring L-amino acids
  MISC_FEATURE (16): Xaa equals any of the naturally occurring L-amino acids
  MISC_FEATURE (24): Xaa equals any of the naturally occurring L-amino acids
  MISC_FEATURE (26): Xaa equals any of the naturally occurring L-amino acids
  MISC_FEATURE (27): Xaa equals any of the naturally occurring L-amino acids
  MISC_FEATURE (32): Xaa equals any of the naturally occurring L-amino acids
YALSKLTXTKXNKSWXSTGGGGGXKXXGSPGXK

SEQ ID NO: 7203 - protein, 55 aa, Homo sapiens
  MISC_FEATURE (48): Xaa equals any of the naturally occurring L-amino acids
LVPNSARVSPGIQAFRATGPLNYWPELPTLPVQRLWCYGGPLHSKSSXISKHLLH

SEQ ID NO: 7204 - protein, 92 aa, Homo sapiens
  MISC_FEATURE (6): Xaa equals any of the naturally occurring L-amino acids
  MISC_FEATURE (12): Xaa equals any of the naturally occurring L-amino acids
  MISC_FEATURE (14): Xaa equals any of the naturally occurring L-amino acids
  MISC_FEATURE (20): Xaa equals any of the naturally occurring L-amino acids
  MISC_FEATURE (27): Xaa equals any of the naturally occurring L-amino acids
  MISC_FEATURE (40): Xaa equals any of the naturally occurring L-amino acids
  MISC_FEATURE (54): Xaa equals any of the naturally occurring L-amino acids
  MISC_FEATURE (55): Xaa equals any of the naturally occurring L-amino acids
  MISC_FEATURE (58): Xaa equals any of the naturally occurring L-amino acids
  MISC_FEATURE (64): Xaa equals any of the naturally occurring L-amino acids
  MISC_FEATURE (65): Xaa equals any of the naturally occurring L-amino acids
  MISC_FEATURE (66): Xaa equals any of the naturally occurring L-amino acids
  MISC_FEATURE (68): Xaa equals any of the naturally occurring L-amino acids
  MISC_FEATURE (69): Xaa equals any of the naturally occurring L-amino acids
  MISC_FEATURE (88): Xaa equals any of the naturally occurring L-amino acids
ANLTLXFMLASXLXDQKEKXKLSPEFXNYGEKLILIVTHXATLSLFCFVFPSNXXKCXEPRLLXXXAXXFHLPWLLIPPKLQNPILGXNLSA

SEQ ID NO: 7205 - protein, 46 aa, Homo sapiens
  MISC_FEATURE (3): Xaa equals any of the naturally occurring L-amino acids
  MISC_FEATURE (30): Xaa equals any of the naturally occurring L-amino acids
  MISC_FEATURE (31): Xaa equals any of the naturally occurring L-amino acids
LYXLLSPNQVYMWFDKYYSILMGILMQRIXXGIVLEIYKIKTVCLI

SEQ ID NO: 7206 - protein, 37 aa, Homo sapiens
  MISC_FEATURE (35): Xaa equals any of the naturally occurring L-amino acids
  MISC_FEATURE (37): Xaa equals any of the naturally occurring L-amino acids
AARGGARYPIRPIVSRITIHWPSFYNVVTGKTQIXVX

SEQ ID NO: 7207 - protein, 99 aa, Homo sapiens
  MISC_FEATURE (2): Xaa equals any of the naturally occurring L-amino acids
  MISC_FEATURE (16): Xaa equals any of the naturally occurring L-amino acids
  MISC_FEATURE (17): Xaa equals any of the naturally occurring L-amino acids
  MISC_FEATURE (23): Xaa equals any of the naturally occurring L-amino acids
  MISC_FEATURE (26): Xaa equals any of the naturally occurring L-amino acids
  MISC_FEATURE (33): Xaa equals any of the naturally occurring L-amino acids
  MISC_FEATURE (34): Xaa equals any of the naturally occurring L-amino acids
  MISC_FEATURE (37): Xaa equals any of the naturally occurring L-amino acids
  MISC_FEATURE (41): Xaa equals any of the naturally occurring L-amino acids
  MISC_FEATURE (43): Xaa equals any of the naturally occurring L-amino acids
  MISC_FEATURE (47): Xaa equals any of the naturally occurring L-amino acids
  MISC_FEATURE (51): Xaa equals any of the naturally occurring L-amino acids
  MISC_FEATURE (58): Xaa equals any of the naturally occurring L-amino acids
  MISC_FEATURE (68): Xaa equals any of the naturally occurring L-amino acids
  MISC_FEATURE (70): Xaa equals any of the naturally occurring L-amino acids
  MISC_FEATURE (72): Xaa equals any of the naturally occurring L-amino acids
  MISC_FEATURE (73): Xaa equals any of the naturally occurring L-amino acids
  MISC_FEATURE (75): Xaa equals any of the naturally occurring L-amino acids
  MISC_FEATURE (83): Xaa equals any of the naturally occurring L-amino acids
  MISC_FEATURE (86): Xaa equals any of the naturally occurring L-amino acids
  MISC_FEATURE (88): Xaa equals any of the naturally occurring L-amino acids
  MISC_FEATURE (90): Xaa equals any of the naturally occurring L-amino acids
  MISC_FEATURE (95): Xaa equals any of the naturally occurring L-amino acids
EXEIFEKIMLKFSQFXXKNLIFXPKXLNELDKXXKIXPKTXSXFFLXSPKXKIFLEYXGEKTPPFLWXPXKXXVXFLTTGGGXVFXTXPXKKKNXPPFF

SEQ ID NO: 7208 - protein, 76 aa, Homo sapiens
  MISC_FEATURE (46): Xaa equals any of the naturally occurring L-amino acids
  MISC_FEATURE (58): Xaa equals any of the naturally occurring L-amino acids
  MISC_FEATURE (59): Xaa equals any of the naturally occurring L-amino acids
  MISC_FEATURE (61): Xaa equals any of the naturally occurring L-amino acids
  MISC_FEATURE (66): Xaa equals any of the naturally occurring L-amino acids
FSSLKLSLEYLSLLLVLWLLMILAFSHFDFVLKKNFEPNNIPVYFXPITFHESRAHSXXPXIPKTXVPTIMGGGVS

SEQ ID NO: 7209 - protein, 39 aa, Homo sapiens
  MISC_FEATURE (33): Xaa equals any of the naturally occurring L-amino acids
  MISC_FEATURE (37): Xaa equals any of the naturally occurring L-amino acids
CKDNGKPLAGFMEDGVLNRCFWKCKVDNGLKLXTTLXAW

SEQ ID NO: 7210 - protein, 38 aa, Homo sapiens
ARRKGCTEFEDTAAVSWREEAKGARRLQAKGGGAWDLN

SEQ ID NO: 7211 - protein, 52 aa, Homo sapiens
  MISC_FEATURE (1): Xaa equals any of the naturally occurring L-amino acids
  MISC_FEATURE (3): Xaa equals any of the naturally occurring L-amino acids
  MISC_FEATURE (5): Xaa equals any of the naturally occurring L-amino acids
  MISC_FEATURE (26): Xaa equals any of the naturally occurring L-amino acids
  MISC_FEATURE (39): Xaa equals any of the naturally occurring L-amino acids
  MISC_FEATURE (46): Xaa equals any of the naturally occurring L-amino acids
XPXVXDKLFPKNQNMSWSWTFKPVLXVIPNYGKSVREQXILPKNEXPCRKPE

SEQ ID NO: 7212 - protein, 66 aa, Homo sapiens
  MISC_FEATURE (2): Xaa equals any of the naturally occurring L-amino acids
  MISC_FEATURE (4): Xaa equals any of the naturally occurring L-amino acids
  MISC_FEATURE (11): Xaa equals any of the naturally occurring L-amino acids
  MISC_FEATURE (20): Xaa equals any of the naturally occurring L-amino acids
  MISC_FEATURE (23): Xaa equals any of the naturally occurring L-amino acids
  MISC_FEATURE (24): Xaa equals any of the naturally occurring L-amino acids
  MISC_FEATURE (25): Xaa equals any of the naturally occurring L-amino acids
  MISC_FEATURE (26): Xaa equals any of the naturally occurring L-amino acids
  MISC_FEATURE (27): Xaa equals any of the naturally occurring L-amino acids
  MISC_FEATURE (29): Xaa equals any of the naturally occurring L-amino acids
  MISC_FEATURE (31): Xaa equals any of the naturally occurring L-amino acids
  MISC_FEATURE (45): Xaa equals any of the naturally occurring L-amino acids
  MISC_FEATURE (52): Xaa equals any of the naturally occurring L-amino acids
EXLXYEKGTRXMCACVNPTXTSXXXXXWXFXIFLPPISYPKQNKXPFSIISXNIQYCPCGIFLNSL

SEQ ID NO: 7213 - protein, 122 aa, Homo sapiens
  MISC_FEATURE (7): Xaa equals any of the naturally occurring L-amino acids
  MISC_FEATURE (17): Xaa equals any of the naturally occurring L-amino acids
  MISC_FEATURE (21): Xaa equals any of the naturally occurring L-amino acids
  MISC_FEATURE (22): Xaa equals any of the naturally occurring L-amino acids
  MISC_FEATURE (23): Xaa equals any of the naturally occurring L-amino acids
  MISC_FEATURE (26): Xaa equals any of the naturally occurring L-amino acids
  MISC_FEATURE (30): Xaa equals any of the naturally occurring L-amino acids
  MISC_FEATURE (36): Xaa equals any of the naturally occurring L-amino acids
  MISC_FEATURE (41): Xaa equals any of the naturally occurring L-amino acids
  MISC_FEATURE (52): Xaa equals any of the naturally occurring L-amino acids
  MISC_FEATURE (61): Xaa equals any of the naturally occurring L-amino acids
  MISC_FEATURE (66): Xaa equals any of the naturally occurring L-amino acids
  MISC_FEATURE (68): Xaa equals any of the naturally occurring L-amino acids
  MISC_FEATURE (69): Xaa equals any of the naturally occurring L-amino acids
  MISC_FEATURE (71): Xaa equals any of the naturally occurring L-amino acids
  MISC_FEATURE (73): Xaa equals any of the naturally occurring L-amino acids
  MISC_FEATURE (76): Xaa equals any of the naturally occurring L-amino acids
  MISC_FEATURE (82): Xaa equals any of the naturally occurring L-amino acids
  MISC_FEATURE (89): Xaa equals any of the naturally occurring L-amino acids
  MISC_FEATURE (91): Xaa equals any of the naturally occurring L-amino acids
  MISC_FEATURE (107): Xaa equals any of the naturally occurring L-amino acids
  MISC_FEATURE (112): Xaa equals any of the naturally occurring L-amino acids
SCRSCRXRHKRHEEQVXNLSXXXNTXPVCXSTCKLXRCLLXYRFISQTTVHXCLPRELQDXITFDXSXXIXCXKVXNFNFLXNIQLFNXSXITSYFNLNLNYRKVSXLSFEXLLPRFNFSSL

SEQ ID NO: 7214 - protein, 40 aa, Homo sapiens
  MISC_FEATURE (15): Xaa equals any of the naturally occurring L-amino acids
  MISC_FEATURE (39): Xaa equals any of the naturally occurring L-amino acids
LLKRTKSWGPPAVKXRFLTSGSPGLQEFGGTPLPEKTVXV

SEQ ID NO: 7215 - protein, 73 aa, Homo sapiens
  MISC_FEATURE (37): Xaa equals any of the naturally occurring L-amino acids
  MISC_FEATURE (42): Xaa equals any of the naturally occurring L-amino acids
  MISC_FEATURE (44): Xaa equals any of the naturally occurring L-amino acids
  MISC_FEATURE (47): Xaa equals any of the naturally occurring L-amino acids
  MISC_FEATURE (51): Xaa equals any of the naturally occurring L-amino acids
  MISC_FEATURE (62): Xaa equals any of the naturally occurring L-amino acids
  MISC_FEATURE (68): Xaa equals any of the naturally occurring L-amino acids
  MISC_FEATURE (71): Xaa equals any of the naturally occurring L-amino acids
QTMFTTCRPSIRIFLGSLMIYLHAICPQQIVSQEWNXQGHWXCXKVXKRAXHPLKFRFVNIXLTNSNXAMXFP

SEQ ID NO: 7216 - protein, 32 aa, Homo sapiens
  MISC_FEATURE (6): Xaa equals any of the naturally occurring L-amino acids
  MISC_FEATURE (12): Xaa equals any of the naturally occurring L-amino acids
  MISC_FEATURE (23): Xaa equals any of the naturally occurring L-amino acids
  MISC_FEATURE (29): Xaa equals any of the naturally occurring L-amino acids
LLKGKXWAPRGXGRFLTSGSPGXQGIRGXPPC

SEQ ID NO: 7217 - protein, 74 aa, Homo sapiens
  MISC_FEATURE (8): Xaa equals any of the naturally occurring L-amino acids
  MISC_FEATURE (11): Xaa equals any of the naturally occurring L-amino acids
  MISC_FEATURE (28): Xaa equals any of the naturally occurring L-amino acids
  MISC_FEATURE (46): Xaa equals any of the naturally occurring L-amino acids
  MISC_FEATURE (51): Xaa equals any of the naturally occurring L-amino acids
  MISC_FEATURE (54): Xaa equals any of the naturally occurring L-amino acids
  MISC_FEATURE (72): Xaa equals any of the naturally occurring L-amino acids
  MISC_FEATURE (74): Xaa equals any of the naturally occurring L-amino acids
YPDIPALXQRXGLKKKSTCSFRPQAQQXGEINCFWKHLGGVWGWAXKKQVXFNXLLWKFCFIIIPFPLCYTXPX

SEQ ID NO: 7218 - protein, 61 aa, Homo sapiens
  MISC_FEATURE (58): Xaa equals any of the naturally occurring L-amino acids
KRNWCVNQHKILECISISIFSPTNPVTVVNNQCVNNEYLFFTLFQGKTNIYGTLPFEXTLE

SEQ ID NO: 7219 - protein, 17 aa, Homo sapiens
  MISC_FEATURE (5): Xaa equals any of the naturally occurring L-amino acids
  MISC_FEATURE (12): Xaa equals any of the naturally occurring L-amino acids
  MISC_FEATURE (17): Xaa equals any of the naturally occurring L-amino acids
AARTXPESVSCXPEITX

SEQ ID NO: 7220 - protein, 56 aa, Homo sapiens
ARAEFGTSPNELLDPDCVHRWLKQSDLHLGDEIIQVHRDPAALDGSGCATLTVVMR

SEQ ID NO: 7221 - protein, 36 aa, Homo sapiens
  MISC_FEATURE (13): Xaa equals any of the naturally occurring L-amino acids
  MISC_FEATURE (17): Xaa equals any of the naturally occurring L-amino acids
  MISC_FEATURE (26): Xaa equals any of the naturally occurring L-amino acids
  MISC_FEATURE (27): Xaa equals any of the naturally occurring L-amino acids
  MISC_FEATURE (34): Xaa equals any of the naturally occurring L-amino acids
LKVWKAEFMKKNXKKAXSNHDLPIKXXWFGGKGXVG

SEQ ID NO: 7222 - protein, 33 aa, Homo sapiens
  MISC_FEATURE (1): Xaa equals any of the naturally occurring L-amino acids
  MISC_FEATURE (9): Xaa equals any of the naturally occurring L-amino acids
  MISC_FEATURE (19): Xaa equals any of the naturally occurring L-amino acids
  MISC_FEATURE (32): Xaa equals any of the naturally occurring L-amino acids
  MISC_FEATURE (33): Xaa equals any of the naturally occurring L-amino acids
XLLKGQKLXPHRGKRPLLXLVDPPGCRKFGDXX

SEQ ID NO: 7223 - protein, 86 aa, Homo sapiens
  MISC_FEATURE (19): Xaa equals any of the naturally occurring L-amino acids
  MISC_FEATURE (32): Xaa equals any of the naturally occurring L-amino acids
  MISC_FEATURE (47): Xaa equals any of the naturally occurring L-amino acids
  MISC_FEATURE (59): Xaa equals any of the naturally occurring L-amino acids
  MISC_FEATURE (60): Xaa equals any of the naturally occurring L-amino acids
ICPQNPLNPLVNLTVSPKXNSSLDTRKKPCRXSKKFNTHGRPKSSHXLRKRSSSTPTTXXIPNILLNSSHPIGTNLSPYRKNLCLL

SEQ ID NO: 7224 - protein, 33 aa, Homo sapiens
  MISC_FEATURE (5): Xaa equals any of the naturally occurring L-amino acids
  MISC_FEATURE (15): Xaa equals any of the naturally occurring L-amino acids
  MISC_FEATURE (24): Xaa equals any of the naturally occurring L-amino acids
  MISC_FEATURE (25): Xaa equals any of the naturally occurring L-amino acids
GALIXRLSASLQWGXSPIPNFFFXXGAQPNSPL

SEQ ID NO: 7225 - protein, 85 aa, Homo sapiens
  MISC_FEATURE (75): Xaa equals any of the naturally occurring L-amino acids
QQHLNTTTFQKSSKFHLTCKACGNPTSPEPDLVVNYLEPPNKSTWKQDTTYGTICRPYQPPDTIISHFNCLPLKXGFTKNKMVLP

SEQ ID NO: 7226 - protein, 67 aa, Homo sapiens
  MISC_FEATURE (5): Xaa equals any of the naturally occurring L-amino acids
  MISC_FEATURE (9): Xaa equals any of the naturally occurring L-amino acids
  MISC_FEATURE (11): Xaa equals any of the naturally occurring L-amino acids
  MISC_FEATURE (13): Xaa equals any of the naturally occurring L-amino acids
  MISC_FEATURE (19): Xaa equals any of the naturally occurring L-amino acids
  MISC_FEATURE (37): Xaa equals any of the naturally occurring L-amino acids
  MISC_FEATURE (40): Xaa equals any of the naturally occurring L-amino acids
  MISC_FEATURE (48): Xaa equals any of the naturally occurring L-amino acids
  MISC_FEATURE (61): Xaa equals any of the naturally occurring L-amino acids
FSPSXCLQXCXVXNLTFDXKTYLINDSTNFGKKKPFXKLXKIPILLNXPPSGTREVQNSFXFGLYYF

SEQ ID NO: 7227 - protein, 61 aa, Homo sapiens
  MISC_FEATURE (16): Xaa equals any of the naturally occurring L-amino acids
  MISC_FEATURE (22): Xaa equals any of the naturally occurring L-amino acids
  MISC_FEATURE (38): Xaa equals any of the naturally occurring L-amino acids
  MISC_FEATURE (54): Xaa equals any of the naturally occurring L-amino acids
DTAEISKFCLKSDKVXVALALXKVGDIFDYISLYLHSXQASSMDCKNLREQHTXLQSEQMN

SEQ ID NO: 7228 - protein, 48 aa, Homo sapiens
  MISC_FEATURE (33): Xaa equals any of the naturally occurring L-amino acids
KNYSSFSNRSFTLNFIFGLYFKISKYMKPYLQXISFGFRLTLFWNSEN

SEQ ID NO: 7229 - protein, 116 aa, Homo sapiens
  MISC_FEATURE (1): Xaa equals any of the naturally occurring L-amino acids
  MISC_FEATURE (4): Xaa equals any of the naturally occurring L-amino acids
  MISC_FEATURE (10): Xaa equals any of the naturally occurring L-amino acids
  MISC_FEATURE (19): Xaa equals any of the naturally occurring L-amino acids
  MISC_FEATURE (24): Xaa equals any of the naturally occurring L-amino acids
  MISC_FEATURE (26): Xaa equals any of the naturally occurring L-amino acids
  MISC_FEATURE (43): Xaa equals any of the naturally occurring L-amino acids
  MISC_FEATURE (48): Xaa equals any of the naturally occurring L-amino acids
  MISC_FEATURE (49): Xaa equals any of the naturally occurring L-amino acids
  MISC_FEATURE (51): Xaa equals any of the naturally occurring L-amino acids
  MISC_FEATURE (52): Xaa equals any of the naturally occurring L-amino acids
  MISC_FEATURE (63): Xaa equals any of the naturally occurring L-amino acids
  MISC_FEATURE (80): Xaa equals any of the naturally occurring L-amino acids
  MISC_FEATURE (99): Xaa equals any of the naturally occurring L-amino acids
  MISC_FEATURE (100): Xaa equals any of the naturally occurring L-amino acids
  MISC_FEATURE (101): Xaa equals any of the naturally occurring L-amino acids
  MISC_FEATURE (104): Xaa equals any of the naturally occurring L-amino acids
  MISC_FEATURE (114): Xaa equals any of the naturally occurring L-amino acids
XLQXTKKFPXFYFLKTILXISFGXRXYSLFLLKSLLWPLVSLXFLSGXXNXXGAFSRFAHSTXLVKHDLCVNGIVWTPWXGMLGKTKEGPELPTAQEGXXXAPXLELKPPPKMXPY

SEQ ID NO: 7230 - protein, 55 aa, Homo sapiens
  MISC_FEATURE (33): Xaa equals any of the naturally occurring L-amino acids
  MISC_FEATURE (38): Xaa equals any of the naturally occurring L-amino acids
VFFFLIFCSSWFVLKCLTIWNVKLLHVLQSKSXVKSGXVKNIIPVGHCPHFCAGG

SEQ ID NO: 7231 - protein, 118 aa, Homo sapiens
  MISC_FEATURE (1): Xaa equals any of the naturally occurring L-amino acids
  MISC_FEATURE (24): Xaa equals any of the naturally occurring L-amino acids
  MISC_FEATURE (39): Xaa equals any of the naturally occurring L-amino acids
  MISC_FEATURE (46): Xaa equals any of the naturally occurring L-amino acids
  MISC_FEATURE (47): Xaa equals any of the naturally occurring L-amino acids
  MISC_FEATURE (52): Xaa equals any of the naturally occurring L-amino acids
  MISC_FEATURE (54): Xaa equals any of the naturally occurring L-amino acids
  MISC_FEATURE (56): Xaa equals any of the naturally occurring L-amino acids
  MISC_FEATURE (60): Xaa equals any of the naturally occurring L-amino acids
  MISC_FEATURE (62): Xaa equals any of the naturally occurring L-amino acids
  MISC_FEATURE (63): Xaa equals any of the naturally occurring L-amino acids
  MISC_FEATURE (65): Xaa equals any of the naturally occurring L-amino acids
  MISC_FEATURE (69): Xaa equals any of the naturally occurring L-amino acids
  MISC_FEATURE (78): Xaa equals any of the naturally occurring L-amino acids
  MISC_FEATURE (90): Xaa equals any of the naturally occurring L-amino acids
  MISC_FEATURE (95): Xaa equals any of the naturally occurring L-amino acids
  MISC_FEATURE (99): Xaa equals any of the naturally occurring L-amino acids
  MISC_FEATURE (101): Xaa equals any of the naturally occurring L-amino acids
  MISC_FEATURE (103): Xaa equals any of the naturally occurring L-amino acids
  MISC_FEATURE (104): Xaa equals any of the naturally occurring L-amino acids
  MISC_FEATURE (110): Xaa equals any of the naturally occurring L-amino acids
  MISC_FEATURE (111): Xaa equals any of the naturally occurring L-amino acids
  MISC_FEATURE (112): Xaa equals any of the naturally occurring L-amino acids
XASYFILLLSFSHYYNVIIGDLMXSQLFLSFMNSGSKKXPKCLSLXXIPGFXQXLXSFWXLXXTXIPFXKKLFTWFDXNPGSSIIYCLNXGPHTXPSFXSXPXXKNYILXXXNKILKN

SEQ ID NO: 7232 - protein, 121 aa, Homo sapiens
  MISC_FEATURE (4): Xaa equals any of the naturally occurring L-amino acids
  MISC_FEATURE (24): Xaa equals any of the naturally occurring L-amino acids
  MISC_FEATURE (26): Xaa equals any of the naturally occurring L-amino acids
  MISC_FEATURE (35): Xaa equals any of the naturally occurring L-amino acids
  MISC_FEATURE (36): Xaa equals any of the naturally occurring L-amino acids
  MISC_FEATURE (40): Xaa equals any of the naturally occurring L-amino acids
  MISC_FEATURE (42): Xaa equals any of the naturally occurring L-amino acids
  MISC_FEATURE (47): Xaa equals any of the naturally occurring L-amino acids
  MISC_FEATURE (48): Xaa equals any of the naturally occurring L-amino acids
  MISC_FEATURE (49): Xaa equals any of the naturally occurring L-amino acids
  MISC_FEATURE (52): Xaa equals any of the naturally occurring L-amino acids
  MISC_FEATURE (53): Xaa equals any of the naturally occurring L-amino acids
  MISC_FEATURE (56): Xaa equals any of the naturally occurring L-amino acids
  MISC_FEATURE (61): Xaa equals any of the naturally occurring L-amino acids
  MISC_FEATURE (71): Xaa equals any of the naturally occurring L-amino acids
  MISC_FEATURE (79): Xaa equals any of the naturally occurring L-amino acids
  MISC_FEATURE (80): Xaa equals any of the naturally occurring L-amino acids
  MISC_FEATURE (101): Xaa equals any of the naturally occurring L-amino acids
PALXGLALFAILWVGCGIYPPSLXPXPASSTCSGXXLNTXRXIRASXXXNMXXFPXLKIIXCFSFKKMVNXAPLAKSPXXTRVSFSHPLPFWEFFNPPFQXLPLFLPWPFFLGILRRIKKS

SEQ ID NO: 7233 - protein, 82 aa, Homo sapiens
  MISC_FEATURE (4): Xaa equals any of the naturally occurring L-amino acids
  MISC_FEATURE (5): Xaa equals any of the naturally occurring L-amino acids
  MISC_FEATURE (7): Xaa equals any of the naturally occurring L-amino acids
  MISC_FEATURE (8): Xaa equals any of the naturally occurring L-amino acids
  MISC_FEATURE (9): Xaa equals any of the naturally occurring L-amino acids
  MISC_FEATURE (11): Xaa equals any of the naturally occurring L-amino acids
  MISC_FEATURE (14): Xaa equals any of the naturally occurring L-amino acids
  MISC_FEATURE (21): Xaa equals any of the naturally occurring L-amino acids
  MISC_FEATURE (23): Xaa equals any of the naturally occurring L-amino acids
  MISC_FEATURE (35): Xaa equals any of the naturally occurring L-amino acids
  MISC_FEATURE (36): Xaa equals any of the naturally occurring L-amino acids
  MISC_FEATURE (37): Xaa equals any of the naturally occurring L-amino acids
  MISC_FEATURE (43): Xaa equals any of the naturally occurring L-amino acids
  MISC_FEATURE (46): Xaa equals any of the naturally occurring L-amino acids
  MISC_FEATURE (54): Xaa equals any of the naturally occurring L-amino acids
  MISC_FEATURE (71): Xaa equals any of the naturally occurring L-amino acids
GTKXXCXXXTXSLXSFLVKLXHXTSYNDGIYFSRXXXLYPLQXLYXDLHLLLTXWKTFHIVLITNYLSCLXVTLIYICRFSP

SEQ ID NO: 7234 - protein, 78 aa, Homo sapiens
  MISC_FEATURE (5): Xaa equals any of the naturally occurring L-amino acids
  MISC_FEATURE (8): Xaa equals any of the naturally occurring L-amino acids
  MISC_FEATURE (9): Xaa equals any of the naturally occurring L-amino acids
  MISC_FEATURE (22): Xaa equals any of the naturally occurring L-amino acids
  MISC_FEATURE (33): Xaa equals any of the naturally occurring L-amino acids
  MISC_FEATURE (34): Xaa equals any of the naturally occurring L-amino acids
  MISC_FEATURE (35): Xaa equals any of the naturally occurring L-amino acids
  MISC_FEATURE (43): Xaa equals any of the naturally occurring L-amino acids
  MISC_FEATURE (52): Xaa equals any of the naturally occurring L-amino acids
  MISC_FEATURE (60): Xaa equals any of the naturally occurring L-amino acids
  MISC_FEATURE (62): Xaa equals any of the naturally occurring L-amino acids
  MISC_FEATURE (68): Xaa equals any of the naturally occurring L-amino acids
  MISC_FEATURE (73): Xaa equals any of the naturally occurring L-amino acids
RKTLXSDXXLPTDLQNGQYLDXLPFYLLFLLQXXXQGTSIMIXKIYFINMFXFTFHLFHXPXEYRCLXNLSLXKLQFC

SEQ ID NO: 7235 - protein, 44 aa, Homo sapiens
  MISC_FEATURE (12): Xaa equals any of the naturally occurring L-amino acids
  MISC_FEATURE (17): Xaa equals any of the naturally occurring L-amino acids
  MISC_FEATURE (33): Xaa equals any of the naturally occurring L-amino acids
  MISC_FEATURE (44): Xaa equals any of the naturally occurring L-amino acids
YTKVLPNRYFYXEKFIXKFLSLKFGFFINLKCXLRITILNHWDX

SEQ ID NO: 7236 - protein, 97 aa, Homo sapiens
  MISC_FEATURE (9): Xaa equals any of the naturally occurring L-amino acids
  MISC_FEATURE (38): Xaa equals any of the naturally occurring L-amino acids
  MISC_FEATURE (41): Xaa equals any of the naturally occurring L-amino acids
  MISC_FEATURE (46): Xaa equals any of the naturally occurring L-amino acids
  MISC_FEATURE (58): Xaa equals any of the naturally occurring L-amino acids
  MISC_FEATURE (65): Xaa equals any of the naturally occurring L-amino acids
  MISC_FEATURE (69): Xaa equals any of the naturally occurring L-amino acids
  MISC_FEATURE (86): Xaa equals any of the naturally occurring L-amino acids
  MISC_FEATURE (92): Xaa equals any of the naturally occurring L-amino acids
TYITPPFSXNSLCVKALKGHIPLIPFINQIVLCNKVGXWPXNSFKXWNLEAGKFGLFXFSFWAPXHSLXWMNPFLLFLGQKKKKTXGGPVPXPLFFF

SEQ ID NO: 7237 - protein, 110 aa, Homo sapiens
  MISC_FEATURE (4): Xaa equals any of the naturally occurring L-amino acids
  MISC_FEATURE (6): Xaa equals any of the naturally occurring L-amino acids
  MISC_FEATURE (9): Xaa equals any of the naturally occurring L-amino acids
  MISC_FEATURE (12): Xaa equals any of the naturally occurring L-amino acids
  MISC_FEATURE (27): Xaa equals any of the naturally occurring L-amino acids
  MISC_FEATURE (31): Xaa equals any of the naturally occurring L-amino acids
  MISC_FEATURE (34): Xaa equals any of the naturally occurring L-amino acids
  MISC_FEATURE (35): Xaa equals any of the naturally occurring L-amino acids
  MISC_FEATURE (41): Xaa equals any of the naturally occurring L-amino acids
  MISC_FEATURE (45): Xaa equals any of the naturally occurring L-amino acids
  MISC_FEATURE (49): Xaa equals any of the naturally occurring L-amino acids
  MISC_FEATURE (52): Xaa equals any of the naturally occurring L-amino acids
  MISC_FEATURE (59): Xaa equals any of the naturally occurring L-amino acids
  MISC_FEATURE (60): Xaa equals any of the naturally occurring L-amino acids
  MISC_FEATURE (61): Xaa equals any of the naturally occurring L-amino acids
  MISC_FEATURE (64): Xaa equals any of the naturally occurring L-amino acids
  MISC_FEATURE (69): Xaa equals any of the naturally occurring L-amino acids
  MISC_FEATURE (74): Xaa equals any of the naturally occurring L-amino acids
  MISC_FEATURE (75): Xaa equals any of the naturally occurring L-amino acids
  MISC_FEATURE (76): Xaa equals any of the naturally occurring L-amino acids
  MISC_FEATURE (93): Xaa equals any of the naturally occurring L-amino acids
  MISC_FEATURE (101): Xaa equals any of the naturally occurring L-amino acids
  MISC_FEATURE (102): Xaa equals any of the naturally occurring L-amino acids
  MISC_FEATURE (106): Xaa equals any of the naturally occurring L-amino acids
TPRXYXFFXKIXKILGPYFLIHFSAPXPSFXPLXXFWVNSXSPGXGPFXFSXFPPPFPXXXLKXPQPPXFPPNXXXFFPNLNSPPVPWVPNFXPLKTFPEXXFFIXKPLK

SEQ ID NO: 7238 - protein, 94 aa, Homo sapiens
  MISC_FEATURE (67): Xaa equals any of the naturally occurring L-amino acids
ASIIFFQVQVLKLLLNLSENPAMTEGLLRAQVNSLYIYFVNIHIYTFEQTDRSGKIKPKMLQGFSLXSSIKGGFLNSFCMYEFPKFFAMSLFYF

SEQ ID NO: 7239 - protein, 47 aa, Homo sapiens
AARELMKSPSNFQSHTCIYCQNLSMTNTKLKSCFQRKKIISLNYFVG

SEQ ID NO: 7240 - protein, 34 aa, Homo sapiens
  MISC_FEATURE (33): Xaa equals any of the naturally occurring L-amino acids
  MISC_FEATURE (34): Xaa equals any of the naturally occurring L-amino acids
AARGGARYPIRPIVSRITIHWPSFYNVVTGKTXX

SEQ ID NO: 7241 - protein, 93 aa, Homo sapiens
  MISC_FEATURE (9): Xaa equals any of the naturally occurring L-amino acids
  MISC_FEATURE (16): Xaa equals any of the naturally occurring L-amino acids
  MISC_FEATURE (29): Xaa equals any of the naturally occurring L-amino acids
  MISC_FEATURE (31): Xaa equals any of the naturally occurring L-amino acids
  MISC_FEATURE (32): Xaa equals any of the naturally occurring L-amino acids
  MISC_FEATURE (33): Xaa equals any of the naturally occurring L-amino acids
  MISC_FEATURE (35): Xaa equals any of the naturally occurring L-amino acids
  MISC_FEATURE (53): Xaa equals any of the naturally occurring L-amino acids
  MISC_FEATURE (67): Xaa equals any of the naturally occurring L-amino acids
  MISC_FEATURE (71): Xaa equals any of the naturally occurring L-amino acids
  MISC_FEATURE (77): Xaa equals any of the naturally occurring L-amino acids
LALWHPVLXVELPGTXSVSPEATSLEAAXRXXXSXTTIFIVSCVIAYFTNFAXALNLLNLLWPPPPXKVKXVNSNSXPAPGSAPVIPTGWTKG

SEQ ID NO: 7242 - protein, 84 aa, Homo sapiens
  MISC_FEATURE (35): Xaa equals any of the naturally occurring L-amino acids
  MISC_FEATURE (57): Xaa equals any of the naturally occurring L-amino acids
  MISC_FEATURE (73): Xaa equals any of the naturally occurring L-amino acids
  MISC_FEATURE (77): Xaa equals any of the naturally occurring L-amino acids
  MISC_FEATURE (79): Xaa equals any of the naturally occurring L-amino acids
  MISC_FEATURE (81): Xaa equals any of the naturally occurring L-amino acids
  MISC_FEATURE (82): Xaa equals any of the naturally occurring L-amino acids
AKSDFSEFGAKRKFTQSFMRSEEEGEKERTENREXGRFASGRRSQYRRSTDREEEEXMDDEAIIAAWRRRREXTRTXLXKXXED

SEQ ID NO: 7243 - protein, 32 aa, Homo sapiens
  MISC_FEATURE (1): Xaa equals any of the naturally occurring L-amino acids
  MISC_FEATURE (12): Xaa equals any of the naturally occurring L-amino acids
  MISC_FEATURE (15): Xaa equals any of the naturally occurring L-amino acids
  MISC_FEATURE (28): Xaa equals any of the naturally occurring L-amino acids
XKLVVVSLENVXKMXLCVLMPWPDSLLXFIEI

SEQ ID NO: 7244 - protein, 89 aa, Homo sapiens
LAENRWPRGRQRNEGFLSSCTEQSSPGTNLEYSVQTTEEDKINFYAFKKNYGQNNIRTKTFMIFQLLGFVYGYQQPCPAIVFILFQAGC

SEQ ID NO: 7245 - protein, 64 aa, Homo sapiens
  MISC_FEATURE (2): Xaa equals any of the naturally occurring L-amino acids
  MISC_FEATURE (4): Xaa equals any of the naturally occurring L-amino acids
  MISC_FEATURE (8): Xaa equals any of the naturally occurring L-amino acids
  MISC_FEATURE (14): Xaa equals any of the naturally occurring L-amino acids
  MISC_FEATURE (18): Xaa equals any of the naturally occurring L-amino acids
  MISC_FEATURE (25): Xaa equals any of the naturally occurring L-amino acids
  MISC_FEATURE (37): Xaa equals any of the naturally occurring L-amino acids
  MISC_FEATURE (46): Xaa equals any of the naturally occurring L-amino acids
  MISC_FEATURE (52): Xaa equals any of the naturally occurring L-amino acids
  MISC_FEATURE (55): Xaa equals any of the naturally occurring L-amino acids
  MISC_FEATURE (57): Xaa equals any of the naturally occurring L-amino acids
FXVXFESXITWLKXIPTXPERNNPXGTLTPPLWKRGXKIPPLSLAXNFFPLXFLXFXHPFKKTF

SEQ ID NO: 7246 - protein, 49 aa, Homo sapiens
  MISC_FEATURE (9): Xaa equals any of the naturally occurring L-amino acids
  MISC_FEATURE (12): Xaa equals any of the naturally occurring L-amino acids
  MISC_FEATURE (13): Xaa equals any of the naturally occurring L-amino acids
  MISC_FEATURE (21): Xaa equals any of the naturally occurring L-amino acids
  MISC_FEATURE (38): Xaa equals any of the naturally occurring L-amino acids
  MISC_FEATURE (40): Xaa equals any of the naturally occurring L-amino acids
  MISC_FEATURE (44): Xaa equals any of the naturally occurring L-amino acids
  MISC_FEATURE (46): Xaa equals any of the naturally occurring L-amino acids
TIGSPGLYXIRXXLVPNSVRXITSLEFLFFFPNIVSLXNXLFNXLXANL

SEQ ID NO: 7247 - protein, 30 aa, Homo sapiens
GTPRNEQAGLPLYRCWLLKVFNCKLGGFGD

SEQ ID NO: 7248 - protein, 60 aa, Homo sapiens
  MISC_FEATURE (8): Xaa equals any of the naturally occurring L-amino acids
  MISC_FEATURE (11): Xaa equals any of the naturally occurring L-amino acids
  MISC_FEATURE (17): Xaa equals any of the naturally occurring L-amino acids
  MISC_FEATURE (46): Xaa equals any of the naturally occurring L-amino acids
  MISC_FEATURE (47): Xaa equals any of the naturally occurring L-amino acids
  MISC_FEATURE (53): Xaa equals any of the naturally occurring L-amino acids
VLCPFHVXICXLTILLXPLIPAQHVFWSMKIVLKTKANACSLPLSXXKSYPKXDFEFRSW

SEQ ID NO: 7249 - protein, 40 aa, Homo sapiens
  MISC_FEATURE (39): Xaa equals any of the naturally occurring L-amino acids
AARARAEFGTRGGPVPNSPYSESYYNSLAVVLQRRDWTXK

SEQ ID NO: 7250 - protein, 124 aa, Homo sapiens
  MISC_FEATURE (58): Xaa equals any of the naturally occurring L-amino acids
  MISC_FEATURE (59): Xaa equals any of the naturally occurring L-amino acids
  MISC_FEATURE (79): Xaa equals any of the naturally occurring L-amino acids
  MISC_FEATURE (92): Xaa equals any of the naturally occurring L-amino acids
  MISC_FEATURE (95): Xaa equals any of the naturally occurring L-amino acids
  MISC_FEATURE (97): Xaa equals any of the naturally occurring L-amino acids
  MISC_FEATURE (100): Xaa equals any of the naturally occurring L-amino acids
  MISC_FEATURE (119): Xaa equals any of the naturally occurring L-amino acids
PKAQFFESLWPELDSQDSGSVQRARGTASSAAAPLMPSPALLPLPGLNGVSIEGWTPXXGELVPCGYKLGASLRAVPGXMGAPLPPATPPTXKRXNXTSXANPSPPGFSRGAPGQKELXNCFGF

SEQ ID NO: 7251 - protein, 130 aa, Homo sapiens
  MISC_FEATURE (20): Xaa equals any of the naturally occurring L-amino acids
  MISC_FEATURE (39): Xaa equals any of the naturally occurring L-amino acids
  MISC_FEATURE (46): Xaa equals any of the naturally occurring L-amino acids
  MISC_FEATURE (50): Xaa equals any of the naturally occurring L-amino acids
  MISC_FEATURE (57): Xaa equals any of the naturally occurring L-amino acids
  MISC_FEATURE (58): Xaa equals any of the naturally occurring L-amino acids
  MISC_FEATURE (59): Xaa equals any of the naturally occurring L-amino acids
  MISC_FEATURE (61): Xaa equals any of the naturally occurring L-amino acids
  MISC_FEATURE (64): Xaa equals any of the naturally occurring L-amino acids
  MISC_FEATURE (65): Xaa equals any of the naturally occurring L-amino acids
  MISC_FEATURE (75): Xaa equals any of the naturally occurring L-amino acids
  MISC_FEATURE (81): Xaa equals any of the naturally occurring L-amino acids
  MISC_FEATURE (85): Xaa equals any of the naturally occurring L-amino acids
  MISC_FEATURE (91): Xaa equals any of the naturally occurring L-amino acids
  MISC_FEATURE (106): Xaa equals any of the naturally occurring L-amino acids
  MISC_FEATURE (107): Xaa equals any of the naturally occurring L-amino acids
  MISC_FEATURE (111): Xaa equals any of the naturally occurring L-amino acids
  MISC_FEATURE (119): Xaa equals any of the naturally occurring L-amino acids
  MISC_FEATURE (123): Xaa equals any of the naturally occurring L-amino acids
  MISC_FEATURE (124): Xaa equals any of the naturally occurring L-amino acids
  MISC_FEATURE (130): Xaa equals any of the naturally occurring L-amino acids
VLPSPFESPGPKRNKSWSSXAVAVALELLDPPGCMNSAXAASSPGXQSPXAPSGYSXXXWXSGXXDAARPPPTVXKSVVVXGGIXGVTCAXQSATLFPSEDILLVXXSPVXNEFQISSXFLYXXNNSMFX

SEQ ID NO: 7252 - protein, 56 aa, Homo sapiens
  MISC_FEATURE (37): Xaa equals any of the naturally occurring L-amino acids
  MISC_FEATURE (41): Xaa equals any of the naturally occurring L-amino acids
  MISC_FEATURE (44): Xaa equals any of the naturally occurring L-amino acids
  MISC_FEATURE (47): Xaa equals any of the naturally occurring L-amino acids
ISPFSECLLKFMPFFEYGSWTPTLLLPTPPRNFLICXVFFXVFXNSXVIILHNFGY

SEQ ID NO: 7253 - protein, 20 aa, Homo sapiens
  MISC_FEATURE (11): Xaa equals any of the naturally occurring L-amino acids
  MISC_FEATURE (13): Xaa equals any of the naturally occurring L-amino acids
  MISC_FEATURE (16): Xaa equals any of the naturally occurring L-amino acids
VEFFFFFLKNXLXKIXPNTF

SEQ ID NO: 7254 - protein, 61 aa, Homo sapiens
  MISC_FEATURE (3): Xaa equals any of the naturally occurring L-amino acids
  MISC_FEATURE (11): Xaa equals any of the naturally occurring L-amino acids
  MISC_FEATURE (15): Xaa equals any of the naturally occurring L-amino acids
  MISC_FEATURE (19): Xaa equals any of the naturally occurring L-amino acids
  MISC_FEATURE (51): Xaa equals any of the naturally occurring L-amino acids
  MISC_FEATURE (58): Xaa equals any of the naturally occurring L-amino acids
  MISC_FEATURE (59): Xaa equals any of the naturally occurring L-amino acids
DFXARIPLRNXASLXGKKXELHRGGGRSTTSGSPGLQEFGTSGNLVMAVVXEHPAFAXXPP

SEQ ID NO: 7255 - protein, 58 aa, Homo sapiens
  MISC_FEATURE (41): Xaa equals any of the naturally occurring L-amino acids
PLYLLHNELTRNNFARRAKAKTPETRRATLEQLKEHTRLCXKIVGKIYRLKRQTYRAW

SEQ ID NO: 7256 - protein, 55 aa, Homo sapiens
  MISC_FEATURE (4): Xaa equals any of the naturally occurring L-amino acids
  MISC_FEATURE (13): Xaa equals any of the naturally occurring L-amino acids
  MISC_FEATURE (18): Xaa equals any of the naturally occurring L-amino acids
  MISC_FEATURE (23): Xaa equals any of the naturally occurring L-amino acids
  MISC_FEATURE (28): Xaa equals any of the naturally occurring L-amino acids
  MISC_FEATURE (40): Xaa equals any of the naturally occurring L-amino acids
  MISC_FEATURE (45): Xaa equals any of the naturally occurring L-amino acids
  MISC_FEATURE (46): Xaa equals any of the naturally occurring L-amino acids
FYRXISDSMIFSXVIVRXMCNVXIETEXYKGQVTCQCDMXRHIYXXTWMFLNLYY

SEQ ID NO: 7257 - protein, 31 aa, Homo sapiens
  MISC_FEATURE (6): Xaa equals any of the naturally occurring L-amino acids
  MISC_FEATURE (7): Xaa equals any of the naturally occurring L-amino acids
  MISC_FEATURE (19): Xaa equals any of the naturally occurring L-amino acids
  MISC_FEATURE (22): Xaa equals any of the naturally occurring L-amino acids
FFFFLXXFPLKKFFPFPPXPPXFPFLNISKP

SEQ ID NO: 7258 - protein, 37 aa, Homo sapiens
  MISC_FEATURE (21): Xaa equals any of the naturally occurring L-amino acids
  MISC_FEATURE (22): Xaa equals any of the naturally occurring L-amino acids
  MISC_FEATURE (27): Xaa equals any of the naturally occurring L-amino acids
  MISC_FEATURE (29): Xaa equals any of the naturally occurring L-amino acids
  MISC_FEATURE (33): Xaa equals any of the naturally occurring L-amino acids
TVILKKMSIGIYFRENISIVXXLPPPXGXEGHXLWVL

SEQ ID NO: 7259 - protein, 62 aa, Homo sapiens
  MISC_FEATURE (9): Xaa equals any of the naturally occurring L-amino acids
  MISC_FEATURE (10): Xaa equals any of the naturally occurring L-amino acids
  MISC_FEATURE (13): Xaa equals any of the naturally occurring L-amino acids
  MISC_FEATURE (22): Xaa equals any of the naturally occurring L-amino acids
  MISC_FEATURE (23): Xaa equals any of the naturally occurring L-amino acids
  MISC_FEATURE (44): Xaa equals any of the naturally occurring L-amino acids
  MISC_FEATURE (56): Xaa equals any of the naturally occurring L-amino acids
  MISC_FEATURE (59): Xaa equals any of the naturally occurring L-amino acids
PLNTPQSQXXLLXQCIKFIYFXXPHTILGPLKPMVKLAALELTXDQILTLLLSNIXNWXISF

SEQ ID NO: 7260 - protein, 53 aa, Homo sapiens
NSNLTGHKYTFGYVYLLLTKVKRNVLMHSLNLKYTYIKFLKDANLNPILNEKV

SEQ ID NO: 7261 - protein, 45 aa, Homo sapiens
  MISC_FEATURE (1): Xaa equals any of the naturally occurring L-amino acids
  MISC_FEATURE (25): Xaa equals any of the naturally occurring L-amino acids
  MISC_FEATURE (29): Xaa equals any of the naturally occurring L-amino acids
  MISC_FEATURE (31): Xaa equals any of the naturally occurring L-amino acids
  MISC_FEATURE (32): Xaa equals any of the naturally occurring L-amino acids
  MISC_FEATURE (42): Xaa equals any of the naturally occurring L-amino acids
XEKNPSLKKPPPKKKKNCSLSPLLXQKFXGXXFHLCPPNFSXFLV

SEQ ID NO: 7262 - protein, 79 aa, Homo sapiens
  MISC_FEATURE (2): Xaa equals any of the naturally occurring L-amino acids
  MISC_FEATURE (4): Xaa equals any of the naturally occurring L-amino acids
  MISC_FEATURE (6): Xaa equals any of the naturally occurring L-amino acids
  MISC_FEATURE (9): Xaa equals any of the naturally occurring L-amino acids
  MISC_FEATURE (10): Xaa equals any of the naturally occurring L-amino acids
  MISC_FEATURE (11): Xaa equals any of the naturally occurring L-amino acids
  MISC_FEATURE (12): Xaa equals any of the naturally occurring L-amino acids
  MISC_FEATURE (13): Xaa equals any of the naturally occurring L-amino acids
  MISC_FEATURE (15): Xaa equals any of the naturally occurring L-amino acids
  MISC_FEATURE (16): Xaa equals any of the naturally occurring L-amino acids
  MISC_FEATURE (17): Xaa equals any of the naturally occurring L-amino acids
  MISC_FEATURE (18): Xaa equals any of the naturally occurring L-amino acids
  MISC_FEATURE (20): Xaa equals any of the naturally occurring L-amino acids
  MISC_FEATURE (21): Xaa equals any of the naturally occurring L-amino acids
  MISC_FEATURE (24): Xaa equals any of the naturally occurring L-amino acids
  MISC_FEATURE (33): Xaa equals any of the naturally occurring L-amino acids
  MISC_FEATURE (35): Xaa equals any of the naturally occurring L-amino acids
  MISC_FEATURE (38): Xaa equals any of the naturally occurring L-amino acids
  MISC_FEATURE (42): Xaa equals any of the naturally occurring L-amino acids
  MISC_FEATURE (45): Xaa equals any of the naturally occurring L-amino acids
  MISC_FEATURE (46): Xaa equals any of the naturally occurring L-amino acids
  MISC_FEATURE (50): Xaa equals any of the naturally occurring L-amino acids
  MISC_FEATURE (60): Xaa equals any of the naturally occurring L-amino acids
  MISC_FEATURE (62): Xaa equals any of the naturally occurring L-amino acids
  MISC_FEATURE (64): Xaa equals any of the naturally occurring L-amino acids
  MISC_FEATURE (66): Xaa equals any of the naturally occurring L-amino acids
  MISC_FEATURE (67): Xaa equals any of the naturally occurring L-amino acids
  MISC_FEATURE (70): Xaa equals any of the naturally occurring L-amino acids
  MISC_FEATURE (75): Xaa equals any of the naturally occurring L-amino acids
FXVXNXFYXXXXXLXXXXLXXPMXKPPHCTELXPXGTXIIIXRVXXFYQXNLQINSLGLXPXPXPXXIKXKKKSXLLET

SEQ ID NO: 7263 - protein, 72 aa, Homo sapiens
  MISC_FEATURE (7): Xaa equals any of the naturally occurring L-amino acids
  MISC_FEATURE (12): Xaa equals any of the naturally occurring L-amino acids
  MISC_FEATURE (14): Xaa equals any of the naturally occurring L-amino acids
  MISC_FEATURE (18): Xaa equals any of the naturally occurring L-amino acids
  MISC_FEATURE (30): Xaa equals any of the naturally occurring L-amino acids
  MISC_FEATURE (34): Xaa equals any of the naturally occurring L-amino acids
  MISC_FEATURE (44): Xaa equals any of the naturally occurring L-amino acids
  MISC_FEATURE (60): Xaa equals any of the naturally occurring L-amino acids
  MISC_FEATURE (63): Xaa equals any of the naturally occurring L-amino acids
  MISC_FEATURE (68): Xaa equals any of the naturally occurring L-amino acids
  MISC_FEATURE (69): Xaa equals any of the naturally occurring L-amino acids
LDQKKSXLFDLXRXNLPXLYTHVCVSLKRXVRLXKILIVINHVXTSCNELHDLILSLLAXTTXYFSNXXISP

SEQ ID NO: 7264 - protein, 71 aa, Homo sapiens
  MISC_FEATURE (5): Xaa equals any of the naturally occurring L-amino acids
  MISC_FEATURE (6): Xaa equals any of the naturally occurring L-amino acids
  MISC_FEATURE (12): Xaa equals any of the naturally occurring L-amino acids
  MISC_FEATURE (18): Xaa equals any of the naturally occurring L-amino acids
  MISC_FEATURE (37): Xaa equals any of the naturally occurring L-amino acids
  MISC_FEATURE (47): Xaa equals any of the naturally occurring L-amino acids
  MISC_FEATURE (50): Xaa equals any of the naturally occurring L-amino acids
  MISC_FEATURE (54): Xaa equals any of the naturally occurring L-amino acids
  MISC_FEATURE (56): Xaa equals any of the naturally occurring L-amino acids
  MISC_FEATURE (68): Xaa equals any of the naturally occurring L-amino acids
EPHEXXPPKKLXNNSFFXKKGESWLVAQNYFKNSAPXGKTLLWYFSXKTXYHHXLXWFSQFHSQGEPXPSC

SEQ ID NO: 7265 - protein, 45 aa, Homo sapiens
  MISC_FEATURE (38): Xaa equals any of the naturally occurring L-amino acids
LTYLLWFPINNCSLLIIVHVFYVASNKLRQSYTSAFQXGSLFLHT

SEQ ID NO: 7266 - protein, 116 aa, Homo sapiens
  MISC_FEATURE (4): Xaa equals any of the naturally occurring L-amino acids
  MISC_FEATURE (7): Xaa equals any of the naturally occurring L-amino acids
  MISC_FEATURE (8): Xaa equals any of the naturally occurring L-amino acids
  MISC_FEATURE (11): Xaa equals any of the naturally occurring L-amino acids
  MISC_FEATURE (16): Xaa equals any of the naturally occurring L-amino acids
  MISC_FEATURE (17): Xaa equals any of the naturally occurring L-amino acids
  MISC_FEATURE (19): Xaa equals any of the naturally occurring L-amino acids
  MISC_FEATURE (24): Xaa equals any of the naturally occurring L-amino acids
  MISC_FEATURE (29): Xaa equals any of the naturally occurring L-amino acids
  MISC_FEATURE (35): Xaa equals any of the naturally occurring L-amino acids
  MISC_FEATURE (36): Xaa equals any of the naturally occurring L-amino acids
  MISC_FEATURE (43): Xaa equals any of the naturally occurring L-amino acids
  MISC_FEATURE (48): Xaa equals any of the naturally occurring L-amino acids
  MISC_FEATURE (54): Xaa equals any of the naturally occurring L-amino acids
  MISC_FEATURE (56): Xaa equals any of the naturally occurring L-amino acids
  MISC_FEATURE (62): Xaa equals any of the naturally occurring L-amino acids
  MISC_FEATURE (63): Xaa equals any of the naturally occurring L-amino acids
  MISC_FEATURE (73): Xaa equals any of the naturally occurring L-amino acids
  MISC_FEATURE (74): Xaa equals any of the naturally occurring L-amino acids
  MISC_FEATURE (86): Xaa equals any of the naturally occurring L-amino acids
  MISC_FEATURE (90): Xaa equals any of the naturally occurring L-amino acids
  MISC_FEATURE (94): Xaa equals any of the naturally occurring L-amino acids
  MISC_FEATURE (102): Xaa equals any of the naturally occurring L-amino acids
  MISC_FEATURE (107): Xaa equals any of the naturally occurring L-amino acids
  MISC_FEATURE (111): Xaa equals any of the naturally occurring L-amino acids
KEKXETXXRKXYFGLXXLXPSKDXTLNLXKKKFGXXLITIIIXHFTFXPGSLLXFXLHYLPXXLYHPLKKFLXXYIFILPFYTKRXNSGXLVGXNPLFIPPXPFWEXFKGXKGFFL

SEQ ID NO: 7267 - protein, 50 aa, Homo sapiens
  MISC_FEATURE (17): Xaa equals any of the naturally occurring L-amino acids
  MISC_FEATURE (33): Xaa equals any of the naturally occurring L-amino acids
  MISC_FEATURE (46): Xaa equals any of the naturally occurring L-amino acids
  MISC_FEATURE (47): Xaa equals any of the naturally occurring L-amino acids
IMGLSLPYIFLLKSILXQCRLIIYNLIYMNSLXHPSFILTIIVYMXXIPN

SEQ ID NO: 7268 - protein, 25 aa, Homo sapiens
  MISC_FEATURE (8): Xaa equals any of the naturally occurring L-amino acids
  MISC_FEATURE (11): Xaa equals any of the naturally occurring L-amino acids
  MISC_FEATURE (23): Xaa equals any of the naturally occurring L-amino acids
GKKEVAPXSEXFSITGAIRGAGXTS

SEQ ID NO: 7269 - protein, 78 aa, Homo sapiens
  MISC_FEATURE (4): Xaa equals any of the naturally occurring L-amino acids
  MISC_FEATURE (29): Xaa equals any of the naturally occurring L-amino acids
  MISC_FEATURE (35): Xaa equals any of the naturally occurring L-amino acids
  MISC_FEATURE (37): Xaa equals any of the naturally occurring L-amino acids
  MISC_FEATURE (39): Xaa equals any of the naturally occurring L-amino acids
  MISC_FEATURE (42): Xaa equals any of the naturally occurring L-amino acids
  MISC_FEATURE (48): Xaa equals any of the naturally occurring L-amino acids
  MISC_FEATURE (58): Xaa equals any of the naturally occurring L-amino acids
  MISC_FEATURE (61): Xaa equals any of the naturally occurring L-amino acids
  MISC_FEATURE (63): Xaa equals any of the naturally occurring L-amino acids
WSMXYLQWNIGLGIFPEHYQVSGWWEGWXKPIPLXLXKXLVXAGLWLXLESGLNPPYXGGXWXGKNQENFVPFPPWGS

SEQ ID NO: 7270 - protein, 33 aa, Homo sapiens
  MISC_FEATURE (6): Xaa equals any of the naturally occurring L-amino acids
  MISC_FEATURE (8): Xaa equals any of the naturally occurring L-amino acids
  MISC_FEATURE (12): Xaa equals any of the naturally occurring L-amino acids
  MISC_FEATURE (20): Xaa equals any of the naturally occurring L-amino acids
  MISC_FEATURE (26): Xaa equals any of the naturally occurring L-amino acids
QNPSCXSXHLLXHFDHLASXARHTRXRLRLSQK

SEQ ID NO: 7271 - protein, 76 aa, Homo sapiens
  MISC_FEATURE (1): Xaa equals any of the naturally occurring L-amino acids
  MISC_FEATURE (47): Xaa equals any of the naturally occurring L-amino acids
  MISC_FEATURE (60): Xaa equals any of the naturally occurring L-amino acids
  MISC_FEATURE (66): Xaa equals any of the naturally occurring L-amino acids
  MISC_FEATURE (75): Xaa equals any of the naturally occurring L-amino acids
XRHALVGAICDPKNSTFTSVWLILNHSSLCTYIHTHTHSGLTQKKKXIQTLQNYPSFLYXLCRFMXTTCNCHNPXG

SEQ ID NO: 7272 - protein, 33 aa, Homo sapiens
  MISC_FEATURE (1): Xaa equals any of the naturally occurring L-amino acids
  MISC_FEATURE (11): Xaa equals any of the naturally occurring L-amino acids
  MISC_FEATURE (20): Xaa equals any of the naturally occurring L-amino acids
  MISC_FEATURE (22): Xaa equals any of the naturally occurring L-amino acids
  MISC_FEATURE (26): Xaa equals any of the naturally occurring L-amino acids
  MISC_FEATURE (28): Xaa equals any of the naturally occurring L-amino acids
XSNPPPPLGKXAGARRGWTXLXLTGXSXGLARL

SEQ ID NO: 7273 - protein, 72 aa, Homo sapiens
  MISC_FEATURE (2): Xaa equals any of the naturally occurring L-amino acids
  MISC_FEATURE (9): Xaa equals any of the naturally occurring L-amino acids
  MISC_FEATURE (14): Xaa equals any of the naturally occurring L-amino acids
  MISC_FEATURE (17): Xaa equals any of the naturally occurring L-amino acids
  MISC_FEATURE (19): Xaa equals any of the naturally occurring L-amino acids
  MISC_FEATURE (21): Xaa equals any of the naturally occurring L-amino acids
  MISC_FEATURE (23): Xaa equals any of the naturally occurring L-amino acids
  MISC_FEATURE (27): Xaa equals any of the naturally occurring L-amino acids
  MISC_FEATURE (31): Xaa equals any of the naturally occurring L-amino acids
  MISC_FEATURE (32): Xaa equals any of the naturally occurring L-amino acids
  MISC_FEATURE (36): Xaa equals any of the naturally occurring L-amino acids
  MISC_FEATURE (37): Xaa equals any of the naturally occurring L-amino acids
  MISC_FEATURE (40): Xaa equals any of the naturally occurring L-amino acids
  MISC_FEATURE (47): Xaa equals any of the naturally occurring L-amino acids
  MISC_FEATURE (48): Xaa equals any of the naturally occurring L-amino acids
  MISC_FEATURE (56): Xaa equals any of the naturally occurring L-amino acids
  MISC_FEATURE (69): Xaa equals any of the naturally occurring L-amino acids
YXNMGTRTXGKQIXTEXSXPXSXFLSXSLIXXFIIXXIPXVLSMLIXXSWSLTPPXIKSFGIIYNLLPXFYS

SEQ ID NO: 7274 - protein, 52 aa, Homo sapiens
  MISC_FEATURE (8): Xaa equals any of the naturally occurring L-amino acids
  MISC_FEATURE (18): Xaa equals any of the naturally occurring L-amino acids
  MISC_FEATURE (23): Xaa equals any of the naturally occurring L-amino acids
  MISC_FEATURE (27): Xaa equals any of the naturally occurring L-amino acids
  MISC_FEATURE (29): Xaa equals any of the naturally occurring L-amino acids
  MISC_FEATURE (31): Xaa equals any of the naturally occurring L-amino acids
  MISC_FEATURE (35): Xaa equals any of the naturally occurring L-amino acids
LEADGAVXNSCRALKGEXADLQXEGKXLXLXGPCXFLPPFPQPYSCPPLKFH

SEQ ID NO: 7275 - protein, 64 aa, Homo sapiens
  MISC_FEATURE (10): Xaa equals any of the naturally occurring L-amino acids
  MISC_FEATURE (13): Xaa equals any of the naturally occurring L-amino acids
  MISC_FEATURE (19): Xaa equals any of the naturally occurring L-amino acids
  MISC_FEATURE (23): Xaa equals any of the naturally occurring L-amino acids
  MISC_FEATURE (24): Xaa equals any of the naturally occurring L-amino acids
  MISC_FEATURE (25): Xaa equals any of the naturally occurring L-amino acids
  MISC_FEATURE (32): Xaa equals any of the naturally occurring L-amino acids
  MISC_FEATURE (33): Xaa equals any of the naturally occurring L-amino acids
  MISC_FEATURE (34): Xaa equals any of the naturally occurring L-amino acids
  MISC_FEATURE (39): Xaa equals any of the naturally occurring L-amino acids
  MISC_FEATURE (48): Xaa equals any of the naturally occurring L-amino acids
  MISC_FEATURE (50): Xaa equals any of the naturally occurring L-amino acids
  MISC_FEATURE (52): Xaa equals any of the naturally occurring L-amino acids
  MISC_FEATURE (53): Xaa equals any of the naturally occurring L-amino acids
PGLKITINKXTAXKLRLCXITSXXXLPLDHTXXXWIAKXDCPLYNGGXIXLXXLNDQEQFCQNV

SEQ ID NO: 7276 - protein, 38 aa, Homo sapiens
  MISC_FEATURE (35): Xaa equals any of the naturally occurring L-amino acids
  MISC_FEATURE (37): Xaa equals any of the naturally occurring L-amino acids
  MISC_FEATURE (38): Xaa equals any of the naturally occurring L-amino acids
AARGGARYPIRPIVSRITIHWPSFYNVAVLGKTQXPXX

SEQ ID NO: 7277 - protein, 66 aa, Homo sapiens
  MISC_FEATURE (15): Xaa equals any of the naturally occurring L-amino acids
  MISC_FEATURE (65): Xaa equals any of the naturally occurring L-amino acids
PSTKPSCFGANWHLXPFGGSDKQIKLQLAVQDSARCLHLLLVESKPCAPFQSKIKGTGIFLEKKXI

SEQ ID NO: 7278 - protein, 66 aa, Homo sapiens
  MISC_FEATURE (8): Xaa equals any of the naturally occurring L-amino acids
  MISC_FEATURE (13): Xaa equals any of the naturally occurring L-amino acids
  MISC_FEATURE (16): Xaa equals any of the naturally occurring L-amino acids
  MISC_FEATURE (29): Xaa equals any of the naturally occurring L-amino acids
  MISC_FEATURE (30): Xaa equals any of the naturally occurring L-amino acids
  MISC_FEATURE (43): Xaa equals any of the naturally occurring L-amino acids
  MISC_FEATURE (56): Xaa equals any of the naturally occurring L-amino acids
  MISC_FEATURE (62): Xaa equals any of the naturally occurring L-amino acids
FLNLTLRXKMELXAVXDALQLVDPPGCRXXGTRLFCAPVLHHXSMSQVIMFFCTRXLGMQRXLELT

SEQ ID NO: 7279 - protein, 48 aa, Homo sapiens
  MISC_FEATURE (35): Xaa equals any of the naturally occurring L-amino acids
  MISC_FEATURE (38): Xaa equals any of the naturally occurring L-amino acids
  MISC_FEATURE (43): Xaa equals any of the naturally occurring L-amino acids
  MISC_FEATURE (47): Xaa equals any of the naturally occurring L-amino acids
GTRGGPVPNSPYSESYYNSLAVVLQRLDWENSCLXDPXNHHMXIPIXT

SEQ ID NO: 7280 - protein, 20 aa, Homo sapiens
  MISC_FEATURE (2): Xaa equals any of the naturally occurring L-amino acids
  MISC_FEATURE (3): Xaa equals any of the naturally occurring L-amino acids
  MISC_FEATURE (4): Xaa equals any of the naturally occurring L-amino acids
  MISC_FEATURE (17): Xaa equals any of the naturally occurring L-amino acids
YXXXTLCGLCLQSSRKXKVR

SEQ ID NO: 7281 - protein, 101 aa, Homo sapiens
  MISC_FEATURE (37): Xaa equals any of the naturally occurring L-amino acids
  MISC_FEATURE (39): Xaa equals any of the naturally occurring L-amino acids
  MISC_FEATURE (59): Xaa equals any of the naturally occurring L-amino acids
  MISC_FEATURE (70): Xaa equals any of the naturally occurring L-amino acids
  MISC_FEATURE (80): Xaa equals any of the naturally occurring L-amino acids
  MISC_FEATURE (82): Xaa equals any of the naturally occurring L-amino acids
  MISC_FEATURE (84): Xaa equals any of the naturally occurring L-amino acids
  MISC_FEATURE (91): Xaa equals any of the naturally occurring L-amino acids
  MISC_FEATURE (99): Xaa equals any of the naturally occurring L-amino acids
LVVKYSDIRHSPRHVLHTCTHTMSHRGHTVFRIVTIXRXSLLWYMLKYLLFWAKAPRQXLLIMVAGKRGXEKRPGQVKTXFXQXLNSCLQXWAEKGRKXSF

SEQ ID NO: 7282 - protein, 26 aa, Homo sapiens
NKLIVNILPKRISIRYINLLMDSQTM

SEQ ID NO: 7283 - protein, 37 aa, Homo sapiens
  MISC_FEATURE (34): Xaa equals any of the naturally occurring L-amino acids
  MISC_FEATURE (36): Xaa equals any of the naturally occurring L-amino acids
  MISC_FEATURE (37): Xaa equals any of the naturally occurring L-amino acids
AARAARGGARYPIRPIVSRITIHWPSFYNVVTGXPXX

SEQ ID NO: 7284 - protein, 61 aa, Homo sapiens
  MISC_FEATURE (37): Xaa equals any of the naturally occurring L-amino acids
  MISC_FEATURE (40): Xaa equals any of the naturally occurring L-amino acids
  MISC_FEATURE (54): Xaa equals any of the naturally occurring L-amino acids
  MISC_FEATURE (61): Xaa equals any of the naturally occurring L-amino acids
LTCSETGAASLLRAGPGSSSFRTERLFQFGSLEKEKXHFXKFPNETKKPPPFSXPCSTAHX

SEQ ID NO: 7285 - protein, 38 aa, Homo sapiens
  MISC_FEATURE (9): Xaa equals any of the naturally occurring L-amino acids
  MISC_FEATURE (13): Xaa equals any of the naturally occurring L-amino acids
  MISC_FEATURE (32): Xaa equals any of the naturally occurring L-amino acids
  MISC_FEATURE (37): Xaa equals any of the naturally occurring L-amino acids
  MISC_FEATURE (38): Xaa equals any of the naturally occurring L-amino acids
AHGIKQTSXYIPXYPRIFLKLMCLSHAFNHFXHLKTXX

SEQ ID NO: 7286 - protein, 43 aa, Homo sapiens
  MISC_FEATURE (40): Xaa equals any of the naturally occurring L-amino acids
  MISC_FEATURE (43): Xaa equals any of the naturally occurring L-amino acids
AARAARAARAARGGARYPIRPIVSRITIHWPSFYNVVTGXPKX

SEQ ID NO: 7287 - protein, 60 aa, Homo sapiens
  MISC_FEATURE (1): Xaa equals any of the naturally occurring L-amino acids
  MISC_FEATURE (13): Xaa equals any of the naturally occurring L-amino acids
  MISC_FEATURE (31): Xaa equals any of the naturally occurring L-amino acids
  MISC_FEATURE (55): Xaa equals any of the naturally occurring L-amino acids
  MISC_FEATURE (56): Xaa equals any of the naturally occurring L-amino acids
  MISC_FEATURE (60): Xaa equals any of the naturally occurring L-amino acids
XFLILLLLAPSVXINYIFLHQIFYTIRFFDXKIIFSFTLLISEGHKIKYFLVHDXXSLLX

SEQ ID NO: 7288 - protein, 67 aa, Homo sapiens
  MISC_FEATURE (31): Xaa equals any of the naturally occurring L-amino acids
  MISC_FEATURE (43): Xaa equals any of the naturally occurring L-amino acids
  MISC_FEATURE (48): Xaa equals any of the naturally occurring L-amino acids
  MISC_FEATURE (52): Xaa equals any of the naturally occurring L-amino acids
  MISC_FEATURE (66): Xaa equals any of the naturally occurring L-amino acids
LNNIKSHVKGPFASVPFTQYITFSFQQKKLXGILKGQKNSLKXDSKQXDKTXIWRKMLKSSDWKFXT

SEQ ID NO: 7289 - protein, 33 aa, Homo sapiens
  MISC_FEATURE (3): Xaa equals any of the naturally occurring L-amino acids
  MISC_FEATURE (6): Xaa equals any of the naturally occurring L-amino acids
  MISC_FEATURE (9): Xaa equals any of the naturally occurring L-amino acids
  MISC_FEATURE (12): Xaa equals any of the naturally occurring L-amino acids
  MISC_FEATURE (20): Xaa equals any of the naturally occurring L-amino acids
  MISC_FEATURE (26): Xaa equals any of the naturally occurring L-amino acids
  MISC_FEATURE (31): Xaa equals any of the naturally occurring L-amino acids
TCXSKXGPXKNXRLNLYRGXGRFKIXGSPGXKE

SEQ ID NO: 7290 - protein, 24 aa, Homo sapiens
  MISC_FEATURE (15): Xaa equals any of the naturally occurring L-amino acids
  MISC_FEATURE (18): Xaa equals any of the naturally occurring L-amino acids
  MISC_FEATURE (20): Xaa equals any of the naturally occurring L-amino acids
  MISC_FEATURE (23): Xaa equals any of the naturally occurring L-amino acids
KGKLNIAKKKKGFKXGAXGXPFXS

SEQ ID NO: 7291 - protein, 40 aa, Homo sapiens
HVSSFRKQLYCHTIVGRKTFIWNIHYCKFVQIIYLPPVFA

SEQ ID NO: 7292 - protein, 36 aa, Homo sapiens
  MISC_FEATURE (34): Xaa equals any of the naturally occurring L-amino acids
  MISC_FEATURE (35): Xaa equals any of the naturally occurring L-amino acids
  MISC_FEATURE (36): Xaa equals any of the naturally occurring L-amino acids
AARGGARYPIRPIVSRITIHWPSFYNVVTGKTQXXX

SEQ ID NO: 7293 - protein, 37 aa, Homo sapiens
TVPPCLPAFAELELSLSACSTYTLPVHWLSNRFKERS

SEQ ID NO: 7294 - protein, 19 aa, Homo sapiens
  MISC_FEATURE (12): Xaa equals any of the naturally occurring L-amino acids
  MISC_FEATURE (14): Xaa equals any of the naturally occurring L-amino acids
  MISC_FEATURE (17): Xaa equals any of the naturally occurring L-amino acids
  MISC_FEATURE (18): Xaa equals any of the naturally occurring L-amino acids
ASFFFFFFLNLXDXFFXXF

SEQ ID NO: 7295 - protein, 70 aa, Homo sapiens
  MISC_FEATURE (17): Xaa equals any of the naturally occurring L-amino acids
  MISC_FEATURE (47): Xaa equals any of the naturally occurring L-amino acids
  MISC_FEATURE (70): Xaa equals any of the naturally occurring L-amino acids
WISSLVLNEGQVWLAVXRHSFHGGRLAANRQAGPKHSGLLKAGGVHXDSCWRAVELFPGIRFGFSGTIPX

SEQ ID NO: 7296 - protein, 98 aa, Homo sapiens
  MISC_FEATURE (14): Xaa equals any of the naturally occurring L-amino acids
  MISC_FEATURE (43): Xaa equals any of the naturally occurring L-amino acids
  MISC_FEATURE (51): Xaa equals any of the naturally occurring L-amino acids
  MISC_FEATURE (58): Xaa equals any of the naturally occurring L-amino acids
  MISC_FEATURE (65): Xaa equals any of the naturally occurring L-amino acids
  MISC_FEATURE (74): Xaa equals any of the naturally occurring L-amino acids
  MISC_FEATURE (75): Xaa equals any of the naturally occurring L-amino acids
  MISC_FEATURE (87): Xaa equals any of the naturally occurring L-amino acids
VSIKNGFLLSAPMXGSVCGVTSQCRSFSWSPDCSLIPDQGLVXFKNSSMAXNAWLVQXECFFHKXSSSPVFTHXXIPHSFPTKSTPXGCCLPYFPNFP

SEQ ID NO: 7297 - protein, 57 aa, Homo sapiens
  MISC_FEATURE (21): Xaa equals any of the naturally occurring L-amino acids
  MISC_FEATURE (29): Xaa equals any of the naturally occurring L-amino acids
  MISC_FEATURE (46): Xaa equals any of the naturally occurring L-amino acids
  MISC_FEATURE (49): Xaa equals any of the naturally occurring L-amino acids
  MISC_FEATURE (50): Xaa equals any of the naturally occurring L-amino acids
  MISC_FEATURE (57): Xaa equals any of the naturally occurring L-amino acids
LYLLKHVHLHIFTGLLTVHFXSSRKWHQXGSTKNMITKNIIIIPFXKTXXPRLPNFX

SEQ ID NO: 7298 - protein, 41 aa, Homo sapiens
  MISC_FEATURE (35): Xaa equals any of the naturally occurring L-amino acids
  MISC_FEATURE (36): Xaa equals any of the naturally occurring L-amino acids
  MISC_FEATURE (40): Xaa equals any of the naturally occurring L-amino acids
LVSRGGPVPNSPYSESYYNSLAVVLQRRDWENPSXXFFSXA

SEQ ID NO: 7299 - protein, 21 aa, Homo sapiens
  MISC_FEATURE (6): Xaa equals any of the naturally occurring L-amino acids
  MISC_FEATURE (9): Xaa equals any of the naturally occurring L-amino acids
  MISC_FEATURE (15): Xaa equals any of the naturally occurring L-amino acids
  MISC_FEATURE (21): Xaa equals any of the naturally occurring L-amino acids
CEASWXLCXGKWYQXTAWPPX

SEQ ID NO: 7300 - protein, 49 aa, Homo sapiens
  MISC_FEATURE (15): Xaa equals any of the naturally occurring L-amino acids
  MISC_FEATURE (21): Xaa equals any of the naturally occurring L-amino acids
ENTECVHQILSAAVXFCLLFXLSSDVTFIKDNPLRTLFYFLTNQNVVFK

SEQ ID NO: 7301 - protein, 34 aa, Homo sapiens
  MISC_FEATURE (28): Xaa equals any of the naturally occurring L-amino acids
  MISC_FEATURE (33): Xaa equals any of the naturally occurring L-amino acids
  MISC_FEATURE (34): Xaa equals any of the naturally occurring L-amino acids
AARGGARYPIRPIVSRITIHWPSFYNVXTGKPXX

SEQ ID NO: 7302 - protein, 34 aa, Homo sapiens
  MISC_FEATURE (14): Xaa equals any of the naturally occurring L-amino acids
  MISC_FEATURE (15): Xaa equals any of the naturally occurring L-amino acids
  MISC_FEATURE (34): Xaa equals any of the naturally occurring L-amino acids
AARGGARYPIRPIXXRITIHWPSFYNFVTGTPKX

SEQ ID NO: 7303 - protein, 34 aa, Homo sapiens
  MISC_FEATURE (14): Xaa equals any of the naturally occurring L-amino acids
  MISC_FEATURE (15): Xaa equals any of the naturally occurring L-amino acids
  MISC_FEATURE (33): Xaa equals any of the naturally occurring L-amino acids
  MISC_FEATURE (34): Xaa equals any of the naturally occurring L-amino acids
AARGGARYPIRPIXXRITIHWPSFYNVVTGKPXX

SEQ ID NO: 7304 - protein, 36 aa, Homo sapiens
  MISC_FEATURE (3): Xaa equals any of the naturally occurring L-amino acids
  MISC_FEATURE (28): Xaa equals any of the naturally occurring L-amino acids
VIXSLKSTFKAFQIKKSNLTNCSLLISXNEIMNVLA

SEQ ID NO: 7305 - protein, 18 aa, Homo sapiens
  MISC_FEATURE (12): Xaa equals any of the naturally occurring L-amino acids
  MISC_FEATURE (13): Xaa equals any of the naturally occurring L-amino acids
  MISC_FEATURE (14): Xaa equals any of the naturally occurring L-amino acids
  MISC_FEATURE (15): Xaa equals any of the naturally occurring L-amino acids
  MISC_FEATURE (17): Xaa equals any of the naturally occurring L-amino acids
ASLEFFFFFFKXXXXNXN

SEQ ID NO: 7306 - protein, 76 aa, Homo sapiens
  MISC_FEATURE (37): Xaa equals any of the naturally occurring L-amino acids
  MISC_FEATURE (39): Xaa equals any of the naturally occurring L-amino acids
RKWAAWISHHPMSAAAQVSLTVSWVCGGDWGVRKGWXGXLKRKQLQPEAQTGCRVTPSSHLESWTPPTLIHPVPQP

SEQ ID NO: 7307 - protein, 35 aa, Homo sapiens
  MISC_FEATURE (34): Xaa equals any of the naturally occurring L-amino acids
  MISC_FEATURE (35): Xaa equals any of the naturally occurring L-amino acids
AARGGARYPIRPIVSRITIHWPSFYNVVTGKTQXX

SEQ ID NO: 7308 - protein, 84 aa, Homo sapiens
  MISC_FEATURE (19): Xaa equals any of the naturally occurring L-amino acids
  MISC_FEATURE (20): Xaa equals any of the naturally occurring L-amino acids
  MISC_FEATURE (28): Xaa equals any of the naturally occurring L-amino acids
  MISC_FEATURE (32): Xaa equals any of the naturally occurring L-amino acids
  MISC_FEATURE (33): Xaa equals any of the naturally occurring L-amino acids
  MISC_FEATURE (43): Xaa equals any of the naturally occurring L-amino acids
  MISC_FEATURE (48): Xaa equals any of the naturally occurring L-amino acids
  MISC_FEATURE (51): Xaa equals any of the naturally occurring L-amino acids
  MISC_FEATURE (56): Xaa equals any of the naturally occurring L-amino acids
  MISC_FEATURE (57): Xaa equals any of the naturally occurring L-amino acids
  MISC_FEATURE (58): Xaa equals any of the naturally occurring L-amino acids
  MISC_FEATURE (73): Xaa equals any of the naturally occurring L-amino acids
  MISC_FEATURE (79): Xaa equals any of the naturally occurring L-amino acids
  MISC_FEATURE (84): Xaa equals any of the naturally occurring L-amino acids
KNPKPLPVVLYYNCLNWGXXTPPCFPFXPQIXXLHFLLGSQFXKIPHXKFXHWAPXXXKTPISHSLEGLEKTXGKFLEXNPFFX

SEQ ID NO: 7309 - protein, 68 aa, Homo sapiens
  MISC_FEATURE (16): Xaa equals any of the naturally occurring L-amino acids
  MISC_FEATURE (25): Xaa equals any of the naturally occurring L-amino acids
  MISC_FEATURE (28): Xaa equals any of the naturally occurring L-amino acids
  MISC_FEATURE (60): Xaa equals any of the naturally occurring L-amino acids
  MISC_FEATURE (62): Xaa equals any of the naturally occurring L-amino acids
  MISC_FEATURE (68): Xaa equals any of the naturally occurring L-amino acids
ICARFVKITLFLKLFXQVSLPHAYXPKXLGIKGLTTAPGQIPVPFPKKTPNLTLELIQFXPXFILKLX

SEQ ID NO: 7310 - protein, 46 aa, Homo sapiens
  MISC_FEATURE (8): Xaa equals any of the naturally occurring L-amino acids
WIIEFYLXKEKLHEKHISKFKNKESKSTSTSTCLIIPTFHLISIYI

SEQ ID NO: 7311 - protein, 81 aa, Homo sapiens
  MISC_FEATURE (9): Xaa equals any of the naturally occurring L-amino acids
  MISC_FEATURE (22): Xaa equals any of the naturally occurring L-amino acids
  MISC_FEATURE (23): Xaa equals any of the naturally occurring L-amino acids
  MISC_FEATURE (40): Xaa equals any of the naturally occurring L-amino acids
  MISC_FEATURE (43): Xaa equals any of the naturally occurring L-amino acids
  MISC_FEATURE (48): Xaa equals any of the naturally occurring L-amino acids
  MISC_FEATURE (65): Xaa equals any of the naturally occurring L-amino acids
  MISC_FEATURE (66): Xaa equals any of the naturally occurring L-amino acids
  MISC_FEATURE (72): Xaa equals any of the naturally occurring L-amino acids
  MISC_FEATURE (81): Xaa equals any of the naturally occurring L-amino acids
PHTRALTEXMPRHLCPVSFIPXXVCLKIFPQPESFPNHLXKKXYASLXTLLRTQLLLLKASATSXXPPKLKXSAFSGGPGX

SEQ ID NO: 7312 - protein, 115 aa, Homo sapiens
  MISC_FEATURE (17): Xaa equals any of the naturally occurring L-amino acids
  MISC_FEATURE (22): Xaa equals any of the naturally occurring L-amino acids
  MISC_FEATURE (25): Xaa equals any of the naturally occurring L-amino acids
  MISC_FEATURE (36): Xaa equals any of the naturally occurring L-amino acids
  MISC_FEATURE (37): Xaa equals any of the naturally occurring L-amino acids
  MISC_FEATURE (42): Xaa equals any of the naturally occurring L-amino acids
  MISC_FEATURE (45): Xaa equals any of the naturally occurring L-amino acids
  MISC_FEATURE (57): Xaa equals any of the naturally occurring L-amino acids
  MISC_FEATURE (59): Xaa equals any of the naturally occurring L-amino acids
  MISC_FEATURE (63): Xaa equals any of the naturally occurring L-amino acids
  MISC_FEATURE (67): Xaa equals any of the naturally occurring L-amino acids
  MISC_FEATURE (70): Xaa equals any of the naturally occurring L-amino acids
  MISC_FEATURE (78): Xaa equals any of the naturally occurring L-amino acids
  MISC_FEATURE (79): Xaa equals any of the naturally occurring L-amino acids
  MISC_FEATURE (81): Xaa equals any of the naturally occurring L-amino acids
  MISC_FEATURE (90): Xaa equals any of the naturally occurring L-amino acids
  MISC_FEATURE (93): Xaa equals any of the naturally occurring L-amino acids
  MISC_FEATURE (98): Xaa equals any of the naturally occurring L-amino acids
  MISC_FEATURE (99): Xaa equals any of the naturally occurring L-amino acids
  MISC_FEATURE (101): Xaa equals any of the naturally occurring L-amino acids
  MISC_FEATURE (106): Xaa equals any of the naturally occurring L-amino acids
  MISC_FEATURE (107): Xaa equals any of the naturally occurring L-amino acids
  MISC_FEATURE (110): Xaa equals any of the naturally occurring L-amino acids
  MISC_FEATURE (112): Xaa equals any of the naturally occurring L-amino acids
  MISC_FEATURE (113): Xaa equals any of the naturally occurring L-amino acids
  MISC_FEATURE (114): Xaa equals any of the naturally occurring L-amino acids
QYVTGAPFVSIHKELLXLCYSXTMXMFHSLTSPVPXXWIPYXYCXQVLQSVTCVISXFXSCCXFIYXINXPKINWCVXXVXVFGYPQKKXGQXPPVKXXFXFGTPXXFKXFXXXF

SEQ ID NO: 7313 - protein, 36 aa, Homo sapiens
  MISC_FEATURE (27): Xaa equals any of the naturally occurring L-amino acids
  MISC_FEATURE (34): Xaa equals any of the naturally occurring L-amino acids
  MISC_FEATURE (35): Xaa equals any of the naturally occurring L-amino acids
  MISC_FEATURE (36): Xaa equals any of the naturally occurring L-amino acids
AARGGARYPIRPIVSRITIHWPSFYNXVTGKTQXXX

SEQ ID NO: 7314 - protein, 82 aa, Homo sapiens
  MISC_FEATURE (5): Xaa equals any of the naturally occurring L-amino acids
  MISC_FEATURE (6): Xaa equals any of the naturally occurring L-amino acids
  MISC_FEATURE (7): Xaa equals any of the naturally occurring L-amino acids
  MISC_FEATURE (13): Xaa equals any of the naturally occurring L-amino acids
  MISC_FEATURE (18): Xaa equals any of the naturally occurring L-amino acids
  MISC_FEATURE (20): Xaa equals any of the naturally occurring L-amino acids
  MISC_FEATURE (21): Xaa equals any of the naturally occurring L-amino acids
  MISC_FEATURE (23): Xaa equals any of the naturally occurring L-amino acids
  MISC_FEATURE (24): Xaa equals any of the naturally occurring L-amino acids
  MISC_FEATURE (25): Xaa equals any of the naturally occurring L-amino acids
  MISC_FEATURE (28): Xaa equals any of the naturally occurring L-amino acids
  MISC_FEATURE (40): Xaa equals any of the naturally occurring L-amino acids
  MISC_FEATURE (51): Xaa equals any of the naturally occurring L-amino acids
  MISC_FEATURE (53): Xaa equals any of the naturally occurring L-amino acids
  MISC_FEATURE (65): Xaa equals any of the naturally occurring L-amino acids
  MISC_FEATURE (78): Xaa equals any of the naturally occurring L-amino acids
  MISC_FEATURE (80): Xaa equals any of the naturally occurring L-amino acids
SSFLXXXIYKWDXMTGYXQXXNXXXGTXHICNPKWAALKXSFAVKSQCPHXKXSSGLQLIYSCPXCSSLAPLNVLHKXGXWA

SEQ ID NO: 7315 - protein, 102 aa, Homo sapiens
  MISC_FEATURE (9): Xaa equals any of the naturally occurring L-amino acids
  MISC_FEATURE (18): Xaa equals any of the naturally occurring L-amino acids
  MISC_FEATURE (19): Xaa equals any of the naturally occurring L-amino acids
  MISC_FEATURE (29): Xaa equals any of the naturally occurring L-amino acids
  MISC_FEATURE (39): Xaa equals any of the naturally occurring L-amino acids
  MISC_FEATURE (41): Xaa equals any of the naturally occurring L-amino acids
  MISC_FEATURE (44): Xaa equals any of the naturally occurring L-amino acids
  MISC_FEATURE (50): Xaa equals any of the naturally occurring L-amino acids
  MISC_FEATURE (51): Xaa equals any of the naturally occurring L-amino acids
  MISC_FEATURE (63): Xaa equals any of the naturally occurring L-amino acids
  MISC_FEATURE (67): Xaa equals any of the naturally occurring L-amino acids
  MISC_FEATURE (69): Xaa equals any of the naturally occurring L-amino acids
  MISC_FEATURE (82): Xaa equals any of the naturally occurring L-amino acids
  MISC_FEATURE (85): Xaa equals any of the naturally occurring L-amino acids
  MISC_FEATURE (86): Xaa equals any of the naturally occurring L-amino acids
DKILFIGPXIYWLWGLVXXLRERPTLKHXPMCWDVHRMXSXPRXLSYLGXXKPPLWAHLVHFXNPLXPXKGFFPRFPKGPPXGVXXPSKHKGPALINLEVGN

SEQ ID NO: 7316 - protein, 34 aa, Homo sapiens
  MISC_FEATURE (15): Xaa equals any of the naturally occurring L-amino acids
  MISC_FEATURE (17): Xaa equals any of the naturally occurring L-amino acids
  MISC_FEATURE (23): Xaa equals any of the naturally occurring L-amino acids
  MISC_FEATURE (31): Xaa equals any of the naturally occurring L-amino acids
  MISC_FEATURE (32): Xaa equals any of the naturally occurring L-amino acids
GPGRFPILGRKKKNXWXPFKKTXSLKKKNFXXGK

SEQ ID NO: 7317 - protein, 34 aa, Homo sapiens
  MISC_FEATURE (34): Xaa equals any of the naturally occurring L-amino acids
AARGGARYPIRPIVSRITIHWPSFYNVVTGKTQX

SEQ ID NO: 7318 - protein, 102 aa, Homo sapiens
  MISC_FEATURE (1): Xaa equals any of the naturally occurring L-amino acids
  MISC_FEATURE (3): Xaa equals any of the naturally occurring L-amino acids
  MISC_FEATURE (38): Xaa equals any of the naturally occurring L-amino acids
  MISC_FEATURE (44): Xaa equals any of the naturally occurring L-amino acids
  MISC_FEATURE (45): Xaa equals any of the naturally occurring L-amino acids
  MISC_FEATURE (49): Xaa equals any of the naturally occurring L-amino acids
  MISC_FEATURE (52): Xaa equals any of the naturally occurring L-amino acids
  MISC_FEATURE (53): Xaa equals any of the naturally occurring L-amino acids
  MISC_FEATURE (77): Xaa equals any of the naturally occurring L-amino acids
  MISC_FEATURE (84): Xaa equals any of the naturally occurring L-amino acids
  MISC_FEATURE (95): Xaa equals any of the naturally occurring L-amino acids
XTXLTSSPCWPLEGSVKRKGKPSLLELPFGIPPRLNFXTPCFIXXITPXPIXXNPNFEPFICHQKKPFFYLPTISQXPRFETSXIPNLQLSLHRXIFPNLLC

SEQ ID NO: 7319 - protein, 23 aa, Homo sapiens
  MISC_FEATURE (3): Xaa equals any of the naturally occurring L-amino acids
  MISC_FEATURE (4): Xaa equals any of the naturally occurring L-amino acids
  MISC_FEATURE (13): Xaa equals any of the naturally occurring L-amino acids
  MISC_FEATURE (15): Xaa equals any of the naturally occurring L-amino acids
  MISC_FEATURE (20): Xaa equals any of the naturally occurring L-amino acids
GQXXRIPGCAIPXCXGLLGXSYF

SEQ ID NO: 7320 - protein, 37 aa, Homo sapiens
  MISC_FEATURE (11): Xaa equals any of the naturally occurring L-amino acids
  MISC_FEATURE (16): Xaa equals any of the naturally occurring L-amino acids
  MISC_FEATURE (35): Xaa equals any of the naturally occurring L-amino acids
  MISC_FEATURE (36): Xaa equals any of the naturally occurring L-amino acids
  MISC_FEATURE (37): Xaa equals any of the naturally occurring L-amino acids
AARGGARYPIXPIVSXITIHWPSFYNVVTGKTQNXXX

SEQ ID NO: 7321 - protein, 38 aa, Homo sapiens
  MISC_FEATURE (30): Xaa equals any of the naturally occurring L-amino acids
  MISC_FEATURE (36): Xaa equals any of the naturally occurring L-amino acids
  MISC_FEATURE (38): Xaa equals any of the naturally occurring L-amino acids
AARAARGGARYPIRPIVSRITIHWPSFYNXVTGKTXGX

SEQ ID NO: 7322 - protein, 60 aa, Homo sapiens
  MISC_FEATURE (9): Xaa equals any of the naturally occurring L-amino acids
  MISC_FEATURE (11): Xaa equals any of the naturally occurring L-amino acids
  MISC_FEATURE (19): Xaa equals any of the naturally occurring L-amino acids
  MISC_FEATURE (23): Xaa equals any of the naturally occurring L-amino acids
  MISC_FEATURE (45): Xaa equals any of the naturally occurring L-amino acids
  MISC_FEATURE (46): Xaa equals any of the naturally occurring L-amino acids
  MISC_FEATURE (53): Xaa equals any of the naturally occurring L-amino acids
  MISC_FEATURE (58): Xaa equals any of the naturally occurring L-amino acids
  MISC_FEATURE (59): Xaa equals any of the naturally occurring L-amino acids
VIQLSDGSXVXTLSDEDSXYRCXGYNVRLLALEIAHGLSSSLQSXXLVDQKCXSDIEXXK

SEQ ID NO: 7323 - protein, 98 aa, Homo sapiens
  MISC_FEATURE (1): Xaa equals any of the naturally occurring L-amino acids
  MISC_FEATURE (6): Xaa equals any of the naturally occurring L-amino acids
  MISC_FEATURE (27): Xaa equals any of the naturally occurring L-amino acids
  MISC_FEATURE (29): Xaa equals any of the naturally occurring L-amino acids
  MISC_FEATURE (31): Xaa equals any of the naturally occurring L-amino acids
  MISC_FEATURE (32): Xaa equals any of the naturally occurring L-amino acids
  MISC_FEATURE (34): Xaa equals any of the naturally occurring L-amino acids
  MISC_FEATURE (35): Xaa equals any of the naturally occurring L-amino acids
  MISC_FEATURE (40): Xaa equals any of the naturally occurring L-amino acids
  MISC_FEATURE (41): Xaa equals any of the naturally occurring L-amino acids
  MISC_FEATURE (43): Xaa equals any of the naturally occurring L-amino acids
  MISC_FEATURE (49): Xaa equals any of the naturally occurring L-amino acids
  MISC_FEATURE (55): Xaa equals any of the naturally occurring L-amino acids
  MISC_FEATURE (59): Xaa equals any of the naturally occurring L-amino acids
  MISC_FEATURE (61): Xaa equals any of the naturally occurring L-amino acids
  MISC_FEATURE (66): Xaa equals any of the naturally occurring L-amino acids
  MISC_FEATURE (71): Xaa equals any of the naturally occurring L-amino acids
  MISC_FEATURE (72): Xaa equals any of the naturally occurring L-amino acids
  MISC_FEATURE (75): Xaa equals any of the naturally occurring L-amino acids
  MISC_FEATURE (76): Xaa equals any of the naturally occurring L-amino acids
  MISC_FEATURE (81): Xaa equals any of the naturally occurring L-amino acids
  MISC_FEATURE (92): Xaa equals any of the naturally occurring L-amino acids
XTGLMXNSNVRLTETDPPGIYPDFKRXPXPXXNXXIWLSXXPXQYWIWXSPNPTXIMAXTXAVGIXIGGPXXLFXXIPGSXAKFPWGWGNQXPCCLKN

SEQ ID NO: 7324 - protein, 127 aa, Homo sapiens
  MISC_FEATURE (3): Xaa equals any of the naturally occurring L-amino acids
  MISC_FEATURE (4): Xaa equals any of the naturally occurring L-amino acids
  MISC_FEATURE (28): Xaa equals any of the naturally occurring L-amino acids
  MISC_FEATURE (30): Xaa equals any of the naturally occurring L-amino acids
  MISC_FEATURE (41): Xaa equals any of the naturally occurring L-amino acids
  MISC_FEATURE (42): Xaa equals any of the naturally occurring L-amino acids
  MISC_FEATURE (48): Xaa equals any of the naturally occurring L-amino acids
  MISC_FEATURE (55): Xaa equals any of the naturally occurring L-amino acids
  MISC_FEATURE (56): Xaa equals any of the naturally occurring L-amino acids
  MISC_FEATURE (63): Xaa equals any of the naturally occurring L-amino acids
  MISC_FEATURE (65): Xaa equals any of the naturally occurring L-amino acids
  MISC_FEATURE (67): Xaa equals any of the naturally occurring L-amino acids
  MISC_FEATURE (73): Xaa equals any of the naturally occurring L-amino acids
  MISC_FEATURE (77): Xaa equals any of the naturally occurring L-amino acids
  MISC_FEATURE (79): Xaa equals any of the naturally occurring L-amino acids
  MISC_FEATURE (104): Xaa equals any of the naturally occurring L-amino acids
  MISC_FEATURE (112): Xaa equals any of the naturally occurring L-amino acids
  MISC_FEATURE (115): Xaa equals any of the naturally occurring L-amino acids
  MISC_FEATURE (117): Xaa equals any of the naturally occurring L-amino acids
  MISC_FEATURE (121): Xaa equals any of the naturally occurring L-amino acids
TSXXEMLAEMKGCCQCNAHGGALQVSAXPXPASPALLSQAXXRRGTLXTPSLGSXXIGHKSLXCXGXAQVHIXEHLXMXLGEPSAQPTSGKNKFWGHGAPKKTXIEYFCLFXSAXHXKLPXENFLQT

SEQ ID NO: 7325 - protein, 79 aa, Homo sapiens
  MISC_FEATURE (39): Xaa equals any of the naturally occurring L-amino acids
  MISC_FEATURE (48): Xaa equals any of the naturally occurring L-amino acids
  MISC_FEATURE (61): Xaa equals any of the naturally occurring L-amino acids
  MISC_FEATURE (66): Xaa equals any of the naturally occurring L-amino acids
  MISC_FEATURE (70): Xaa equals any of the naturally occurring L-amino acids
  MISC_FEATURE (74): Xaa equals any of the naturally occurring L-amino acids
SVDSKGTFCLFQLKLKLQFKMKSVSFFLYFSAKQDATLXLPPLTINRXHSGLKAAPPFNLXIWQTXSLEXNSAXIFFLN

SEQ ID NO: 7326 - protein, 45 aa, Homo sapiens
  MISC_FEATURE (40): Xaa equals any of the naturally occurring L-amino acids
  MISC_FEATURE (43): Xaa equals any of the naturally occurring L-amino acids
SSSHLSQLNNVTPPPLPLKICLLYFYLRFKSGFFYESLVXSSXLY

SEQ ID NO: 7327 - protein, 38 aa, Homo sapiens
  MISC_FEATURE (36): Xaa equals any of the naturally occurring L-amino acids
  MISC_FEATURE (37): Xaa equals any of the naturally occurring L-amino acids
  MISC_FEATURE (38): Xaa equals any of the naturally occurring L-amino acids
AARAARGGARYPIRPIVSRITIHWPSFYNVVTGKTXXX

SEQ ID NO: 7328 - protein, 19 aa, Homo sapiens
  MISC_FEATURE (10): Xaa equals any of the naturally occurring L-amino acids
  MISC_FEATURE (13): Xaa equals any of the naturally occurring L-amino acids
  MISC_FEATURE (15): Xaa equals any of the naturally occurring L-amino acids
  MISC_FEATURE (17): Xaa equals any of the naturally occurring L-amino acids
  MISC_FEATURE (19): Xaa equals any of the naturally occurring L-amino acids
GTRVCFFFKXGLXFXGXRX

SEQ ID NO: 7329 - protein, 35 aa, Homo sapiens
  MISC_FEATURE (33): Xaa equals any of the naturally occurring L-amino acids
  MISC_FEATURE (34): Xaa equals any of the naturally occurring L-amino acids
  MISC_FEATURE (35): Xaa equals any of the naturally occurring L-amino acids
AARGGARYPIRPIVSRITIHWPSFYNVVTGNPXXX

SEQ ID NO: 7330 - protein, 51 aa, Homo sapiens
AKMRITIPNVKPGLETAVLAQFSISSQCYNLIPSLVRKLNKMDSLRFPVRI

SEQ ID NO: 7331 - protein, 51 aa, Homo sapiens
  MISC_FEATURE (2): Xaa equals any of the naturally occurring L-amino acids
  MISC_FEATURE (24): Xaa equals any of the naturally occurring L-amino acids
  MISC_FEATURE (36): Xaa equals any of the naturally occurring L-amino acids
  MISC_FEATURE (38): Xaa equals any of the naturally occurring L-amino acids
  MISC_FEATURE (43): Xaa equals any of the naturally occurring L-amino acids
KXVMETFHMKPSLTEITLLLNNSXNFHLQSVWNFMXVXESHLXQCLITSLP

SEQ ID NO: 7332 - protein, 38 aa, Homo sapiens
  MISC_FEATURE (7): Xaa equals any of the naturally occurring L-amino acids
  MISC_FEATURE (26): Xaa equals any of the naturally occurring L-amino acids
  MISC_FEATURE (30): Xaa equals any of the naturally occurring L-amino acids
  MISC_FEATURE (35): Xaa equals any of the naturally occurring L-amino acids
  MISC_FEATURE (38): Xaa equals any of the naturally occurring L-amino acids
KVYKRWXLHRGPRKNLELMDPPGCRXFGTXGTNAXFIX

SEQ ID NO: 7333 - protein, 38 aa, Homo sapiens
  MISC_FEATURE (9): Xaa equals any of the naturally occurring L-amino acids
  MISC_FEATURE (14): Xaa equals any of the naturally occurring L-amino acids
  MISC_FEATURE (17): Xaa equals any of the naturally occurring L-amino acids
  MISC_FEATURE (38): Xaa equals any of the naturally occurring L-amino acids
NYWIPRAAXNSVRXEKXNPMRVTSHPTNSVSTFCVGEX

SEQ ID NO: 7334 - protein, 69 aa, Homo sapiens
  MISC_FEATURE (48): Xaa equals any of the naturally occurring L-amino acids
  MISC_FEATURE (51): Xaa equals any of the naturally occurring L-amino acids
  MISC_FEATURE (54): Xaa equals any of the naturally occurring L-amino acids
  MISC_FEATURE (58): Xaa equals any of the naturally occurring L-amino acids
  MISC_FEATURE (65): Xaa equals any of the naturally occurring L-amino acids
PLEPAQAKWTLHWSDTCCFQACPSNLPHVLCLLFSLPRSVTIVETPGXQWXIGXHPWXETGFPDXKHHG

SEQ ID NO: 7335 - protein, 75 aa, Homo sapiens
  MISC_FEATURE (2): Xaa equals any of the naturally occurring L-amino acids
  MISC_FEATURE (17): Xaa equals any of the naturally occurring L-amino acids
  MISC_FEATURE (20): Xaa equals any of the naturally occurring L-amino acids
  MISC_FEATURE (70): Xaa equals any of the naturally occurring L-amino acids
  MISC_FEATURE (71): Xaa equals any of the naturally occurring L-amino acids
  MISC_FEATURE (72): Xaa equals any of the naturally occurring L-amino acids
LXRVLLNKGNKRPSSTXGGXRSRTSGSPGLQESGTSGTRGGPVPNSPYSESYYNSLAVVLQRRDWENPKXXXFFV

SEQ ID NO: 7336 - protein, 66 aa, Homo sapiens
  MISC_FEATURE (2): Xaa equals any of the naturally occurring L-amino acids
  MISC_FEATURE (3): Xaa equals any of the naturally occurring L-amino acids
  MISC_FEATURE (11): Xaa equals any of the naturally occurring L-amino acids
  MISC_FEATURE (13): Xaa equals any of the naturally occurring L-amino acids
  MISC_FEATURE (35): Xaa equals any of the naturally occurring L-amino acids
  MISC_FEATURE (41): Xaa equals any of the naturally occurring L-amino acids
  MISC_FEATURE (48): Xaa equals any of the naturally occurring L-amino acids
  MISC_FEATURE (53): Xaa equals any of the naturally occurring L-amino acids
  MISC_FEATURE (56): Xaa equals any of the naturally occurring L-amino acids
YXXVDPPLNHXPXLSLTKRKPSPHSLNLIHHSRQXRWIKPXPATQNLXILLNXPHXMNNSSSTVQT

SEQ ID NO: 7337 - protein, 44 aa, Homo sapiens
  MISC_FEATURE (27): Xaa equals any of the naturally occurring L-amino acids
  MISC_FEATURE (40): Xaa equals any of the naturally occurring L-amino acids
  MISC_FEATURE (43): Xaa equals any of the naturally occurring L-amino acids
  MISC_FEATURE (44): Xaa equals any of the naturally occurring L-amino acids
GKIPDYVALHVRDPKETRLSTGRVPEXNLVSRPQIDFDGXDFXX

SEQ ID NO: 7338 - protein, 38 aa, Homo sapiens
  MISC_FEATURE (3): Xaa equals any of the naturally occurring L-amino acids
  MISC_FEATURE (33): Xaa equals any of the naturally occurring L-amino acids
  MISC_FEATURE (35): Xaa equals any of the naturally occurring L-amino acids
  MISC_FEATURE (36): Xaa equals any of the naturally occurring L-amino acids
AAXGGARYPIRPIVSRITIHWPSFYNVVTGKPXVXXFS

SEQ ID NO: 7339 - protein, 18 aa, Homo sapiens
  MISC_FEATURE (2): Xaa equals any of the naturally occurring L-amino acids
  MISC_FEATURE (10): Xaa equals any of the naturally occurring L-amino acids
  MISC_FEATURE (13): Xaa equals any of the naturally occurring L-amino acids
  MISC_FEATURE (16): Xaa equals any of the naturally occurring L-amino acids
DXTHSDRCCXVPXNHXHC

SEQ ID NO: 7340 - protein, 97 aa, Homo sapiens
  MISC_FEATURE (64): Xaa equals any of the naturally occurring L-amino acids
  MISC_FEATURE (92): Xaa equals any of the naturally occurring L-amino acids
FGLSHLPPLHCRLCTKPRYLLLSEPCCFYIPCMCTCCIYCLLCKLLPSFPRAFRGLTLCFSLPXTLVTPFCVSITFTVVLCYSYLHVCPILXELSAT

SEQ ID NO: 7341 - protein, 40 aa, Homo sapiens
TVLMEYGLIYILLSWTNTICFWLHSTNRTWQDKFMVRVGW

SEQ ID NO: 7342 - protein, 33 aa, Homo sapiens
  MISC_FEATURE (9): Xaa equals any of the naturally occurring L-amino acids
  MISC_FEATURE (20): Xaa equals any of the naturally occurring L-amino acids
  MISC_FEATURE (26): Xaa equals any of the naturally occurring L-amino acids
  MISC_FEATURE (31): Xaa equals any of the naturally occurring L-amino acids
  MISC_FEATURE (32): Xaa equals any of the naturally occurring L-amino acids
LHQRGLSLXGTSGSPGLQEXRTSESXILLIXXL

SEQ ID NO: 7343 - protein, 45 aa, Homo sapiens
  MISC_FEATURE (24): Xaa equals any of the naturally occurring L-amino acids
  MISC_FEATURE (41): Xaa equals any of the naturally occurring L-amino acids
  MISC_FEATURE (43): Xaa equals any of the naturally occurring L-amino acids
  MISC_FEATURE (44): Xaa equals any of the naturally occurring L-amino acids
  MISC_FEATURE (45): Xaa equals any of the naturally occurring L-amino acids
GGSASLSSSHKKGTKGPAPPTVAXALELVDPPGCRNPARVXPXXX

SEQ ID NO: 7344 - protein, 35 aa, Homo sapiens
  MISC_FEATURE (4): Xaa equals any of the naturally occurring L-amino acids
  MISC_FEATURE (7): Xaa equals any of the naturally occurring L-amino acids
  MISC_FEATURE (10): Xaa equals any of the naturally occurring L-amino acids
  MISC_FEATURE (18): Xaa equals any of the naturally occurring L-amino acids
  MISC_FEATURE (25): Xaa equals any of the naturally occurring L-amino acids
  MISC_FEATURE (32): Xaa equals any of the naturally occurring L-amino acids
SPAXQMXSSXPLYFSGVXLVKRICXGEELLAXLHL

SEQ ID NO: 7345 - protein, 17 aa, Homo sapiens
  MISC_FEATURE (1): Xaa equals any of the naturally occurring L-amino acids
  MISC_FEATURE (8): Xaa equals any of the naturally occurring L-amino acids
  MISC_FEATURE (10): Xaa equals any of the naturally occurring L-amino acids
  MISC_FEATURE (14): Xaa equals any of the naturally occurring L-amino acids
  MISC_FEATURE (16): Xaa equals any of the naturally occurring L-amino acids
XKSDGHLXAXDKDXTXP

SEQ ID NO: 7346 - protein, 48 aa, Homo sapiens
  MISC_FEATURE (3): Xaa equals any of the naturally occurring L-amino acids
  MISC_FEATURE (10): Xaa equals any of the naturally occurring L-amino acids
  MISC_FEATURE (20): Xaa equals any of the naturally occurring L-amino acids
  MISC_FEATURE (21): Xaa equals any of the naturally occurring L-amino acids
  MISC_FEATURE (33): Xaa equals any of the naturally occurring L-amino acids
  MISC_FEATURE (41): Xaa equals any of the naturally occurring L-amino acids
  MISC_FEATURE (45): Xaa equals any of the naturally occurring L-amino acids
  MISC_FEATURE (48): Xaa equals any of the naturally occurring L-amino acids
KTXWFCLVSXIEFVCGFKFXXNFYFYLFPFIYXCLFCYFCXVFLXPLX

SEQ ID NO: 7347 - protein, 22 aa, Homo sapiens
  MISC_FEATURE (6): Xaa equals any of the naturally occurring L-amino acids
  MISC_FEATURE (10): Xaa equals any of the naturally occurring L-amino acids
VWGHPXKNKXPGAHWVNSLYEK

SEQ ID NO: 7348 - protein, 38 aa, Homo sapiens
  MISC_FEATURE (38): Xaa equals any of the naturally occurring L-amino acids
ARAEFGTRGARYPIRPIVSRITIHWPSFYNVVTGNPKX

SEQ ID NO: 7349 - protein, 49 aa, Homo sapiens
  MISC_FEATURE (19): Xaa equals any of the naturally occurring L-amino acids
  MISC_FEATURE (32): Xaa equals any of the naturally occurring L-amino acids
  MISC_FEATURE (43): Xaa equals any of the naturally occurring L-amino acids
LSKHTIYMTLILITRSNQXDNEIPIIKFGEKXSKIYQNICPPXRCISSL

SEQ ID NO: 7350 - protein, 18 aa, Homo sapiens
  MISC_FEATURE (7): Xaa equals any of the naturally occurring L-amino acids
  MISC_FEATURE (17): Xaa equals any of the naturally occurring L-amino acids
KNEVTDXLKKKKKKIPXL

SEQ ID NO: 7351 - protein, 88 aa, Homo sapiens
  MISC_FEATURE (58): Xaa equals any of the naturally occurring L-amino acids
  MISC_FEATURE (62): Xaa equals any of the naturally occurring L-amino acids
FPIGPFFFSCKTVLLLIKIILEYCQCVDNIHLLLLTAYSSVKLLKVLNIMKHLVKNWXGSNXHGRNPRTLQIPPLILNSKISIILDWA

SEQ ID NO: 7352 - protein, 35 aa, Homo sapiens
  MISC_FEATURE (15): Xaa equals any of the naturally occurring L-amino acids
  MISC_FEATURE (35): Xaa equals any of the naturally occurring L-amino acids
NGTRGGPVPNSPYSXSYYNSLAVVLQRRDWENPKX

SEQ ID NO: 7353 - protein, 55 aa, Homo sapiens
  MISC_FEATURE (9): Xaa equals any of the naturally occurring L-amino acids
  MISC_FEATURE (18): Xaa equals any of the naturally occurring L-amino acids
  MISC_FEATURE (40): Xaa equals any of the naturally occurring L-amino acids
  MISC_FEATURE (45): Xaa equals any of the naturally occurring L-amino acids
  MISC_FEATURE (53): Xaa equals any of the naturally occurring L-amino acids
WLKTPLGLXQITVFNMTXLRLYNLNPISLLLSQLSETLNXTILCXAKNSFLFXRN

SEQ ID NO: 7354 - protein, 44 aa, Homo sapiens
  MISC_FEATURE (2): Xaa equals any of the naturally occurring L-amino acids
  MISC_FEATURE (10): Xaa equals any of the naturally occurring L-amino acids
  MISC_FEATURE (19): Xaa equals any of the naturally occurring L-amino acids
SXVICILINXQHTVRSTLXYYIEVLLFAYLLIFSTQSGSHFVFC

SEQ ID NO: 7355 - protein, 92 aa, Homo sapiens
  MISC_FEATURE (5): Xaa equals any of the naturally occurring L-amino acids
  MISC_FEATURE (30): Xaa equals any of the naturally occurring L-amino acids
  MISC_FEATURE (40): Xaa equals any of the naturally occurring L-amino acids
  MISC_FEATURE (43): Xaa equals any of the naturally occurring L-amino acids
  MISC_FEATURE (48): Xaa equals any of the naturally occurring L-amino acids
  MISC_FEATURE (60): Xaa equals any of the naturally occurring L-amino acids
  MISC_FEATURE (63): Xaa equals any of the naturally occurring L-amino acids
  MISC_FEATURE (64): Xaa equals any of the naturally occurring L-amino acids
  MISC_FEATURE (66): Xaa equals any of the naturally occurring L-amino acids
  MISC_FEATURE (67): Xaa equals any of the naturally occurring L-amino acids
  MISC_FEATURE (70): Xaa equals any of the naturally occurring L-amino acids
  MISC_FEATURE (75): Xaa equals any of the naturally occurring L-amino acids
  MISC_FEATURE (87): Xaa equals any of the naturally occurring L-amino acids
  MISC_FEATURE (92): Xaa equals any of the naturally occurring L-amino acids
RTQVXAQQEATDLWDPGPGVFAGLTPASLXFQLFLSKVEXTFXCICCXDWCSGPSRPCCXHNXXQXXPGXILSGXVFTALPALQLGXTMPAX

SEQ ID NO: 7356 - protein, 76 aa, Homo sapiens
  MISC_FEATURE (8): Xaa equals any of the naturally occurring L-amino acids
  MISC_FEATURE (15): Xaa equals any of the naturally occurring L-amino acids
  MISC_FEATURE (26): Xaa equals any of the naturally occurring L-amino acids
  MISC_FEATURE (49): Xaa equals any of the naturally occurring L-amino acids
  MISC_FEATURE (67): Xaa equals any of the naturally occurring L-amino acids
TLKMILEXVFYVFKXRYISFLYAVNXSHVYVSYVSLCGNSLNYYISSLXILSSFRGTGHIYMKNRNXTTNKREITR

SEQ ID NO: 7357 - protein, 80 aa, Homo sapiens
  MISC_FEATURE (28): Xaa equals any of the naturally occurring L-amino acids
  MISC_FEATURE (29): Xaa equals any of the naturally occurring L-amino acids
  MISC_FEATURE (35): Xaa equals any of the naturally occurring L-amino acids
  MISC_FEATURE (47): Xaa equals any of the naturally occurring L-amino acids
  MISC_FEATURE (56): Xaa equals any of the naturally occurring L-amino acids
  MISC_FEATURE (60): Xaa equals any of the naturally occurring L-amino acids
  MISC_FEATURE (68): Xaa equals any of the naturally occurring L-amino acids
  MISC_FEATURE (70): Xaa equals any of the naturally occurring L-amino acids
  MISC_FEATURE (74): Xaa equals any of the naturally occurring L-amino acids
LVPNSARGFTLLTKRLNRLFINRPHHSXXLNLWAXNHSRLTLSTPQXGGPSQIISXFKSXALPFPFNXQXPGGXKRGPLI

SEQ ID NO: 7358 - protein, 21 aa, Homo sapiens
  MISC_FEATURE (3): Xaa equals any of the naturally occurring L-amino acids
  MISC_FEATURE (7): Xaa equals any of the naturally occurring L-amino acids
  MISC_FEATURE (12): Xaa equals any of the naturally occurring L-amino acids
  MISC_FEATURE (21): Xaa equals any of the naturally occurring L-amino acids
VQXHFTXQSYGXTHPLIILVX

SEQ ID NO: 7359 - protein, 63 aa, Homo sapiens
  MISC_FEATURE (13): Xaa equals any of the naturally occurring L-amino acids
  MISC_FEATURE (24): Xaa equals any of the naturally occurring L-amino acids
  MISC_FEATURE (55): Xaa equals any of the naturally occurring L-amino acids
QSEVKKSVCVVVXAWIGVPSCLGXYTYASFLLFIFCLHSSEFTYFLKISKLLFRXISRHWGRL

SEQ ID NO: 7360 - protein, 35 aa, Homo sapiens
  MISC_FEATURE (2): Xaa equals any of the naturally occurring L-amino acids
  MISC_FEATURE (23): Xaa equals any of the naturally occurring L-amino acids
CXTYVYPLLKFPPALISMFQCQXSYNSKCSPKGGS

SEQ ID NO: 7361 - protein, 69 aa, Homo sapiens
  MISC_FEATURE (14): Xaa equals any of the naturally occurring L-amino acids
  MISC_FEATURE (21): Xaa equals any of the naturally occurring L-amino acids
  MISC_FEATURE (35): Xaa equals any of the naturally occurring L-amino acids
  MISC_FEATURE (36): Xaa equals any of the naturally occurring L-amino acids
  MISC_FEATURE (39): Xaa equals any of the naturally occurring L-amino acids
  MISC_FEATURE (42): Xaa equals any of the naturally occurring L-amino acids
  MISC_FEATURE (46): Xaa equals any of the naturally occurring L-amino acids
  MISC_FEATURE (48): Xaa equals any of the naturally occurring L-amino acids
  MISC_FEATURE (54): Xaa equals any of the naturally occurring L-amino acids
  MISC_FEATURE (64): Xaa equals any of the naturally occurring L-amino acids
GLKKPKTSHEVNYXKGFPWDXKIRVKTVGQQYFPXXQNXSYXKKLXIXYMNQTXTPFPILLKIXSSIKN

SEQ ID NO: 7362 - protein, 60 aa, Homo sapiens
  MISC_FEATURE (9): Xaa equals any of the naturally occurring L-amino acids
  MISC_FEATURE (14): Xaa equals any of the naturally occurring L-amino acids
  MISC_FEATURE (15): Xaa equals any of the naturally occurring L-amino acids
  MISC_FEATURE (16): Xaa equals any of the naturally occurring L-amino acids
  MISC_FEATURE (17): Xaa equals any of the naturally occurring L-amino acids
  MISC_FEATURE (19): Xaa equals any of the naturally occurring L-amino acids
  MISC_FEATURE (26): Xaa equals any of the naturally occurring L-amino acids
  MISC_FEATURE (38): Xaa equals any of the naturally occurring L-amino acids
  MISC_FEATURE (41): Xaa equals any of the naturally occurring L-amino acids
  MISC_FEATURE (49): Xaa equals any of the naturally occurring L-amino acids
KHQLFCFFXPYKLXXXXEXWVVVMVXTITGYFAATVRXEKXQRILLSCXIWGITKWKTAI

SEQ ID NO: 7363 - protein, 18 aa, Homo sapiens
  MISC_FEATURE (2): Xaa equals any of the naturally occurring L-amino acids
  MISC_FEATURE (6): Xaa equals any of the naturally occurring L-amino acids
  MISC_FEATURE (14): Xaa equals any of the naturally occurring L-amino acids
AXPGGXRNQFRPIXIPIT

SEQ ID NO: 7364 - protein, 34 aa, Homo sapiens
  MISC_FEATURE (3): Xaa equals any of the naturally occurring L-amino acids
  MISC_FEATURE (34): Xaa equals any of the naturally occurring L-amino acids
AAXGGARYPIRPIVSRITIHWPSFYNVVTGKTKX

SEQ ID NO: 7365 - protein, 48 aa, Homo sapiens
  MISC_FEATURE (5): Xaa equals any of the naturally occurring L-amino acids
MLPLXIITCLTLNKFYRIFSRTFANTGDSQKQCWELFSNFPFENLQKF

SEQ ID NO: 7366 - protein, 40 aa, Homo sapiens
  MISC_FEATURE (1): Xaa equals any of the naturally occurring L-amino acids
XQLKEHTRLCSKIVGRFIGRGDKPTEPGDSWLSKINLSSL

SEQ ID NO: 7367 - protein, 53 aa, Homo sapiens
  MISC_FEATURE (17): Xaa equals any of the naturally occurring L-amino acids
  MISC_FEATURE (20): Xaa equals any of the naturally occurring L-amino acids
  MISC_FEATURE (49): Xaa equals any of the naturally occurring L-amino acids
VEATNLPSLVIAGCPKXNLXSTLNLPTEPSKSLVNLTVSPKEEQLFGPXKKPC

SEQ ID NO: 7368 - protein, 34 aa, Homo sapiens
  MISC_FEATURE (15): Xaa equals any of the naturally occurring L-amino acids
  MISC_FEATURE (34): Xaa equals any of the naturally occurring L-amino acids
AARGGARYPIRPIVXRITIHWPSFYNVVTGKTQX

SEQ ID NO: 7369 - protein, 74 aa, Homo sapiens
  MISC_FEATURE (44): Xaa equals any of the naturally occurring L-amino acids
LLIPGAGLSLLPISQPCESVLASTDTADPELNVPKWRSQSRLFXNWAKTLKWGQSGLPQWSNTGFLLNVSKTCP

SEQ ID NO: 7370 - protein, 77 aa, Homo sapiens
  MISC_FEATURE (24): Xaa equals any of the naturally occurring L-amino acids
  MISC_FEATURE (25): Xaa equals any of the naturally occurring L-amino acids
  MISC_FEATURE (35): Xaa equals any of the naturally occurring L-amino acids
  MISC_FEATURE (36): Xaa equals any of the naturally occurring L-amino acids
  MISC_FEATURE (60): Xaa equals any of the naturally occurring L-amino acids
  MISC_FEATURE (63): Xaa equals any of the naturally occurring L-amino acids
  MISC_FEATURE (65): Xaa equals any of the naturally occurring L-amino acids
  MISC_FEATURE (70): Xaa equals any of the naturally occurring L-amino acids
  MISC_FEATURE (71): Xaa equals any of the naturally occurring L-amino acids
EIIVVLVWWHKFFSLHFVYADCLXXLHPFLFFPEXXKSQFCLLDALKKIRRERKNQTDCXYFXEXDNFGXXCQAPSW

SEQ ID NO: 7371 - protein, 33 aa, Homo sapiens
AARGGARYPIRPIVSRITIHWPSFYNVVTGKPK

SEQ ID NO: 7372 - protein, 69 aa, Homo sapiens
  MISC_FEATURE (44): Xaa equals any of the naturally occurring L-amino acids
  MISC_FEATURE (53): Xaa equals any of the naturally occurring L-amino acids
  MISC_FEATURE (57): Xaa equals any of the naturally occurring L-amino acids
  MISC_FEATURE (63): Xaa equals any of the naturally occurring L-amino acids
NNMNCMPTVYQTWHWAPCCCRFSEPWPLYHGPDHVFSGRLNKLXIEQITTSSXDIKXKYSFDXIEQWEV

SEQ ID NO: 7373 - protein, 77 aa, Homo sapiens
  MISC_FEATURE (3): Xaa equals any of the naturally occurring L-amino acids
  MISC_FEATURE (21): Xaa equals any of the naturally occurring L-amino acids
  MISC_FEATURE (23): Xaa equals any of the naturally occurring L-amino acids
  MISC_FEATURE (27): Xaa equals any of the naturally occurring L-amino acids
  MISC_FEATURE (28): Xaa equals any of the naturally occurring L-amino acids
  MISC_FEATURE (46): Xaa equals any of the naturally occurring L-amino acids
  MISC_FEATURE (47): Xaa equals any of the naturally occurring L-amino acids
  MISC_FEATURE (48): Xaa equals any of the naturally occurring L-amino acids
  MISC_FEATURE (49): Xaa equals any of the naturally occurring L-amino acids
  MISC_FEATURE (56): Xaa equals any of the naturally occurring L-amino acids
  MISC_FEATURE (58): Xaa equals any of the naturally occurring L-amino acids
  MISC_FEATURE (60): Xaa equals any of the naturally occurring L-amino acids
YRXFAFINYIWPLLTYLKLCXNXFFFXXVCWEKKFFPFLKKNQTTXXXXVSWESPXGXKXIPGLESPPILFSWALFY

SEQ ID NO: 7374 - protein, 100 aa, Homo sapiens
  MISC_FEATURE (1): Xaa equals any of the naturally occurring L-amino acids
  MISC_FEATURE (8): Xaa equals any of the naturally occurring L-amino acids
  MISC_FEATURE (9): Xaa equals any of the naturally occurring L-amino acids
  MISC_FEATURE (17): Xaa equals any of the naturally occurring L-amino acids
  MISC_FEATURE (21): Xaa equals any of the naturally occurring L-amino acids
  MISC_FEATURE (38): Xaa equals any of the naturally occurring L-amino acids
  MISC_FEATURE (47): Xaa equals any of the naturally occurring L-amino acids
  MISC_FEATURE (59): Xaa equals any of the naturally occurring L-amino acids
  MISC_FEATURE (60): Xaa equals any of the naturally occurring L-amino acids
  MISC_FEATURE (62): Xaa equals any of the naturally occurring L-amino acids
  MISC_FEATURE (63): Xaa equals any of the naturally occurring L-amino acids
  MISC_FEATURE (64): Xaa equals any of the naturally occurring L-amino acids
  MISC_FEATURE (74): Xaa equals any of the naturally occurring L-amino acids
  MISC_FEATURE (76): Xaa equals any of the naturally occurring L-amino acids
  MISC_FEATURE (78): Xaa equals any of the naturally occurring L-amino acids
  MISC_FEATURE (79): Xaa equals any of the naturally occurring L-amino acids
  MISC_FEATURE (82): Xaa equals any of the naturally occurring L-amino acids
  MISC_FEATURE (87): Xaa equals any of the naturally occurring L-amino acids
  MISC_FEATURE (89): Xaa equals any of the naturally occurring L-amino acids
  MISC_FEATURE (98): Xaa equals any of the naturally occurring L-amino acids
XPFLLLTXXLKWGGGLXPKNXTFFPRGEKTSRGALGGXPPPLKNPLXQNPLLFPQNGSXXFXXXGHPPNLNDFXFXIXXRGXQSNWXFXKAKGNLPPXFG

SEQ ID NO: 7375 - protein, 122 aa, Homo sapiens
  MISC_FEATURE (9): Xaa equals any of the naturally occurring L-amino acids
  MISC_FEATURE (13): Xaa equals any of the naturally occurring L-amino acids
  MISC_FEATURE (14): Xaa equals any of the naturally occurring L-amino acids
  MISC_FEATURE (17): Xaa equals any of the naturally occurring L-amino acids
  MISC_FEATURE (21): Xaa equals any of the naturally occurring L-amino acids
  MISC_FEATURE (30): Xaa equals any of the naturally occurring L-amino acids
  MISC_FEATURE (32): Xaa equals any of the naturally occurring L-amino acids
  MISC_FEATURE (34): Xaa equals any of the naturally occurring L-amino acids
  MISC_FEATURE (37): Xaa equals any of the naturally occurring L-amino acids
  MISC_FEATURE (38): Xaa equals any of the naturally occurring L-amino acids
  MISC_FEATURE (41): Xaa equals any of the naturally occurring L-amino acids
  MISC_FEATURE (45): Xaa equals any of the naturally occurring L-amino acids
  MISC_FEATURE (52): Xaa equals any of the naturally occurring L-amino acids
  MISC_FEATURE (56): Xaa equals any of the naturally occurring L-amino acids
  MISC_FEATURE (57): Xaa equals any of the naturally occurring L-amino acids
  MISC_FEATURE (62): Xaa equals any of the naturally occurring L-amino acids
  MISC_FEATURE (73): Xaa equals any of the naturally occurring L-amino acids
  MISC_FEATURE (74): Xaa equals any of the naturally occurring L-amino acids
  MISC_FEATURE (75): Xaa equals any of the naturally occurring L-amino acids
  MISC_FEATURE (76): Xaa equals any of the naturally occurring L-amino acids
  MISC_FEATURE (77): Xaa equals any of the naturally occurring L-amino acids
  MISC_FEATURE (79): Xaa equals any of the naturally occurring L-amino acids
  MISC_FEATURE (80): Xaa equals any of the naturally occurring L-amino acids
  MISC_FEATURE (86): Xaa equals any of the naturally occurring L-amino acids
  MISC_FEATURE (98): Xaa equals any of the naturally occurring L-amino acids
  MISC_FEATURE (109): Xaa equals any of the naturally occurring L-amino acids
  MISC_FEATURE (113): Xaa equals any of the naturally occurring L-amino acids
  MISC_FEATURE (116): Xaa equals any of the naturally occurring L-amino acids
  MISC_FEATURE (119): Xaa equals any of the naturally occurring L-amino acids
KGFELFVEXKNQXXKKXGSFXKKKLLGAWXTXPXKKXXKKXLEFXFPKKLGXIFFXXKNSPXKIPFPPFWGEXXXXXKXXPPPPFXIWKNFGPPFFEXFLKKIFFGEKXPPKXPPXNFXKNS

SEQ ID NO: 7376 - protein, 50 aa, Homo sapiens
  MISC_FEATURE (21): Xaa equals any of the naturally occurring L-amino acids
  MISC_FEATURE (28): Xaa equals any of the naturally occurring L-amino acids
LSTFSLLFEVLFQPSFLKLFXSTLSFSXFITYPFSLELELHYLFYYFTRL

SEQ ID NO: 7377 - protein, 35 aa, Homo sapiens
  MISC_FEATURE (4): Xaa equals any of the naturally occurring L-amino acids
  MISC_FEATURE (34): Xaa equals any of the naturally occurring L-amino acids
  MISC_FEATURE (35): Xaa equals any of the naturally occurring L-amino acids
AARXGARYPIRPIVSRITIHWPSFYNVVTGNPKXX

SEQ ID NO: 7378 - protein, 77 aa, Homo sapiens
  MISC_FEATURE (9): Xaa equals any of the naturally occurring L-amino acids
  MISC_FEATURE (24): Xaa equals any of the naturally occurring L-amino acids
  MISC_FEATURE (26): Xaa equals any of the naturally occurring L-amino acids
  MISC_FEATURE (30): Xaa equals any of the naturally occurring L-amino acids
  MISC_FEATURE (44): Xaa equals any of the naturally occurring L-amino acids
  MISC_FEATURE (62): Xaa equals any of the naturally occurring L-amino acids
  MISC_FEATURE (66): Xaa equals any of the naturally occurring L-amino acids
  MISC_FEATURE (71): Xaa equals any of the naturally occurring L-amino acids
  MISC_FEATURE (74): Xaa equals any of the naturally occurring L-amino acids
SHSGSSSHXLDLCVYEYIKIRALXRXVLVXNGYSSVVQRYTKCXFLYKVKILGGYKKITLNXLTLXGFDIXFSXWNP

SEQ ID NO: 7379 - protein, 78 aa, Homo sapiens
  MISC_FEATURE (9): Xaa equals any of the naturally occurring L-amino acids
  MISC_FEATURE (10): Xaa equals any of the naturally occurring L-amino acids
  MISC_FEATURE (42): Xaa equals any of the naturally occurring L-amino acids
  MISC_FEATURE (46): Xaa equals any of the naturally occurring L-amino acids
  MISC_FEATURE (48): Xaa equals any of the naturally occurring L-amino acids
  MISC_FEATURE (75): Xaa equals any of the naturally occurring L-amino acids
SGTVSVCTXXTKETCLRTFGFGWKLFIFCLIEPNLLSGTAHXVNKXVXKDGTGHGKLKKSFLSLTFVRLNHLTYXSES

SEQ ID NO: 7380 - protein, 67 aa, Homo sapiens
  MISC_FEATURE (2): Xaa equals any of the naturally occurring L-amino acids
  MISC_FEATURE (7): Xaa equals any of the naturally occurring L-amino acids
  MISC_FEATURE (8): Xaa equals any of the naturally occurring L-amino acids
  MISC_FEATURE (25): Xaa equals any of the naturally occurring L-amino acids
  MISC_FEATURE (35): Xaa equals any of the naturally occurring L-amino acids
  MISC_FEATURE (37): Xaa equals any of the naturally occurring L-amino acids
  MISC_FEATURE (45): Xaa equals any of the naturally occurring L-amino acids
  MISC_FEATURE (48): Xaa equals any of the naturally occurring L-amino acids
  MISC_FEATURE (57): Xaa equals any of the naturally occurring L-amino acids
  MISC_FEATURE (60): Xaa equals any of the naturally occurring L-amino acids
MXACGFXXNWQQCQIPRSWALFKSXLNRGLTESKXSXLRCTKHTXTTXWFSFDAQHXHEXTWKCPFK

SEQ ID NO: 7381 - protein, 65 aa, Homo sapiens
  MISC_FEATURE (14): Xaa equals any of the naturally occurring L-amino acids
  MISC_FEATURE (18): Xaa equals any of the naturally occurring L-amino acids
  MISC_FEATURE (25): Xaa equals any of the naturally occurring L-amino acids
  MISC_FEATURE (36): Xaa equals any of the naturally occurring L-amino acids
  MISC_FEATURE (38): Xaa equals any of the naturally occurring L-amino acids
  MISC_FEATURE (42): Xaa equals any of the naturally occurring L-amino acids
  MISC_FEATURE (43): Xaa equals any of the naturally occurring L-amino acids
  MISC_FEATURE (61): Xaa equals any of the naturally occurring L-amino acids
SFYIRIRKCKLVSXSLCXLLNPTVXMTDKFSPSPAXCXQVRXXPKSPPFWNFKLGGSQNTXGSYF

SEQ ID NO: 7382 - protein, 100 aa, Homo sapiens
  MISC_FEATURE (34): Xaa equals any of the naturally occurring L-amino acids
  MISC_FEATURE (76): Xaa equals any of the naturally occurring L-amino acids
  MISC_FEATURE (84): Xaa equals any of the naturally occurring L-amino acids
  MISC_FEATURE (91): Xaa equals any of the naturally occurring L-amino acids
  MISC_FEATURE (96): Xaa equals any of the naturally occurring L-amino acids
GHVFSFELFSFSVGGKISHEKQKVTLPSLMPGSXDEKEILGKDQFPLFQLSITEFVFGKWAFLKSCSVFQQGQEVXCLLCYLKXSVRGVPXGSRKXSSFC

SEQ ID NO: 7383 - protein, 96 aa, Homo sapiens
  MISC_FEATURE (8): Xaa equals any of the naturally occurring L-amino acids
  MISC_FEATURE (11): Xaa equals any of the naturally occurring L-amino acids
  MISC_FEATURE (17): Xaa equals any of the naturally occurring L-amino acids
  MISC_FEATURE (20): Xaa equals any of the naturally occurring L-amino acids
  MISC_FEATURE (23): Xaa equals any of the naturally occurring L-amino acids
  MISC_FEATURE (27): Xaa equals any of the naturally occurring L-amino acids
  MISC_FEATURE (30): Xaa equals any of the naturally occurring L-amino acids
  MISC_FEATURE (41): Xaa equals any of the naturally occurring L-amino acids
  MISC_FEATURE (44): Xaa equals any of the naturally occurring L-amino acids
  MISC_FEATURE (64): Xaa equals any of the naturally occurring L-amino acids
  MISC_FEATURE (67): Xaa equals any of the naturally occurring L-amino acids
  MISC_FEATURE (68): Xaa equals any of the naturally occurring L-amino acids
  MISC_FEATURE (72): Xaa equals any of the naturally occurring L-amino acids
  MISC_FEATURE (74): Xaa equals any of the naturally occurring L-amino acids
  MISC_FEATURE (77): Xaa equals any of the naturally occurring L-amino acids
  MISC_FEATURE (80): Xaa equals any of the naturally occurring L-amino acids
  MISC_FEATURE (82): Xaa equals any of the naturally occurring L-amino acids
  MISC_FEATURE (91): Xaa equals any of the naturally occurring L-amino acids
GTSVVVYXRCXLMLNSXYSXREXHKFXVKXPSYCGFFLLLXNMXEIKITHVLGPLKPYIATVHXSNXXRGDXGXYVXTYXSXFKFYLLRKXFPQSA

SEQ ID NO: 7384 - protein, 59 aa, Homo sapiens
  MISC_FEATURE (5): Xaa equals any of the naturally occurring L-amino acids
  MISC_FEATURE (15): Xaa equals any of the naturally occurring L-amino acids
  MISC_FEATURE (18): Xaa equals any of the naturally occurring L-amino acids
  MISC_FEATURE (31): Xaa equals any of the naturally occurring L-amino acids
  MISC_FEATURE (32): Xaa equals any of the naturally occurring L-amino acids
  MISC_FEATURE (41): Xaa equals any of the naturally occurring L-amino acids
  MISC_FEATURE (57): Xaa equals any of the naturally occurring L-amino acids
IEFYXYFGEKIIFCXPKXIFSYSFRKFEILXXFRAFNWNLXPKLKPFTLKPPIFFFXPL

SEQ ID NO: 7385 - protein, 38 aa, Homo sapiens
  MISC_FEATURE (2): Xaa equals any of the naturally occurring L-amino acids
  MISC_FEATURE (4): Xaa equals any of the naturally occurring L-amino acids
  MISC_FEATURE (15): Xaa equals any of the naturally occurring L-amino acids
  MISC_FEATURE (16): Xaa equals any of the naturally occurring L-amino acids
  MISC_FEATURE (35): Xaa equals any of the naturally occurring L-amino acids
  MISC_FEATURE (38): Xaa equals any of the naturally occurring L-amino acids
AXRXGARYPIRPIVXXITIHWPSFYNVVTGKTKTXGIX

SEQ ID NO: 7386 - protein, 53 aa, Homo sapiens
  MISC_FEATURE (1): Xaa equals any of the naturally occurring L-amino acids
  MISC_FEATURE (6): Xaa equals any of the naturally occurring L-amino acids
  MISC_FEATURE (8): Xaa equals any of the naturally occurring L-amino acids
  MISC_FEATURE (18): Xaa equals any of the naturally occurring L-amino acids
  MISC_FEATURE (32): Xaa equals any of the naturally occurring L-amino acids
  MISC_FEATURE (44): Xaa equals any of the naturally occurring L-amino acids
  MISC_FEATURE (45): Xaa equals any of the naturally occurring L-amino acids
  MISC_FEATURE (49): Xaa equals any of the naturally occurring L-amino acids
XKEITXTXRNSPLPYPSXGSSISGSITNSWFXLTNPHHFLSFPXXLPPXTPSI

SEQ ID NO: 7387 - protein, 34 aa, Homo sapiens
  MISC_FEATURE (7): Xaa equals any of the naturally occurring L-amino acids
  MISC_FEATURE (11): Xaa equals any of the naturally occurring L-amino acids
  MISC_FEATURE (12): Xaa equals any of the naturally occurring L-amino acids
  MISC_FEATURE (13): Xaa equals any of the naturally occurring L-amino acids
  MISC_FEATURE (23): Xaa equals any of the naturally occurring L-amino acids
LLYFPVXSAGXXXLLSDRNLYKXFFDPVGRRYPF

SEQ ID NO: 7388 - protein, 26 aa, Homo sapiens
  MISC_FEATURE (4): Xaa equals any of the naturally occurring L-amino acids
  MISC_FEATURE (6): Xaa equals any of the naturally occurring L-amino acids
  MISC_FEATURE (12): Xaa equals any of the naturally occurring L-amino acids
  MISC_FEATURE (18): Xaa equals any of the naturally occurring L-amino acids
  MISC_FEATURE (26): Xaa equals any of the naturally occurring L-amino acids
GLLXYXNETLVXTKYDFXKVLFYKTX

SEQ ID NO: 7389 - protein, 112 aa, Homo sapiens
  MISC_FEATURE (8): Xaa equals any of the naturally occurring L-amino acids
  MISC_FEATURE (13): Xaa equals any of the naturally occurring L-amino acids
  MISC_FEATURE (16): Xaa equals any of the naturally occurring L-amino acids
  MISC_FEATURE (18): Xaa equals any of the naturally occurring L-amino acids
  MISC_FEATURE (19): Xaa equals any of the naturally occurring L-amino acids
  MISC_FEATURE (26): Xaa equals any of the naturally occurring L-amino acids
  MISC_FEATURE (27): Xaa equals any of the naturally occurring L-amino acids
  MISC_FEATURE (29): Xaa equals any of the naturally occurring L-amino acids
  MISC_FEATURE (32): Xaa equals any of the naturally occurring L-amino acids
  MISC_FEATURE (43): Xaa equals any of the naturally occurring L-amino acids
  MISC_FEATURE (44): Xaa equals any of the naturally occurring L-amino acids
  MISC_FEATURE (47): Xaa equals any of the naturally occurring L-amino acids
  MISC_FEATURE (52): Xaa equals any of the naturally occurring L-amino acids
  MISC_FEATURE (56): Xaa equals any of the naturally occurring L-amino acids
  MISC_FEATURE (61): Xaa equals any of the naturally occurring L-amino acids
  MISC_FEATURE (62): Xaa equals any of the naturally occurring L-amino acids
  MISC_FEATURE (64): Xaa equals any of the naturally occurring L-amino acids
  MISC_FEATURE (74): Xaa equals any of the naturally occurring L-amino acids
  MISC_FEATURE (81): Xaa equals any of the naturally occurring L-amino acids
  MISC_FEATURE (83): Xaa equals any of the naturally occurring L-amino acids
  MISC_FEATURE (91): Xaa equals any of the naturally occurring L-amino acids
  MISC_FEATURE (95): Xaa equals any of the naturally occurring L-amino acids
KNFFFFFXKSPFXFFXIXXFLKIGPXXFXFKXFLKKKNFNCFXXKIXPPFKXFSPXRFFPXXFXKKIFFFKKFXFFGGFFXFXPSLSPNFXFNPXFFPPKISPSPFPQKFPP

SEQ ID NO: 7390 - protein, 83 aa, Homo sapiens
  MISC_FEATURE (28): Xaa equals any of the naturally occurring L-amino acids
  MISC_FEATURE (32): Xaa equals any of the naturally occurring L-amino acids
  MISC_FEATURE (39): Xaa equals any of the naturally occurring L-amino acids
  MISC_FEATURE (42): Xaa equals any of the naturally occurring L-amino acids
  MISC_FEATURE (47): Xaa equals any of the naturally occurring L-amino acids
  MISC_FEATURE (49): Xaa equals any of the naturally occurring L-amino acids
  MISC_FEATURE (63): Xaa equals any of the naturally occurring L-amino acids
  MISC_FEATURE (74): Xaa equals any of the naturally occurring L-amino acids
  MISC_FEATURE (76): Xaa equals any of the naturally occurring L-amino acids
  MISC_FEATURE (77): Xaa equals any of the naturally occurring L-amino acids
  MISC_FEATURE (79): Xaa equals any of the naturally occurring L-amino acids
PWDRDVQLSKALSYALRHGALNWGFPWXLVPXLELMPLXTPXALPPXLXHGTFWNTGHPSYSXACPAREGPTFXLXXEXPGKP

SEQ ID NO: 7391 - protein, 20 aa, Homo sapiens
  MISC_FEATURE (15): Xaa equals any of the naturally occurring L-amino acids
  MISC_FEATURE (18): Xaa equals any of the naturally occurring L-amino acids
  MISC_FEATURE (20): Xaa equals any of the naturally occurring L-amino acids
RHEVTSLEFFFFFLXLNXFX

SEQ ID NO: 7392 - protein, 69 aa, Homo sapiens
  MISC_FEATURE (39): Xaa equals any of the naturally occurring L-amino acids
  MISC_FEATURE (42): Xaa equals any of the naturally occurring L-amino acids
  MISC_FEATURE (45): Xaa equals any of the naturally occurring L-amino acids
  MISC_FEATURE (47): Xaa equals any of the naturally occurring L-amino acids
  MISC_FEATURE (66): Xaa equals any of the naturally occurring L-amino acids
VQMDSIYVVLNNNLGCLQTLQFIIFPYKQDGLGFSSSTXSIXPTXFXYSWSKKITCFFFFKWARNXFFF

SEQ ID NO: 7393 - protein, 61 aa, Homo sapiens
  MISC_FEATURE (10): Xaa equals any of the naturally occurring L-amino acids
  MISC_FEATURE (11): Xaa equals any of the naturally occurring L-amino acids
  MISC_FEATURE (13): Xaa equals any of the naturally occurring L-amino acids
  MISC_FEATURE (30): Xaa equals any of the naturally occurring L-amino acids
  MISC_FEATURE (58): Xaa equals any of the naturally occurring L-amino acids
  MISC_FEATURE (61): Xaa equals any of the naturally occurring L-amino acids
IRGSLALEYXXLXKEMRLGTLMSQNLFAQXLGRTALLTLGCTTWLKFSPPTSLECPPXSPX

SEQ ID NO: 7394 - protein, 24 aa, Homo sapiens
  MISC_FEATURE (5): Xaa equals any of the naturally occurring L-amino acids
  MISC_FEATURE (20): Xaa equals any of the naturally occurring L-amino acids
  MISC_FEATURE (21): Xaa equals any of the naturally occurring L-amino acids
VPFPXGEIPPLLKFRNKKKXXRSK

SEQ ID NO: 7395 - protein, 42 aa, Homo sapiens
  MISC_FEATURE (3): Xaa equals any of the naturally occurring L-amino acids
  MISC_FEATURE (9): Xaa equals any of the naturally occurring L-amino acids
  MISC_FEATURE (11): Xaa equals any of the naturally occurring L-amino acids
  MISC_FEATURE (16): Xaa equals any of the naturally occurring L-amino acids
  MISC_FEATURE (35): Xaa equals any of the naturally occurring L-amino acids
  MISC_FEATURE (39): Xaa equals any of the naturally occurring L-amino acids
LLXVLVNQXTXLLNQXFKNLNGKFLDLNLGSKFGXPFPXQVS

SEQ ID NO: 7396 - protein, 46 aa, Homo sapiens
  MISC_FEATURE (19): Xaa equals any of the naturally occurring L-amino acids
EPHPWNATPLLTFSNELRXLKGRDYELLIFVSPSRAQLCCGWDPSQ

SEQ ID NO: 7397 - protein, 34 aa, Homo sapiens
  MISC_FEATURE (27): Xaa equals any of the naturally occurring L-amino acids
  MISC_FEATURE (28): Xaa equals any of the naturally occurring L-amino acids
  MISC_FEATURE (33): Xaa equals any of the naturally occurring L-amino acids
  MISC_FEATURE (34): Xaa equals any of the naturally occurring L-amino acids
VGTRGGPVPNSPYSESYYNSLAVVLQXXDWENXX

SEQ ID NO: 7398 - protein, 38 aa, Homo sapiens
  MISC_FEATURE (2): Xaa equals any of the naturally occurring L-amino acids
  MISC_FEATURE (3): Xaa equals any of the naturally occurring L-amino acids
  MISC_FEATURE (24): Xaa equals any of the naturally occurring L-amino acids
  MISC_FEATURE (27): Xaa equals any of the naturally occurring L-amino acids
RXXGGGRSILMDRPGWMNAARATXLPXALVQTIYPNKV

SEQ ID NO: 7399 - protein, 52 aa, Homo sapiens
  MISC_FEATURE (1): Xaa equals any of the naturally occurring L-amino acids
  MISC_FEATURE (9): Xaa equals any of the naturally occurring L-amino acids
  MISC_FEATURE (12): Xaa equals any of the naturally occurring L-amino acids
  MISC_FEATURE (13): Xaa equals any of the naturally occurring L-amino acids
  MISC_FEATURE (22): Xaa equals any of the naturally occurring L-amino acids
  MISC_FEATURE (35): Xaa equals any of the naturally occurring L-amino acids
  MISC_FEATURE (38): Xaa equals any of the naturally occurring L-amino acids
  MISC_FEATURE (48): Xaa equals any of the naturally occurring L-amino acids
XFQASHNFXINXXDRTQEKTNXLHGGSNFPFSRPXLKXNPLPPRFPFXLPKF

SEQ ID NO: 7400 - protein, 25 aa, Homo sapiens
  MISC_FEATURE (20): Xaa equals any of the naturally occurring L-amino acids
  MISC_FEATURE (21): Xaa equals any of the naturally occurring L-amino acids
  MISC_FEATURE (22): Xaa equals any of the naturally occurring L-amino acids
  MISC_FEATURE (24): Xaa equals any of the naturally occurring L-amino acids
GNGDGHPCRCHDARGDKGHXXXPXW

SEQ ID NO: 7401 - protein, 32 aa, Homo sapiens
  MISC_FEATURE (7): Xaa equals any of the naturally occurring L-amino acids
  MISC_FEATURE (9): Xaa equals any of the naturally occurring L-amino acids
  MISC_FEATURE (30): Xaa equals any of the naturally occurring L-amino acids
SEASAGXNXLNFSGFPGCRNSARGPPGPPXFF

SEQ ID NO: 7402 - protein, 176 aa, Homo sapiens
  MISC_FEATURE (7): Xaa equals any of the naturally occurring L-amino acids
  MISC_FEATURE (8): Xaa equals any of the naturally occurring L-amino acids
  MISC_FEATURE (18): Xaa equals any of the naturally occurring L-amino acids
  MISC_FEATURE (23): Xaa equals any of the naturally occurring L-amino acids
  MISC_FEATURE (58): Xaa equals any of the naturally occurring L-amino acids
  MISC_FEATURE (83): Xaa equals any of the naturally occurring L-amino acids
  MISC_FEATURE (95): Xaa equals any of the naturally occurring L-amino acids
  MISC_FEATURE (105): Xaa equals any of the naturally occurring L-amino acids
  MISC_FEATURE (117): Xaa equals any of the naturally occurring L-amino acids
  MISC_FEATURE (127): Xaa equals any of the naturally occurring L-amino acids
  MISC_FEATURE (128): Xaa equals any of the naturally occurring L-amino acids
  MISC_FEATURE (130): Xaa equals any of the naturally occurring L-amino acids
  MISC_FEATURE (157): Xaa equals any of the naturally occurring L-amino acids
  MISC_FEATURE (158): Xaa equals any of the naturally occurring L-amino acids
  MISC_FEATURE (169): Xaa equals any of the naturally occurring L-amino acids
RSQPHHXXGRSTLNGSPXLHEFXTSLCIASQGSPRKMAELHGQGVLTPPQMGRVHSPXDLHAGRPPAADLPPRPMLHMVGQSXWLVECFRGCVYXRGVMCEHHSXKRGLLKGKWGLXVNLADGGRTXXRXLGLSPRTYILLPSLVISPSLPPRGSCXXIWPCSWASTMXVYIGLGK

SEQ ID NO: 7403 - protein, 91 aa, Homo sapiens
  MISC_FEATURE (70): Xaa equals any of the naturally occurring L-amino acids
  MISC_FEATURE (79): Xaa equals any of the naturally occurring L-amino acids
  MISC_FEATURE (81): Xaa equals any of the naturally occurring L-amino acids
RSSGLLPGKISQRECASATSPRPPPTPGSVVLSLPGPAARPPRAPAVPLSLSPNLALPQTCPVPVGSSPXGNWLWDRMXFXAAANLGPGLS

SEQ ID NO: 7404 - protein, 111 aa, Homo sapiens
  MISC_FEATURE (14): Xaa equals any of the naturally occurring L-amino acids
  MISC_FEATURE (21): Xaa equals any of the naturally occurring L-amino acids
  MISC_FEATURE (23): Xaa equals any of the naturally occurring L-amino acids
  MISC_FEATURE (27): Xaa equals any of the naturally occurring L-amino acids
  MISC_FEATURE (66): Xaa equals any of the naturally occurring L-amino acids
  MISC_FEATURE (87): Xaa equals any of the naturally occurring L-amino acids
  MISC_FEATURE (96): Xaa equals any of the naturally occurring L-amino acids
ALSRHRHVPASLEXEPRHSLXDXNFGXFPSRPSLRLLPHEAISGDGRLGQRQVNRVPQAPFPHTKXADCELTGLRPNRSLSSSCLLXTSGPILIPXWPNLAFLGFARCLVC

SEQ ID NO: 7405 - protein, 55 aa, Homo sapiens
  MISC_FEATURE (5): Xaa equals any of the naturally occurring L-amino acids
  MISC_FEATURE (8): Xaa equals any of the naturally occurring L-amino acids
  MISC_FEATURE (9): Xaa equals any of the naturally occurring L-amino acids
  MISC_FEATURE (11): Xaa equals any of the naturally occurring L-amino acids
  MISC_FEATURE (14): Xaa equals any of the naturally occurring L-amino acids
  MISC_FEATURE (18): Xaa equals any of the naturally occurring L-amino acids
  MISC_FEATURE (21): Xaa equals any of the naturally occurring L-amino acids
  MISC_FEATURE (22): Xaa equals any of the naturally occurring L-amino acids
  MISC_FEATURE (32): Xaa equals any of the naturally occurring L-amino acids
  MISC_FEATURE (40): Xaa equals any of the naturally occurring L-amino acids
  MISC_FEATURE (41): Xaa equals any of the naturally occurring L-amino acids
  MISC_FEATURE (45): Xaa equals any of the naturally occurring L-amino acids
  MISC_FEATURE (47): Xaa equals any of the naturally occurring L-amino acids
CACCXVNXXGXIWXKYPXILXXSIKHACDSYXLKVILSSXXISGXYXLSLICLNI

SEQ ID NO: 7406 - protein, 19 aa, Homo sapiens
  MISC_FEATURE (4): Xaa equals any of the naturally occurring L-amino acids
  MISC_FEATURE (15): Xaa equals any of the naturally occurring L-amino acids
LLIXDSLPFVLNKSXINEC

SEQ ID NO: 7407 - protein, 46 aa, Homo sapiens
  MISC_FEATURE (7): Xaa equals any of the naturally occurring L-amino acids
  MISC_FEATURE (12): Xaa equals any of the naturally occurring L-amino acids
  MISC_FEATURE (16): Xaa equals any of the naturally occurring L-amino acids
  MISC_FEATURE (32): Xaa equals any of the naturally occurring L-amino acids
  MISC_FEATURE (45): Xaa equals any of the naturally occurring L-amino acids
  MISC_FEATURE (46): Xaa equals any of the naturally occurring L-amino acids
LTNQGFXRKILXSKCXSSPGLYIHHLLDIHSXVKNTGIIILISTXX

SEQ ID NO: 7408 - protein, 34 aa, Homo sapiens
  MISC_FEATURE (4): Xaa equals any of the naturally occurring L-amino acids
  MISC_FEATURE (34): Xaa equals any of the naturally occurring L-amino acids
AARXGARYPIRPIVSRITIHWPSFYNVVTGNPKX

SEQ ID NO: 7409 - protein, 41 aa, Homo sapiens
  MISC_FEATURE (7): Xaa equals any of the naturally occurring L-amino acids
  MISC_FEATURE (16): Xaa equals any of the naturally occurring L-amino acids
  MISC_FEATURE (17): Xaa equals any of the naturally occurring L-amino acids
  MISC_FEATURE (20): Xaa equals any of the naturally occurring L-amino acids
  MISC_FEATURE (26): Xaa equals any of the naturally occurring L-amino acids
NILFGEXGIYPPWLNXXFLXRFSWKXLGGGNFWGSRWREPG

SEQ ID NO: 7410 - protein, 35 aa, Homo sapiens; identical to SEQ ID NO: 7307
  MISC_FEATURE (34): Xaa equals any of the naturally occurring L-amino acids
  MISC_FEATURE (35): Xaa equals any of the naturally occurring L-amino acids

SEQ ID NO: 7411 - protein, 22 aa, Homo sapiens
  MISC_FEATURE (20): Xaa equals any of the naturally occurring L-amino acids
  MISC_FEATURE (22): Xaa equals any of the naturally occurring L-amino acids
DWFGCFKIDIVVQCVLHGGXRX

SEQ ID NO: 7412 - protein, 71 aa, Homo sapiens
  MISC_FEATURE (1): Xaa equals any of the naturally occurring L-amino acids
  MISC_FEATURE (40): Xaa equals any of the naturally occurring L-amino acids
  MISC_FEATURE (69): Xaa equals any of the naturally occurring L-amino acids
XAWAKCVIYRSGARAESGPRTDPLSELGLHQGFGSGLNVXLASSCRSTGRLLSQQLRTPRTSEACAIIXEL

SEQ ID NO: 7413 - protein, 42 aa, Homo sapiens
  MISC_FEATURE (1): Xaa equals any of the naturally occurring L-amino acids
  MISC_FEATURE (2): Xaa equals any of the naturally occurring L-amino acids
  MISC_FEATURE (7): Xaa equals any of the naturally occurring L-amino acids
  MISC_FEATURE (16): Xaa equals any of the naturally occurring L-amino acids
  MISC_FEATURE (38): Xaa equals any of the naturally occurring L-amino acids
  MISC_FEATURE (40): Xaa equals any of the naturally occurring L-amino acids
XXLPWEXSGTTGCELXRGGGRSRTSGSPGLQEFGTRPXMXGQ

SEQ ID NO: 7414 - protein, 32 aa, Homo sapiens
  MISC_FEATURE (2): Xaa equals any of the naturally occurring L-amino acids
  MISC_FEATURE (9): Xaa equals any of the naturally occurring L-amino acids
  MISC_FEATURE (16): Xaa equals any of the naturally occurring L-amino acids
  MISC_FEATURE (17): Xaa equals any of the naturally occurring L-amino acids
  MISC_FEATURE (21): Xaa equals any of the naturally occurring L-amino acids
  MISC_FEATURE (23): Xaa equals any of the naturally occurring L-amino acids
  MISC_FEATURE (30): Xaa equals any of the naturally occurring L-amino acids
WXYGDLPAXNFSKFGXXGLEXHXRCAAALXTS

SEQ ID NO: 7415 - protein, 32 aa, Homo sapiens
  MISC_FEATURE (1): Xaa equals any of the naturally occurring L-amino acids
  MISC_FEATURE (5): Xaa equals any of the naturally occurring L-amino acids
  MISC_FEATURE (6): Xaa equals any of the naturally occurring L-amino acids
  MISC_FEATURE (8): Xaa equals any of the naturally occurring L-amino acids
  MISC_FEATURE (13): Xaa equals any of the naturally occurring L-amino acids
  MISC_FEATURE (14): Xaa equals any of the naturally occurring L-amino acids
  MISC_FEATURE (17): Xaa equals any of the naturally occurring L-amino acids
  MISC_FEATURE (23): Xaa equals any of the naturally occurring L-amino acids
XGFLXXMXKIREXXLEXHRRCAXALELVDPPG

SEQ ID NO: 7416 - protein, 33 aa, Homo sapiens
  MISC_FEATURE (4): Xaa equals any of the naturally occurring L-amino acids
  MISC_FEATURE (5): Xaa equals any of the naturally occurring L-amino acids
  MISC_FEATURE (24): Xaa equals any of the naturally occurring L-amino acids
EQGXXSSTAVSGRSRTSGSPGLQXQTHSTLLPD

SEQ ID NO: 7417 - protein, 52 aa, Homo sapiens
  MISC_FEATURE (1): Xaa equals any of the naturally occurring L-amino acids
  MISC_FEATURE (2): Xaa equals any of the naturally occurring L-amino acids
  MISC_FEATURE (3): Xaa equals any of the naturally occurring L-amino acids
  MISC_FEATURE (8): Xaa equals any of the naturally occurring L-amino acids
  MISC_FEATURE (36): Xaa equals any of the naturally occurring L-amino acids
  MISC_FEATURE (38): Xaa equals any of the naturally occurring L-amino acids
  MISC_FEATURE (48): Xaa equals any of the naturally occurring L-amino acids
  MISC_FEATURE (52): Xaa equals any of the naturally occurring L-amino acids
XXXWNSTXVSGRSRTSGSPGLQEFEHEEAFSCFKMXLXISFPATGCQXLIEX

SEQ ID NO: 7418 - protein, 38 aa, Homo sapiens
  MISC_FEATURE (2): Xaa equals any of the naturally occurring L-amino acids
  MISC_FEATURE (5): Xaa equals any of the naturally occurring L-amino acids
  MISC_FEATURE (9): Xaa equals any of the naturally occurring L-amino acids
SXLIXLRAXSKRLLIAINSNLKIMATYYFEKFVEWCVL

SEQ ID NO: 7419 - protein, 37 aa, Homo sapiens
  MISC_FEATURE (10): Xaa equals any of the naturally occurring L-amino acids
  MISC_FEATURE (19): Xaa equals any of the naturally occurring L-amino acids
  MISC_FEATURE (33): Xaa equals any of the naturally occurring L-amino acids
  MISC_FEATURE (34): Xaa equals any of the naturally occurring L-amino acids
AWFLALTAKXGKIGWSSTXVASRSSTSGSPGLXXFGT

SEQ ID NO: 7420 - protein, 112 aa, Homo sapiens
  MISC_FEATURE (12): Xaa equals any of the naturally occurring L-amino acids
  MISC_FEATURE (50): Xaa equals any of the naturally occurring L-amino acids
  MISC_FEATURE (54): Xaa equals any of the naturally occurring L-amino acids
  MISC_FEATURE (56): Xaa equals any of the naturally occurring L-amino acids
  MISC_FEATURE (58): Xaa equals any of the naturally occurring L-amino acids
  MISC_FEATURE (59): Xaa equals any of the naturally occurring L-amino acids
  MISC_FEATURE (61): Xaa equals any of the naturally occurring L-amino acids
  MISC_FEATURE (64): Xaa equals any of the naturally occurring L-amino acids
  MISC_FEATURE (67): Xaa equals any of the naturally occurring L-amino acids
  MISC_FEATURE (73): Xaa equals any of the naturally occurring L-amino acids
  MISC_FEATURE (89): Xaa equals any of the naturally occurring L-amino acids
  MISC_FEATURE (94): Xaa equals any of the naturally occurring L-amino acids
  MISC_FEATURE (106): Xaa equals any of the naturally occurring L-amino acids
  MISC_FEATURE (111): Xaa equals any of the naturally occurring L-amino acids
LWMPLIKGESAXELPAPPGVTAVGLGLCCKPYILPCSGKCLALSLLTSGXPVIXTXRXXRXVGXMPXFLADSXLISVVLKKNLMFLVVXFWGGXGGQKHGGSSELXRNVSXI

SEQ ID NO: 7421 - protein, 24 aa, Homo sapiens
  MISC_FEATURE (6): Xaa equals any of the naturally occurring L-amino acids
  MISC_FEATURE (9): Xaa equals any of the naturally occurring L-amino acids
  MISC_FEATURE (14): Xaa equals any of the naturally occurring L-amino acids
  MISC_FEATURE (22): Xaa equals any of the naturally occurring L-amino acids
ARAEFXTNXTFTGXHIISIQGXIE

SEQ ID NO: 7422 - protein, 23 aa, Homo sapiens
  MISC_FEATURE (6): Xaa equals any of the naturally occurring L-amino acids
  MISC_FEATURE (8): Xaa equals any of the naturally occurring L-amino acids
  MISC_FEATURE (11): Xaa equals any of the naturally occurring L-amino acids
  MISC_FEATURE (16): Xaa equals any of the naturally occurring L-amino acids
ILKIRXTXPAXPPRCXAALGISG

SEQ ID NO: 7423 - protein, 31 aa, Homo sapiens
  MISC_FEATURE (12): Xaa equals any of the naturally occurring L-amino acids
  MISC_FEATURE (13): Xaa equals any of the naturally occurring L-amino acids
  MISC_FEATURE (14): Xaa equals any of the naturally occurring L-amino acids
  MISC_FEATURE (17): Xaa equals any of the naturally occurring L-amino acids
  MISC_FEATURE (22): Xaa equals any of the naturally occurring L-amino acids
PHSAQCGVEATXXXSPXPRNTXNTLVLAKSS

SEQ ID NO: 7424 - protein, 45 aa, Homo sapiens
  MISC_FEATURE (7): Xaa equals any of the naturally occurring L-amino acids
  MISC_FEATURE (8): Xaa equals any of the naturally occurring L-amino acids
  MISC_FEATURE (13): Xaa equals any of the naturally occurring L-amino acids
  MISC_FEATURE (14): Xaa equals any of the naturally occurring L-amino acids
  MISC_FEATURE (44): Xaa equals any of the naturally occurring L-amino acids
YSALPAXXRESWXXCRYRSGIPGSTHASAHASVIVRWANLLVLXI

SEQ ID NO: 7425 - protein, 19 aa, Homo sapiens
  MISC_FEATURE (2): Xaa equals any of the naturally occurring L-amino acids
  MISC_FEATURE (7): Xaa equals any of the naturally occurring L-amino acids
  MISC_FEATURE (19): Xaa equals any of the naturally occurring L-amino acids
PXNNGFXHMIKKKKPFTNX

SEQ ID NO: 7426 - protein, 57 aa, Homo sapiens
  MISC_FEATURE (31): Xaa equals any of the naturally occurring L-amino acids
  MISC_FEATURE (50): Xaa equals any of the naturally occurring L-amino acids
  MISC_FEATURE (52): Xaa equals any of the naturally occurring L-amino acids
  MISC_FEATURE (55): Xaa equals any of the naturally occurring L-amino acids
RLCELYRQDLRIASPPNEVLTLAWVLKRPDXFLLLPESMGLGLPHVWGAXAXWEXKK

SEQ ID NO: 7427 - protein, 42 aa, Homo sapiens
  MISC_FEATURE (3): Xaa equals any of the naturally occurring L-amino acids
  MISC_FEATURE (19): Xaa equals any of the naturally occurring L-amino acids
  MISC_FEATURE (22): Xaa equals any of the naturally occurring L-amino acids
  MISC_FEATURE (28): Xaa equals any of the naturally occurring L-amino acids
  MISC_FEATURE (35): Xaa equals any of the naturally occurring L-amino acids
  MISC_FEATURE (37): Xaa equals any of the naturally occurring L-amino acids
LRXPIRKAGTPARTGPVIXGSXQASAHXGRKENPXIXEETES

SEQ ID NO: 7428 - protein, 47 aa, Homo sapiens
  MISC_FEATURE (8): Xaa equals any of the naturally occurring L-amino acids
  MISC_FEATURE (10): Xaa equals any of the naturally occurring L-amino acids
  MISC_FEATURE (12): Xaa equals any of the naturally occurring L-amino acids
  MISC_FEATURE (13): Xaa equals any of the naturally occurring L-amino acids
  MISC_FEATURE (14): Xaa equals any of the naturally occurring L-amino acids
  MISC_FEATURE (17): Xaa equals any of the naturally occurring L-amino acids
  MISC_FEATURE (18): Xaa equals any of the naturally occurring L-amino acids
  MISC_FEATURE (20): Xaa equals any of the naturally occurring L-amino acids
  MISC_FEATURE (25): Xaa equals any of the naturally occurring L-amino acids
  MISC_FEATURE (30): Xaa equals any of the naturally occurring L-amino acids
  MISC_FEATURE (35): Xaa equals any of the naturally occurring L-amino acids
  MISC_FEATURE (40): Xaa equals any of the naturally occurring L-amino acids
PRVRIYVXLXVXXXTLXXPXNVLDXNTQSXDSHSXKSLVXPYNWVFW

SEQ ID NO: 7429 - protein, 44 aa, Homo sapiens
AHFCSKTNSIKPLECSGFQHTVHRQPFYQKLSVFPMTGFSGKVN

SEQ ID NO: 7430 - protein, 89 aa, Homo sapiens
  MISC_FEATURE (42): Xaa equals any of the naturally occurring L-amino acids
  MISC_FEATURE (43): Xaa equals any of the naturally occurring L-amino acids
  MISC_FEATURE (67): Xaa equals any of the naturally occurring L-amino acids
  MISC_FEATURE (73): Xaa equals any of the naturally occurring L-amino acids
  MISC_FEATURE (74): Xaa equals any of the naturally occurring L-amino acids
  MISC_FEATURE (75): Xaa equals any of the naturally occurring L-amino acids
  MISC_FEATURE (84): Xaa equals any of the naturally occurring L-amino acids
SRNSRNDSTSVFFFKKNLISLFYFRIALLITFLPWKLTHSLXXLRMHPMKYFRIEKKEMNYLNSPEXLCLLVXXXRLNAILPLXTDALL

SEQ ID NO: 7431 - protein, 26 aa, Homo sapiens
  MISC_FEATURE (20): Xaa equals any of the naturally occurring L-amino acids
  MISC_FEATURE (23): Xaa equals any of the naturally occurring L-amino acids
  MISC_FEATURE (24): Xaa equals any of the naturally occurring L-amino acids
  MISC_FEATURE (25): Xaa equals any of the naturally occurring L-amino acids
  MISC_FEATURE (26): Xaa equals any of the naturally occurring L-amino acids
PRVRVHLPFFFFFKFSPIQXNNXXXX

SEQ ID NO: 7432 - protein, 81 aa, Homo sapiens
  MISC_FEATURE (10): Xaa equals any of the naturally occurring L-amino acids
  MISC_FEATURE (13): Xaa equals any of the naturally occurring L-amino acids
  MISC_FEATURE (22): Xaa equals any of the naturally occurring L-amino acids
  MISC_FEATURE (42): Xaa equals any of the naturally occurring L-amino acids
  MISC_FEATURE (47): Xaa equals any of the naturally occurring L-amino acids
  MISC_FEATURE (48): Xaa equals any of the naturally occurring L-amino acids
  MISC_FEATURE (55): Xaa equals any of the naturally occurring L-amino acids
  MISC_FEATURE (61): Xaa equals any of the naturally occurring L-amino acids
  MISC_FEATURE (71): Xaa equals any of the naturally occurring L-amino acids
  MISC_FEATURE (75): Xaa equals any of the naturally occurring L-amino acids
  MISC_FEATURE (78): Xaa equals any of the naturally occurring L-amino acids
PFYKKGEKSXGVXRGPPPGVNXRSRGKFPPGGSGNPTAGSRXNSILXXKTPNPNXNPLKPXGGALLQAPPXNWNXPGXEPN

SEQ ID NO: 7433 - protein, 117 aa, Homo sapiens
  MISC_FEATURE (47): Xaa equals any of the naturally occurring L-amino acids
  MISC_FEATURE (89): Xaa equals any of the naturally occurring L-amino acids
  MISC_FEATURE (103): Xaa equals any of the naturally occurring L-amino acids
  MISC_FEATURE (114): Xaa equals any of the naturally occurring L-amino acids
VRKQLNLCVLLELQHPFLPFHLCVHPQLNASVTSNEIENAAEAPGVXNTGKGSWASLLVWERTSSPTLLSPSFWASYEFEAFNKLYQRXMKNFQNAIGKGCSXMVAHLKGSPIXLVL

SEQ ID NO: 7434 - protein, 55 aa, Homo sapiens
  MISC_FEATURE (2): Xaa equals any of the naturally occurring L-amino acids
  MISC_FEATURE (6): Xaa equals any of the naturally occurring L-amino acids
  MISC_FEATURE (7): Xaa equals any of the naturally occurring L-amino acids
  MISC_FEATURE (9): Xaa equals any of the naturally occurring L-amino acids
  MISC_FEATURE (12): Xaa equals any of the naturally occurring L-amino acids
  MISC_FEATURE (14): Xaa equals any of the naturally occurring L-amino acids
  MISC_FEATURE (15): Xaa equals any of the naturally occurring L-amino acids
  MISC_FEATURE (42): Xaa equals any of the naturally occurring L-amino acids
KXFLHXXLXDSXCXXGNSSFKLFFPTFRLVSPPDPHRWISEXYQTGEPKKLGLTF

SEQ ID NO: 7435 - protein, 54 aa, Homo sapiens
  MISC_FEATURE (5): Xaa equals any of the naturally occurring L-amino acids
  MISC_FEATURE (9): Xaa equals any of the naturally occurring L-amino acids
  MISC_FEATURE (13): Xaa equals any of the naturally occurring L-amino acids
  MISC_FEATURE (16): Xaa equals any of the naturally occurring L-amino acids
  MISC_FEATURE (19): Xaa equals any of the naturally occurring L-amino acids
  MISC_FEATURE (21): Xaa equals any of the naturally occurring L-amino acids
  MISC_FEATURE (42): Xaa equals any of the naturally occurring L-amino acids
  MISC_FEATURE (43): Xaa equals any of the naturally occurring L-amino acids
  MISC_FEATURE (52): Xaa equals any of the naturally occurring L-amino acids
  MISC_FEATURE (54): Xaa equals any of the naturally occurring L-amino acids
YSEHXGESXIKVXRSXNIXEXFGETNIPLNVSRTYKGPRKPXXMKKNKEIQXPX

SEQ ID NO: 7436 - protein, 33 aa, Homo sapiens
  MISC_FEATURE (4): Xaa equals any of the naturally occurring L-amino acids
  MISC_FEATURE (12): Xaa equals any of the naturally occurring L-amino acids
  MISC_FEATURE (18): Xaa equals any of the naturally occurring L-amino acids
  MISC_FEATURE (19): Xaa equals any of the naturally occurring L-amino acids
  MISC_FEATURE (31): Xaa equals any of the naturally occurring L-amino acids
DCRXLSPFKKWXPGPKSXXLVRNSRVDPRVXAH

SEQ ID NO: 7437 - protein, 33 aa, Homo sapiens
  MISC_FEATURE (1): Xaa equals any of the naturally occurring L-amino acids
  MISC_FEATURE (10): Xaa equals any of the naturally occurring L-amino acids
  MISC_FEATURE (11): Xaa equals any of the naturally occurring L-amino acids
  MISC_FEATURE (23): Xaa equals any of the naturally occurring L-amino acids
  MISC_FEATURE (26): Xaa equals any of the naturally occurring L-amino acids
XKSPLINIGXXGKFLGEGFSGCXFLXGPYFLRV

SEQ ID NO: 7438 - protein, 78 aa, Homo sapiens
  MISC_FEATURE (1): Xaa equals any of the naturally occurring L-amino acids
  MISC_FEATURE (2): Xaa equals any of the naturally occurring L-amino acids
  MISC_FEATURE (3): Xaa equals any of the naturally occurring L-amino acids
  MISC_FEATURE (4): Xaa equals any of the naturally occurring L-amino acids
  MISC_FEATURE (24): Xaa equals any of the naturally occurring L-amino acids
  MISC_FEATURE (36): Xaa equals any of the naturally occurring L-amino acids
  MISC_FEATURE (37): Xaa equals any of the naturally occurring L-amino acids
  MISC_FEATURE (42): Xaa equals any of the naturally occurring L-amino acids
  MISC_FEATURE (48): Xaa equals any of the naturally occurring L-amino acids
  MISC_FEATURE (54): Xaa equals any of the naturally occurring L-amino acids
  MISC_FEATURE (74): Xaa equals any of the naturally occurring L-amino acids
  MISC_FEATURE (78): Xaa equals any of the naturally occurring L-amino acids
XXXXYACMYRSGIPGSTHASDPSXLKFSCYIGIPHXXLSSIXGWMRAXISSWVXEQIHGHTFYNDWSSVLQIKXLQSX

SEQ ID NO: 7439 - protein, 86 aa, Homo sapiens
  MISC_FEATURE (44): Xaa equals any of the naturally occurring L-amino acids
  MISC_FEATURE (51): Xaa equals any of the naturally occurring L-amino acids
  MISC_FEATURE (53): Xaa equals any of the naturally occurring L-amino acids
  MISC_FEATURE (55): Xaa equals any of the naturally occurring L-amino acids
  MISC_FEATURE (70): Xaa equals any of the naturally occurring L-amino acids
  MISC_FEATURE (76): Xaa equals any of the naturally occurring L-amino acids
  MISC_FEATURE (78): Xaa equals any of the naturally occurring L-amino acids
  MISC_FEATURE (83): Xaa equals any of the naturally occurring L-amino acids
GPQSPASSVFLHWPPGSPRLNRPSCENHCYRCENGVLQSSQRRXIEKETDXMXNXLGKESFHEHFTMLPXALKEIXLXLFSQXTLF

SEQ ID NO: 7440 - protein, 84 aa, Homo sapiens
  MISC_FEATURE (47): Xaa equals any of the naturally occurring L-amino acids
  MISC_FEATURE (78): Xaa equals any of the naturally occurring L-amino acids
  MISC_FEATURE (84): Xaa equals any of the naturally occurring L-amino acids
ERMSSFSSPLGISRARRGKTKTGNVYKNCSRFANKKLVKVSKNGDWXFPGRKDARGLIGEKLGTLKPRKVQAPSPTRXSLFFSX

SEQ ID NO: 7441 - protein, 61 aa, Homo sapiens
  MISC_FEATURE (21): Xaa equals any of the naturally occurring L-amino acids
  MISC_FEATURE (50): Xaa equals any of the naturally occurring L-amino acids
  MISC_FEATURE (55): Xaa equals any of the naturally occurring L-amino acids
IINNNKNKANTLDITLPSGAXKKVKAGISFSYLNLSVLSQGIFSENRWNXVRLWXMLSIIG

SEQ ID NO: 7442 - protein, 53 aa, Homo sapiens
  MISC_FEATURE (10): Xaa equals any of the naturally occurring L-amino acids
  MISC_FEATURE (14): Xaa equals any of the naturally occurring L-amino acids
  MISC_FEATURE (18): Xaa equals any of the naturally occurring L-amino acids
  MISC_FEATURE (24): Xaa equals any of the naturally occurring L-amino acids
  MISC_FEATURE (30): Xaa equals any of the naturally occurring L-amino acids
  MISC_FEATURE (51): Xaa equals any of the naturally occurring L-amino acids
RAKGQMVLPXPPCXCGGXPLSACXALTGNXLAWNLGRGLPSHPCSSSPPTXNP

SEQ ID NO: 7443 - protein, 54 aa, Homo sapiens
  MISC_FEATURE (6): Xaa equals any of the naturally occurring L-amino acids
  MISC_FEATURE (15): Xaa equals any of the naturally occurring L-amino acids
  MISC_FEATURE (20): Xaa equals any of the naturally occurring L-amino acids
  MISC_FEATURE (28): Xaa equals any of the naturally occurring L-amino acids
  MISC_FEATURE (46): Xaa equals any of the naturally occurring L-amino acids
  MISC_FEATURE (50): Xaa equals any of the naturally occurring L-amino acids
PLGGGXPTGPPFWAXKKKIXNPRGGFPXGGEKIFPPPRGGGFPSKXPQTXPGFP

SEQ ID NO: 7444 - protein, 78 aa, Homo sapiens
  MISC_FEATURE (17): Xaa equals any of the naturally occurring L-amino acids
  MISC_FEATURE (24): Xaa equals any of the naturally occurring L-amino acids
  MISC_FEATURE (30): Xaa equals any of the naturally occurring L-amino acids
  MISC_FEATURE (45): Xaa equals any of the naturally occurring L-amino acids
  MISC_FEATURE (66): Xaa equals any of the naturally occurring L-amino acids
  MISC_FEATURE (72): Xaa equals any of the naturally occurring L-amino acids
AGAGIRKWEAAAPHPPXSFRPLLXPKFSPXRGPFKGPALRRRARXRHQEAGWAQPSLKLAGTGRTXPSRASXRKGNRS

SEQ ID NO: 7445 - protein, 37 aa, Homo sapiens
  MISC_FEATURE (16): Xaa equals any of the naturally occurring L-amino acids
  MISC_FEATURE (22): Xaa equals any of the naturally occurring L-amino acids
  MISC_FEATURE (27): Xaa equals any of the naturally occurring L-amino acids
  MISC_FEATURE (30): Xaa equals any of the naturally occurring L-amino acids
GTLRQAIPAPESQIWXAELLSXLHCSXISXSSQSCFC

SEQ ID NO: 7446 - protein, 67 aa, Homo sapiens
  MISC_FEATURE (25): Xaa equals any of the naturally occurring L-amino acids
  MISC_FEATURE (45): Xaa equals any of the naturally occurring L-amino acids
  MISC_FEATURE (46): Xaa equals any of the naturally occurring L-amino acids
  MISC_FEATURE (67): Xaa equals any of the naturally occurring L-amino acids
RRCWSSDWPGKIRALERSKEQLLSXRAGQKFVLQARTPEVSDGAXXLRKAGLAEHSGLTGSGPLPHX

SEQ ID NO: 7447 - protein, 32 aa, Homo sapiens
  MISC_FEATURE (6): Xaa equals any of the naturally occurring L-amino acids
  MISC_FEATURE (7): Xaa equals any of the naturally occurring L-amino acids
  MISC_FEATURE (15): Xaa equals any of the naturally occurring L-amino acids
  MISC_FEATURE (17): Xaa equals any of the naturally occurring L-amino acids
  MISC_FEATURE (21): Xaa equals any of the naturally occurring L-amino acids
  MISC_FEATURE (22): Xaa equals any of the naturally occurring L-amino acids
  MISC_FEATURE (23): Xaa equals any of the naturally occurring L-amino acids
  MISC_FEATURE (30): Xaa equals any of the naturally occurring L-amino acids
GVVHGXXGVRTAQTXLXVSSXXXFHRSFRXVL

SEQ ID NO: 7448 - protein, 77 aa, Homo sapiens
  MISC_FEATURE (14): Xaa equals any of the naturally occurring L-amino acids
  MISC_FEATURE (41): Xaa equals any of the naturally occurring L-amino acids
  MISC_FEATURE (65): Xaa equals any of the naturally occurring L-amino acids
  MISC_FEATURE (70): Xaa equals any of the naturally occurring L-amino acids
  MISC_FEATURE (71): Xaa equals any of the naturally occurring L-amino acids
DRGGNTTALIQVEXTKKRQQLVTVARVTATKRGCGKGGLAXLLAAAAYQASYENYLLRVAYCHVXDHEGXXALRSSE

SEQ ID NO: 7449 - protein, 35 aa, Homo sapiens
  MISC_FEATURE (9): Xaa equals any of the naturally occurring L-amino acids
  MISC_FEATURE (10): Xaa equals any of the naturally occurring L-amino acids
  MISC_FEATURE (18): Xaa equals any of the naturally occurring L-amino acids
  MISC_FEATURE (19): Xaa equals any of the naturally occurring L-amino acids
  MISC_FEATURE (24): Xaa equals any of the naturally occurring L-amino acids
GGPCDSDTXXQDIYEFKXXITQDXSWSTLRSAVYR

SEQ ID NO: 7450 - protein, 34 aa, Homo sapiens
  MISC_FEATURE (24): Xaa equals any of the naturally occurring L-amino acids
  MISC_FEATURE (25): Xaa equals any of the naturally occurring L-amino acids
  MISC_FEATURE (26): Xaa equals any of the naturally occurring L-amino acids
  MISC_FEATURE (31): Xaa equals any of the naturally occurring L-amino acids
HYVISAQCSECQMKKFNETPVNRXXXYNPLXVSK

SEQ ID NO: 7451 - protein, 71 aa, Homo sapiens
  MISC_FEATURE (40): Xaa equals any of the naturally occurring L-amino acids
  MISC_FEATURE (52): Xaa equals any of the naturally occurring L-amino acids
  MISC_FEATURE (59): Xaa equals any of the naturally occurring L-amino acids
  MISC_FEATURE (65): Xaa equals any of the naturally occurring L-amino acids
  MISC_FEATURE (70): Xaa equals any of the naturally occurring L-amino acids
WPTYWWFVFNVVFVVCCLVTQQLQWLATGVVYYMGPAQPXPLEATCPQSARXFVLVAKXNNVNHXKRPCXL

SEQ ID NO: 7452 - protein, 50 aa, Homo sapiens
  MISC_FEATURE (1): Xaa equals any of the naturally occurring L-amino acids
  MISC_FEATURE (6): Xaa equals any of the naturally occurring L-amino acids
  MISC_FEATURE (9): Xaa equals any of the naturally occurring L-amino acids
  MISC_FEATURE (14): Xaa equals any of the naturally occurring L-amino acids
  MISC_FEATURE (36): Xaa equals any of the naturally occurring L-amino acids
  MISC_FEATURE (37): Xaa equals any of the naturally occurring L-amino acids
  MISC_FEATURE (39): Xaa equals any of the naturally occurring L-amino acids
  MISC_FEATURE (44): Xaa equals any of the naturally occurring L-amino acids
XAGKAXRIXPGILXSTHASAGLLGWFSSSGPFWGTXXPXFLRCXFPHRFP

SEQ ID NO: 7453 - protein, 65 aa, Homo sapiens
  MISC_FEATURE (2): Xaa equals any of the naturally occurring L-amino acids
  MISC_FEATURE (15): Xaa equals any of the naturally occurring L-amino acids
  MISC_FEATURE (20): Xaa equals any of the naturally occurring L-amino acids
  MISC_FEATURE (32): Xaa equals any of the naturally occurring L-amino acids
  MISC_FEATURE (55): Xaa equals any of the naturally occurring L-amino acids
DXANPDPVANVYPIXYPRSXFSFAFILTTAVXYSALHVRPFFGCCVVWGAVAVWXLVVSHGLPYT

SEQ ID NO: 7454 - protein, 73 aa, Homo sapiens
  MISC_FEATURE (3): Xaa equals any of the naturally occurring L-amino acids
  MISC_FEATURE (59): Xaa equals any of the naturally occurring L-amino acids
SVXRFTRSFISFLRPLLCCLYCCIFAKAVLLLTGVLCLLAVTLLYTAALRSECYAAANXSTDAYSTLVLLAYV

SEQ ID NO: 7455 - protein, 71 aa, Homo sapiens
  MISC_FEATURE (7): Xaa equals any of the naturally occurring L-amino acids
  MISC_FEATURE (17): Xaa equals any of the naturally occurring L-amino acids
  MISC_FEATURE (24): Xaa equals any of the naturally occurring L-amino acids
  MISC_FEATURE (38): Xaa equals any of the naturally occurring L-amino acids
  MISC_FEATURE (45): Xaa equals any of the naturally occurring L-amino acids
  MISC_FEATURE (60): Xaa equals any of the naturally occurring L-amino acids
  MISC_FEATURE (61): Xaa equals any of the naturally occurring L-amino acids
  MISC_FEATURE (66): Xaa equals any of the naturally occurring L-amino acids
AHATGRXQLAPPRTGTXAPRLPTXVADCTCLGMCLISXAHVMARXISSYHNASDRRFGIXXRRLQXACPIM

SEQ ID NO: 7456 - protein, 35 aa, Homo sapiens
  MISC_FEATURE (1): Xaa equals any of the naturally occurring L-amino acids
  MISC_FEATURE (6): Xaa equals any of the naturally occurring L-amino acids
  MISC_FEATURE (12): Xaa equals any of the naturally occurring L-amino acids
  MISC_FEATURE (19): Xaa equals any of the naturally occurring L-amino acids
  MISC_FEATURE (32): Xaa equals any of the naturally occurring L-amino acids
XFVGWXRWDTGXILGKWLXTFLSRSYLAHHVXLNG

SEQ ID NO: 7457 - protein, 95 aa, Homo sapiens
  MISC_FEATURE (35): Xaa equals any of the naturally occurring L-amino acids
  MISC_FEATURE (73): Xaa equals any of the naturally occurring L-amino acids
  MISC_FEATURE (82): Xaa equals any of the naturally occurring L-amino acids
QLQAREDGRLPVQGANCCYYVNERWNGRQRKKRHXNTTDIEWLEPFAERGPGGRAAAQCEQPIMKKTTTTKAXVVGTLWSWXQLGDKKTFWATGR

SEQ ID NO: 7458 - protein, 134 aa, Homo sapiens
  MISC_FEATURE (1): Xaa equals any of the naturally occurring L-amino acids
  MISC_FEATURE (2): Xaa equals any of the naturally occurring L-amino acids
  MISC_FEATURE (4): Xaa equals any of the naturally occurring L-amino acids
  MISC_FEATURE (8): Xaa equals any of the naturally occurring L-amino acids
  MISC_FEATURE (65): Xaa equals any of the naturally occurring L-amino acids
  MISC_FEATURE (70): Xaa equals any of the naturally occurring L-amino acids
  MISC_FEATURE (72): Xaa equals any of the naturally occurring L-amino acids
  MISC_FEATURE (93): Xaa equals any of the naturally occurring L-amino acids
  MISC_FEATURE (109): Xaa equals any of the naturally occurring L-amino acids
  MISC_FEATURE (114): Xaa equals any of the naturally occurring L-amino acids
  MISC_FEATURE (134): Xaa equals any of the naturally occurring L-amino acids
XXNXCLPXLPVIYLVLYLVLYLVLFTLLFLLFSVCSRVPVAELTLRRRVWYVLVAGVIPIVVLIXTAVFXVXTVPTVSIPALATATPTAVRPXNRIGSMSVGRQSLFCXLFTLXRFKLYEVCRVRGVANSIATX

SEQ ID NO: 7459 - protein, 39 aa, Homo sapiens
  MISC_FEATURE (31): Xaa equals any of the naturally occurring L-amino acids
  MISC_FEATURE (37): Xaa equals any of the naturally occurring L-amino acids
HFSFSFNLQYLWRASRRHQSTHFFPSLLRLXELPMDXVR

SEQ ID NO: 7460 - protein, 67 aa, Homo sapiens
  MISC_FEATURE (1): Xaa equals any of the naturally occurring L-amino acids
  MISC_FEATURE (3): Xaa equals any of the naturally occurring L-amino acids
  MISC_FEATURE (7): Xaa equals any of the naturally occurring L-amino acids
  MISC_FEATURE (35): Xaa equals any of the naturally occurring L-amino acids
  MISC_FEATURE (45): Xaa equals any of the naturally occurring L-amino acids
  MISC_FEATURE (46): Xaa equals any of the naturally occurring L-amino acids
  MISC_FEATURE (61): Xaa equals any of the naturally occurring L-amino acids
  MISC_FEATURE (66): Xaa equals any of the naturally occurring L-amino acids
XRXLPSXRAIRNPVKAGTPAGTGPEFPGRPTRPRXRGRPLRSRHXXCRKEHPEMKGHQEEXHYLLXQ

SEQ ID NO: 7461 - protein, 155 aa, Homo sapiens
  MISC_FEATURE (2): Xaa equals any of the naturally occurring L-amino acids
  MISC_FEATURE (25): Xaa equals any of the naturally occurring L-amino acids
  MISC_FEATURE (78): Xaa equals any of the naturally occurring L-amino acids
  MISC_FEATURE (114): Xaa equals any of the naturally occurring L-amino acids
  MISC_FEATURE (126): Xaa equals any of the naturally occurring L-amino acids
  MISC_FEATURE (131): Xaa equals any of the naturally occurring L-amino acids
  MISC_FEATURE (135): Xaa equals any of the naturally occurring L-amino acids
  MISC_FEATURE (142): Xaa equals any of the naturally occurring L-amino acids
VXIVKAGTPAGTGPEFPGRPTRSVXDEQEHYISDDLDIETKMEEQEKNPASSELEEPSLVCEEDEIMRSKESPDLSIXHSQVEQLVNKTSELDMSESKTRSGKVFQNKMANGNXPVKSSKENRKRXQHESXRIVXLMIMYRXNTMGRITNIITTD

SEQ ID NO: 7462 - protein, 29 aa, Homo sapiens
  MISC_FEATURE (3): Xaa equals any of the naturally occurring L-amino acids
  MISC_FEATURE (6): Xaa equals any of the naturally occurring L-amino acids
  MISC_FEATURE (7): Xaa equals any of the naturally occurring L-amino acids
  MISC_FEATURE (9): Xaa equals any of the naturally occurring L-amino acids
AVXFLXXNXTHYFGKLVPPAGTGPEFPGR

SEQ ID NO: 7463 - protein, 27 aa, Homo sapiens
  MISC_FEATURE (4): Xaa equals any of the naturally occurring L-amino acids
  MISC_FEATURE (9): Xaa equals any of the naturally occurring L-amino acids
  MISC_FEATURE (18): Xaa equals any of the naturally occurring L-amino acids
  MISC_FEATURE (27): Xaa equals any of the naturally occurring L-amino acids
VDMXWKWIXTLVNEQMIXYVLKMHHPX

SEQ ID NO: 7464 - protein, 60 aa, Homo sapiens
  MISC_FEATURE (2): Xaa equals any of the naturally occurring L-amino acids
  MISC_FEATURE (7): Xaa equals any of the naturally occurring L-amino acids
  MISC_FEATURE (8): Xaa equals any of the naturally occurring L-amino acids
  MISC_FEATURE (18): Xaa equals any of the naturally occurring L-amino acids
  MISC_FEATURE (39): Xaa equals any of the naturally occurring L-amino acids
  MISC_FEATURE (50): Xaa equals any of the naturally occurring L-amino acids
  MISC_FEATURE (55): Xaa equals any of the naturally occurring L-amino acids
  MISC_FEATURE (56): Xaa equals any of the naturally occurring L-amino acids
  MISC_FEATURE (59): Xaa equals any of the naturally occurring L-amino acids
RXILHPXXDRHLDPHSPXARGGGFPWDVKGWPLLSPCNXNVNPTEAPSRXPESWXXTNXV

SEQ ID NO: 7465 - protein, 33 aa, Homo sapiens
  MISC_FEATURE (4): Xaa equals any of the naturally occurring L-amino acids
  MISC_FEATURE (21): Xaa equals any of the naturally occurring L-amino acids
  MISC_FEATURE (25): Xaa equals any of the naturally occurring L-amino acids
  MISC_FEATURE (27): Xaa equals any of the naturally occurring L-amino acids
TIFXRWYPLQVPVRNSRVDPXVRFXQXLTRDGK

SEQ ID NO: 7466 - protein, 50 aa, Homo sapiens
VNTDGFPLIFQFYVESSLDYKFHMLLGVFSVCLIACHWKVKNLDLDIIKI

SEQ ID NO: 7467 - protein, 48 aa, Homo sapiens
  MISC_FEATURE (39): Xaa equals any of the naturally occurring L-amino acids
  MISC_FEATURE (41): Xaa equals any of the naturally occurring L-amino acids
  MISC_FEATURE (42): Xaa equals any of the naturally occurring L-amino acids
GGPFGSRRGAGGAGAGPGGGGSGGVAKWLREHLGFRGGXGXXGGRKPA

SEQ ID NO: 7468 - protein, 42 aa, Homo sapiens
  MISC_FEATURE (3): Xaa equals any of the naturally occurring L-amino acids
  MISC_FEATURE (5): Xaa equals any of the naturally occurring L-amino acids
  MISC_FEATURE (11): Xaa equals any of the naturally occurring L-amino acids
  MISC_FEATURE (14): Xaa equals any of the naturally occurring L-amino acids
  MISC_FEATURE (20): Xaa equals any of the naturally occurring L-amino acids
  MISC_FEATURE (28): Xaa equals any of the naturally occurring L-amino acids
  MISC_FEATURE (32): Xaa equals any of the naturally occurring L-amino acids
  MISC_FEATURE (33): Xaa equals any of the naturally occurring L-amino acids
HYXGXEIYKEXKYXSIYNFXKRFNVKIXWICXXNNTYRYVLC

SEQ ID NO: 7469 - protein, 20 aa, Homo sapiens
  MISC_FEATURE (4): Xaa equals any of the naturally occurring L-amino acids
  MISC_FEATURE (5): Xaa equals any of the naturally occurring L-amino acids
  MISC_FEATURE (11): Xaa equals any of the naturally occurring L-amino acids
  MISC_FEATURE (14): Xaa equals any of the naturally occurring L-amino acids
  MISC_FEATURE (18): Xaa equals any of the naturally occurring L-amino acids
DRLXXCKVNKXFKXKHCXWT

SEQ ID NO: 7470 - protein, 112 aa, Homo sapiens
  MISC_FEATURE (90): Xaa equals any of the naturally occurring L-amino acids
PTRSGIHVEATPAASAFLGAERQPRPPVPSPPSHHRSSAPGRTVWPLPVPAMGSGWTPWAPPIAKPGRQLSLVPARDSPGFPSILMCPLXPLQRPPTQHHRPGLLQTINYNH

SEQ ID NO: 7471 - protein, 20 aa, Homo sapiens
  MISC_FEATURE (7): Xaa equals any of the naturally occurring L-amino acids
  MISC_FEATURE (11): Xaa equals any of the naturally occurring L-amino acids
  MISC_FEATURE (16): Xaa equals any of the naturally occurring L-amino acids
  MISC_FEATURE (20): Xaa equals any of the naturally occurring L-amino acids
VDPRVRXRVGXPVLLXQTPX

SEQ ID NO: 7472 - protein, 105 aa, Homo sapiens
  MISC_FEATURE (20): Xaa equals any of the naturally occurring L-amino acids
  MISC_FEATURE (74): Xaa equals any of the naturally occurring L-amino acids
  MISC_FEATURE (81): Xaa equals any of the naturally occurring L-amino acids
  MISC_FEATURE (102): Xaa equals any of the naturally occurring L-amino acids
  MISC_FEATURE (105): Xaa equals any of the naturally occurring L-amino acids
LKFTLRWFHFLVYKGRVSDXCPVISGTPSGKEAEGPSYGRVHPVRPSTTKVSWFPFLPSYHSFPGSHPLHIQQXGLTFLCXSWENTSLLQCKVRLDKQAGVXEAX

SEQ ID NO: 7473 - protein, 30 aa, Homo sapiens
  MISC_FEATURE (28): Xaa equals any of the naturally occurring L-amino acids
  MISC_FEATURE (30): Xaa equals any of the naturally occurring L-amino acids
TFGKAGPPAGTGPEFPGRPTRPFASKAXRX

SEQ ID NO: 7474 - protein, 39 aa, Homo sapiens
  MISC_FEATURE (1): Xaa equals any of the naturally occurring L-amino acids
  MISC_FEATURE (2): Xaa equals any of the naturally occurring L-amino acids
  MISC_FEATURE (10): Xaa equals any of the naturally occurring L-amino acids
  MISC_FEATURE (15): Xaa equals any of the naturally occurring L-amino acids
  MISC_FEATURE (17): Xaa equals any of the naturally occurring L-amino acids
  MISC_FEATURE (21): Xaa equals any of the naturally occurring L-amino acids
XXLRRCGLLXIDLHXNXYMTXTTPKEILRIWHSYSLCVI

SEQ ID NO: 7475 - protein, 89 aa, Homo sapiens
  MISC_FEATURE (86): Xaa equals any of the naturally occurring L-amino acids
  MISC_FEATURE (88): Xaa equals any of the naturally occurring L-amino acids
FLYHLFLEAFRSPVFRHGTDKNGFSLGFSKNMRQVFGDEKKYWLLPIFSSLGDGCSFPTCLVNQDPEQASTPCRAEFHSLKSRKPXSXL

SEQ ID NO: 7476 - protein, 19 aa, Homo sapiens
  MISC_FEATURE (2): Xaa equals any of the naturally occurring L-amino acids
  MISC_FEATURE (9): Xaa equals any of the naturally occurring L-amino acids
  MISC_FEATURE (10): Xaa equals any of the naturally occurring L-amino acids
  MISC_FEATURE (11): Xaa equals any of the naturally occurring L-amino acids
  MISC_FEATURE (16): Xaa equals any of the naturally occurring L-amino acids
AXWADFDSXXXFGFGXSKP

SEQ ID NO: 7477 - protein, 99 aa, Homo sapiens
  MISC_FEATURE (3): Xaa equals any of the naturally occurring L-amino acids
  MISC_FEATURE (13): Xaa equals any of the naturally occurring L-amino acids
  MISC_FEATURE (14): Xaa equals any of the naturally occurring L-amino acids
  MISC_FEATURE (39): Xaa equals any of the naturally occurring L-amino acids
  MISC_FEATURE (40): Xaa equals any of the naturally occurring L-amino acids
  MISC_FEATURE (57): Xaa equals any of the naturally occurring L-amino acids
  MISC_FEATURE (58): Xaa equals any of the naturally occurring L-amino acids
  MISC_FEATURE (63): Xaa equals any of the naturally occurring L-amino acids
  MISC_FEATURE (65): Xaa equals any of the naturally occurring L-amino acids
  MISC_FEATURE (82): Xaa equals any of the naturally occurring L-amino acids
  MISC_FEATURE (93): Xaa equals any of the naturally occurring L-amino acids
TKXGELISVPLLXXGYVLVRGSSDKNQISSTISLLKYLXXGYSIGTPLDGPKGPKEXXKKGLXYXSQKTSIPLVPVGISYSXKWILKKTWDKXEIPKPF

SEQ ID NO: 7478 - protein, 21 aa, Homo sapiens
  MISC_FEATURE (16): Xaa equals any of the naturally occurring L-amino acids
  MISC_FEATURE (18): Xaa equals any of the naturally occurring L-amino acids
  MISC_FEATURE (20): Xaa equals any of the naturally occurring L-amino acids
  MISC_FEATURE (21): Xaa equals any of the naturally occurring L-amino acids
TSEVTLLGIENATTWXPXEXX

SEQ ID NO: 7479 - protein, 62 aa, Homo sapiens
  MISC_FEATURE (6): Xaa equals any of the naturally occurring L-amino acids
VKLRDXGLSGRGFATEMTCMWQPPEPEDMQPRAESEADPLRAHSLPFPSRIPSSKQAILKSL

SEQ ID NO: 7480 - protein, 33 aa, Homo sapiens
  MISC_FEATURE (5): Xaa equals any of the naturally occurring L-amino acids
  MISC_FEATURE (9): Xaa equals any of the naturally occurring L-amino acids
  MISC_FEATURE (10): Xaa equals any of the naturally occurring L-amino acids
  MISC_FEATURE (11): Xaa equals any of the naturally occurring L-amino acids
  MISC_FEATURE (19): Xaa equals any of the naturally occurring L-amino acids
  MISC_FEATURE (32): Xaa equals any of the naturally occurring L-amino acids
QGESXLTTXXXWPAEQAPXRNSRVDPRAFHPXA

SEQ ID NO: 7481 - protein, 46 aa, Homo sapiens
  MISC_FEATURE (1): Xaa equals any of the naturally occurring L-amino acids
  MISC_FEATURE (4): Xaa equals any of the naturally occurring L-amino acids
  MISC_FEATURE (10): Xaa equals any of the naturally occurring L-amino acids
  MISC_FEATURE (16): Xaa equals any of the naturally occurring L-amino acids
  MISC_FEATURE (26): Xaa equals any of the naturally occurring L-amino acids
  MISC_FEATURE (42): Xaa equals any of the naturally occurring L-amino acids
  MISC_FEATURE (44): Xaa equals any of the naturally occurring L-amino acids
XNVXRHALRXLIHLHXRVAPSKLEAXQKALEPTGQSGIGSEXAXLP

SEQ ID NO: 7482 - protein, 77 aa, Homo sapiens
  MISC_FEATURE (38): Xaa equals any of the naturally occurring L-amino acids
  MISC_FEATURE (42): Xaa equals any of the naturally occurring L-amino acids
  MISC_FEATURE (46): Xaa equals any of the naturally occurring L-amino acids
  MISC_FEATURE (49): Xaa equals any of the naturally occurring L-amino acids
  MISC_FEATURE (56): Xaa equals any of the naturally occurring L-amino acids
  MISC_FEATURE (58): Xaa equals any of the naturally occurring L-amino acids
  MISC_FEATURE (74): Xaa equals any of the naturally occurring L-amino acids
AAECRGMEGEPPWEGARGLAEQLGGVREVRRCPGQGAXALMXDSSXQSXGAMRTAXAXESGVASPPQAVLATQXHYP

SEQ ID NO: 7483 - protein, 22 aa, Homo sapiens
  MISC_FEATURE (4): Xaa equals any of the naturally occurring L-amino acids
  MISC_FEATURE (5): Xaa equals any of the naturally occurring L-amino acids
  MISC_FEATURE (18): Xaa equals any of the naturally occurring L-amino acids
  MISC_FEATURE (22): Xaa equals any of the naturally occurring L-amino acids
LFTXXDAFRYLALMWEEXIDLX

SEQ ID NO: 7484 - protein, 91 aa, Homo sapiens
  MISC_FEATURE (1): Xaa equals any of the naturally occurring L-amino acids
  MISC_FEATURE (7): Xaa equals any of the naturally occurring L-amino acids
  MISC_FEATURE (22): Xaa equals any of the naturally occurring L-amino acids
  MISC_FEATURE (24): Xaa equals any of the naturally occurring L-amino acids
  MISC_FEATURE (49): Xaa equals any of the naturally occurring L-amino acids
  MISC_FEATURE (50): Xaa equals any of the naturally occurring L-amino acids
  MISC_FEATURE (56): Xaa equals any of the naturally occurring L-amino acids
  MISC_FEATURE (80): Xaa equals any of the naturally occurring L-amino acids
  MISC_FEATURE (82): Xaa equals any of the naturally occurring L-amino acids
XINQKNXGGPPPERASFLALGXQXPPLKPFPSFQPYGPSQEGEESPRSXXGRKQAXPWPPTGFKNPKPKVPLPLGAQGPXIXKKWKNLEQL

SEQ ID NO: 7485 - protein, 48 aa, Homo sapiens
  MISC_FEATURE (1): Xaa equals any of the naturally occurring L-amino acids
  MISC_FEATURE (5): Xaa equals any of the naturally occurring L-amino acids
  MISC_FEATURE (10): Xaa equals any of the naturally occurring L-amino acids
  MISC_FEATURE (31): Xaa equals any of the naturally occurring L-amino acids
  MISC_FEATURE (39): Xaa equals any of the naturally occurring L-amino acids
  MISC_FEATURE (40): Xaa equals any of the naturally occurring L-amino acids
  MISC_FEATURE (43): Xaa equals any of the naturally occurring L-amino acids
  MISC_FEATURE (47): Xaa equals any of the naturally occurring L-amino acids
XSILXIPFIXKASTPAGTGPEFPGRPTLSVXVAPSCGLXXPVXMSSXR

SEQ ID NO: 7486 - protein, 33 aa, Homo sapiens
  MISC_FEATURE (1): Xaa equals any of the naturally occurring L-amino acids
  MISC_FEATURE (24): Xaa equals any of the naturally occurring L-amino acids
XNPVKACTPAGTGPEFPGRPTRPXRVRPRVRPR

SEQ ID NO: 7487 - protein, 58 aa, Homo sapiens
VSTRLETVMCPAWLALASHSALCVQGASGHSDEDLVTSAQHRRQVEEDGKLRGFFREK

SEQ ID NO: 7488 - protein, 33 aa, Homo sapiens
  MISC_FEATURE (1): Xaa equals any of the naturally occurring L-amino acids
  MISC_FEATURE (8): Xaa equals any of the naturally occurring L-amino acids
  MISC_FEATURE (11): Xaa equals any of the naturally occurring L-amino acids
  MISC_FEATURE (21): Xaa equals any of the naturally occurring L-amino acids
XSRCRPRXLVXLTWEPLLYLXAGTPAGTGPESP

SEQ ID NO: 7489 - protein, 20 aa, Homo sapiens
  MISC_FEATURE (15): Xaa equals any of the naturally occurring L-amino acids
  MISC_FEATURE (16): Xaa equals any of the naturally occurring L-amino acids
  MISC_FEATURE (17): Xaa equals any of the naturally occurring L-amino acids
  MISC_FEATURE (19): Xaa equals any of the naturally occurring L-amino acids
  MISC_FEATURE (20): Xaa equals any of the naturally occurring L-amino acids
HDILLEFSAHMLTDXXXGXX

SEQ ID NO: 7490 - protein, 27 aa, Homo sapiens
  MISC_FEATURE (21): Xaa equals any of the naturally occurring L-amino acids
  MISC_FEATURE (22): Xaa equals any of the naturally occurring L-amino acids
  MISC_FEATURE (23): Xaa equals any of the naturally occurring L-amino acids
PRSFFWGKKKPPSPFFGGKKXXXPLLW

SEQ ID NO: 7491 - protein, 23 aa, Homo sapiens
  MISC_FEATURE (2): Xaa equals any of the naturally occurring L-amino acids
  MISC_FEATURE (6): Xaa equals any of the naturally occurring L-amino acids
  MISC_FEATURE (17): Xaa equals any of the naturally occurring L-amino acids
AXARSXPFLGAWLMWMXEGLGPL

SEQ ID NO: 7492 - protein, 80 aa, Homo sapiens
  MISC_FEATURE (3): Xaa equals any of the naturally occurring L-amino acids
  MISC_FEATURE (9): Xaa equals any of the naturally occurring L-amino acids
  MISC_FEATURE (22): Xaa equals any of the naturally occurring L-amino acids
  MISC_FEATURE (25): Xaa equals any of the naturally occurring L-amino acids
  MISC_FEATURE (28): Xaa equals any of the naturally occurring L-amino acids
  MISC_FEATURE (45): Xaa equals any of the naturally occurring L-amino acids
  MISC_FEATURE (46): Xaa equals any of the naturally occurring L-amino acids
  MISC_FEATURE (47): Xaa equals any of the naturally occurring L-amino acids
  MISC_FEATURE (49): Xaa equals any of the naturally occurring L-amino acids
  MISC_FEATURE (58): Xaa equals any of the naturally occurring L-amino acids
  MISC_FEATURE (66): Xaa equals any of the naturally occurring L-amino acids
  MISC_FEATURE (80): Xaa equals any of the naturally occurring L-amino acids
IDXCSLPSXCPSPGLHILTGLXPFXQMXVFLPLFTLQLKFNYLKXXXYXSFPWLQTFXLPLRLKLXFLTVYSVQLPTFLX

SEQ ID NO: 7493 - protein, 54 aa, Homo sapiens
SFVIQGGQEKGYGAAELSNSLRQEKRKEKMYIFKFQFKPLLVTKCFDMISHTKS

SEQ ID NO: 7494 - protein, 64 aa, Homo sapiens
  MISC_FEATURE (14): Xaa equals any of the naturally occurring L-amino acids
  MISC_FEATURE (36): Xaa equals any of the naturally occurring L-amino acids
QKKELRAVSMERRXGCLSWLALSLAHYQKTSREQLXKGFGIKICLKKYPEIGFPIKTLPIFSKI

SEQ ID NO: 7495 - protein, 41 aa, Homo sapiens
  MISC_FEATURE (2): Xaa equals any of the naturally occurring L-amino acids
  MISC_FEATURE (6): Xaa equals any of the naturally occurring L-amino acids
  MISC_FEATURE (28): Xaa equals any of the naturally occurring L-amino acids
  MISC_FEATURE (29): Xaa equals any of the naturally occurring L-amino acids
  MISC_FEATURE (32): Xaa equals any of the naturally occurring L-amino acids
LXRKYXYYRVSWYACRYRSGIPGSTHAXXDAXGEKLLSPGA

SEQ ID NO: 7496 - protein, 21 aa, Homo sapiens
  MISC_FEATURE (3): Xaa equals any of the naturally occurring L-amino acids
  MISC_FEATURE (4): Xaa equals any of the naturally occurring L-amino acids
  MISC_FEATURE (20): Xaa equals any of the naturally occurring L-amino acids
  MISC_FEATURE (21): Xaa equals any of the naturally occurring L-amino acids
RTXXQDLRREIDLPKRDRFXX

SEQ ID NO: 7497 - protein, 20 aa, Homo sapiens
  MISC_FEATURE (4): Xaa equals any of the naturally occurring L-amino acids
  MISC_FEATURE (16): Xaa equals any of the naturally occurring L-amino acids
  MISC_FEATURE (17): Xaa equals any of the naturally occurring L-amino acids
  MISC_FEATURE (20): Xaa equals any of the naturally occurring L-amino acids
ANSXSTPDYLFDMGQXXEYX

SEQ ID NO: 7498 - protein, 13 aa, Homo sapiens
  MISC_FEATURE (4): Xaa equals any of the naturally occurring L-amino acids
  MISC_FEATURE (7): Xaa equals any of the naturally occurring L-amino acids
  MISC_FEATURE (8): Xaa equals any of the naturally occurring L-amino acids
  MISC_FEATURE (13): Xaa equals any of the naturally occurring L-amino acids
MTFXTSXXKAYRX

SEQ ID NO: 7499 - protein, 22 aa, Homo sapiens
  MISC_FEATURE (4): Xaa equals any of the naturally occurring L-amino acids
  MISC_FEATURE (21): Xaa equals any of the naturally occurring L-amino acids
  MISC_FEATURE (22): Xaa equals any of the naturally occurring L-amino acids
ASEXGELIPPSKPSLGWVQWXX

SEQ ID NO: 7500 - protein, 81 aa, Homo sapiens
  MISC_FEATURE (6): Xaa equals any of the naturally occurring L-amino acids
  MISC_FEATURE (11): Xaa equals any of the naturally occurring L-amino acids
  MISC_FEATURE (28): Xaa equals any of the naturally occurring L-amino acids
  MISC_FEATURE (30): Xaa equals any of the naturally occurring L-amino acids
  MISC_FEATURE (36): Xaa equals any of the naturally occurring L-amino acids
  MISC_FEATURE (46): Xaa equals any of the naturally occurring L-amino acids
  MISC_FEATURE (48): Xaa equals any of the naturally occurring L-amino acids
  MISC_FEATURE (50): Xaa equals any of the naturally occurring L-amino acids
  MISC_FEATURE (66): Xaa equals any of the naturally occurring L-amino acids
  MISC_FEATURE (72): Xaa equals any of the naturally occurring L-amino acids
  MISC_FEATURE (75): Xaa equals any of the naturally occurring L-amino acids
  MISC_FEATURE (77): Xaa equals any of the naturally occurring L-amino acids
CYSSEXVLPQXPVRNSRVDPRVRPRFSXTXLYREKXGLLWASYAEXYXRXVRKIMMHQLSSKSSLXLFTALXLLXPXADGC

SEQ ID NO: 7501 - protein, 27 aa, Homo sapiens
  MISC_FEATURE (1): Xaa equals any of the naturally occurring L-amino acids
  MISC_FEATURE (11): Xaa equals any of the naturally occurring L-amino acids
  MISC_FEATURE (20): Xaa equals any of the naturally occurring L-amino acids
  MISC_FEATURE (24): Xaa equals any of the naturally occurring L-amino acids
XCLYYYSPIIXHYEIMIIQXDSKXYNI

SEQ ID NO: 7502 - protein, 24 aa, Homo sapiens
  MISC_FEATURE (10): Xaa equals any of the naturally occurring L-amino acids
  MISC_FEATURE (11): Xaa equals any of the naturally occurring L-amino acids
  MISC_FEATURE (13): Xaa equals any of the naturally occurring L-amino acids
  MISC_FEATURE (19): Xaa equals any of the naturally occurring L-amino acids
ELCLCLLNIXXNXWFTKIXRKRGK

SEQ ID NO: 7503 - protein, 82 aa, Homo sapiens
  MISC_FEATURE (13): Xaa equals any of the naturally occurring L-amino acids
FSSILAGSEYATXKIETSKIHSMSRLFTDGVTKNNEVNVVASGKNTGGIGKGWVGGLLFFAFAPLSSFVLSSNRHLLFAKHM

SEQ ID NO: 7504 - protein, 45 aa, Homo sapiens
  MISC_FEATURE (1): Xaa equals any of the naturally occurring L-amino acids
  MISC_FEATURE (4): Xaa equals any of the naturally occurring L-amino acids
  MISC_FEATURE (39): Xaa equals any of the naturally occurring L-amino acids
  MISC_FEATURE (42): Xaa equals any of the naturally occurring L-amino acids
  MISC_FEATURE (43): Xaa equals any of the naturally occurring L-amino acids
XILXKLLTIVKAGTPAGTGPEFPGRPTRPLPLCQVWWKXGQXXKN

SEQ ID NO: 7505 - protein, 18 aa, Homo sapiens
  MISC_FEATURE (5): Xaa equals any of the naturally occurring L-amino acids
  MISC_FEATURE (6): Xaa equals any of the naturally occurring L-amino acids
  MISC_FEATURE (10): Xaa equals any of the naturally occurring L-amino acids
DLYYXXSWYXCRYRSGIP

SEQ ID NO: 7506 - protein, 68 aa, Homo sapiens
  MISC_FEATURE (3): Xaa equals any of the naturally occurring L-amino acids
  MISC_FEATURE (6): Xaa equals any of the naturally occurring L-amino acids
  MISC_FEATURE (8): Xaa equals any of the naturally occurring L-amino acids
  MISC_FEATURE (9): Xaa equals any of the naturally occurring L-amino acids
  MISC_FEATURE (13): Xaa equals any of the naturally occurring L-amino acids
  MISC_FEATURE (38): Xaa equals any of the naturally occurring L-amino acids
  MISC_FEATURE (49): Xaa equals any of the naturally occurring L-amino acids
  MISC_FEATURE (53): Xaa equals any of the naturally occurring L-amino acids
  MISC_FEATURE (56): Xaa equals any of the naturally occurring L-amino acids
  MISC_FEATURE (57): Xaa equals any of the naturally occurring L-amino acids
SPXWDXCXXRSGXPGSTHASAHSVLEFFSFESYVGGLXDYVSIKLMGLXGAPXESXXVLDNLLSALLC

SEQ ID NO: 7507 - protein, 94 aa, Homo sapiens
LACFYNFIFQILTTTAFRVVILLFLKQEITICICTCVLHMNYGILGKCFSFTCENSESWSKLHCIPNCALIYYLHRVLFNQIACFSFIIVSFLL

SEQ ID NO: 7508 - protein, 47 aa, Homo sapiens
  MISC_FEATURE (1): Xaa equals any of the naturally occurring L-amino acids
  MISC_FEATURE (3): Xaa equals any of the naturally occurring L-amino acids
  MISC_FEATURE (9): Xaa equals any of the naturally occurring L-amino acids
  MISC_FEATURE (10): Xaa equals any of the naturally occurring L-amino acids
  MISC_FEATURE (41): Xaa equals any of the naturally occurring L-amino acids
  MISC_FEATURE (45): Xaa equals any of the naturally occurring L-amino acids
  MISC_FEATURE (46): Xaa equals any of the naturally occurring L-amino acids
XPXETPHSXXGKLARLQVPVRNSRVDPRFRRSLPLVKEGVXPESXXS

SEQ ID NO: 7509 - protein, 60 aa, Homo sapiens
  MISC_FEATURE (14): Xaa equals any of the naturally occurring L-amino acids
EFALRSASILLASXCIAFVIRRTNSRLNMKGFSSVSSKKASLSSHLTSNSFPVCQLQSQH

SEQ ID NO: 7510 - protein, 43 aa, Homo sapiens
  MISC_FEATURE (16): Xaa equals any of the naturally occurring L-amino acids
  MISC_FEATURE (18): Xaa equals any of the naturally occurring L-amino acids
  MISC_FEATURE (23): Xaa equals any of the naturally occurring L-amino acids
  MISC_FEATURE (39): Xaa equals any of the naturally occurring L-amino acids
  MISC_FEATURE (40): Xaa equals any of the naturally occurring L-amino acids
VLIILRQRWVEFENNXNXPFVIXPFTMLCQKIRISILGXXITM

SEQ ID NO: 7511 - protein, 35 aa, Homo sapiens
  MISC_FEATURE (1): Xaa equals any of the naturally occurring L-amino acids
  MISC_FEATURE (6): Xaa equals any of the naturally occurring L-amino acids
  MISC_FEATURE (21): Xaa equals any of the naturally occurring L-amino acids
  MISC_FEATURE (25): Xaa equals any of the naturally occurring L-amino acids
  MISC_FEATURE (29): Xaa equals any of the naturally occurring L-amino acids
  MISC_FEATURE (34): Xaa equals any of the naturally occurring L-amino acids
XLDNPXSKGRRQRQAEEAEAXEGAXEKGXEGLNXG

SEQ ID NO: 7512 - protein, 36 aa, Homo sapiens
  MISC_FEATURE (15): Xaa equals any of the naturally occurring L-amino acids
  MISC_FEATURE (17): Xaa equals any of the naturally occurring L-amino acids
  MISC_FEATURE (28): Xaa equals any of the naturally occurring L-amino acids
  MISC_FEATURE (30): Xaa equals any of the naturally occurring L-amino acids
RPPAGTGPEFPGLPXRXFKPYNKLKNRXTXNENPEN

SEQ ID NO: 7513 - protein, 52 aa, Homo sapiens
  MISC_FEATURE (5): Xaa equals any of the naturally occurring L-amino acids
  MISC_FEATURE (21): Xaa equals any of the naturally occurring L-amino acids
  MISC_FEATURE (24): Xaa equals any of the naturally occurring L-amino acids
  MISC_FEATURE (27): Xaa equals any of the naturally occurring L-amino acids
  MISC_FEATURE (36): Xaa equals any of the naturally occurring L-amino acids
  MISC_FEATURE (37): Xaa equals any of the naturally occurring L-amino acids
  MISC_FEATURE (40): Xaa equals any of the naturally occurring L-amino acids
  MISC_FEATURE (43): Xaa equals any of the naturally occurring L-amino acids
  MISC_FEATURE (48): Xaa equals any of the naturally occurring L-amino acids
KGRKXQDRSGIPGSTPLPRTXFKXATXSLELGATLXXALXSIXLYGTXVYQI

SEQ ID NO: 7514 - protein, 23 aa, Homo sapiens
  MISC_FEATURE (2): Xaa equals any of the naturally occurring L-amino acids
  MISC_FEATURE (6): Xaa equals any of the naturally occurring L-amino acids
  MISC_FEATURE (19): Xaa equals any of the naturally occurring L-amino acids
FXTQGXAGPGGALGSKPAXQDDE

SEQ ID NO: 7515 - protein, 116 aa, Homo sapiens
  MISC_FEATURE (53): Xaa equals any of the naturally occurring L-amino acids
  MISC_FEATURE (87): Xaa equals any of the naturally occurring L-amino acids
  MISC_FEATURE (90): Xaa equals any of the naturally occurring L-amino acids
  MISC_FEATURE (109): Xaa equals any of the naturally occurring L-amino acids
  MISC_FEATURE (112): Xaa equals any of the naturally occurring L-amino acids
  MISC_FEATURE (116): Xaa equals any of the naturally occurring L-amino acids
WGFVSAPRKWRRGPWRPLPRGQRRTPSPPLGAPAAGPAPPPAPSLTRLSPPLXPLETLAILFRGLLDRPCYLQRVCRARETRDRRPXSGXSWGHLGKDADASLELALAXGSXFTAX

SEQ ID NO: 7516 - protein, 32 aa, Homo sapiens
  MISC_FEATURE (4): Xaa equals any of the naturally occurring L-amino acids
  MISC_FEATURE (7): Xaa equals any of the naturally occurring L-amino acids
  MISC_FEATURE (8): Xaa equals any of the naturally occurring L-amino acids
  MISC_FEATURE (10): Xaa equals any of the naturally occurring L-amino acids
  MISC_FEATURE (13): Xaa equals any of the naturally occurring L-amino acids
  MISC_FEATURE (18): Xaa equals any of the naturally occurring L-amino acids
  MISC_FEATURE (19): Xaa equals any of the naturally occurring L-amino acids
  MISC_FEATURE (31): Xaa equals any of the naturally occurring L-amino acids
RPHXKNXXKXPLXVPVRXXRDVPRDLFKRKXN

SEQ ID NO: 7517 - protein, 109 aa, Homo sapiens
  MISC_FEATURE (81): Xaa equals any of the naturally occurring L-amino acids
  MISC_FEATURE (88): Xaa equals any of the naturally occurring L-amino acids
  MISC_FEATURE (91): Xaa equals any of the naturally occurring L-amino acids
  MISC_FEATURE (100): Xaa equals any of the naturally occurring L-amino acids
  MISC_FEATURE (106): Xaa equals any of the naturally occurring L-amino acids
GPPPRCCSPRNSTAFEYLEEFPIQMLAQLETLTGRKAKHGLFASTWNMAEISLAPTRTSSLMTGLWGTQKMPGSLTFFILXSTTIDTXPPXSRSLPSPTXGLLKTXRCK

SEQ ID NO: 7518 - protein, 57 aa, Homo sapiens
NVISSCNQYKVIKMFSCQILNLVCNFILSTSQAICQMLGSRMWLGDYRMGQCRSRIW

SEQ ID NO: 7519 - protein, 18 aa, Homo sapiens
  MISC_FEATURE (1): Xaa equals any of the naturally occurring L-amino acids
  MISC_FEATURE (13): Xaa equals any of the naturally occurring L-amino acids
  MISC_FEATURE (14): Xaa equals any of the naturally occurring L-amino acids
XFKNRTSTTRYGXXLKKQ

SEQ ID NO: 7520 - protein, 43 aa, Homo sapiens
  MISC_FEATURE (9): Xaa equals any of the naturally occurring L-amino acids
  MISC_FEATURE (23): Xaa equals any of the naturally occurring L-amino acids
  MISC_FEATURE (32): Xaa equals any of the naturally occurring L-amino acids
  MISC_FEATURE (35): Xaa equals any of the naturally occurring L-amino acids
  MISC_FEATURE (37): Xaa equals any of the naturally occurring L-amino acids
ASNKLALKXIKQKYNYKEKLANXHLQWENCIXLSXNXRTSKQN

SEQ ID NO: 7521 - protein, 32 aa, Homo sapiens
  MISC_FEATURE (3): Xaa equals any of the naturally occurring L-amino acids
  MISC_FEATURE (7): Xaa equals any of the naturally occurring L-amino acids
  MISC_FEATURE (9): Xaa equals any of the naturally occurring L-amino acids
  MISC_FEATURE (32): Xaa equals any of the naturally occurring L-amino acids
AAXKSGXNXRGLSLVAHIWYLIGYKLELFANX

SEQ ID NO: 7522 - protein, 17 aa, Homo sapiens
  MISC_FEATURE (10): Xaa equals any of the naturally occurring L-amino acids
  MISC_FEATURE (13): Xaa equals any of the naturally occurring L-amino acids
  MISC_FEATURE (15): Xaa equals any of the naturally occurring L-amino acids
  MISC_FEATURE (17): Xaa equals any of the naturally occurring L-amino acids
RFFSKVKMDXGLXRXFX

SEQ ID NO: 7523 - protein, 129 aa, Homo sapiens
  MISC_FEATURE (1): Xaa equals any of the naturally occurring L-amino acids
  MISC_FEATURE (2): Xaa equals any of the naturally occurring L-amino acids
  MISC_FEATURE (8): Xaa equals any of the naturally occurring L-amino acids
  MISC_FEATURE (26): Xaa equals any of the naturally occurring L-amino acids
  MISC_FEATURE (35): Xaa equals any of the naturally occurring L-amino acids
  MISC_FEATURE (37): Xaa equals any of the naturally occurring L-amino acids
  MISC_FEATURE (38): Xaa equals any of the naturally occurring L-amino acids
  MISC_FEATURE (40): Xaa equals any of the naturally occurring L-amino acids
  MISC_FEATURE (43): Xaa equals any of the naturally occurring L-amino acids
  MISC_FEATURE (50): Xaa equals any of the naturally occurring L-amino acids
  MISC_FEATURE (57): Xaa equals any of the naturally occurring L-amino acids
  MISC_FEATURE (59): Xaa equals any of the naturally occurring L-amino acids
  MISC_FEATURE (60): Xaa equals any of the naturally occurring L-amino acids
  MISC_FEATURE (66): Xaa equals any of the naturally occurring L-amino acids
  MISC_FEATURE (67): Xaa equals any of the naturally occurring L-amino acids
  MISC_FEATURE (70): Xaa equals any of the naturally occurring L-amino acids
  MISC_FEATURE (75): Xaa equals any of the naturally occurring L-amino acids
  MISC_FEATURE (77): Xaa equals any of the naturally occurring L-amino acids
  MISC_FEATURE (79): Xaa equals any of the naturally occurring L-amino acids
  MISC_FEATURE (81): Xaa equals any of the naturally occurring L-amino acids
  MISC_FEATURE (83): Xaa equals any of the naturally occurring L-amino acids
  MISC_FEATURE (84): Xaa equals any of the naturally occurring L-amino acids
  MISC_FEATURE (85): Xaa equals any of the naturally occurring L-amino acids
  MISC_FEATURE (87): Xaa equals any of the naturally occurring L-amino acids
  MISC_FEATURE (93): Xaa equals any of the naturally occurring L-amino acids
  MISC_FEATURE (96): Xaa equals any of the naturally occurring L-amino acids
  MISC_FEATURE (109): Xaa equals any of the naturally occurring L-amino acids
  MISC_FEATURE (114): Xaa equals any of the naturally occurring L-amino acids
  MISC_FEATURE (125): Xaa equals any of the naturally occurring L-amino acids
  MISC_FEATURE (126): Xaa equals any of the naturally occurring L-amino acids
  MISC_FEATURE (129): Xaa equals any of the naturally occurring L-amino acids
XXTPDGIXKTPSRRNPGTPAGTGPEXPGRPTLFAXPXXGXPRXGSKKRTXRTGTQTXTXXNAERGXXTSXASPRXHXHXSXPXXXPXKLRRAXRTXSRPSGAKGMQGTXPGYQXGDPRRTQMKQXXTEX

SEQ ID NO: 7524 - protein, 43 aa, Homo sapiens
  MISC_FEATURE (6): Xaa equals any of the naturally occurring L-amino acids
  MISC_FEATURE (9): Xaa equals any of the naturally occurring L-amino acids
  MISC_FEATURE (17): Xaa equals any of the naturally occurring L-amino acids
  MISC_FEATURE (20): Xaa equals any of the naturally occurring L-amino acids
  MISC_FEATURE (27): Xaa equals any of the naturally occurring L-amino acids
  MISC_FEATURE (39): Xaa equals any of the naturally occurring L-amino acids
  MISC_FEATURE (41): Xaa equals any of the naturally occurring L-amino acids
KKQETXPNXAKNIRAGXARXNGRTDGXDGNQPKADTGRXDXKA

SEQ ID NO: 7525 - protein, 32 aa, Homo sapiens
  MISC_FEATURE (5): Xaa equals any of the naturally occurring L-amino acids
  MISC_FEATURE (7): Xaa equals any of the naturally occurring L-amino acids
  MISC_FEATURE (9): Xaa equals any of the naturally occurring L-amino acids
  MISC_FEATURE (17): Xaa equals any of the naturally occurring L-amino acids
  MISC_FEATURE (27): Xaa equals any of the naturally occurring L-amino acids
IGKTXTXPXKPLTIFEXKGPPAGTGPXFPGRL

SEQ ID NO: 7526 - protein, 38 aa, Homo sapiens
  MISC_FEATURE (7): Xaa equals any of the naturally occurring L-amino acids
  MISC_FEATURE (11): Xaa equals any of the naturally occurring L-amino acids
  MISC_FEATURE (13): Xaa equals any of the naturally occurring L-amino acids
  MISC_FEATURE (35): Xaa equals any of the naturally occurring L-amino acids
PDPHTPXGEKXPXPQTIRQEITQGYTEKIYPERYXTPT

SEQ ID NO: 7527 - protein, 38 aa, Homo sapiens
  MISC_FEATURE (1): Xaa equals any of the naturally occurring L-amino acids
  MISC_FEATURE (5): Xaa equals any of the naturally occurring L-amino acids
  MISC_FEATURE (32): Xaa equals any of the naturally occurring L-amino acids
  MISC_FEATURE (33): Xaa equals any of the naturally occurring L-amino acids
  MISC_FEATURE (37): Xaa equals any of the naturally occurring L-amino acids
XAASXEHRPRTKTRTTGTTPTELKRRTSRKTXXTETXK

SEQ ID NO: 7528 - protein, 26 aa, Homo sapiens
  MISC_FEATURE (3): Xaa equals any of the naturally occurring L-amino acids
  MISC_FEATURE (4): Xaa equals any of the naturally occurring L-amino acids
  MISC_FEATURE (5): Xaa equals any of the naturally occurring L-amino acids
  MISC_FEATURE (6): Xaa equals any of the naturally occurring L-amino acids
  MISC_FEATURE (11): Xaa equals any of the naturally occurring L-amino acids
VSXXXXPEDHXTARMLMVICIKMNNF

SEQ ID NO: 7529 - protein, 35 aa, Homo sapiens
  MISC_FEATURE (10): Xaa equals any of the naturally occurring L-amino acids
  MISC_FEATURE (14): Xaa equals any of the naturally occurring L-amino acids
  MISC_FEATURE (18): Xaa equals any of the naturally occurring L-amino acids
  MISC_FEATURE (26): Xaa equals any of the naturally occurring L-amino acids
HNTYHRENRXARRXRSGXPGSTHAFXPNMAGQDGG

SEQ ID NO: 7530 - protein, 105 aa, Homo sapiens
LGKKAEQLSSRHIPAGWGPHSRKGLDWLSFPVAWLRCVDGEIGARGRTLVRKLQSCSLPSPSCLHGASGGLWASSNRGWWAPRANGVDPWLVRAKSHRLLLGKGF

SEQ ID NO: 7531 - protein, 67 aa, Homo sapiens
  MISC_FEATURE (24): Xaa equals any of the naturally occurring L-amino acids
  MISC_FEATURE (30): Xaa equals any of the naturally occurring L-amino acids
  MISC_FEATURE (56): Xaa equals any of the naturally occurring L-amino acids
GMADLLESSCPFTESGGTLFHSSXTGRCLXFFFLISLHRERELFPKTHFIFLLAMXSARVKKFLKSN

SEQ ID NO: 7532 - protein, 47 aa, Homo sapiens
  MISC_FEATURE (1): Xaa equals any of the naturally occurring L-amino acids
  MISC_FEATURE (10): Xaa equals any of the naturally occurring L-amino acids
  MISC_FEATURE (12): Xaa equals any of the naturally occurring L-amino acids
  MISC_FEATURE (16): Xaa equals any of the naturally occurring L-amino acids
  MISC_FEATURE (41): Xaa equals any of the naturally occurring L-amino acids
  MISC_FEATURE (45): Xaa equals any of the naturally occurring L-amino acids
  MISC_FEATURE (47): Xaa equals any of the naturally occurring L-amino acids
XNFYDLLLFXKXVPLXVPVRNSRVDPRVLTGEGMDEMEFTXVGCXTX

SEQ ID NO: 7533 - protein, 35 aa, Homo sapiens
  MISC_FEATURE (2): Xaa equals any of the naturally occurring L-amino acids
  MISC_FEATURE (11): Xaa equals any of the naturally occurring L-amino acids
  MISC_FEATURE (19): Xaa equals any of the naturally occurring L-amino acids
  MISC_FEATURE (33): Xaa equals any of the naturally occurring L-amino acids
  MISC_FEATURE (34): Xaa equals any of the naturally occurring L-amino acids
VXVLDRERPPXFFLIFFFXFFGIINISFEMHIXXE

SEQ ID NO: 7534 - protein, 51 aa, Homo sapiens
  MISC_FEATURE (13): Xaa equals any of the naturally occurring L-amino acids
LLCLRNSKRFVLXASRRIGTHMGLDVRFCRPEPSQGSWHVFLHLCRLTEMS

SEQ ID NO: 7535 - protein, 80 aa, Homo sapiens
  MISC_FEATURE (2): Xaa equals any of the naturally occurring L-amino acids
  MISC_FEATURE (9): Xaa equals any of the naturally occurring L-amino acids
  MISC_FEATURE (23): Xaa equals any of the naturally occurring L-amino acids
  MISC_FEATURE (31): Xaa equals any of the naturally occurring L-amino acids
  MISC_FEATURE (33): Xaa equals any of the naturally occurring L-amino acids
  MISC_FEATURE (41): Xaa equals any of the naturally occurring L-amino acids
  MISC_FEATURE (43): Xaa equals any of the naturally occurring L-amino acids
  MISC_FEATURE (46): Xaa equals any of the naturally occurring L-amino acids
  MISC_FEATURE (50): Xaa equals any of the naturally occurring L-amino acids
  MISC_FEATURE (54): Xaa equals any of the naturally occurring L-amino acids
  MISC_FEATURE (55): Xaa equals any of the naturally occurring L-amino acids
  MISC_FEATURE (60): Xaa equals any of the naturally occurring L-amino acids
  MISC_FEATURE (69): Xaa equals any of the naturally occurring L-amino acids
  MISC_FEATURE (71): Xaa equals any of the naturally occurring L-amino acids
  MISC_FEATURE (75): Xaa equals any of the naturally occurring L-amino acids
  MISC_FEATURE (76): Xaa equals any of the naturally occurring L-amino acids
KXGEIWGGXPLKGGKKFGELPQXQFLLPTLXFXGEKTQTPXIXGGXLKPXPPRXXQTSGXVSFGKPNFXPXVSIXXLGNF

SEQ ID NO: 7536 - protein, 69 aa, Homo sapiens
  MISC_FEATURE (3): Xaa equals any of the naturally occurring L-amino acids
  MISC_FEATURE (9): Xaa equals any of the naturally occurring L-amino acids
STXVGTAAXLPGPTHASGGRTPEPWALLGMPLNPVSFTDSLGLSSLDSRPPTVTVSVFFAAELVHRDDG

SEQ ID NO: 7537 - protein, 85 aa, Homo sapiens
  MISC_FEATURE (18): Xaa equals any of the naturally occurring L-amino acids
  MISC_FEATURE (23): Xaa equals any of the naturally occurring L-amino acids
  MISC_FEATURE (56): Xaa equals any of the naturally occurring L-amino acids
  MISC_FEATURE (60): Xaa equals any of the naturally occurring L-amino acids
  MISC_FEATURE (66): Xaa equals any of the naturally occurring L-amino acids
  MISC_FEATURE (81): Xaa equals any of the naturally occurring L-amino acids
  MISC_FEATURE (84): Xaa equals any of the naturally occurring L-amino acids
IITVRVRDRRQSLSTLCXSLKEXQLGIQEWKNTESQPFFFLFKTKTKFILGMVSSXLECXREKKRXFPRHYLKINSFHLNXGPXW

SEQ ID NO: 7538 - protein, 43 aa, Homo sapiens
  MISC_FEATURE (14): Xaa equals any of the naturally occurring L-amino acids
  MISC_FEATURE (21): Xaa equals any of the naturally occurring L-amino acids
  MISC_FEATURE (23): Xaa equals any of the naturally occurring L-amino acids
GLQEHPTSVLLDHXALDCDPXRXFCPALRTHSAVLENSAHVCR

SEQ ID NO: 7539 - protein, 44 aa, Homo sapiens
  MISC_FEATURE (1): Xaa equals any of the naturally occurring L-amino acids
  MISC_FEATURE (7): Xaa equals any of the naturally occurring L-amino acids
  MISC_FEATURE (15): Xaa equals any of the naturally occurring L-amino acids
  MISC_FEATURE (24): Xaa equals any of the naturally occurring L-amino acids
  MISC_FEATURE (40): Xaa equals any of the naturally occurring L-amino acids
  MISC_FEATURE (42): Xaa equals any of the naturally occurring L-amino acids
XWLSKPXCCEHSGLXKKPREDSGXWTKRAVKHSWACAPRXPXLG

SEQ ID NO: 7540 - protein, 18 aa, Homo sapiens
  MISC_FEATURE (10): Xaa equals any of the naturally occurring L-amino acids
  MISC_FEATURE (11): Xaa equals any of the naturally occurring L-amino acids
  MISC_FEATURE (14): Xaa equals any of the naturally occurring L-amino acids
  MISC_FEATURE (17): Xaa equals any of the naturally occurring L-amino acids
GWLKCTTLRXXNQXTLXA

SEQ ID NO: 7541 - protein, 36 aa, Homo sapiens
  MISC_FEATURE (1): Xaa equals any of the naturally occurring L-amino acids
  MISC_FEATURE (16): Xaa equals any of the naturally occurring L-amino acids
  MISC_FEATURE (26): Xaa equals any of the naturally occurring L-amino acids
  MISC_FEATURE (31): Xaa equals any of the naturally occurring L-amino acids
  MISC_FEATURE (36): Xaa equals any of the naturally occurring L-amino acids
XLQALNHHVQPRISLXSLVEGLFLRXELTQXHMLIX

SEQ ID NO: 7542 - protein, 93 aa, Homo sapiens
  MISC_FEATURE (12): Xaa equals any of the naturally occurring L-amino acids
  MISC_FEATURE (54): Xaa equals any of the naturally occurring L-amino acids
  MISC_FEATURE (65): Xaa equals any of the naturally occurring L-amino acids
  MISC_FEATURE (78): Xaa equals any of the naturally occurring L-amino acids
  MISC_FEATURE (79): Xaa equals any of the naturally occurring L-amino acids
  MISC_FEATURE (85): Xaa equals any of the naturally occurring L-amino acids
EKNKKSGESSSXLSQEQKSVFDEDLQKKIEENERLHIQFFEADEQHKHVEAELXSRLVTLETEAXQHQAVVDGLTRKXXETIEKXQNDKVKLE

SEQ ID NO: 7543 - protein, 52 aa, Homo sapiens
KIYLPCLKFVGLLIQCGLMFLLSLTATFYNQCRAWIWHYEVFCLGGTYRRAT

SEQ ID NO: 7544 - protein, 40 aa, Homo sapiens
YSFYVCYPSVSSPHFSFLGLKGFFSTLYMCVVIFGFCYIL

SEQ ID NO: 7545 - protein, 36 aa, Homo sapiens
  MISC_FEATURE (1): Xaa equals any of the naturally occurring L-amino acids
  MISC_FEATURE (18): Xaa equals any of the naturally occurring L-amino acids
  MISC_FEATURE (20): Xaa equals any of the naturally occurring L-amino acids
  MISC_FEATURE (26): Xaa equals any of the naturally occurring L-amino acids
XEMYSSPIYKQILFYLKXNXYRTSPXMATHTVCVSH

SEQ ID NO: 7546 - protein, 54 aa, Homo sapiens
  MISC_FEATURE (15): Xaa equals any of the naturally occurring L-amino acids
  MISC_FEATURE (18): Xaa equals any of the naturally occurring L-amino acids
PTNAKTKLFFLYLFXIKXNEKDPFQKGDPENKTNTPVFCHCFSQLSYLKTVIPK

SEQ ID NO: 7547 - protein, 45 aa, Homo sapiens
GGRVQDLVVYKIGFLIHLENFYFGITDEMIRFVYDEGVICGHKFK

SEQ ID NO: 7548 - protein, 76 aa, Homo sapiens
IHRASTWVVSVPHRQRSVPLHFSIYSSSKIVSFEIFFNCIIGRLINKPERRKNNEVGRASCSASGLYSKAILDCGC

SEQ ID NO: 7549 - protein, 34 aa, Homo sapiens
  MISC_FEATURE (14): Xaa equals any of the naturally occurring L-amino acids
  MISC_FEATURE (26): Xaa equals any of the naturally occurring L-amino acids
  MISC_FEATURE (27): Xaa equals any of the naturally occurring L-amino acids
  MISC_FEATURE (29): Xaa equals any of the naturally occurring L-amino acids
  MISC_FEATURE (34): Xaa equals any of the naturally occurring L-amino acids
PPENTTIFQAGTPXGTGPEFPGRPIXXLXKKKKX

SEQ ID NO: 7550 - protein, 90 aa, Homo sapiens
  MISC_FEATURE (22): Xaa equals any of the naturally occurring L-amino acids
  MISC_FEATURE (24): Xaa equals any of the naturally occurring L-amino acids
  MISC_FEATURE (25): Xaa equals any of the naturally occurring L-amino acids
  MISC_FEATURE (30): Xaa equals any of the naturally occurring L-amino acids
  MISC_FEATURE (31): Xaa equals any of the naturally occurring L-amino acids
  MISC_FEATURE (34): Xaa equals any of the naturally occurring L-amino acids
  MISC_FEATURE (41): Xaa equals any of the naturally occurring L-amino acids
  MISC_FEATURE (82): Xaa equals any of the naturally occurring L-amino acids
  MISC_FEATURE (83): Xaa equals any of the naturally occurring L-amino acids
  MISC_FEATURE (84): Xaa equals any of the naturally occurring L-amino acids
KTFGDHDKFWIKTFCYFACKLXYXXPDWPXXGTXINTCPFXGFHTITTSTRNSRWPKLKVKILKHIGFSHAMCWVQTMLVNXXXPMVMTD

SEQ ID NO: 7551 - protein, 116 aa, Homo sapiens
MVGIGTSDVDLDKYRHTFCSLLGRDEDSWGLSYTGLLHHKGDKTSFSSRFGQGSIIGVHLDTWHGTLTFFKNRKCIGVAATKLRGREPGWSPRCCSHRASVFPNLLCMLSAAAPPS

SEQ ID NO: 7552 - protein, 38 aa, Homo sapiens
  MISC_FEATURE (11): Xaa equals any of the naturally occurring L-amino acids
  MISC_FEATURE (19): Xaa equals any of the naturally occurring L-amino acids
  MISC_FEATURE (27): Xaa equals any of the naturally occurring L-amino acids
  MISC_FEATURE (28): Xaa equals any of the naturally occurring L-amino acids
KRMKDKVVALXQDPLVVTXTACPGRLXXTECLDIILLM

SEQ ID NO: 7553 - protein, 90 aa, Homo sapiens
  MISC_FEATURE (80): Xaa equals any of the naturally occurring L-amino acids
HTLCVVLGKLHSLSQPLSFTFPLCEISRFLTYLYYGFLLKYDESCRLSIPKKKKNEQICIHKRFYKSISGGHEPTPDTHXTPWDLLSFQV

SEQ ID NO: 7554 - protein, 98 aa, Homo sapiens
  MISC_FEATURE (65): Xaa equals any of the naturally occurring L-amino acids
  MISC_FEATURE (85): Xaa equals any of the naturally occurring L-amino acids
  MISC_FEATURE (88): Xaa equals any of the naturally occurring L-amino acids
  MISC_FEATURE (98): Xaa equals any of the naturally occurring L-amino acids
PGCLFLQRWFWLVRVLLSLFIGAEIVGECVVQPMGRGRGEEGGGQRAPGTIGNWGWFSAPSSHSXAPSRAHFLALTMQPHWTSKXPSXLQCPTFHTTX

SEQ ID NO: 7555 - protein, 15 aa, Homo sapiens
  MISC_FEATURE (2): Xaa equals any of the naturally occurring L-amino acids
  MISC_FEATURE (14): Xaa equals any of the naturally occurring L-amino acids
SXPSHHMRLFGLLXA

SEQ ID NO: 7556 - protein, 67 aa, Homo sapiens
  MISC_FEATURE (61): Xaa equals any of the naturally occurring L-amino acids
  MISC_FEATURE (62): Xaa equals any of the naturally occurring L-amino acids
  MISC_FEATURE (65): Xaa equals any of the naturally occurring L-amino acids
  MISC_FEATURE (66): Xaa equals any of the naturally occurring L-amino acids
VGCSDDFGFLSKNDGSHTVIPAPNCCTEKRVNAARVGGRWAVSWGVMVITYARDQGCGREXXFSXXG

SEQ ID NO: 7557 - protein, 33 aa, Homo sapiens
LNLARNKDLISVFKYIYMALWSGFWTSKAAYLA

SEQ ID NO: 7558 - protein, 19 aa, Homo sapiens
  MISC_FEATURE (16): Xaa equals any of the naturally occurring L-amino acids
  MISC_FEATURE (18): Xaa equals any of the naturally occurring L-amino acids
  MISC_FEATURE (19): Xaa equals any of the naturally occurring L-amino acids
FCTLSTTQAQAQGRTXDXX

SEQ ID NO: 7559 - protein, 103 aa, Homo sapiens
  MISC_FEATURE (10): Xaa equals any of the naturally occurring L-amino acids
  MISC_FEATURE (82): Xaa equals any of the naturally occurring L-amino acids
  MISC_FEATURE (86): Xaa equals any of the naturally occurring L-amino acids
  MISC_FEATURE (95): Xaa equals any of the naturally occurring L-amino acids
FAIYNSSGEXINNIKYYDGFMGQRVGAISCLAFHPHWPHLAVGSNDYYISVYSVEKPCQISGVTPGPPGHGRLLYIVKLSLXGARXVGCCGPAVXTVGCCLSC

SEQ ID NO: 7560 - protein, 28 aa, Homo sapiens
  MISC_FEATURE (4): Xaa equals any of the naturally occurring L-amino acids
  MISC_FEATURE (13): Xaa equals any of the naturally occurring L-amino acids
  MISC_FEATURE (17): Xaa equals any of the naturally occurring L-amino acids
  MISC_FEATURE (27): Xaa equals any of the naturally occurring L-amino acids
FRGXEPGRQSSGXDLSXILHGCQVRVXP

SEQ ID NO: 7561 - protein, 24 aa, Homo sapiens
  MISC_FEATURE (2): Xaa equals any of the naturally occurring L-amino acids
  MISC_FEATURE (3): Xaa equals any of the naturally occurring L-amino acids
  MISC_FEATURE (22): Xaa equals any of the naturally occurring L-amino acids
AXXPACPSSMWPPWTFCIQSLXCP

SEQ ID NO: 7562 - protein, 40 aa, Homo sapiens
  MISC_FEATURE (1): Xaa equals any of the naturally occurring L-amino acids
  MISC_FEATURE (4): Xaa equals any of the naturally occurring L-amino acids
  MISC_FEATURE (29): Xaa equals any of the naturally occurring L-amino acids
  MISC_FEATURE (40): Xaa equals any of the naturally occurring L-amino acids
XLQXNLATIWKAGRLQVPVRNSRVDPRVXGRVGYFLNKPX

SEQ ID NO: 7563 - protein, 48 aa, Homo sapiens
  MISC_FEATURE (34): Xaa equals any of the naturally occurring L-amino acids
  MISC_FEATURE (39): Xaa equals any of the naturally occurring L-amino acids
  MISC_FEATURE (46): Xaa equals any of the naturally occurring L-amino acids
FIYLYASRFYSLLYICYSSKKKRKKNPFFLQRYXLLYLXITNLNMXTE

SEQ ID NO: 7564 - protein, 17 aa, Homo sapiens
  MISC_FEATURE (8): Xaa equals any of the naturally occurring L-amino acids
  MISC_FEATURE (13): Xaa equals any of the naturally occurring L-amino acids
  MISC_FEATURE (15): Xaa equals any of the naturally occurring L-amino acids
  MISC_FEATURE (17): Xaa equals any of the naturally occurring L-amino acids
AHASGRVXGIKGXIXLX

SEQ ID NO: 7565 - protein, 47 aa, Homo sapiens
  MISC_FEATURE (4): Xaa equals any of the naturally occurring L-amino acids
  MISC_FEATURE (7): Xaa equals any of the naturally occurring L-amino acids
  MISC_FEATURE (10): Xaa equals any of the naturally occurring L-amino acids
  MISC_FEATURE (11): Xaa equals any of the naturally occurring L-amino acids
  MISC_FEATURE (40): Xaa equals any of the naturally occurring L-amino acids
  MISC_FEATURE (44): Xaa equals any of the naturally occurring L-amino acids
  MISC_FEATURE (45): Xaa equals any of the naturally occurring L-amino acids
PGFXGGXFSXXHFQKPRLGLLGNRGKNPLGQAFRFSLANXPRGXXAP

SEQ ID NO: 7566 - protein, 19 aa, Homo sapiens
  MISC_FEATURE (6): Xaa equals any of the naturally occurring L-amino acids
  MISC_FEATURE (12): Xaa equals any of the naturally occurring L-amino acids
  MISC_FEATURE (13): Xaa equals any of the naturally occurring L-amino acids
AFPKGXSRSCRXXRLTRPL

SEQ ID NO: 7567 - protein, 68 aa, Homo sapiens
  MISC_FEATURE (14): Xaa equals any of the naturally occurring L-amino acids
VLPSYLQVLTLPGXLPNMTLDTVSLRLLGYQDQNQEGKRIKIYRVSFRVLAWSFHYQLCKIGIIDPIL

SEQ ID NO: 7568 - protein, 59 aa, Homo sapiens
  MISC_FEATURE (9): Xaa equals any of the naturally occurring L-amino acids
  MISC_FEATURE (16): Xaa equals any of the naturally occurring L-amino acids
  MISC_FEATURE (22): Xaa equals any of the naturally occurring L-amino acids
  MISC_FEATURE (26): Xaa equals any of the naturally occurring L-amino acids
  MISC_FEATURE (39): Xaa equals any of the naturally occurring L-amino acids
  MISC_FEATURE (42): Xaa equals any of the naturally occurring L-amino acids
  MISC_FEATURE (43): Xaa equals any of the naturally occurring L-amino acids
  MISC_FEATURE (49): Xaa equals any of the naturally occurring L-amino acids
  MISC_FEATURE (54): Xaa equals any of the naturally occurring L-amino acids
TMTWSRQSXLWLGTLXPTINNXWLKXFPVTVHFQVGKCXVLXXFFFSNXKRTIXLKKKK

SEQ ID NO: 7569 - protein, 91 aa, Homo sapiens
  MISC_FEATURE (66): Xaa equals any of the naturally occurring L-amino acids
  MISC_FEATURE (68): Xaa equals any of the naturally occurring L-amino acids
  MISC_FEATURE (77): Xaa equals any of the naturally occurring L-amino acids
  MISC_FEATURE (82): Xaa equals any of the naturally occurring L-amino acids
GSALGFQSLSAVAVPFAGTAGSPGPLRSTRSCYAYRGRICRASPRVEGPLQVFTACPRSKGSSARXRXMALGQRFLXMGNWXFGPWARAGG

SEQ ID NO: 7570 - protein, 53 aa, Homo sapiens
  MISC_FEATURE (5): Xaa equals any of the naturally occurring L-amino acids
  MISC_FEATURE (8): Xaa equals any of the naturally occurring L-amino acids
  MISC_FEATURE (13): Xaa equals any of the naturally occurring L-amino acids
  MISC_FEATURE (14): Xaa equals any of the naturally occurring L-amino acids
  MISC_FEATURE (42): Xaa equals any of the naturally occurring L-amino acids
  MISC_FEATURE (46): Xaa equals any of the naturally occurring L-amino acids
GQTLXKVXRVPKXXWEFFQGGRPLTPWEKKKNLGKTTREPTXGGLXFNRGRRG

SEQ ID NO: 7571 - protein, 40 aa, Homo sapiens
  MISC_FEATURE (9): Xaa equals any of the naturally occurring L-amino acids
  MISC_FEATURE (21): Xaa equals any of the naturally occurring L-amino acids
  MISC_FEATURE (23): Xaa equals any of the naturally occurring L-amino acids
  MISC_FEATURE (37): Xaa equals any of the naturally occurring L-amino acids
HTHFINGHXHFDKGGKKFNSXFXKVQGLGLHSESLPXAPT

SEQ ID NO: 7572 - protein, 57 aa, Homo sapiens
  MISC_FEATURE (2): Xaa equals any of the naturally occurring L-amino acids
  MISC_FEATURE (7): Xaa equals any of the naturally occurring L-amino acids
  MISC_FEATURE (8): Xaa equals any of the naturally occurring L-amino acids
  MISC_FEATURE (9): Xaa equals any of the naturally occurring L-amino acids
  MISC_FEATURE (52): Xaa equals any of the naturally occurring L-amino acids
  MISC_FEATURE (53): Xaa equals any of the naturally occurring L-amino acids
  MISC_FEATURE (54): Xaa equals any of the naturally occurring L-amino acids
  MISC_FEATURE (57): Xaa equals any of the naturally occurring L-amino acids
DXKSSRXXXAGFLQGYSVFDETQLGMTYSPSPHSYLSFIKNFIVTVSMLPSXXXNPX

SEQ ID NO: 7573 - protein, 105 aa, Homo sapiens
  MISC_FEATURE (7): Xaa equals any of the naturally occurring L-amino acids
  MISC_FEATURE (21): Xaa equals any of the naturally occurring L-amino acids
  MISC_FEATURE (40): Xaa equals any of the naturally occurring L-amino acids
  MISC_FEATURE (41): Xaa equals any of the naturally occurring L-amino acids
  MISC_FEATURE (53): Xaa equals any of the naturally occurring L-amino acids
  MISC_FEATURE (55): Xaa equals any of the naturally occurring L-amino acids
  MISC_FEATURE (60): Xaa equals any of the naturally occurring L-amino acids
  MISC_FEATURE (69): Xaa equals any of the naturally occurring L-amino acids
  MISC_FEATURE (81): Xaa equals any of the naturally occurring L-amino acids
  MISC_FEATURE (83): Xaa equals any of the naturally occurring L-amino acids
  MISC_FEATURE (102): Xaa equals any of the naturally occurring L-amino acids
  MISC_FEATURE (104): Xaa equals any of the naturally occurring L-amino acids
RKTCTIXSGKVLLGVPVRNSXVDPRVRLRVRAAAEAMGLXXGRSCPEPATALXQXASFSXLPSPRLPRXGYPQPQPGAGEXAXGEGRNQGMSAGRALGALSXTXD

SEQ ID NO: 7574 - protein, 43 aa, Homo sapiens
  MISC_FEATURE (1): Xaa equals any of the naturally occurring L-amino acids
  MISC_FEATURE (2): Xaa equals any of the naturally occurring L-amino acids
  MISC_FEATURE (23): Xaa equals any of the naturally occurring L-amino acids
  MISC_FEATURE (36): Xaa equals any of the naturally occurring L-amino acids
  MISC_FEATURE (37): Xaa equals any of the naturally occurring L-amino acids
  MISC_FEATURE (42): Xaa equals any of the naturally occurring L-amino acids
XXRPGPSPLPHRDRDRDRERERXERSRERDKERERXXSRSRXR

SEQ ID NO: 7575 - protein, 45 aa, Homo sapiens
  MISC_FEATURE (14): Xaa equals any of the naturally occurring L-amino acids
  MISC_FEATURE (38): Xaa equals any of the naturally occurring L-amino acids
  MISC_FEATURE (45): Xaa equals any of the naturally occurring L-amino acids
WITVAGCNFYQFLXLLSQNPFSGKGDPINFKNLTLKHXLAMGAWX

SEQ ID NO: 7576 - protein, 38 aa, Homo sapiens
  MISC_FEATURE (1): Xaa equals any of the naturally occurring L-amino acids
  MISC_FEATURE (3): Xaa equals any of the naturally occurring L-amino acids
  MISC_FEATURE (9): Xaa equals any of the naturally occurring L-amino acids
  MISC_FEATURE (28): Xaa equals any of the naturally occurring L-amino acids
XSXRSMKAXTPCRVPVRNSRVDPRVREXCGNLPSQRPG

SEQ ID NO: 7577 - protein, 18 aa, Homo sapiens
  MISC_FEATURE (10): Xaa equals any of the naturally occurring L-amino acids
  MISC_FEATURE (12): Xaa equals any of the naturally occurring L-amino acids
  MISC_FEATURE (13): Xaa equals any of the naturally occurring L-amino acids
  MISC_FEATURE (14): Xaa equals any of the naturally occurring L-amino acids
  MISC_FEATURE (17): Xaa equals any of the naturally occurring L-amino acids
DLVWKPPLSXGXXXKLXN

SEQ ID NO: 7578 - protein, 90 aa, Homo sapiens
  MISC_FEATURE (15): Xaa equals any of the naturally occurring L-amino acids
  MISC_FEATURE (35): Xaa equals any of the naturally occurring L-amino acids
  MISC_FEATURE (49): Xaa equals any of the naturally occurring L-amino acids
  MISC_FEATURE (51): Xaa equals any of the naturally occurring L-amino acids
  MISC_FEATURE (52): Xaa equals any of the naturally occurring L-amino acids
  MISC_FEATURE (53): Xaa equals any of the naturally occurring L-amino acids
  MISC_FEATURE (56): Xaa equals any of the naturally occurring L-amino acids
  MISC_FEATURE (59): Xaa equals any of the naturally occurring L-amino acids
  MISC_FEATURE (64): Xaa equals any of the naturally occurring L-amino acids
  MISC_FEATURE (72): Xaa equals any of the naturally occurring L-amino acids
  MISC_FEATURE (73): Xaa equals any of the naturally occurring L-amino acids
  MISC_FEATURE (77): Xaa equals any of the naturally occurring L-amino acids
ICRSISWKPQFFIPXKKAVFRWERKHLRLLTFGFXRKSSQWCSNITRDXLXXXIGXLKXEGSPXQTPSSGQXXSSPXQAKCKKIQLGKHN

SEQ ID NO: 7579 - protein, 66 aa, Homo sapiens
  MISC_FEATURE (1): Xaa equals any of the naturally occurring L-amino acids
  MISC_FEATURE (5): Xaa equals any of the naturally occurring L-amino acids
  MISC_FEATURE (11): Xaa equals any of the naturally occurring L-amino acids
  MISC_FEATURE (13): Xaa equals any of the naturally occurring L-amino acids
  MISC_FEATURE (51): Xaa equals any of the naturally occurring L-amino acids
  MISC_FEATURE (52): Xaa equals any of the naturally occurring L-amino acids
  MISC_FEATURE (57): Xaa equals any of the naturally occurring L-amino acids
  MISC_FEATURE (62): Xaa equals any of the naturally occurring L-amino acids
  MISC_FEATURE (63): Xaa equals any of the naturally occurring L-amino acids
XRRLXVDPLEXTXSWYACRYRSGIPGSTHASGFFRYSSFILHQNLISCNVXXWPRAXPSEDXXEKH

SEQ ID NO: 7580 - protein, 75 aa, Homo sapiens
  MISC_FEATURE (1): Xaa equals any of the naturally occurring L-amino acids
  MISC_FEATURE (2): Xaa equals any of the naturally occurring L-amino acids
  MISC_FEATURE (4): Xaa equals any of the naturally occurring L-amino acids
  MISC_FEATURE (20): Xaa equals any of the naturally occurring L-amino acids
  MISC_FEATURE (50): Xaa equals any of the naturally occurring L-amino acids
  MISC_FEATURE (54): Xaa equals any of the naturally occurring L-amino acids
  MISC_FEATURE (61): Xaa equals any of the naturally occurring L-amino acids
  MISC_FEATURE (66): Xaa equals any of the naturally occurring L-amino acids
XXIXLCHLYLHLPPFTLTNXFLSCAYMYSLFPNTGIITSNNYSILSLSFXDFPXWGEEDYXLYKNXNKIFQTCRI

SEQ ID NO: 7581 - protein, 69 aa, Homo sapiens
NRYNFKATNLTTRSSAGEGQGGQNRGVWLGVGGVKSLHPSSIHYTNILMRYVFIKCLQMFITFGSEFYI

SEQ ID NO: 7582 - protein, 99 aa, Homo sapiens
  MISC_FEATURE (10): Xaa equals any of the naturally occurring L-amino acids
  MISC_FEATURE (26): Xaa equals any of the naturally occurring L-amino acids
  MISC_FEATURE (35): Xaa equals any of the naturally occurring L-amino acids
QLHLLLGKLXRLQVPVRNSRVDPRFXQRGEPVGNXNILLYIYIYIFVQTNRTCRWGSRPWCYLKKKRLCVQMNDKLSASPSAPLQAPAGGPVSKLMQSV

SEQ ID NO: 7583 - protein, 59 aa, Homo sapiens
  MISC_FEATURE (52): Xaa equals any of the naturally occurring L-amino acids
  MISC_FEATURE (59): Xaa equals any of the naturally occurring L-amino acids
GHCSGHPGAGSLVEVRRVNLVKGREDSSLRVSRPCLLGVHFGSLAHPGRTRXWLKAPPX

SEQ ID NO: 7584 - protein, 30 aa, Homo sapiens
  MISC_FEATURE (2): Xaa equals any of the naturally occurring L-amino acids
  MISC_FEATURE (6): Xaa equals any of the naturally occurring L-amino acids
  MISC_FEATURE (15): Xaa equals any of the naturally occurring L-amino acids
  MISC_FEATURE (19): Xaa equals any of the naturally occurring L-amino acids
  MISC_FEATURE (30): Xaa equals any of the naturally occurring L-amino acids
AXKCTXAMGGFSAKXRMIXNSLNLKALTQX

SEQ ID NO: 7585 - protein, 47 aa, Homo sapiens
  MISC_FEATURE (13): Xaa equals any of the naturally occurring L-amino acids
  MISC_FEATURE (17): Xaa equals any of the naturally occurring L-amino acids
  MISC_FEATURE (23): Xaa equals any of the naturally occurring L-amino acids
  MISC_FEATURE (41): Xaa equals any of the naturally occurring L-amino acids
GCPLPCGPSPGDXPVKXSAVTYXGPSPQQQILLLALDLRVXLYPASR

SEQ ID NO: 7586 - protein, 83 aa, Homo sapiens
  MISC_FEATURE (2): Xaa equals any of the naturally occurring L-amino acids
  MISC_FEATURE (29): Xaa equals any of the naturally occurring L-amino acids
  MISC_FEATURE (41): Xaa equals any of the naturally occurring L-amino acids
  MISC_FEATURE (46): Xaa equals any of the naturally occurring L-amino acids
  MISC_FEATURE (57): Xaa equals any of the naturally occurring L-amino acids
HXPSGSQTIRNKRKNFLPLSPRGYGKLLXVHRMGAGVILSXFPSSXHILDHLNIPWXGSKGKSGIGPRRKQPRTLSCNKQDPD

SEQ ID NO: 7587 - protein, 44 aa, Homo sapiens
  MISC_FEATURE (10): Xaa equals any of the naturally occurring L-amino acids
  MISC_FEATURE (12): Xaa equals any of the naturally occurring L-amino acids
  MISC_FEATURE (30): Xaa equals any of the naturally occurring L-amino acids
  MISC_FEATURE (32): Xaa equals any of the naturally occurring L-amino acids
  MISC_FEATURE (44): Xaa equals any of the naturally occurring L-amino acids
RRHRPNQGEXRXTRKQEKTKSEGDRDKHGXKXMDMSIPLTGEEX

SEQ ID NO: 7588 - protein, 34 aa, Homo sapiens
  MISC_FEATURE (1): Xaa equals any of the naturally occurring L-amino acids
  MISC_FEATURE (15): Xaa equals any of the naturally occurring L-amino acids
  MISC_FEATURE (18): Xaa equals any of the naturally occurring L-amino acids
  MISC_FEATURE (19): Xaa equals any of the naturally occurring L-amino acids
  MISC_FEATURE (24): Xaa equals any of the naturally occurring L-amino acids
XLGKKPREATNEVWXPLXXWPPGXPGNKANAGAM

SEQ ID NO: 7589 - protein, 62 aa, Homo sapiens
  MISC_FEATURE (21): Xaa equals any of the naturally occurring L-amino acids
  MISC_FEATURE (32): Xaa equals any of the naturally occurring L-amino acids
  MISC_FEATURE (53): Xaa equals any of the naturally occurring L-amino acids
VKSSLDTLMDTLGRACPKLLXSLILSEATTQXSGKVQKAGIFYLSFLKGFKFXTFLNKGYKG

SEQ ID NO: 7590 - protein, 53 aa, Homo sapiens
GHSPLEAGKAPHQALQFLTQEVADSSASGLPVPAHEALGGEWRLSLFLLALEA

SEQ ID NO: 7591 - protein, 104 aa, Homo sapiens
  MISC_FEATURE (71): Xaa equals any of the naturally occurring L-amino acids
  MISC_FEATURE (87): Xaa equals any of the naturally occurring L-amino acids
  MISC_FEATURE (97): Xaa equals any of the naturally occurring L-amino acids
  MISC_FEATURE (99): Xaa equals any of the naturally occurring L-amino acids
GKAVISRSNVAWGRESPVSCIRSLKNNVEDLDSSPVFAVPCPGVGPALFMVPRRLPQEGLWTEGRSISSLXLFLSKKPGLTSILPLXSQEECPDPLXLXHPFMG

SEQ ID NO: 7592 - protein, 62 aa, Homo sapiens
  MISC_FEATURE (1): Xaa equals any of the naturally occurring L-amino acids
  MISC_FEATURE (4): Xaa equals any of the naturally occurring L-amino acids
  MISC_FEATURE (6): Xaa equals any of the naturally occurring L-amino acids
  MISC_FEATURE (25): Xaa equals any of the naturally occurring L-amino acids
XKSXLXFGGKKKAPGFNRPLGQGGXPRGFPGENFPPGVSGTPNGPFPAFPAGITKFKGNGAW

SEQ ID NO: 7593 - protein, 80 aa, Homo sapiens
  MISC_FEATURE (1): Xaa equals any of the naturally occurring L-amino acids
  MISC_FEATURE (5): Xaa equals any of the naturally occurring L-amino acids
  MISC_FEATURE (69): Xaa equals any of the naturally occurring L-amino acids
  MISC_FEATURE (70): Xaa equals any of the naturally occurring L-amino acids
XSQAXGYLEEEGPWVTCRAGSGLAAPRAAHLGWGTARVSRTWRAVVPVVRVRIEGLGGSRGEPALSPAXXTPDHGGLGPG

SEQ ID NO: 7594 - protein, 87 aa, Homo sapiens
  MISC_FEATURE (1): Xaa equals any of the naturally occurring L-amino acids
  MISC_FEATURE (2): Xaa equals any of the naturally occurring L-amino acids
  MISC_FEATURE (57): Xaa equals any of the naturally occurring L-amino acids
  MISC_FEATURE (64): Xaa equals any of the naturally occurring L-amino acids
  MISC_FEATURE (68): Xaa equals any of the naturally occurring L-amino acids
  MISC_FEATURE (72): Xaa equals any of the naturally occurring L-amino acids
XXILASACGAGGTRFPPPRGSASGLVLSPAAPCRRSHRSSYRREWRADQGAAGLPSXIHVSLRXRGPXEPAXMPLGLKPTCSRMQDH

SEQ ID NO: 7595 - protein, 80 aa, Homo sapiens
  MISC_FEATURE (27): Xaa equals any of the naturally occurring L-amino acids
  MISC_FEATURE (35): Xaa equals any of the naturally occurring L-amino acids
  MISC_FEATURE (41): Xaa equals any of the naturally occurring L-amino acids
  MISC_FEATURE (48): Xaa equals any of the naturally occurring L-amino acids
  MISC_FEATURE (69): Xaa equals any of the naturally occurring L-amino acids
TFQVFLNLSMLSLNLLQGFYNCRHVSXYRREAVFXSCIFLXFQKLQMXIISFKHCLNSNWKITAVSPTXAFPLLQEENDY

SEQ ID NO: 7596 - protein, 23 aa, Homo sapiens
  MISC_FEATURE (5): Xaa equals any of the naturally occurring L-amino acids
  MISC_FEATURE (18): Xaa equals any of the naturally occurring L-amino acids
  MISC_FEATURE (19): Xaa equals any of the naturally occurring L-amino acids
GFELXPCLLVGWPRIKGXXWPFK

SEQ ID NO: 7597 - protein, 104 aa, Homo sapiens
  MISC_FEATURE (69): Xaa equals any of the naturally occurring L-amino acids
  MISC_FEATURE (70): Xaa equals any of the naturally occurring L-amino acids
  MISC_FEATURE (72): Xaa equals any of the naturally occurring L-amino acids
  MISC_FEATURE (85): Xaa equals any of the naturally occurring L-amino acids
  MISC_FEATURE (96): Xaa equals any of the naturally occurring L-amino acids
  MISC_FEATURE (100): Xaa equals any of the naturally occurring L-amino acids
GSRAPCSPRVLPWVSPCQVFRECPPTPAPFCVAPATSVLWDTGLSPSSRVLVCLSVPWTCPQGPRLWLXXPXRLAAETPCARPAXGSFKECVGNCXTCIXGTGR

SEQ ID NO: 7598 - protein, 65 aa, Homo sapiens
  MISC_FEATURE (1): Xaa equals any of the naturally occurring L-amino acids
  MISC_FEATURE (13): Xaa equals any of the naturally occurring L-amino acids
  MISC_FEATURE (18): Xaa equals any of the naturally occurring L-amino acids
  MISC_FEATURE (20): Xaa equals any of the naturally occurring L-amino acids
  MISC_FEATURE (21): Xaa equals any of the naturally occurring L-amino acids
  MISC_FEATURE (23): Xaa equals any of the naturally occurring L-amino acids
  MISC_FEATURE (24): Xaa equals any of the naturally occurring L-amino acids
  MISC_FEATURE (27): Xaa equals any of the naturally occurring L-amino acids
  MISC_FEATURE (38): Xaa equals any of the naturally occurring L-amino acids
  MISC_FEATURE (40): Xaa equals any of the naturally occurring L-amino acids
  MISC_FEATURE (52): Xaa equals any of the naturally occurring L-amino acids
  MISC_FEATURE (55): Xaa equals any of the naturally occurring L-amino acids
  MISC_FEATURE (56): Xaa equals any of the naturally occurring L-amino acids
  MISC_FEATURE (61): Xaa equals any of the naturally occurring L-amino acids
  MISC_FEATURE (65): Xaa equals any of the naturally occurring L-amino acids
XLRIKGSGVRWIXAIMLXKXXLXXLAXKSTGHFIGTFXEXMIVCEILTHPHXQNXXCPWIXCTGX

SEQ ID NO: 7599 - protein, 53 aa, Homo sapiens
LLIGRFSFYSSTEKKIIVIIIRQCSVVLQSIIVSVLFCFLRCLENGECVTVSN

SEQ ID NO: 7600 - protein, 63 aa, Homo sapiens
NVLVLFLSLDFMYFEPQILSSSDLKILSYTQSPLTFLWDCLIYEKSLEKSLIETFRFRNTCTI

SEQ ID NO: 7601 - protein, 174 aa, Homo sapiens
  MISC_FEATURE (2): Xaa equals any of the naturally occurring L-amino acids
  MISC_FEATURE (119): Xaa equals any of the naturally occurring L-amino acids
  MISC_FEATURE (160): Xaa equals any of the naturally occurring L-amino acids
  MISC_FEATURE (161): Xaa equals any of the naturally occurring L-amino acids
  MISC_FEATURE (169): Xaa equals any of the naturally occurring L-amino acids
  MISC_FEATURE (173): Xaa equals any of the naturally occurring L-amino acids
AXRQLLVDSVTDSVLGPNGDVTGTPHTSPDGRFIVSAAADSPWLHVQEITVRGEIQTLYDLQINSGISDLAFQRSFTESNQYNIYAALHTEPDLLFLELSTGKVGMLKNLKEPPAGPAXPWGGTHRIMRDSGLFGQYLLHQPESHCSSSMGDKNTLRCEXXRYKGGGPXWCWXG

SEQ ID NO: 7602 - protein, 22 aa, Homo sapiens
  MISC_FEATURE (12): Xaa equals any of the naturally occurring L-amino acids
  MISC_FEATURE (14): Xaa equals any of the naturally occurring L-amino acids
  MISC_FEATURE (19): Xaa equals any of the naturally occurring L-amino acids
  MISC_FEATURE (21): Xaa equals any of the naturally occurring L-amino acids
GEDDEEDTGVCXLXPFDLXYXD

SEQ ID NO: 7603 - protein, 60 aa, Homo sapiens
  MISC_FEATURE (42): Xaa equals any of the naturally occurring L-amino acids
ILHFFLLGNIICGRRQPHFICPYSCGSSICFLPECSLGLLKXHESNLEVSLSNKAVFLPF

SEQ ID NO: 7604 - protein, 17 aa, Homo sapiens
  MISC_FEATURE (1): Xaa equals any of the naturally occurring L-amino acids
  MISC_FEATURE (2): Xaa equals any of the naturally occurring L-amino acids
  MISC_FEATURE (11): Xaa equals any of the naturally occurring L-amino acids
XXLEANPEGRXENSWIS

SEQ ID NO: 7605 - protein, 105 aa, Homo sapiens
KSYGGGSNPDSESNSRCWNWAGPVSSLALNFNPFNKGLGKMISEVLSISVQLSLEGQVLDTQTDDGTAQHQAQPLVGSVCAAALVLNNNNTMVPLTEIYGALFRP

SEQ ID NO: 7606 - protein, 35 aa, Homo sapiens
  MISC_FEATURE (7): Xaa equals any of the naturally occurring L-amino acids
  MISC_FEATURE (10): Xaa equals any of the naturally occurring L-amino acids
  MISC_FEATURE (12): Xaa equals any of the naturally occurring L-amino acids
  MISC_FEATURE (29): Xaa equals any of the naturally occurring L-amino acids
TNYRALXSVXAXSYGSPDGQQRRSASMRXLGALVP

SEQ ID NO: 7607 - protein, 30 aa, Homo sapiens
  MISC_FEATURE (9): Xaa equals any of the naturally occurring L-amino acids
  MISC_FEATURE (14): Xaa equals any of the naturally occurring L-amino acids
  MISC_FEATURE (26): Xaa equals any of the naturally occurring L-amino acids
CFTYSQNCXDKHTXIIVATPWEIAGXILLR

SEQ ID NO: 7608 - protein, 131 aa, Homo sapiens
  MISC_FEATURE (100): Xaa equals any of the naturally occurring L-amino acids
  MISC_FEATURE (114): Xaa equals any of the naturally occurring L-amino acids
  MISC_FEATURE (121): Xaa equals any of the naturally occurring L-amino acids
PRWCCLAPGRIPVLAASRGLGCRLAGAHAAIPFAAIRVTCIGSCGVSNKANDTAWVVEEGYFNSSLSLADKGSLPAGEHSFPFQFLLPATAPTSFEGPFXKIVHQVKAAIQTPXFSKDHKXKPRGLYLEPL

SEQ ID NO: 7609 - protein, 76 aa, Homo sapiens
  MISC_FEATURE (62): Xaa equals any of the naturally occurring L-amino acids
  MISC_FEATURE (64): Xaa equals any of the naturally occurring L-amino acids
  MISC_FEATURE (67): Xaa equals any of the naturally occurring L-amino acids
  MISC_FEATURE (75): Xaa equals any of the naturally occurring L-amino acids
  MISC_FEATURE (76): Xaa equals any of the naturally occurring L-amino acids
PDCCFKQPGSLPSHWAGTPSWALQPCPLAHTMDRALISPWDGVPQGGEGCHLGWMDDSTVPXLXALXKSKLMGQXX

SEQ ID NO: 7610 - protein, 62 aa, Homo sapiens
  MISC_FEATURE (27): Xaa equals any of the naturally occurring L-amino acids
  MISC_FEATURE (54): Xaa equals any of the naturally occurring L-amino acids
  MISC_FEATURE (56): Xaa equals any of the naturally occurring L-amino acids
  MISC_FEATURE (57): Xaa equals any of the naturally occurring L-amino acids
GCTAGKSLSKLLAWSPVSSPPRGSSPXFTFPFSLSCAECPTPALFPFWVSLLGXGXXVSPTG

SEQ ID NO: 7611 - protein, 99 aa, Homo sapiens
  MISC_FEATURE (11): Xaa equals any of the naturally occurring L-amino acids
  MISC_FEATURE (44): Xaa equals any of the naturally occurring L-amino acids
  MISC_FEATURE (45): Xaa equals any of the naturally occurring L-amino acids
  MISC_FEATURE (46): Xaa equals any of the naturally occurring L-amino acids
  MISC_FEATURE (49): Xaa equals any of the naturally occurring L-amino acids
  MISC_FEATURE (50): Xaa equals any of the naturally occurring L-amino acids
  MISC_FEATURE (55): Xaa equals any of the naturally occurring L-amino acids
  MISC_FEATURE (57): Xaa equals any of the naturally occurring L-amino acids
  MISC_FEATURE (62): Xaa equals any of the naturally occurring L-amino acids
  MISC_FEATURE (63): Xaa equals any of the naturally occurring L-amino acids
  MISC_FEATURE (67): Xaa equals any of the naturally occurring L-amino acids
  MISC_FEATURE (77): Xaa equals any of the naturally occurring L-amino acids
  MISC_FEATURE (79): Xaa equals any of the naturally occurring L-amino acids
  MISC_FEATURE (90): Xaa equals any of the naturally occurring L-amino acids
SSDPIHPSAVXTHQRGAALTLPMQLGRGERRRHSKLKLFAVSSXXXKPXXSSPNXGXKAKSXXRLQXRGKAPSAPEXPXVLGLGGTLQHXLLWTPEGRI

SEQ ID NO: 7612 - protein, 114 aa, Homo sapiens
  MISC_FEATURE (113): Xaa equals any of the naturally occurring L-amino acids
PASCPTGSPAVPVHLPAHPGTCPHCLLPALCGRTEAKRRSLELWSHGNGSLPTTHACPAFLHALKRGEWNLLGPGNAPLLRHSLHYSLASSVGNSLPIGVPRQTHRESWQNFXF

SEQ ID NO: 7613 - protein, 39 aa, Homo sapiens
  MISC_FEATURE (15): Xaa equals any of the naturally occurring L-amino acids
  MISC_FEATURE (17): Xaa equals any of the naturally occurring L-amino acids
  MISC_FEATURE (18): Xaa equals any of the naturally occurring L-amino acids
WTDYGTLRLACTGSXHXXENRSLALPLPVAGLTACPPAC

SEQ ID NO: 7614 - protein, 29 aa, Homo sapiens
  MISC_FEATURE (16): Xaa equals any of the naturally occurring L-amino acids
  MISC_FEATURE (23): Xaa equals any of the naturally occurring L-amino acids
  MISC_FEATURE (24): Xaa equals any of the naturally occurring L-amino acids
  MISC_FEATURE (26): Xaa equals any of the naturally occurring L-amino acids
  MISC_FEATURE (27): Xaa equals any of the naturally occurring L-amino acids
TYHLAFLLALMNLNFXPNVDALXXLXXEP

SEQ ID NO: 7615 - protein, 22 aa, Homo sapiens
  MISC_FEATURE (9): Xaa equals any of the naturally occurring L-amino acids
  MISC_FEATURE (14): Xaa equals any of the naturally occurring L-amino acids
  MISC_FEATURE (18): Xaa equals any of the naturally occurring L-amino acids
  MISC_FEATURE (19): Xaa equals any of the naturally occurring L-amino acids
ASSRSRAAXISLGXFYNXXFWG

SEQ ID NO: 7616 - protein, 64 aa, Homo sapiens
AGLTAPSMGPILYLVLSWSKGHLQCHKYPYIRKKMISYQLALTNVLLIEQPTHSVDYVNLSGLL

SEQ ID NO: 7617 - protein, 56 aa, Homo sapiens
  MISC_FEATURE (5): Xaa equals any of the naturally occurring L-amino acids
  MISC_FEATURE (12): Xaa equals any of the naturally occurring L-amino acids
  MISC_FEATURE (25): Xaa equals any of the naturally occurring L-amino acids
  MISC_FEATURE (32): Xaa equals any of the naturally occurring L-amino acids
  MISC_FEATURE (33): Xaa equals any of the naturally occurring L-amino acids
  MISC_FEATURE (37): Xaa equals any of the naturally occurring L-amino acids
  MISC_FEATURE (44): Xaa equals any of the naturally occurring L-amino acids
  MISC_FEATURE (45): Xaa equals any of the naturally occurring L-amino acids
  MISC_FEATURE (46): Xaa equals any of the naturally occurring L-amino acids
  MISC_FEATURE (49): Xaa equals any of the naturally occurring L-amino acids
  MISC_FEATURE (50): Xaa equals any of the naturally occurring L-amino acids
  MISC_FEATURE (51): Xaa equals any of the naturally occurring L-amino acids
  MISC_FEATURE (54): Xaa equals any of the naturally occurring L-amino acids
GHACXIFGISHXNYFRLEQVATQLXTELHQRXXTWMXRDLASVXXXQQXXXWIXLS

SEQ ID NO: 7618 - protein, 92 aa, Homo sapiens
  MISC_FEATURE (3): Xaa equals any of the naturally occurring L-amino acids
  MISC_FEATURE (14): Xaa equals any of the naturally occurring L-amino acids
  MISC_FEATURE (23): Xaa equals any of the naturally occurring L-amino acids
  MISC_FEATURE (27): Xaa equals any of the naturally occurring L-amino acids
  MISC_FEATURE (51): Xaa equals any of the naturally occurring L-amino acids
  MISC_FEATURE (69): Xaa equals any of the naturally occurring L-amino acids
SFXLINLLPINAVXPTSSQQIPXRETXEANKERRKMTSKSSESNIYSPLTXFITADSELHDIIKDLEDXLMVGLHTCGDLGSKYFANIYLQL

SEQ ID NO: 7619 - protein, 58 aa, Homo sapiens
  MISC_FEATURE (7): Xaa equals any of the naturally occurring L-amino acids
  MISC_FEATURE (19): Xaa equals any of the naturally occurring L-amino acids
  MISC_FEATURE (39): Xaa equals any of the naturally occurring L-amino acids
  MISC_FEATURE (50): Xaa equals any of the naturally occurring L-amino acids
  MISC_FEATURE (56): Xaa equals any of the naturally occurring L-amino acids
PKHINLXTDLTSDQGQDPXWEVILDYTSLLWSGCKHCSXSECGFTLNHPXYTGLIXCL

SEQ ID NO: 7620 - protein, 15 aa, Homo sapiens
  MISC_FEATURE (3): Xaa equals any of the naturally occurring L-amino acids
  MISC_FEATURE (5): Xaa equals any of the naturally occurring L-amino acids
  MISC_FEATURE (7): Xaa equals any of the naturally occurring L-amino acids
LWXHXHXKNIAWKKK

SEQ ID NO: 7621 - protein, 79 aa, Homo sapiens
  MISC_FEATURE (9): Xaa equals any of the naturally occurring L-amino acids
  MISC_FEATURE (36): Xaa equals any of the naturally occurring L-amino acids
  MISC_FEATURE (41): Xaa equals any of the naturally occurring L-amino acids
  MISC_FEATURE (64): Xaa equals any of the naturally occurring L-amino acids
  MISC_FEATURE (77): Xaa equals any of the naturally occurring L-amino acids
SVTEGRLCXVSCIFLFFQKLQMFIISFKHCLNSNWXITAVXRRGLSLYFMRRMTTNLEERSYYXTQDHQSMCRTLSXLI

SEQ ID NO: 7622 - protein, 28 aa, Homo sapiens
  MISC_FEATURE (15): Xaa equals any of the naturally occurring L-amino acids
  MISC_FEATURE (19): Xaa equals any of the naturally occurring L-amino acids
  MISC_FEATURE (20): Xaa equals any of the naturally occurring L-amino acids
  MISC_FEATURE (21): Xaa equals any of the naturally occurring L-amino acids
RGSDFLVTWESHDLXPDSXXXLWVINIG

SEQ ID NO: 7623 - protein, 82 aa, Homo sapiens
  MISC_FEATURE (71): Xaa equals any of the naturally occurring L-amino acids
  MISC_FEATURE (74): Xaa equals any of the naturally occurring L-amino acids
  MISC_FEATURE (75): Xaa equals any of the naturally occurring L-amino acids
GTVDPAPGTASVLLAAHGRERGAAARRSRMPPGPEVLQRPGRGRPRLGGRRTSGEEAQERWRLGAAREAAXAEXXAAHGLFG

SEQ ID NO: 7624 - protein, 20 aa, Homo sapiens
  MISC_FEATURE (3): Xaa equals any of the naturally occurring L-amino acids
  MISC_FEATURE (11): Xaa equals any of the naturally occurring L-amino acids
  MISC_FEATURE (18): Xaa equals any of the naturally occurring L-amino acids
DMXTQLDTPGXWQFPDPXMI

SEQ ID NO: 7625 - protein, 74 aa, Homo sapiens
  MISC_FEATURE (4): Xaa equals any of the naturally occurring L-amino acids
  MISC_FEATURE (20): Xaa equals any of the naturally occurring L-amino acids
  MISC_FEATURE (27): Xaa equals any of the naturally occurring L-amino acids
  MISC_FEATURE (30): Xaa equals any of the naturally occurring L-amino acids
  MISC_FEATURE (45): Xaa equals any of the naturally occurring L-amino acids
  MISC_FEATURE (51): Xaa equals any of the naturally occurring L-amino acids
  MISC_FEATURE (64): Xaa equals any of the naturally occurring L-amino acids
  MISC_FEATURE (72): Xaa equals any of the naturally occurring L-amino acids
VYAXTPCRYRSGIPGSTHAXEVRWALXTLXITTSRKDEVRDLVLXFGMPLXLDSQSCRLGKMLXLSWSASCXIQ

SEQ ID NO: 7626 - protein, 55 aa, Homo sapiens
  MISC_FEATURE (2): Xaa equals any of the naturally occurring L-amino acids
  MISC_FEATURE (4): Xaa equals any of the naturally occurring L-amino acids
  MISC_FEATURE (7): Xaa equals any of the naturally occurring L-amino acids
  MISC_FEATURE (12): Xaa equals any of the naturally occurring L-amino acids
  MISC_FEATURE (26): Xaa equals any of the naturally occurring L-amino acids
  MISC_FEATURE (49): Xaa equals any of the naturally occurring L-amino acids
  MISC_FEATURE (51): Xaa equals any of the naturally occurring L-amino acids
RXGXEWXLKGGXKISLGGLLTGLYSXSKGICDHVWGGTGETHGVLEALXAXDGRA

SEQ ID NO: 7627 - protein, 52 aa, Homo sapiens
  MISC_FEATURE (6): Xaa equals any of the naturally occurring L-amino acids
  MISC_FEATURE (13): Xaa equals any of the naturally occurring L-amino acids
  MISC_FEATURE (27): Xaa equals any of the naturally occurring L-amino acids
  MISC_FEATURE (45): Xaa equals any of the naturally occurring L-amino acids
  MISC_FEATURE (46): Xaa equals any of the naturally occurring L-amino acids
  MISC_FEATURE (52): Xaa equals any of the naturally occurring L-amino acids
WYATNXKLITWLXLQFNGTTILFPWWXLTLPNQQTHSCQDRKQKXXKPVIRX

SEQ ID NO: 7628 - protein, 50 aa, Homo sapiens
  MISC_FEATURE (1): Xaa equals any of the naturally occurring L-amino acids
  MISC_FEATURE (3): Xaa equals any of the naturally occurring L-amino acids
  MISC_FEATURE (4): Xaa equals any of the naturally occurring L-amino acids
  MISC_FEATURE (14): Xaa equals any of the naturally occurring L-amino acids
  MISC_FEATURE (44): Xaa equals any of the naturally occurring L-amino acids
  MISC_FEATURE (47): Xaa equals any of the naturally occurring L-amino acids
  MISC_FEATURE (48): Xaa equals any of the naturally occurring L-amino acids
XPXXLANSQRFKGXKGPRRPPGSGIPGSTHASGCAREWVWRPGXGRXXTH

SEQ ID NO: 7629 - protein, 50 aa, Homo sapiens
INNSVNVYIVNNCIALGWNRDARRYRTMWNSEKGALKNEILLFLPGESRC

SEQ ID NO: 7630 - protein, 57 aa, Homo sapiens
  MISC_FEATURE (20): Xaa equals any of the naturally occurring L-amino acids
  MISC_FEATURE (25): Xaa equals any of the naturally occurring L-amino acids
  MISC_FEATURE (33): Xaa equals any of the naturally occurring L-amino acids
  MISC_FEATURE (38): Xaa equals any of the naturally occurring L-amino acids
  MISC_FEATURE (39): Xaa equals any of the naturally occurring L-amino acids
PLLICSLRETRLPNAKMVNXQLEEXDQDVCLRXKGEEXXVGSMFASDIEGERNKNYK

SEQ ID NO: 7631 - protein, 43 aa, Homo sapiens
  MISC_FEATURE (2): Xaa equals any of the naturally occurring L-amino acids
  MISC_FEATURE (13): Xaa equals any of the naturally occurring L-amino acids
QXIDLEGYKINNXAEWCLQVFTVDSELRCEGMRRHRWVWKPPA

SEQ ID NO: 7632 - protein, 34 aa, Homo sapiens
  MISC_FEATURE (5): Xaa equals any of the naturally occurring L-amino acids
  MISC_FEATURE (9): Xaa equals any of the naturally occurring L-amino acids
  MISC_FEATURE (25): Xaa equals any of the naturally occurring L-amino acids
  MISC_FEATURE (31): Xaa equals any of the naturally occurring L-amino acids
GKDDXSILXTLRPTADREEGECGGXEEGGRXAGG

SEQ ID NO: 7633 - protein, 38 aa, Homo sapiens
  MISC_FEATURE (2): Xaa equals any of the naturally occurring L-amino acids
  MISC_FEATURE (11): Xaa equals any of the naturally occurring L-amino acids
  MISC_FEATURE (12): Xaa equals any of the naturally occurring L-amino acids
  MISC_FEATURE (16): Xaa equals any of the naturally occurring L-amino acids
  MISC_FEATURE (34): Xaa equals any of the naturally occurring L-amino acids
  MISC_FEATURE (35): Xaa equals any of the naturally occurring L-amino acids
  MISC_FEATURE (37): Xaa equals any of the naturally occurring L-amino acids
  MISC_FEATURE (38): Xaa equals any of the naturally occurring L-amino acids
TXTHGSITAIXXAHHXSTELNVYTVDPEISTGHXXQXX

SEQ ID NO: 7634 - protein, 44 aa, Homo sapiens
LVTLTPTPQPLVLGTLIPTLGPLPLGSSNGWTAGLWSGWSIAVA

SEQ ID NO: 7635 - protein, 33 aa, Homo sapiens
  MISC_FEATURE (2): Xaa equals any of the naturally occurring L-amino acids
  MISC_FEATURE (8): Xaa equals any of the naturally occurring L-amino acids
  MISC_FEATURE (15): Xaa equals any of the naturally occurring L-amino acids
  MISC_FEATURE (23): Xaa equals any of the naturally occurring L-amino acids
CXWANPHXESRGKGXHLSPRGGXSQSWVEKTPL

SEQ ID NO: 7636 - protein, 23 aa, Homo sapiens
  MISC_FEATURE (3): Xaa equals any of the naturally occurring L-amino acids
  MISC_FEATURE (5): Xaa equals any of the naturally occurring L-amino acids
  MISC_FEATURE (13): Xaa equals any of the naturally occurring L-amino acids
  MISC_FEATURE (18): Xaa equals any of the naturally occurring L-amino acids
  MISC_FEATURE (19): Xaa equals any of the naturally occurring L-amino acids
NLXLXLDCLDVLXPLGHXXIIEQ

SEQ ID NO: 7637 - protein, 99 aa, Homo sapiens
  MISC_FEATURE (48): Xaa equals any of the naturally occurring L-amino acids
  MISC_FEATURE (79): Xaa equals any of the naturally occurring L-amino acids
VTSFSSNFFIQENMVIYYKCLYLSLSGLWIILHIATEIWEFLLHTAEXIQSAARSCHPEHRRLLCSSLGTGPHGHRSSXKGRKGGVKPKFKPGIFNFSP

SEQ ID NO: 7638 - protein, 72 aa, Homo sapiens
  MISC_FEATURE (1): Xaa equals any of the naturally occurring L-amino acids
  MISC_FEATURE (3): Xaa equals any of the naturally occurring L-amino acids
  MISC_FEATURE (7): Xaa equals any of the naturally occurring L-amino acids
  MISC_FEATURE (17): Xaa equals any of the naturally occurring L-amino acids
  MISC_FEATURE (22): Xaa equals any of the naturally occurring L-amino acids
  MISC_FEATURE (58): Xaa equals any of the naturally occurring L-amino acids
  MISC_FEATURE (62): Xaa equals any of the naturally occurring L-amino acids
XEXACFXPWVGRLQHKXKTNSXQAFLKRLIMCIKVQHRRVPLNLPCFCFFRFAIPLLXGLYXVAVIKCPKQG

SEQ ID NO: 7639 - protein, 19 aa, Homo sapiens
  MISC_FEATURE (12): Xaa equals any of the naturally occurring L-amino acids
  MISC_FEATURE (13): Xaa equals any of the naturally occurring L-amino acids
  MISC_FEATURE (15): Xaa equals any of the naturally occurring L-amino acids
  MISC_FEATURE (18): Xaa equals any of the naturally occurring L-amino acids
  MISC_FEATURE (19): Xaa equals any of the naturally occurring L-amino acids
DNTCLLKSVAIXXAXIWXX

SEQ ID NO: 7640 - protein, 13 aa, Homo sapiens
  MISC_FEATURE (2): Xaa equals any of the naturally occurring L-amino acids
  MISC_FEATURE (4): Xaa equals any of the naturally occurring L-amino acids
  MISC_FEATURE (5): Xaa equals any of the naturally occurring L-amino acids
AXLXXLNQILNKE

SEQ ID NO: 7641 - protein, 75 aa, Homo sapiens
LKVVPGYAHTVGQKHRQICSISKHVGAEFHLFQVNICVSMPDSQPWTCTSAITWPWMDEGGWHVNRNWTRETTKE

SEQ ID NO: 7642 - protein, 74 aa, Homo sapiens
  MISC_FEATURE (49): Xaa equals any of the naturally occurring L-amino acids
  MISC_FEATURE (54): Xaa equals any of the naturally occurring L-amino acids
IYPLFIQSMLSRSFNSNFTTVSSFHCGSSRDLHGSQGSLALSVADRRGXGGHIXRVSTYTRPILLACRRENPKF

SEQ ID NO: 7643 - protein, 71 aa, Homo sapiens
  MISC_FEATURE (8): Xaa equals any of the naturally occurring L-amino acids
  MISC_FEATURE (14): Xaa equals any of the naturally occurring L-amino acids
  MISC_FEATURE (25): Xaa equals any of the naturally occurring L-amino acids
  MISC_FEATURE (30): Xaa equals any of the naturally occurring L-amino acids
  MISC_FEATURE (40): Xaa equals any of the naturally occurring L-amino acids
  MISC_FEATURE (43): Xaa equals any of the naturally occurring L-amino acids
  MISC_FEATURE (44): Xaa equals any of the naturally occurring L-amino acids
  MISC_FEATURE (47): Xaa equals any of the naturally occurring L-amino acids
  MISC_FEATURE (48): Xaa equals any of the naturally occurring L-amino acids
  MISC_FEATURE (49): Xaa equals any of the naturally occurring L-amino acids
  MISC_FEATURE (55): Xaa equals any of the naturally occurring L-amino acids
  MISC_FEATURE (60): Xaa equals any of the naturally occurring L-amino acids
  MISC_FEATURE (63): Xaa equals any of the naturally occurring L-amino acids
  MISC_FEATURE (66): Xaa equals any of the naturally occurring L-amino acids
  MISC_FEATURE (69): Xaa equals any of the naturally occurring L-amino acids
  MISC_FEATURE (70): Xaa equals any of the naturally occurring L-amino acids
  MISC_FEATURE (71): Xaa equals any of the naturally occurring L-amino acids
KHKCSMSXLKIYHXFVTFIWSISSXTYISXILKKKWTGPXNAXXPCXXXFTHTCXGDAVXAEXWSXNWXXX

SEQ ID NO: 7644 - protein, 65 aa, Homo sapiens
  MISC_FEATURE (6): Xaa equals any of the naturally occurring L-amino acids
KIKLLXFRFFSVPKMEVKSYTKNNTIAPKKASHRILSDTSDEEDASVTVGTGEKLRLLAHTDIAW

SEQ ID NO: 7645 - protein, 33 aa, Homo sapiens
  MISC_FEATURE (6): Xaa equals any of the naturally occurring L-amino acids
  MISC_FEATURE (20): Xaa equals any of the naturally occurring L-amino acids
  MISC_FEATURE (22): Xaa equals any of the naturally occurring L-amino acids
  MISC_FEATURE (26): Xaa equals any of the naturally occurring L-amino acids
NIPGQXDALLKVTLSFGRAXLXPQTXEYLGQQA

SEQ ID NO: 7646 - protein, 29 aa, Homo sapiens
  MISC_FEATURE (27): Xaa equals any of the naturally occurring L-amino acids
  MISC_FEATURE (28): Xaa equals any of the naturally occurring L-amino acids
  MISC_FEATURE (29): Xaa equals any of the naturally occurring L-amino acids
LVLDREQPPTGSLVFIYNKIVGDTSKXXX

SEQ ID NO: 7647 - protein, 86 aa, Homo sapiens
  MISC_FEATURE (76): Xaa equals any of the naturally occurring L-amino acids
  MISC_FEATURE (82): Xaa equals any of the naturally occurring L-amino acids
  MISC_FEATURE (83): Xaa equals any of the naturally occurring L-amino acids
TCRRFQPRPRCLLSADGKVFLNLWFIPHSSEVLVMFKTLPEKAAFKALKRTLQLIAPLHDIVAYLVSFAKLGNCPXCFEFLXXPTL

SEQ ID NO: 7648 - protein, 36 aa, Homo sapiens
  MISC_FEATURE (23): Xaa equals any of the naturally occurring L-amino acids
  MISC_FEATURE (34): Xaa equals any of the naturally occurring L-amino acids
  MISC_FEATURE (36): Xaa equals any of the naturally occurring L-amino acids
NVRTRSPIAGSTHASVSPLLLTXFNTEQNSGAKXGX

SEQ ID NO: 7649 - protein, 49 aa, Homo sapiens
  MISC_FEATURE (1): Xaa equals any of the naturally occurring L-amino acids
  MISC_FEATURE (8): Xaa equals any of the naturally occurring L-amino acids
  MISC_FEATURE (19): Xaa equals any of the naturally occurring L-amino acids
  MISC_FEATURE (37): Xaa equals any of the naturally occurring L-amino acids
  MISC_FEATURE (41): Xaa equals any of the naturally occurring L-amino acids
  MISC_FEATURE (48): Xaa equals any of the naturally occurring L-amino acids
  MISC_FEATURE (49): Xaa equals any of the naturally occurring L-amino acids
XRHGHGLXTLPVYVAEGAXGTAPPGNCRPSQKLLKFXNKHXIWRSQSXX

SEQ ID NO: 7650 - protein, 21 aa, Homo sapiens
  MISC_FEATURE (15): Xaa equals any of the naturally occurring L-amino acids
  MISC_FEATURE (18): Xaa equals any of the naturally occurring L-amino acids
  MISC_FEATURE (19): Xaa equals any of the naturally occurring L-amino acids
LLRCNPATIAAGLHXKRXXSK

SEQ ID NO: 7651 - protein, 29 aa, Homo sapiens
  MISC_FEATURE (20): Xaa equals any of the naturally occurring L-amino acids
  MISC_FEATURE (26): Xaa equals any of the naturally occurring L-amino acids
  MISC_FEATURE (27): Xaa equals any of the naturally occurring L-amino acids
  MISC_FEATURE (28): Xaa equals any of the naturally occurring L-amino acids
GKNGRTYQTIKREIPFEPLXLLKPEXXXF

SEQ ID NO: 7652 - protein, 54 aa, Homo sapiens
LGLIQTLGTKSIDWSSWVEGCLLLLNPGSEEDWVAHCVSFTMVTTFPFLTSLLS

SEQ ID NO: 7653 - protein, 83 aa, Homo sapiens
  MISC_FEATURE (59): Xaa equals any of the naturally occurring L-amino acids
  MISC_FEATURE (72): Xaa equals any of the naturally occurring L-amino acids
  MISC_FEATURE (80): Xaa equals any of the naturally occurring L-amino acids
VYGSKKILKNYQKVHKNLTNSHVIRLNVLREPAVFHTPCNLMVIAPQQDKWVTRQSSSXLVGKCQYQHTFKXFYVNLQIXPGL

SEQ ID NO: 7654 - protein, 17 aa, Homo sapiens
  MISC_FEATURE (1): Xaa equals any of the naturally occurring L-amino acids
  MISC_FEATURE (2): Xaa equals any of the naturally occurring L-amino acids
  MISC_FEATURE (5): Xaa equals any of the naturally occurring L-amino acids
  MISC_FEATURE (14): Xaa equals any of the naturally occurring L-amino acids
  MISC_FEATURE (15): Xaa equals any of the naturally occurring L-amino acids
XXACXDSRAHKLVXXEP

SEQ ID NO: 7655 - protein, 11 aa, Homo sapiens
  MISC_FEATURE (3): Xaa equals any of the naturally occurring L-amino acids
  MISC_FEATURE (10): Xaa equals any of the naturally occurring L-amino acids
EIXYINKYKXR

SEQ ID NO: 7656 - protein, 33 aa, Homo sapiens
  MISC_FEATURE (2): Xaa equals any of the naturally occurring L-amino acids
  MISC_FEATURE (8): Xaa equals any of the naturally occurring L-amino acids
  MISC_FEATURE (16): Xaa equals any of the naturally occurring L-amino acids
  MISC_FEATURE (24): Xaa equals any of the naturally occurring L-amino acids
  MISC_FEATURE (31): Xaa equals any of the naturally occurring L-amino acids
PXDRDAQXAVPGFVKXHCIGSNSXTRGVSKXGK

SEQ ID NO: 7657 - protein, 27 aa, Homo sapiens
  MISC_FEATURE (10): Xaa equals any of the naturally occurring L-amino acids
  MISC_FEATURE (22): Xaa equals any of the naturally occurring L-amino acids
  MISC_FEATURE (24): Xaa equals any of the naturally occurring L-amino acids
VGCSDDFGFXSKNDGSHTVIPXPXCCT

SEQ ID NO: 7658 - protein, 30 aa, Homo sapiens
  MISC_FEATURE (15): Xaa equals any of the naturally occurring L-amino acids
  MISC_FEATURE (26): Xaa equals any of the naturally occurring L-amino acids
  MISC_FEATURE (29): Xaa equals any of the naturally occurring L-amino acids
  MISC_FEATURE (30): Xaa equals any of the naturally occurring L-amino acids
GDLTVWDDKMRCLHXEKAHDLGITCXDFXX

SEQ ID NO: 7659 - protein, 18 aa, Homo sapiens
  MISC_FEATURE (12): Xaa equals any of the naturally occurring L-amino acids
  MISC_FEATURE (18): Xaa equals any of the naturally occurring L-amino acids
GNKGNCLWLESXLGVNTX

SEQ ID NO: 7660 - protein, 28 aa, Homo sapiens
  MISC_FEATURE (13): Xaa equals any of the naturally occurring L-amino acids
  MISC_FEATURE (20): Xaa equals any of the naturally occurring L-amino acids
  MISC_FEATURE (21): Xaa equals any of the naturally occurring L-amino acids
HLQKISAPATMFXVRGWKSXXKFMVHTP

SEQ ID NO: 7661 - protein, 40 aa, Homo sapiens
  MISC_FEATURE (4): Xaa equals any of the naturally occurring L-amino acids
  MISC_FEATURE (23): Xaa equals any of the naturally occurring L-amino acids
  MISC_FEATURE (36): Xaa equals any of the naturally occurring L-amino acids
GTRXLERNAPGEKTNALKRSRLXSSNTDDTQLPSEXAKEQ

SEQ ID NO: 7662 - protein, 33 aa, Homo sapiens
  MISC_FEATURE (3): Xaa equals any of the naturally occurring L-amino acids
  MISC_FEATURE (8): Xaa equals any of the naturally occurring L-amino acids
  MISC_FEATURE (11): Xaa equals any of the naturally occurring L-amino acids
  MISC_FEATURE (12): Xaa equals any of the naturally occurring L-amino acids
  MISC_FEATURE (27): Xaa equals any of the naturally occurring L-amino acids
ANXVPPRXKTXXEFYSHKSDALNMIGXVRPASM

SEQ ID NO: 7663 - protein, 54 aa, Homo sapiens
  MISC_FEATURE (41): Xaa equals any of the naturally occurring L-amino acids
  MISC_FEATURE (46): Xaa equals any of the naturally occurring L-amino acids
  MISC_FEATURE (52): Xaa equals any of the naturally occurring L-amino acids
KIHESAEKRLKVIYTSGRRNNHSEQHTSFYTIVLHCWDYIXIYVCXPLCEHXSM

SEQ ID NO: 7664 - protein, 22 aa, Homo sapiens
  MISC_FEATURE (12): Xaa equals any of the naturally occurring L-amino acids
  MISC_FEATURE (17): Xaa equals any of the naturally occurring L-amino acids
  MISC_FEATURE (19): Xaa equals any of the naturally occurring L-amino acids
VDAWVVLDRERXPFFFXPXSPP

SEQ ID NO: 7665 - protein, 94 aa, Homo sapiens
  MISC_FEATURE (5): Xaa equals any of the naturally occurring L-amino acids
  MISC_FEATURE (12): Xaa equals any of the naturally occurring L-amino acids
  MISC_FEATURE (17): Xaa equals any of the naturally occurring L-amino acids
  MISC_FEATURE (55): Xaa equals any of the naturally occurring L-amino acids
  MISC_FEATURE (63): Xaa equals any of the naturally occurring L-amino acids
  MISC_FEATURE (74): Xaa equals any of the naturally occurring L-amino acids
  MISC_FEATURE (80): Xaa equals any of the naturally occurring L-amino acids
  MISC_FEATURE (84): Xaa equals any of the naturally occurring L-amino acids
  MISC_FEATURE (86): Xaa equals any of the naturally occurring L-amino acids
ARFPXNFSPFFXPQLKXQFPKKNLGEPKNLGALSFPFFSPLGGEPKKIFKGGAPXKVPLLTRXHLPLGPLISWXFFPFFXPLGXWXLGLLEASW

SEQ ID NO: 7666 - protein, 24 aa, Homo sapiens
  MISC_FEATURE (12): Xaa equals any of the naturally occurring L-amino acids
  MISC_FEATURE (15): Xaa equals any of the naturally occurring L-amino acids
  MISC_FEATURE (22): Xaa equals any of the naturally occurring L-amino acids
EGSLSSETQDGXIGXNCLLLCXRA

SEQ ID NO: 7667 - protein, 20 aa, Homo sapiens
  MISC_FEATURE (16): Xaa equals any of the naturally occurring L-amino acids
  MISC_FEATURE (19): Xaa equals any of the naturally occurring L-amino acids
VDAWARAQSSGAPLPXTAXR

SEQ ID NO: 7668 - protein, 44 aa, Homo sapiens
  MISC_FEATURE (30): Xaa equals any of the naturally occurring L-amino acids
  MISC_FEATURE (33): Xaa equals any of the naturally occurring L-amino acids
  MISC_FEATURE (35): Xaa equals any of the naturally occurring L-amino acids
  MISC_FEATURE (36): Xaa equals any of the naturally occurring L-amino acids
  MISC_FEATURE (40): Xaa equals any of the naturally occurring L-amino acids
VAVTAFISPVIFLTEILSLSPGNIGDYQNXLVXAXXLKIXKGKN

SEQ ID NO: 7669 - protein, 17 aa, Homo sapiens
  MISC_FEATURE (10): Xaa equals any of the naturally occurring L-amino acids
  MISC_FEATURE (11): Xaa equals any of the naturally occurring L-amino acids
KMKGIIYDKXXSDILLQ

SEQ ID NO: 7670 - protein, 36 aa, Homo sapiens
  MISC_FEATURE (1): Xaa equals any of the naturally occurring L-amino acids
  MISC_FEATURE (16): Xaa equals any of the naturally occurring L-amino acids
  MISC_FEATURE (20): Xaa equals any of the naturally occurring L-amino acids
  MISC_FEATURE (21): Xaa equals any of the naturally occurring L-amino acids
  MISC_FEATURE (36): Xaa equals any of the naturally occurring L-amino acids
XSIGKAGTPGGNGPEXPGGXXCAGLELYGERRDIKX

SEQ ID NO: 7671 - protein, 33 aa, Homo sapiens
  MISC_FEATURE (21): Xaa equals any of the naturally occurring L-amino acids
  MISC_FEATURE (25): Xaa equals any of the naturally occurring L-amino acids
  MISC_FEATURE (26): Xaa equals any of the naturally occurring L-amino acids
  MISC_FEATURE (28): Xaa equals any of the naturally occurring L-amino acids
ALGEEPLIPSVLQWPSSLGPXTMCXXDXHRARV

SEQ ID NO: 7672 - protein, 53 aa, Homo sapiens
VYCLPQSPLSHYTQGLAFNKKLGYIPKSKANNDSLSRDKVVNRNRPRSNAPRC

SEQ ID NO: 7673 - protein, 56 aa, Homo sapiens
IRHIVKLSLDVSIFKIIFKMTFKGFKHRLSKSLTFSDTFLSSKLFGEYLFFKKTDR

SEQ ID NO: 7674 - protein, 52 aa, Homo sapiens
  MISC_FEATURE (16): Xaa equals any of the naturally occurring L-amino acids
  MISC_FEATURE (19): Xaa equals any of the naturally occurring L-amino acids
  MISC_FEATURE (24): Xaa equals any of the naturally occurring L-amino acids
  MISC_FEATURE (28): Xaa equals any of the naturally occurring L-amino acids
  MISC_FEATURE (45): Xaa equals any of the naturally occurring L-amino acids
  MISC_FEATURE (50): Xaa equals any of the naturally occurring L-amino acids
  MISC_FEATURE (52): Xaa equals any of the naturally occurring L-amino acids
SISYRLNHIHVVDVLXNRXWVMCXLTIXTLPVYIKAIKNLNIVIXHCIPXTX

SEQ ID NO: 7675 - protein, 25 aa, Homo sapiens
  MISC_FEATURE (2): Xaa equals any of the naturally occurring L-amino acids
  MISC_FEATURE (22): Xaa equals any of the naturally occurring L-amino acids
AXAFAAKLRMSDGVEAVTGAAXGEV

SEQ ID NO: 7676 - protein, 78 aa, Homo sapiens
  MISC_FEATURE (69): Xaa equals any of the naturally occurring L-amino acids
  MISC_FEATURE (72): Xaa equals any of the naturally occurring L-amino acids
  MISC_FEATURE (73): Xaa equals any of the naturally occurring L-amino acids
  MISC_FEATURE (78): Xaa equals any of the naturally occurring L-amino acids
QYLLQLTLLHSPQIILTDGINPGNNNGGLSSTLCHSGNCATKNKLGFCFGIAGEETQAVVSCKSLSETXLTXXLFSLX

SEQ ID NO: 7677 - protein, 19 aa, Homo sapiens
  MISC_FEATURE (8): Xaa equals any of the naturally occurring L-amino acids
  MISC_FEATURE (9): Xaa equals any of the naturally occurring L-amino acids
  MISC_FEATURE (11): Xaa equals any of the naturally occurring L-amino acids
  MISC_FEATURE (16): Xaa equals any of the naturally occurring L-amino acids
TFVYKMKXXQXKEYKXMKK

SEQ ID NO: 7678 - protein, 103 aa, Homo sapiens
  MISC_FEATURE (6): Xaa equals any of the naturally occurring L-amino acids
  MISC_FEATURE (47): Xaa equals any of the naturally occurring L-amino acids
  MISC_FEATURE (53): Xaa equals any of the naturally occurring L-amino acids
RTYFPXKMPTTKKTLMFLSSFFTSLGSFIVICSILGTQAWITSTIAXRDSASXGSIFITYGLFRGESSEELSHGLAEPKKKIAVLEILNNSSQKTLHSVTILT

SEQ ID NO: 7679 - protein, 66 aa, Homo sapiens
  MISC_FEATURE (2): Xaa equals any of the naturally occurring L-amino acids
  MISC_FEATURE (17): Xaa equals any of the naturally occurring L-amino acids
  MISC_FEATURE (25): Xaa equals any of the naturally occurring L-amino acids
  MISC_FEATURE (62): Xaa equals any of the naturally occurring L-amino acids
GXLVRLQVHGPEFPGRXTRPNADVXQKLYLSAFGWTSYFPLSLDDAAREFLSLFCSRRTSCXHGQL

SEQ ID NO: 7680 - protein, 125 aa, Homo sapiens
  MISC_FEATURE (1): Xaa equals any of the naturally occurring L-amino acids
  MISC_FEATURE (5): Xaa equals any of the naturally occurring L-amino acids
  MISC_FEATURE (7): Xaa equals any of the naturally occurring L-amino acids
  MISC_FEATURE (21): Xaa equals any of the naturally occurring L-amino acids
  MISC_FEATURE (52): Xaa equals any of the naturally occurring L-amino acids
  MISC_FEATURE (58): Xaa equals any of the naturally occurring L-amino acids
  MISC_FEATURE (115): Xaa equals any of the naturally occurring L-amino acids
  MISC_FEATURE (124): Xaa equals any of the naturally occurring L-amino acids
XDSLXGXLVRLQVPVRNSRVXPRVRPRVRTASRATSRGPQGMDLQAAGAQAXGAAEPXRGPPLPSARGAPPSPEAGFATADHSGQERETEKAMDRLARGTQSIPNDSPARGEGTXSEEEGFAMXE

SEQ ID NO: 7681 - protein, 14 aa, Homo sapiens
AKIYCGMHLINLFM

SEQ ID NO: 7682 - protein, 21 aa, Homo sapiens
  MISC_FEATURE (15): Xaa equals any of the naturally occurring L-amino acids
  MISC_FEATURE (16): Xaa equals any of the naturally occurring L-amino acids
  MISC_FEATURE (18): Xaa equals any of the naturally occurring L-amino acids
  MISC_FEATURE (21): Xaa equals any of the naturally occurring L-amino acids
ADAWADFQNEVCAGXXLXTRX

SEQ ID NO: 7683 - protein, 22 aa, Homo sapiens
  MISC_FEATURE (5): Xaa equals any of the naturally occurring L-amino acids
  MISC_FEATURE (11): Xaa equals any of the naturally occurring L-amino acids
  MISC_FEATURE (12): Xaa equals any of the naturally occurring L-amino acids
  MISC_FEATURE (15): Xaa equals any of the naturally occurring L-amino acids
  MISC_FEATURE (19): Xaa equals any of the naturally occurring L-amino acids
AHASXSGRPFXXFLXEIYXCTE

SEQ ID NO: 7684 - protein, 85 aa, Homo sapiens
  MISC_FEATURE (44): Xaa equals any of the naturally occurring L-amino acids
RQRFKDPGRVSLSRQCWHLQQDRAPCRVSLVKTADKCSEVLLQXAPHQTSSAAWFECCSWLQTCFSSPLLILEAAKYPFNEFLFC

SEQ ID NO: 7685 - protein, 35 aa, Homo sapiens
  MISC_FEATURE (8): Xaa equals any of the naturally occurring L-amino acids
  MISC_FEATURE (13): Xaa equals any of the naturally occurring L-amino acids
  MISC_FEATURE (15): Xaa equals any of the naturally occurring L-amino acids
  MISC_FEATURE (31): Xaa equals any of the naturally occurring L-amino acids
TQGGEKRXTGLNXPXWPRGFKPRGVPGGKIXYTRE

SEQ ID NO: 7686 - protein, 25 aa, Homo sapiens
  MISC_FEATURE (10): Xaa equals any of the naturally occurring L-amino acids
  MISC_FEATURE (21): Xaa equals any of the naturally occurring L-amino acids
  MISC_FEATURE (22): Xaa equals any of the naturally occurring L-amino acids
GENKRAVRRXRNDWGGLKKKXXPPG

SEQ ID NO: 7687 - protein, 36 aa, Homo sapiens
  MISC_FEATURE (1): Xaa equals any of the naturally occurring L-amino acids
  MISC_FEATURE (6): Xaa equals any of the naturally occurring L-amino acids
  MISC_FEATURE (7): Xaa equals any of the naturally occurring L-amino acids
  MISC_FEATURE (14): Xaa equals any of the naturally occurring L-amino acids
  MISC_FEATURE (28): Xaa equals any of the naturally occurring L-amino acids
XGKKAXXLTGKRQXVKRGVTPGKFYTQXVTGTPNRP

SEQ ID NO: 7688 - protein, 35 aa, Homo sapiens
  MISC_FEATURE (14): Xaa equals any of the naturally occurring L-amino acids
  MISC_FEATURE (27): Xaa equals any of the naturally occurring L-amino acids
LGGGGKKKVPTGVXNRTPPAPRGFKPXGVYTGGKN

SEQ ID NO: 7689 - protein, 33 aa, Homo sapiens
  MISC_FEATURE (1): Xaa equals any of the naturally occurring L-amino acids
  MISC_FEATURE (5): Xaa equals any of the naturally occurring L-amino acids
  MISC_FEATURE (18): Xaa equals any of the naturally occurring L-amino acids
  MISC_FEATURE (26): Xaa equals any of the naturally occurring L-amino acids
XGPEXPGSTHASAHAFEXFGQDEMIXGGGLLKK

SEQ ID NO: 7690 - protein, 37 aa, Homo sapiens
  MISC_FEATURE (3): Xaa equals any of the naturally occurring L-amino acids
  MISC_FEATURE (16): Xaa equals any of the naturally occurring L-amino acids
  MISC_FEATURE (26): Xaa equals any of the naturally occurring L-amino acids
  MISC_FEATURE (29): Xaa equals any of the naturally occurring L-amino acids
EQXVKRPRGYRPSAQXLTAGVPGENXHPXGTGTPNGP

SEQ ID NO: 7691 - protein, 60 aa, Homo sapiens
  MISC_FEATURE (45): Xaa equals any of the naturally occurring L-amino acids
  MISC_FEATURE (48): Xaa equals any of the naturally occurring L-amino acids
KLYILCETVFHCPHSKIISQLKKIPKQFCVLSMLYYYHHICLVLXLNXFMGTFYVFLTIL

SEQ ID NO: 7692 - protein, 77 aa, Homo sapiens
PQVLIVEESMVGSCGTMSAVCSVKCGCCRACFTYGKVKFMPWTKPGFLELLLASIKITSRLHVWICIPAGGISCFAD

SEQ ID NO: 7693 - protein, 137 aa, Homo sapiens
TRAQSDSSQTLGSSMDCSTAREEPSSEPGPSPLPLPSQQQVEEATVQDLLSSLSEDPCPSQKALDPAPLARPSPAGSAQTSPELEHRVSLFNQKNQEGFTVFQIRPVIHFQPTVPMLEDKFRSLESKEQKLHRVPEA

SEQ ID NO: 7694 - protein, 43 aa, Homo sapiens
  MISC_FEATURE (16): Xaa equals any of the naturally occurring L-amino acids
  MISC_FEATURE (26): Xaa equals any of the naturally occurring L-amino acids
DFLYGYLEILYMKNNXWFKIDHFNKXTIFLFTKMLFFYDVNNC

SEQ ID NO: 7695 - protein, 30 aa, Homo sapiens
  MISC_FEATURE (11): Xaa equals any of the naturally occurring L-amino acids
  MISC_FEATURE (21): Xaa equals any of the naturally occurring L-amino acids
  MISC_FEATURE (29): Xaa equals any of the naturally occurring L-amino acids
  MISC_FEATURE (30): Xaa equals any of the naturally occurring L-amino acids
GRNLVREIRYXVVSNHKVFVXFKWIDYLXX

SEQ ID NO: 7696 - protein, 34 aa, Homo sapiens
  MISC_FEATURE (1): Xaa equals any of the naturally occurring L-amino acids
  MISC_FEATURE (10): Xaa equals any of the naturally occurring L-amino acids
  MISC_FEATURE (21): Xaa equals any of the naturally occurring L-amino acids
  MISC_FEATURE (29): Xaa equals any of the naturally occurring L-amino acids
  MISC_FEATURE (34): Xaa equals any of the naturally occurring L-amino acids
XAETAKDVGXEATIHLKSAYXPYYSEGVXQWNKX

SEQ ID NO: 7697 - protein, 58 aa, Homo sapiens
  MISC_FEATURE (40): Xaa equals any of the naturally occurring L-amino acids
  MISC_FEATURE (53): Xaa equals any of the naturally occurring L-amino acids
  MISC_FEATURE (56): Xaa equals any of the naturally occurring L-amino acids
SGIKCFTEAMGYVSIGRGAFHSALKANVSFTGACGKANVXISNDKGGEKPPRXKTXVS

SEQ ID NO: 7698 - protein, 77 aa, Homo sapiens
  MISC_FEATURE (22): Xaa equals any of the naturally occurring L-amino acids
  MISC_FEATURE (25): Xaa equals any of the naturally occurring L-amino acids
  MISC_FEATURE (27): Xaa equals any of the naturally occurring L-amino acids
  MISC_FEATURE (29): Xaa equals any of the naturally occurring L-amino acids
  MISC_FEATURE (30): Xaa equals any of the naturally occurring L-amino acids
  MISC_FEATURE (31): Xaa equals any of the naturally occurring L-amino acids
  MISC_FEATURE (33): Xaa equals any of the naturally occurring L-amino acids
  MISC_FEATURE (36): Xaa equals any of the naturally occurring L-amino acids
  MISC_FEATURE (38): Xaa equals any of the naturally occurring L-amino acids
  MISC_FEATURE (39): Xaa equals any of the naturally occurring L-amino acids
  MISC_FEATURE (42): Xaa equals any of the naturally occurring L-amino acids
  MISC_FEATURE (56): Xaa equals any of the naturally occurring L-amino acids
  MISC_FEATURE (67): Xaa equals any of the naturally occurring L-amino acids
  MISC_FEATURE (71): Xaa equals any of the naturally occurring L-amino acids
LGTIYLQMFCSIDCSNQGFFLXNQXWXVXXXKXPEXKXXNWXLENLREKINSNKFXILPLRTLNGEXLKKXFFFKPS

SEQ ID NO: 7699 - protein, 106 aa, Homo sapiens
  MISC_FEATURE (99): Xaa equals any of the naturally occurring L-amino acids
  MISC_FEATURE (104): Xaa equals any of the naturally occurring L-amino acids
  MISC_FEATURE (105): Xaa equals any of the naturally occurring L-amino acids
  MISC_FEATURE (106): Xaa equals any of the naturally occurring L-amino acids
ADAWVLKKLGLIVYSAWSTSAFLPLLLPFSYSRLFLNSVMLAFTKALTFPVIRKRCLCFHYFSYKKTHSQIHIHYTVCGITPSLNGHSVDFTIMATLCXWMQNXXX

SEQ ID NO: 7700 - protein, 50 aa, Homo sapiens
VLVRRCQFCWLFNNTGWLVLIDNLQYLYSRFVPEIMNLNFLLPSSCNWIV

SEQ ID NO: 7701 - protein, 19 aa, Homo sapiens
  MISC_FEATURE (13): Xaa equals any of the naturally occurring L-amino acids
  MISC_FEATURE (14): Xaa equals any of the naturally occurring L-amino acids
  MISC_FEATURE (18): Xaa equals any of the naturally occurring L-amino acids
ALLMRDVRLPGGXXALSXD

SEQ ID NO: 7702 - protein, 26 aa, Homo sapiens
LENKCVPAQSVGAPQPWPQDRCEAMN

SEQ ID NO: 7703 - protein, 15 aa, Homo sapiens
  MISC_FEATURE (14): Xaa equals any of the naturally occurring L-amino acids
FETSLTGHGGGPFXS

SEQ ID NO: 7704 - protein, 21 aa, Homo sapiens
  MISC_FEATURE (11): Xaa equals any of the naturally occurring L-amino acids
  MISC_FEATURE (14): Xaa equals any of the naturally occurring L-amino acids
  MISC_FEATURE (15): Xaa equals any of the naturally occurring L-amino acids
  MISC_FEATURE (16): Xaa equals any of the naturally occurring L-amino acids
  MISC_FEATURE (18): Xaa equals any of the naturally occurring L-amino acids
APPPAGGGGVXDGXXXIXERV

SEQ ID NO: 7705 - protein, 41 aa, Homo sapiens
  MISC_FEATURE (24): Xaa equals any of the naturally occurring L-amino acids
  MISC_FEATURE (26): Xaa equals any of the naturally occurring L-amino acids
  MISC_FEATURE (31): Xaa equals any of the naturally occurring L-amino acids
  MISC_FEATURE (39): Xaa equals any of the naturally occurring L-amino acids
VTRRHGCLLSWRISQGLLAGNLTXNXDLTVXCQIKKTFXPC

SEQ ID NO: 7706 - protein, 33 aa, Homo sapiens
  MISC_FEATURE (14): Xaa equals any of the naturally occurring L-amino acids
  MISC_FEATURE (16): Xaa equals any of the naturally occurring L-amino acids
ITSSFVAKKICYTXLXLYLNNNLCAGMDIMPHC

SEQ ID NO: 7707 - protein, 96 aa, Homo sapiens
  MISC_FEATURE (13): Xaa equals any of the naturally occurring L-amino acids
  MISC_FEATURE (40): Xaa equals any of the naturally occurring L-amino acids
  MISC_FEATURE (42): Xaa equals any of the naturally occurring L-amino acids
  MISC_FEATURE (43): Xaa equals any of the naturally occurring L-amino acids
  MISC_FEATURE (50): Xaa equals any of the naturally occurring L-amino acids
  MISC_FEATURE (55): Xaa equals any of the naturally occurring L-amino acids
  MISC_FEATURE (59): Xaa equals any of the naturally occurring L-amino acids
  MISC_FEATURE (60): Xaa equals any of the naturally occurring L-amino acids
  MISC_FEATURE (63): Xaa equals any of the naturally occurring L-amino acids
  MISC_FEATURE (65): Xaa equals any of the naturally occurring L-amino acids
  MISC_FEATURE (78): Xaa equals any of the naturally occurring L-amino acids
  MISC_FEATURE (86): Xaa equals any of the naturally occurring L-amino acids
  MISC_FEATURE (94): Xaa equals any of the naturally occurring L-amino acids
AEYTFLLLFWKRXACVLVLTARPSRPLLPKWWQYLAIGRXIXXACTFKIXADVLXRSLXXAAXSXLQSVLNSMKITMXSLTFVTLXYLLAHFTXTI

SEQ ID NO: 7708 - protein, 60 aa, Homo sapiens
  MISC_FEATURE (36): Xaa equals any of the naturally occurring L-amino acids
  MISC_FEATURE (37): Xaa equals any of the naturally occurring L-amino acids
  MISC_FEATURE (47): Xaa equals any of the naturally occurring L-amino acids
  MISC_FEATURE (51): Xaa equals any of the naturally occurring L-amino acids
RLDNQEMTNQESAVHVKMMPEFQKSSVRIKNPTRVXXIICGLIKGGXAKLXIITDFDMTL

SEQ ID NO: 7709 - protein, 40 aa, Homo sapiens
  MISC_FEATURE (32): Xaa equals any of the naturally occurring L-amino acids
  MISC_FEATURE (37): Xaa equals any of the naturally occurring L-amino acids
  MISC_FEATURE (39): Xaa equals any of the naturally occurring L-amino acids
CEAAERTATPGEARAPGAGAGAGAAPSHARGXRRAPXEXR

SEQ ID NO: 7710 - protein, 60 aa, Homo sapiens
  MISC_FEATURE (37): Xaa equals any of the naturally occurring L-amino acids
  MISC_FEATURE (39): Xaa equals any of the naturally occurring L-amino acids
  MISC_FEATURE (48): Xaa equals any of the naturally occurring L-amino acids
HQESLKCLNCELIRRKMKYVSTLVTLVFTDIMISLQXYXTNEKLEAIXEPCDGVKPTFDR

SEQ ID NO: 7711 - protein, 33 aa, Homo sapiens
  MISC_FEATURE (25): Xaa equals any of the naturally occurring L-amino acids
  MISC_FEATURE (28): Xaa equals any of the naturally occurring L-amino acids
  MISC_FEATURE (30): Xaa equals any of the naturally occurring L-amino acids
GTWWCCCLKPPCYLLVGLNPDHPIXETXGXRLK

SEQ ID NO: 7712 - protein, 55 aa, Homo sapiens
  MISC_FEATURE (48): Xaa equals any of the naturally occurring L-amino acids
  MISC_FEATURE (54): Xaa equals any of the naturally occurring L-amino acids
HTKCILSHINYALQVGRVDTVDTAFLMLSHCDQKLFYSCVAFIEGDLXKFEKFXI

SEQ ID NO: 7713 - protein, 27 aa, Homo sapiens
  MISC_FEATURE (8): Xaa equals any of the naturally occurring L-amino acids
  MISC_FEATURE (9): Xaa equals any of the naturally occurring L-amino acids
  MISC_FEATURE (15): Xaa equals any of the naturally occurring L-amino acids
  MISC_FEATURE (19): Xaa equals any of the naturally occurring L-amino acids
LIREDCQXXKLWDEXVSHXVEGPNFLK

SEQ ID NO: 7714 - protein, 54 aa, Homo sapiens
  MISC_FEATURE (9): Xaa equals any of the naturally occurring L-amino acids
  MISC_FEATURE (39): Xaa equals any of the naturally occurring L-amino acids
  MISC_FEATURE (42): Xaa equals any of the naturally occurring L-amino acids
  MISC_FEATURE (46): Xaa equals any of the naturally occurring L-amino acids
  MISC_FEATURE (52): Xaa equals any of the naturally occurring L-amino acids
  MISC_FEATURE (53): Xaa equals any of the naturally occurring L-amino acids
GFAVFCLPXSHWLSCYYIYCCFMIYFEYGAYDLGTNAYXLYXDYSXIYHSVXXN

SEQ ID NO: 7715 - protein, 58 aa, Homo sapiens
  MISC_FEATURE (53): Xaa equals any of the naturally occurring L-amino acids
  MISC_FEATURE (56): Xaa equals any of the naturally occurring L-amino acids
  MISC_FEATURE (58): Xaa equals any of the naturally occurring L-amino acids
DRDYGSSGGKDQPAPNGDCVGAATLFPQAFLSPFISHEMGSELKKKLFKRRRXLNXEX

SEQ ID NO: 7716 - protein, 84 aa, Homo sapiens
  MISC_FEATURE (72): Xaa equals any of the naturally occurring L-amino acids
  MISC_FEATURE (74): Xaa equals any of the naturally occurring L-amino acids
  MISC_FEATURE (82): Xaa equals any of the naturally occurring L-amino acids
YLFYKMQSQVPQPRLSQTCSLMTQVSLRYSWCPPGQTVSLIITKAKAWVGEQVSSFYPSQAAHLLFKNSKSXNXKFGHEPLXNL

SEQ ID NO: 7717 - protein, 17 aa, Homo sapiens
  MISC_FEATURE (2): Xaa equals any of the naturally occurring L-amino acids
  MISC_FEATURE (10): Xaa equals any of the naturally occurring L-amino acids
  MISC_FEATURE (15): Xaa equals any of the naturally occurring L-amino acids
  MISC_FEATURE (16): Xaa equals any of the naturally occurring L-amino acids
GXILQKRNCXAGVIXXN

SEQ ID NO: 7718 - protein, 56 aa, Homo sapiens
  MISC_FEATURE (48): Xaa equals any of the naturally occurring L-amino acids
LPGWRWPLTDMASEECSTKHGPKSTPQKRKGMKGSFACFTHLSRSGPXREDLLHCC

SEQ ID NO: 7719 - protein, 67 aa, Homo sapiens
  MISC_FEATURE (4): Xaa equals any of the naturally occurring L-amino acids
  MISC_FEATURE (8): Xaa equals any of the naturally occurring L-amino acids
  MISC_FEATURE (15): Xaa equals any of the naturally occurring L-amino acids
  MISC_FEATURE (16): Xaa equals any of the naturally occurring L-amino acids
  MISC_FEATURE (31): Xaa equals any of the naturally occurring L-amino acids
  MISC_FEATURE (39): Xaa equals any of the naturally occurring L-amino acids
  MISC_FEATURE (49): Xaa equals any of the naturally occurring L-amino acids
  MISC_FEATURE (51): Xaa equals any of the naturally occurring L-amino acids
  MISC_FEATURE (64): Xaa equals any of the naturally occurring L-amino acids
  MISC_FEATURE (65): Xaa equals any of the naturally occurring L-amino acids
FYFXKMSXGFPFPLXXQLHASPGHKILSDCXIYSITCQXYVPVVDYISXLXGLGLVFRIDSKGXXKA

SEQ ID NO: 7720 - protein, 49 aa, Homo sapiens
  MISC_FEATURE (5): Xaa equals any of the naturally occurring L-amino acids
  MISC_FEATURE (8): Xaa equals any of the naturally occurring L-amino acids
  MISC_FEATURE (12): Xaa equals any of the naturally occurring L-amino acids
  MISC_FEATURE (18): Xaa equals any of the naturally occurring L-amino acids
  MISC_FEATURE (35): Xaa equals any of the naturally occurring L-amino acids
  MISC_FEATURE (38): Xaa equals any of the naturally occurring L-amino acids
  MISC_FEATURE (40): Xaa equals any of the naturally occurring L-amino acids
QLEEXSVXNPEXAFMKMXQARKNYTSTELTVEPEXPSXSXGINLSGFGS

SEQ ID NO: 7721 - protein, 38 aa, Homo sapiens
  MISC_FEATURE (2): Xaa equals any of the naturally occurring L-amino acids
  MISC_FEATURE (3): Xaa equals any of the naturally occurring L-amino acids
  MISC_FEATURE (6): Xaa equals any of the naturally occurring L-amino acids
  MISC_FEATURE (7): Xaa equals any of the naturally occurring L-amino acids
  MISC_FEATURE (36): Xaa equals any of the naturally occurring L-amino acids
  MISC_FEATURE (38): Xaa equals any of the naturally occurring L-amino acids
LXXGAXXPFTKPRDLVLPIPAVCTKGPRQAMSAFRXLX

SEQ ID NO: 7722 - protein, 50 aa, Homo sapiens
  MISC_FEATURE (3): Xaa equals any of the naturally occurring L-amino acids
  MISC_FEATURE (10): Xaa equals any of the naturally occurring L-amino acids
TVXLKTQNCXLPTNQSFDLLRQICFEIVNIRGNLVTRFVTRHLFSLHGEK

SEQ ID NO: 7723 - protein, 23 aa, Homo sapiens
  MISC_FEATURE (5): Xaa equals any of the naturally occurring L-amino acids
  MISC_FEATURE (14): Xaa equals any of the naturally occurring L-amino acids
  MISC_FEATURE (17): Xaa equals any of the naturally occurring L-amino acids
  MISC_FEATURE (21): Xaa equals any of the naturally occurring L-amino acids
AHASXIFKNLSMVXGWXYTNXCI

SEQ ID NO: 7724 - protein, 70 aa, Homo sapiens
  MISC_FEATURE (1): Xaa equals any of the naturally occurring L-amino acids
  MISC_FEATURE (11): Xaa equals any of the naturally occurring L-amino acids
  MISC_FEATURE (12): Xaa equals any of the naturally occurring L-amino acids
  MISC_FEATURE (23): Xaa equals any of the naturally occurring L-amino acids
  MISC_FEATURE (32): Xaa equals any of the naturally occurring L-amino acids
  MISC_FEATURE (47): Xaa equals any of the naturally occurring L-amino acids
  MISC_FEATURE (56): Xaa equals any of the naturally occurring L-amino acids
  MISC_FEATURE (61): Xaa equals any of the naturally occurring L-amino acids
  MISC_FEATURE (69): Xaa equals any of the naturally occurring L-amino acids
  MISC_FEATURE (70): Xaa equals any of the naturally occurring L-amino acids
XEHHAFPSLQXXTPSAAFHLYLXSIIIIIIAXVASVTVGMECLRLAXWVGHTTLCXVDLLXSSLKLFYXX

SEQ ID NO: 7725 - protein, 45 aa, Homo sapiens
  MISC_FEATURE (33): Xaa equals any of the naturally occurring L-amino acids
  MISC_FEATURE (42): Xaa equals any of the naturally occurring L-amino acids
FLIMSNDCKSAWIFTCKGYSCIVRSPSPAESSXHWLAVCCVXHSF

SEQ ID NO: 7726 - protein, 134 aa, Homo sapiens
  MISC_FEATURE (10): Xaa equals any of the naturally occurring L-amino acids
  MISC_FEATURE (17): Xaa equals any of the naturally occurring L-amino acids
  MISC_FEATURE (20): Xaa equals any of the naturally occurring L-amino acids
  MISC_FEATURE (39): Xaa equals any of the naturally occurring L-amino acids
  MISC_FEATURE (56): Xaa equals any of the naturally occurring L-amino acids
  MISC_FEATURE (107): Xaa equals any of the naturally occurring L-amino acids
LARGNPGSRXNFPGGFXPHXGPACKSWIGQPGLPHFPGXQPSQIRTPIFGLAKPRXPKLRALGSIRVASSLPVPDLILRQRLLQDPVARPQAMAGPFSRLCPPPGLXLCFGGRGLYRGFVDELTTAVTTEVIPT

SEQ ID NO: 7727 - protein, 41 aa, Homo sapiens
  MISC_FEATURE (2): Xaa equals any of the naturally occurring L-amino acids
  MISC_FEATURE (3): Xaa equals any of the naturally occurring L-amino acids
  MISC_FEATURE (19): Xaa equals any of the naturally occurring L-amino acids
  MISC_FEATURE (23): Xaa equals any of the naturally occurring L-amino acids
  MISC_FEATURE (27): Xaa equals any of the naturally occurring L-amino acids
  MISC_FEATURE (36): Xaa equals any of the naturally occurring L-amino acids
  MISC_FEATURE (39): Xaa equals any of the naturally occurring L-amino acids
LXXHCSELTCVPPWTINGXINPXKYKXPPREGLRGXPGXLS

SEQ ID NO: 7728 - protein, 28 aa, Homo sapiens
  MISC_FEATURE (12): Xaa equals any of the naturally occurring L-amino acids
  MISC_FEATURE (17): Xaa equals any of the naturally occurring L-amino acids
  MISC_FEATURE (18): Xaa equals any of the naturally occurring L-amino acids
  MISC_FEATURE (27): Xaa equals any of the naturally occurring L-amino acids
HQWKQLASLLRXLWVRXXRPNKRRLCXC

SEQ ID NO: 7729 - protein, 53 aa, Homo sapiens
  MISC_FEATURE (48): Xaa equals any of the naturally occurring L-amino acids
  MISC_FEATURE (49): Xaa equals any of the naturally occurring L-amino acids
  MISC_FEATURE (52): Xaa equals any of the naturally occurring L-amino acids
EFMLKWIYRIFVNLFLVFVRFFNCSFLCAECISLPGQECGGAEVSSFXXTFXQ

SEQ ID NO: 7730 - protein, 37 aa, Homo sapiens
  MISC_FEATURE (12): Xaa equals any of the naturally occurring L-amino acids
  MISC_FEATURE (21): Xaa equals any of the naturally occurring L-amino acids
  MISC_FEATURE (29): Xaa equals any of the naturally occurring L-amino acids
  MISC_FEATURE (35): Xaa equals any of the naturally occurring L-amino acids
EPLTKNPHCPCXGAVVVNSPXGLNEGVKXYEPDHXAI

SEQ ID NO: 7731 - protein, 80 aa, Homo sapiens
IRHVRLDISDLALRKSKTVHSQVLSRSFAEFQGLRCMASHGRWYLRAHLRRGLSAGEGGSFSEEPVGTAICQALVWALGL

SEQ ID NO: 7732 - protein, 26 aa, Homo sapiens
RTRGPLFPLQTNNSSVTFHLIPTPLM

SEQ ID NO: 7733 - protein, 72 aa, Homo sapiens
  MISC_FEATURE (1): Xaa equals any of the naturally occurring L-amino acids
  MISC_FEATURE (10): Xaa equals any of the naturally occurring L-amino acids
  MISC_FEATURE (11): Xaa equals any of the naturally occurring L-amino acids
  MISC_FEATURE (23): Xaa equals any of the naturally occurring L-amino acids
  MISC_FEATURE (38): Xaa equals any of the naturally occurring L-amino acids
  MISC_FEATURE (45): Xaa equals any of the naturally occurring L-amino acids
  MISC_FEATURE (55): Xaa equals any of the naturally occurring L-amino acids
  MISC_FEATURE (60): Xaa equals any of the naturally occurring L-amino acids
  MISC_FEATURE (63): Xaa equals any of the naturally occurring L-amino acids
XNPPPHRASXXIKPQASQTSFKXGEKRDVVVNRRFVEXGEHRGCXAGRIFSPRGXAALHXPLXRGRNLAIAL

SEQ ID NO: 7734 - protein, 34 aa, Homo sapiens
  MISC_FEATURE (1): Xaa equals any of the naturally occurring L-amino acids
  MISC_FEATURE (12): Xaa equals any of the naturally occurring L-amino acids
  MISC_FEATURE (16): Xaa equals any of the naturally occurring L-amino acids
  MISC_FEATURE (21): Xaa equals any of the naturally occurring L-amino acids
  MISC_FEATURE (29): Xaa equals any of the naturally occurring L-amino acids
  MISC_FEATURE (34): Xaa equals any of the naturally occurring L-amino acids
XWPWPWTGLPWXVGNXKLGKXGVLIGWGXPENSX

SEQ ID NO: 7735 - protein, 56 aa, Homo sapiens
  MISC_FEATURE (6): Xaa equals any of the naturally occurring L-amino acids
  MISC_FEATURE (12): Xaa equals any of the naturally occurring L-amino acids
  MISC_FEATURE (36): Xaa equals any of the naturally occurring L-amino acids
  MISC_FEATURE (43): Xaa equals any of the naturally occurring L-amino acids
  MISC_FEATURE (51): Xaa equals any of the naturally occurring L-amino acids
  MISC_FEATURE (52): Xaa equals any of the naturally occurring L-amino acids
  MISC_FEATURE (53): Xaa equals any of the naturally occurring L-amino acids
SPPCSXEIDSPXRVLQQPTTGCSAVALGHRGASSPXSKLSREXGKWGRRVXXXVET

SEQ ID NO: 7736 - protein, 28 aa, Homo sapiens
  MISC_FEATURE (1): Xaa equals any of the naturally occurring L-amino acids
  MISC_FEATURE (5): Xaa equals any of the naturally occurring L-amino acids
  MISC_FEATURE (21): Xaa equals any of the naturally occurring L-amino acids
  MISC_FEATURE (22): Xaa equals any of the naturally occurring L-amino acids
XDPRXPLINQTLDFPERSSLXXCLRKCK

SEQ ID NO: 7737 - protein, 42 aa, Homo sapiens
EAIDLFFNHPMRKEQTIWSITILSMQMKWQKQNNKNTFRSKN

SEQ ID NO: 7738 - protein, 51 aa, Homo sapiens
  MISC_FEATURE (12): Xaa equals any of the naturally occurring L-amino acids
  MISC_FEATURE (22): Xaa equals any of the naturally occurring L-amino acids
  MISC_FEATURE (24): Xaa equals any of the naturally occurring L-amino acids
  MISC_FEATURE (38): Xaa equals any of the naturally occurring L-amino acids
  MISC_FEATURE (48): Xaa equals any of the naturally occurring L-amino acids
  MISC_FEATURE (50): Xaa equals any of the naturally occurring L-amino acids
NICLFIFRDVPXLKRRLVFSSXLXCILFIYEVSSENCXWYFSAFVSQXEXI

SEQ ID NO: 7739 - protein, 52 aa, Homo sapiens
  MISC_FEATURE (1): Xaa equals any of the naturally occurring L-amino acids
  MISC_FEATURE (2): Xaa equals any of the naturally occurring L-amino acids
  MISC_FEATURE (32): Xaa equals any of the naturally occurring L-amino acids
  MISC_FEATURE (42): Xaa equals any of the naturally occurring L-amino acids
  MISC_FEATURE (44): Xaa equals any of the naturally occurring L-amino acids
  MISC_FEATURE (48): Xaa equals any of the naturally occurring L-amino acids
XXLGKTPHYRLKLVRLQVPVRNSRVDPRVRPXVRCASDSERXPXPGQXGPGA

SEQ ID NO: 7740 - protein, 25 aa, Homo sapiens
  MISC_FEATURE (2): Xaa equals any of the naturally occurring L-amino acids
  MISC_FEATURE (19): Xaa equals any of the naturally occurring L-amino acids
  MISC_FEATURE (20): Xaa equals any of the naturally occurring L-amino acids
  MISC_FEATURE (22): Xaa equals any of the naturally occurring L-amino acids
IXYSQRVTQQLCSPAFLQXXYXHVP

SEQ ID NO: 7741 - protein, 30 aa, Homo sapiens
  MISC_FEATURE (15): Xaa equals any of the naturally occurring L-amino acids
  MISC_FEATURE (16): Xaa equals any of the naturally occurring L-amino acids
  MISC_FEATURE (21): Xaa equals any of the naturally occurring L-amino acids
  MISC_FEATURE (30): Xaa equals any of the naturally occurring L-amino acids
NFLMEKDNVYFGRVXXKRIFXISYISKFLX

SEQ ID NO: 7742 - protein, 30 aa, Homo sapiens
  MISC_FEATURE (25): Xaa equals any of the naturally occurring L-amino acids
SVNVIFNNTYIYSGMSQTSATFQLXSKQAP

SEQ ID NO: 7743 - protein, 67 aa, Homo sapiens
RKTNGVTDQSIQSNNSASKKLKGMVLILQPFQQNLKVEEGLSEKDLCVWLLFNAKNPSEIPRTPTKL

SEQ ID NO: 7744 - protein, 18 aa, Homo sapiens
  MISC_FEATURE (9): Xaa equals any of the naturally occurring L-amino acids
  MISC_FEATURE (17): Xaa equals any of the naturally occurring L-amino acids
  MISC_FEATURE (18): Xaa equals any of the naturally occurring L-amino acids
RYKSCLNRXRRGSYRGXX

SEQ ID NO: 7745 - protein, 59 aa, Homo sapiens
  MISC_FEATURE (53): Xaa equals any of the naturally occurring L-amino acids
GFLVLMLVKVCAGISKSLKKVFTGHWAVVREGLTNPWIPDNWSWGGVASEHCXCYRVLH

SEQ ID NO: 7746 - protein, 27 aa, Homo sapiens
  MISC_FEATURE (2): Xaa equals any of the naturally occurring L-amino acids
  MISC_FEATURE (10): Xaa equals any of the naturally occurring L-amino acids
  MISC_FEATURE (16): Xaa equals any of the naturally occurring L-amino acids
  MISC_FEATURE (19): Xaa equals any of the naturally occurring L-amino acids
NXDVTVLAIXLGNVYXFLXYLKCIITK

SEQ ID NO: 7747 - protein, 145 aa, Homo sapiens
  MISC_FEATURE (72): Xaa equals any of the naturally occurring L-amino acids
  MISC_FEATURE (136): Xaa equals any of the naturally occurring L-amino acids
  MISC_FEATURE (140): Xaa equals any of the naturally occurring L-amino acids
  MISC_FEATURE (143): Xaa equals any of the naturally occurring L-amino acids
  MISC_FEATURE (144): Xaa equals any of the naturally occurring L-amino acids
TQSCQSLYPFSCPGAQRETHLPLALPEWLLRTPCPAQLSLGGDEERQWWSWQQNAQPLVAGLDKGKLDQEAXIRDLPLPRKARLQLQAGSHPLLLALGKGTQRLACPCLGQCEVLPYPHHGVHGLFILAQLTLYTXTVLXAHXXL

SEQ ID NO: 7748 - protein, 22 aa, Homo sapiens
  MISC_FEATURE (12): Xaa equals any of the naturally occurring L-amino acids
  MISC_FEATURE (19): Xaa equals any of the naturally occurring L-amino acids
  MISC_FEATURE (20): Xaa equals any of the naturally occurring L-amino acids
ERASLVPTGVAXVSSTPDXXPP

SEQ ID NO: 7749 - protein, 21 aa, Homo sapiens
  MISC_FEATURE (3): Xaa equals any of the naturally occurring L-amino acids
  MISC_FEATURE (12): Xaa equals any of the naturally occurring L-amino acids
  MISC_FEATURE (16): Xaa equals any of the naturally occurring L-amino acids
GWXKCTTLRPAXGAVXEGLDR

SEQ ID NO: 7750 - protein, 20 aa, Homo sapiens
  MISC_FEATURE (13): Xaa equals any of the naturally occurring L-amino acids
  MISC_FEATURE (16): Xaa equals any of the naturally occurring L-amino acids
  MISC_FEATURE (18): Xaa equals any of the naturally occurring L-amino acids
  MISC_FEATURE (20): Xaa equals any of the naturally occurring L-amino acids
NELTFIKRYRTCXWAXWXGX

SEQ ID NO: 7751 - protein, 98 aa, Homo sapiens
  MISC_FEATURE (2): Xaa equals any of the naturally occurring L-amino acids
  MISC_FEATURE (88): Xaa equals any of the naturally occurring L-amino acids
CXYFQGVLGNNILQTHLVLFRSISWKRPASCCLSMDLNFYFYSLMKTQPFSIWGQSVSLVSVCHFMSYAHYQQLTQRTDRILAVSALXKEQFFMAIRI

SEQ ID NO: 7752 - protein, 83 aa, Homo sapiens
GWWLHSRRPLTASPTRSRPLARPSRFPHRLCSPPPQTPSPLDSHSLFHGAPRFREPPRGTWSPHPVTTSCLRGHLSPSHLAPQ

SEQ ID NO: 7753 - protein, 23 aa, Homo sapiens
GRVGWTLSLLCLSALNKDSPALK

SEQ ID NO: 7754 - protein, 47 aa, Homo sapiens
  MISC_FEATURE (1): Xaa equals any of the naturally occurring L-amino acids
  MISC_FEATURE (11): Xaa equals any of the naturally occurring L-amino acids
  MISC_FEATURE (36): Xaa equals any of the naturally occurring L-amino acids
  MISC_FEATURE (39): Xaa equals any of the naturally occurring L-amino acids
  MISC_FEATURE (44): Xaa equals any of the naturally occurring L-amino acids
XKPGGSDHHFXNNSRLPPQPQGFGEMWVCWSLCRLXPPXLDLAXPQS

SEQ ID NO: 7755 - protein, 16 aa, Homo sapiens
  MISC_FEATURE (2): Xaa equals any of the naturally occurring L-amino acids
  MISC_FEATURE (11): Xaa equals any of the naturally occurring L-amino acids
  MISC_FEATURE (16): Xaa equals any of the naturally occurring L-amino acids
YXHCFKIVIFXTGEKX

SEQ ID NO: 7756 - protein, 97 aa, Homo sapiens
CQLLTVIVRKGTDTIFALIGLIDSGDATGRAWRGEDGMCFLPTISIRTPIRFCVQLTFLNLSKYYAMEAKAPLPKQIISFHLCRNSGLLPFIVKFGR

SEQ ID NO: 7757 - protein, 19 aa, Homo sapiens
  MISC_FEATURE (2): Xaa equals any of the naturally occurring L-amino acids
  MISC_FEATURE (15): Xaa equals any of the naturally occurring L-amino acids
  MISC_FEATURE (17): Xaa equals any of the naturally occurring L-amino acids
MXRTVRSSVAEGGGXSXPF

SEQ ID NO: 7758 - protein, 48 aa, Homo sapiens
  MISC_FEATURE (2): Xaa equals any of the naturally occurring L-amino acids
  MISC_FEATURE (5): Xaa equals any of the naturally occurring L-amino acids
  MISC_FEATURE (12): Xaa equals any of the naturally occurring L-amino acids
  MISC_FEATURE (26): Xaa equals any of the naturally occurring L-amino acids
  MISC_FEATURE (36): Xaa equals any of the naturally occurring L-amino acids
  MISC_FEATURE (40): Xaa equals any of the naturally occurring L-amino acids
  MISC_FEATURE (47): Xaa equals any of the naturally occurring L-amino acids
QXIFXPSGLTSXVSVCGRRVPLTIYXALDCSRRLLXIVDXEERQKEXV

SEQ ID NO: 7759 - protein, 59 aa, Homo sapiens
  MISC_FEATURE (16): Xaa equals any of the naturally occurring L-amino acids
CLLFRSHFNERSFVFXIPFPRNFSTYKNNHFKLQKPRTYKPTPQTTFLIMTAFRNVGKL

SEQ ID NO: 7760 - protein, 19 aa, Homo sapiens
  MISC_FEATURE (12): Xaa equals any of the naturally occurring L-amino acids
  MISC_FEATURE (18): Xaa equals any of the naturally occurring L-amino acids
LSSMEEQLKTIXWLLLPXQ

SEQ ID NO: 7761 - protein, 18 aa, Homo sapiens
  MISC_FEATURE (8): Xaa equals any of the naturally occurring L-amino acids
  MISC_FEATURE (11): Xaa equals any of the naturally occurring L-amino acids
  MISC_FEATURE (16): Xaa equals any of the naturally occurring L-amino acids
DDAWDFLXPQXSKDFXLL

SEQ ID NO: 7762 - protein, 30 aa, Homo sapiens
  MISC_FEATURE (1): Xaa equals any of the naturally occurring L-amino acids
  MISC_FEATURE (2): Xaa equals any of the naturally occurring L-amino acids
  MISC_FEATURE (3): Xaa equals any of the naturally occurring L-amino acids
  MISC_FEATURE (17): Xaa equals any of the naturally occurring L-amino acids
  MISC_FEATURE (24): Xaa equals any of the naturally occurring L-amino acids
XXXKQKGGFLFRIIIFXLRSGNGXEHSMFV

SEQ ID NO: 7763 - protein, 21 aa, Homo sapiens
  MISC_FEATURE (3): Xaa equals any of the naturally occurring L-amino acids
  MISC_FEATURE (15): Xaa equals any of the naturally occurring L-amino acids
  MISC_FEATURE (17): Xaa equals any of the naturally occurring L-amino acids
  MISC_FEATURE (19): Xaa equals any of the naturally occurring L-amino acids
  MISC_FEATURE (21): Xaa equals any of the naturally occurring L-amino acids
AAXQVQTDRKMTMTXRXQXCX

SEQ ID NO: 7764 - protein, 69 aa, Homo sapiens
  MISC_FEATURE (56): Xaa equals any of the naturally occurring L-amino acids
  MISC_FEATURE (58): Xaa equals any of the naturally occurring L-amino acids
  MISC_FEATURE (64): Xaa equals any of the naturally occurring L-amino acids
  MISC_FEATURE (68): Xaa equals any of the naturally occurring L-amino acids
PIICLGFFSPVPDSTSSATNVSMVVSAGPWSSEKAEMNILEINEKLRPQLAENKQXFXNLKERXFLTXL

SEQ ID NO: 7765 - protein, 17 aa, Homo sapiens
  MISC_FEATURE (6): Xaa equals any of the naturally occurring L-amino acids
  MISC_FEATURE (11): Xaa equals any of the naturally occurring L-amino acids
  MISC_FEATURE (17): Xaa equals any of the naturally occurring L-amino acids
SGLISXTKLRXDTMSLX

SEQ ID NO: 7766 - protein, 35 aa, Homo sapiens
  MISC_FEATURE (21): Xaa equals any of the naturally occurring L-amino acids
  MISC_FEATURE (24): Xaa equals any of the naturally occurring L-amino acids
  MISC_FEATURE (29): Xaa equals any of the naturally occurring L-amino acids
  MISC_FEATURE (35): Xaa equals any of the naturally occurring L-amino acids
HHLPPFDFLMLYNFRLKGGDXVMXSPPNXASGRSX

SEQ ID NO: 7767 - protein, 65 aa, Homo sapiens
  MISC_FEATURE (21): Xaa equals any of the naturally occurring L-amino acids
  MISC_FEATURE (35): Xaa equals any of the naturally occurring L-amino acids
  MISC_FEATURE (57): Xaa equals any of the naturally occurring L-amino acids
  MISC_FEATURE (62): Xaa equals any of the naturally occurring L-amino acids
  MISC_FEATURE (64): Xaa equals any of the naturally occurring L-amino acids
LSYVVETKKFTFSCDHSRPHXIRVNLLSRLTKHYXLMKILHEDYKSIFCSYSAHLLXENLFXSXI

SEQ ID NO: 7768 - protein, 48 aa, Homo sapiens
CQSWLPDQGVAVGMCRGSHTCKKHLGSFLTWLGCSGQVMSPLALGSLC

SEQ ID NO: 7769 - protein, 48 aa, Homo sapiens
  MISC_FEATURE (37): Xaa equals any of the naturally occurring L-amino acids
  MISC_FEATURE (45): Xaa equals any of the naturally occurring L-amino acids
YEAQRIGPGNCLTKTQGCANSRDDVYSLTPARCRKVXRRVQTSVXGLN

SEQ ID NO: 7770 - protein, 22 aa, Homo sapiens
  MISC_FEATURE (2): Xaa equals any of the naturally occurring L-amino acids
  MISC_FEATURE (12): Xaa equals any of the naturally occurring L-amino acids
  MISC_FEATURE (16): Xaa equals any of the naturally occurring L-amino acids
  MISC_FEATURE (21): Xaa equals any of the naturally occurring L-amino acids
VXIASGRSRGSXLTYXVHATXI

SEQ ID NO: 7771 - protein, 25 aa, Homo sapiens
  MISC_FEATURE (18): Xaa equals any of the naturally occurring L-amino acids
  MISC_FEATURE (20): Xaa equals any of the naturally occurring L-amino acids
SIFKLMCFKIYFKVLQPXHXHALTR

SEQ ID NO: 7772 - protein, 22 aa, Homo sapiens
  MISC_FEATURE (13): Xaa equals any of the naturally occurring L-amino acids
  MISC_FEATURE (17): Xaa equals any of the naturally occurring L-amino acids
  MISC_FEATURE (18): Xaa equals any of the naturally occurring L-amino acids
  MISC_FEATURE (20): Xaa equals any of the naturally occurring L-amino acids
RNKCFLIQTASQXEHLXXDXII

SEQ ID NO: 7773 - protein, 54 aa, Homo sapiens
  MISC_FEATURE (35): Xaa equals any of the naturally occurring L-amino acids
  MISC_FEATURE (42): Xaa equals any of the naturally occurring L-amino acids
  MISC_FEATURE (45): Xaa equals any of the naturally occurring L-amino acids
  MISC_FEATURE (48): Xaa equals any of the naturally occurring L-amino acids
  MISC_FEATURE (50): Xaa equals any of the naturally occurring L-amino acids
NFPRISTISKMKKVLLLITAILAVAVGFPVSQDQXREKRSIXDSXELXSXFFVF

SEQ ID NO: 7774 - protein, 48 aa, Homo sapiens
  MISC_FEATURE (3): Xaa equals any of the naturally occurring L-amino acids
  MISC_FEATURE (7): Xaa equals any of the naturally occurring L-amino acids
  MISC_FEATURE (10): Xaa equals any of the naturally occurring L-amino acids
  MISC_FEATURE (11): Xaa equals any of the naturally occurring L-amino acids
  MISC_FEATURE (30): Xaa equals any of the naturally occurring L-amino acids
  MISC_FEATURE (35): Xaa equals any of the naturally occurring L-amino acids
  MISC_FEATURE (38): Xaa equals any of the naturally occurring L-amino acids
EPXGPLXIPXXYGKLVRLQVPVRNYRVDPXVRADXALXSSEALGALSF

SEQ ID NO: 7775 - protein, 35 aa, Homo sapiens
  MISC_FEATURE (34): Xaa equals any of the naturally occurring L-amino acids
RSSSIYTLKRVPSLVQLFIHPFFFYWFSSGGKWXF

SEQ ID NO: 7776 - protein, 44 aa, Homo sapiens
  MISC_FEATURE (1): Xaa equals any of the naturally occurring L-amino acids
  MISC_FEATURE (3): Xaa equals any of the naturally occurring L-amino acids
  MISC_FEATURE (7): Xaa equals any of the naturally occurring L-amino acids
  MISC_FEATURE (8): Xaa equals any of the naturally occurring L-amino acids
  MISC_FEATURE (13): Xaa equals any of the naturally occurring L-amino acids
  MISC_FEATURE (15): Xaa equals any of the naturally occurring L-amino acids
  MISC_FEATURE (18): Xaa equals any of the naturally occurring L-amino acids
  MISC_FEATURE (33): Xaa equals any of the naturally occurring L-amino acids
  MISC_FEATURE (38): Xaa equals any of the naturally occurring L-amino acids
  MISC_FEATURE (42): Xaa equals any of the naturally occurring L-amino acids
XPXAVYXXSGSSXHXLFXTTDYVTVTEDKMDLXIISHXVNVXPF

SEQ ID NO: 7777 - protein, 54 aa, Homo sapiens
  MISC_FEATURE (15): Xaa equals any of the naturally occurring L-amino acids
  MISC_FEATURE (21): Xaa equals any of the naturally occurring L-amino acids
KNDHEAKTTIFFCLXIGKEFXGPSCHHNAMKQKISKWIAINQFLKIRQKKTLSL

SEQ ID NO: 7778 - protein, 19 aa, Homo sapiens
  MISC_FEATURE (6): Xaa equals any of the naturally occurring L-amino acids
  MISC_FEATURE (13): Xaa equals any of the naturally occurring L-amino acids
  MISC_FEATURE (15): Xaa equals any of the naturally occurring L-amino acids
VDALVXPQDHAVXEXALRA

SEQ ID NO: 7779 - protein, 69 aa, Homo sapiens
  MISC_FEATURE (42): Xaa equals any of the naturally occurring L-amino acids
  MISC_FEATURE (55): Xaa equals any of the naturally occurring L-amino acids
DLALRLLSTPPVLPEKGQMFPEQKTSPLLCLTWSPIHALFLXSVYSLSLGLEEPXMWPLAKLDNVQTHS

SEQ ID NO: 7780 - protein, 37 aa, Homo sapiens
  MISC_FEATURE (20): Xaa equals any of the naturally occurring L-amino acids
  MISC_FEATURE (23): Xaa equals any of the naturally occurring L-amino acids
  MISC_FEATURE (29): Xaa equals any of the naturally occurring L-amino acids
  MISC_FEATURE (36): Xaa equals any of the naturally occurring L-amino acids
  MISC_FEATURE (37): Xaa equals any of the naturally occurring L-amino acids
MLVTLIHCIMVIFHLIYLEXVVXRIGVHXHGTCIEXX

SEQ ID NO: 7781 - protein, 24 aa, Homo sapiens
  MISC_FEATURE (5): Xaa equals any of the naturally occurring L-amino acids
  MISC_FEATURE (16): Xaa equals any of the naturally occurring L-amino acids
  MISC_FEATURE (24): Xaa equals any of the naturally occurring L-amino acids
HHRIXELFKMKFNPFXTFRPEARX

SEQ ID NO: 7782 - protein, 58 aa, Homo sapiens
  MISC_FEATURE (4): Xaa equals any of the naturally occurring L-amino acids
  MISC_FEATURE (5): Xaa equals any of the naturally occurring L-amino acids
  MISC_FEATURE (14): Xaa equals any of the naturally occurring L-amino acids
  MISC_FEATURE (24): Xaa equals any of the naturally occurring L-amino acids
  MISC_FEATURE (25): Xaa equals any of the naturally occurring L-amino acids
  MISC_FEATURE (37): Xaa equals any of the naturally occurring L-amino acids
  MISC_FEATURE (39): Xaa equals any of the naturally occurring L-amino acids
  MISC_FEATURE (49): Xaa equals any of the naturally occurring L-amino acids
  MISC_FEATURE (52): Xaa equals any of the naturally occurring L-amino acids
LFVXXGWVSPRRLXWGGAACFWAXXGAPSPGSKPSFXKXPGRDLLQRAXGKXEREKAP

SEQ ID NO: 7783 - protein, 65 aa, Homo sapiens
  MISC_FEATURE (5): Xaa equals any of the naturally occurring L-amino acids
  MISC_FEATURE (10): Xaa equals any of the naturally occurring L-amino acids
  MISC_FEATURE (33): Xaa equals any of the naturally occurring L-amino acids
  MISC_FEATURE (46): Xaa equals any of the naturally occurring L-amino acids
  MISC_FEATURE (64): Xaa equals any of the naturally occurring L-amino acids
VSNWXLLTLXVPDCCSFTDLIQVTRSFIGLNQXPCSQVTDLPIVPXILFNLNEREFALNGKVPXF

SEQ ID NO: 7784 - protein, 57 aa, Homo sapiens
  MISC_FEATURE (8): Xaa equals any of the naturally occurring L-amino acids
  MISC_FEATURE (10): Xaa equals any of the naturally occurring L-amino acids
  MISC_FEATURE (32): Xaa equals any of the naturally occurring L-amino acids
QCNLQFPXKXKKVNLAAIEYTMCIYNSYFIYXSINIFKLNVLHSQVVGSLVIKVCVI

SEQ ID NO: 7785 - protein, 135 aa, Homo sapiens
VMITETAAEPTVPAVPAAEEATEARGREEPAWPWKDAPIRTLVQRIHQLQAERAQGFRRLEEGHRQYLRSGPDYDFARYRSTVHGVTQAFAAASREVLAVEAELGGPRRQPLLAGHVRSCRIWSRRGWARWPCCS

SEQ ID NO: 7786 - protein, 28 aa, Homo sapiens
  MISC_FEATURE (10): Xaa equals any of the naturally occurring L-amino acids
  MISC_FEATURE (20): Xaa equals any of the naturally occurring L-amino acids
  MISC_FEATURE (21): Xaa equals any of the naturally occurring L-amino acids
LDFRRLIPGXLSGGDRGGEXXPGADPEC

SEQ ID NO: 7787 - protein, 17 aa, Homo sapiens
  MISC_FEATURE (1): Xaa equals any of the naturally occurring L-amino acids
  MISC_FEATURE (4): Xaa equals any of the naturally occurring L-amino acids
  MISC_FEATURE (17): Xaa equals any of the naturally occurring L-amino acids
XTRXSLVSFKKYHPTKX

SEQ ID NO: 7788 - protein, 27 aa, Homo sapiens
  MISC_FEATURE (15): Xaa equals any of the naturally occurring L-amino acids
  MISC_FEATURE (17): Xaa equals any of the naturally occurring L-amino acids
  MISC_FEATURE (18): Xaa equals any of the naturally occurring L-amino acids
YRVPDMKAFALLIRXGXXSRTGIHLRV

SEQ ID NO: 7789 - protein, 53 aa, Homo sapiens
GRVGPCRDKAAGPELDSVSSWGRTGTQGVMPHPPSRAGASTSQFVQIHPPFKK

SEQ ID NO: 7790 - protein, 69 aa, Homo sapiens
ERLESNGWKGGFSVMDTFFFSEANPRHCERNGFSYEDFKFSQLFSQVLGMSFALTLNCQIDKTSQTIGL

SEQ ID NO: 7791 - protein, 19 aa, Homo sapiens
  MISC_FEATURE (2): Xaa equals any of the naturally occurring L-amino acids
  MISC_FEATURE (13): Xaa equals any of the naturally occurring L-amino acids
  MISC_FEATURE (14): Xaa equals any of the naturally occurring L-amino acids
PXRPDGDGGGDHXXAEPLQ

SEQ ID NO: 7792 - protein, 71 aa, Homo sapiens
  MISC_FEATURE (34): Xaa equals any of the naturally occurring L-amino acids
  MISC_FEATURE (48): Xaa equals any of the naturally occurring L-amino acids
  MISC_FEATURE (58): Xaa equals any of the naturally occurring L-amino acids
  MISC_FEATURE (61): Xaa equals any of the naturally occurring L-amino acids
  MISC_FEATURE (65): Xaa equals any of the naturally occurring L-amino acids
PWASPLPPHPLTPGKPTAPPVPQLTDPRQAHCPXIPSPRVSPLPLPPXTDPGQAEYSXWTXGKDXGTTWTP

SEQ ID NO: 7793 - protein, 54 aa, Homo sapiens
  MISC_FEATURE (2): Xaa equals any of the naturally occurring L-amino acids
  MISC_FEATURE (5): Xaa equals any of the naturally occurring L-amino acids
  MISC_FEATURE (33): Xaa equals any of the naturally occurring L-amino acids
  MISC_FEATURE (35): Xaa equals any of the naturally occurring L-amino acids
  MISC_FEATURE (36): Xaa equals any of the naturally occurring L-amino acids
  MISC_FEATURE (37): Xaa equals any of the naturally occurring L-amino acids
AXTHXCTGPAFPGRPTRPQPPFHPPNIALRLRXTXXXNQTFVQGVNTDSCLLYC

SEQ ID NO: 7794 - protein, 32 aa, Homo sapiens
  MISC_FEATURE (15): Xaa equals any of the naturally occurring L-amino acids
  MISC_FEATURE (17): Xaa equals any of the naturally occurring L-amino acids
  MISC_FEATURE (22): Xaa equals any of the naturally occurring L-amino acids
  MISC_FEATURE (29): Xaa equals any of the naturally occurring L-amino acids
DLYPWPFFFFFFPGXLXHCSFXLYFLPYXNQR

SEQ ID NO: 7795 - protein, 75 aa, Homo sapiens
GPLVRLQVPVRNSRVDPRVRKKGYCIFKNRKLNPSCEKPVVLCAWCCAEPGAVVLCWDFLDSWAGHILQELSRPV

SEQ ID NO: 7796 - protein, 89 aa, Homo sapiens
  MISC_FEATURE (61): Xaa equals any of the naturally occurring L-amino acids
GKLVRLQVPVRNSRVVLCLEANLGPSSVEPFSAVYPSKCLAFQIIVSLMCVRRGGSGWRRXPNTSLPCQHLPPRLGKNQNNKDNAISCS

SEQ ID NO: 7797 - protein, 83 aa, Homo sapiens
  MISC_FEATURE (44): Xaa equals any of the naturally occurring L-amino acids
  MISC_FEATURE (61): Xaa equals any of the naturally occurring L-amino acids
  MISC_FEATURE (83): Xaa equals any of the naturally occurring L-amino acids
ILCFNSWNPSVCLGGSLLIKYSRPTTIAAFLIPPLLKLLLRLTXVSSLPLIETLEFSGPLXLPISCSKSCNYWDGKVTNSDHX

SEQ ID NO: 7798 - protein, 62 aa, Homo sapiens
KIFEKIPGIQRQPKANLGIPSYFTVQKISPISKDNTGNDKIYVFERIVMFLASTLIKGRCSL

SEQ ID NO: 7799 - protein, 34 aa, Homo sapiens
  MISC_FEATURE (14): Xaa equals any of the naturally occurring L-amino acids
  MISC_FEATURE (16): Xaa equals any of the naturally occurring L-amino acids
  MISC_FEATURE (22): Xaa equals any of the naturally occurring L-amino acids
  MISC_FEATURE (29): Xaa equals any of the naturally occurring L-amino acids
HWSLCCASGTAQLXGXAQATKXRKQLRFXPIMNQ

SEQ ID NO: 7800 - protein, 139 aa, Homo sapiens
PAALGGGVVAVAVCEPVARLLWAGTLKVSNSRWLMRSYKRVRFAGARLRVSVLYCFSRRPSAPRLPHVQAERRVGRSRRRRSRGGAGGGEAAPARNAGSWGSPHVAGAQAVPRLLRDGTVAALIPIASFFFFFFTSTAF

SEQ ID NO: 7801 - protein, 40 aa, Homo sapiens
  MISC_FEATURE (22): Xaa equals any of the naturally occurring L-amino acids
  MISC_FEATURE (32): Xaa equals any of the naturally occurring L-amino acids
  MISC_FEATURE (35): Xaa equals any of the naturally occurring L-amino acids
SSLGSRGAERSIDDIGHLIHEXLQNLLSLQPXSNXIVLKF

SEQ ID NO: 7802 - protein, 22 aa, Homo sapiens
  MISC_FEATURE (5): Xaa equals any of the naturally occurring L-amino acids
  MISC_FEATURE (14): Xaa equals any of the naturally occurring L-amino acids
  MISC_FEATURE (16): Xaa equals any of the naturally occurring L-amino acids
  MISC_FEATURE (17): Xaa equals any of the naturally occurring L-amino acids
GKTQXVSDSLIFIXVXXKWVFL

SEQ ID NO: 7803 - protein, 69 aa, Homo sapiens
  MISC_FEATURE (4): Xaa equals any of the naturally occurring L-amino acids
  MISC_FEATURE (5): Xaa equals any of the naturally occurring L-amino acids
  MISC_FEATURE (6): Xaa equals any of the naturally occurring L-amino acids
  MISC_FEATURE (7): Xaa equals any of the naturally occurring L-amino acids
  MISC_FEATURE (8): Xaa equals any of the naturally occurring L-amino acids
KTSXXXXXLSLKLVRLQVPVRNSRVDPRVRPRVRCSNRHIKEVLWMEAQRKKRLIVSKNLEGMKMKIEI

SEQ ID NO: 7804 - protein, 61 aa, Homo sapiens
  MISC_FEATURE (55): Xaa equals any of the naturally occurring L-amino acids
  MISC_FEATURE (56): Xaa equals any of the naturally occurring L-amino acids
  MISC_FEATURE (59): Xaa equals any of the naturally occurring L-amino acids
  MISC_FEATURE (60): Xaa equals any of the naturally occurring L-amino acids
SICLWSKQLASFMCGLLTKLPMLVSFLHYDVYSLLKLLLLSVLLSHCSACSSSAXXSDXXP

SEQ ID NO: 7805 - protein, 62 aa, Homo sapiens
  MISC_FEATURE (12): Xaa equals any of the naturally occurring L-amino acids
  MISC_FEATURE (15): Xaa equals any of the naturally occurring L-amino acids
  MISC_FEATURE (25): Xaa equals any of the naturally occurring L-amino acids
  MISC_FEATURE (41): Xaa equals any of the naturally occurring L-amino acids
  MISC_FEATURE (43): Xaa equals any of the naturally occurring L-amino acids
  MISC_FEATURE (61): Xaa equals any of the naturally occurring L-amino acids
GGGKKALGVKRXLGXRVNPGGSPGXNFSPRGGSGKPPNGRXPXWGALTLTGNGGRKWKSFXR

SEQ ID NO: 7806 - protein, 54 aa, Homo sapiens
  MISC_FEATURE (2): Xaa equals any of the naturally occurring L-amino acids
  MISC_FEATURE (3): Xaa equals any of the naturally occurring L-amino acids
  MISC_FEATURE (27): Xaa equals any of the naturally occurring L-amino acids
  MISC_FEATURE (28): Xaa equals any of the naturally occurring L-amino acids
  MISC_FEATURE (30): Xaa equals any of the naturally occurring L-amino acids
  MISC_FEATURE (32): Xaa equals any of the naturally occurring L-amino acids
  MISC_FEATURE (46): Xaa equals any of the naturally occurring L-amino acids
PXXRTIPSIPVVPELPCPKACARFTPXXAXLXPENSEDMNSRQAWXLLLSQGRG

SEQ ID NO: 7807 - protein, 51 aa, Homo sapiens
  MISC_FEATURE (1): Xaa equals any of the naturally occurring L-amino acids
  MISC_FEATURE (8): Xaa equals any of the naturally occurring L-amino acids
  MISC_FEATURE (23): Xaa equals any of the naturally occurring L-amino acids
  MISC_FEATURE (29): Xaa equals any of the naturally occurring L-amino acids
  MISC_FEATURE (46): Xaa equals any of the naturally occurring L-amino acids
  MISC_FEATURE (50): Xaa equals any of the naturally occurring L-amino acids
XFPGRPIXLPPLSCPEEATPCLXRGPGNXCGPEEWRGCGMNTMTAXIRLXP

SEQ ID NO: 7808 - protein, 88 aa, Homo sapiens
  MISC_FEATURE (6): Xaa equals any of the naturally occurring L-amino acids
  MISC_FEATURE (15): Xaa equals any of the naturally occurring L-amino acids
  MISC_FEATURE (20): Xaa equals any of the naturally occurring L-amino acids
  MISC_FEATURE (21): Xaa equals any of the naturally occurring L-amino acids
  MISC_FEATURE (22): Xaa equals any of the naturally occurring L-amino acids
  MISC_FEATURE (25): Xaa equals any of the naturally occurring L-amino acids
  MISC_FEATURE (33): Xaa equals any of the naturally occurring L-amino acids
  MISC_FEATURE (40): Xaa equals any of the naturally occurring L-amino acids
  MISC_FEATURE (44): Xaa equals any of the naturally occurring L-amino acids
  MISC_FEATURE (53): Xaa equals any of the naturally occurring L-amino acids
  MISC_FEATURE (66): Xaa equals any of the naturally occurring L-amino acids
  MISC_FEATURE (85): Xaa equals any of the naturally occurring L-amino acids
  MISC_FEATURE (88): Xaa equals any of the naturally occurring L-amino acids
LAPWDXWVGQVILLXSGSRXXXGDXDDRDKITXEKIQELXGEGXGLTKLSLPXKGELEATDVGTAXCFPDDETGAVMLRAPSSGXCTX

SEQ ID NO: 7809 - protein, 18 aa, Homo sapiens
  MISC_FEATURE (11): Xaa equals any of the naturally occurring L-amino acids
  MISC_FEATURE (13): Xaa equals any of the naturally occurring L-amino acids
  MISC_FEATURE (14): Xaa equals any of the naturally occurring L-amino acids
  MISC_FEATURE (16): Xaa equals any of the naturally occurring L-amino acids
  MISC_FEATURE (18): Xaa equals any of the naturally occurring L-amino acids
AISRIASGRPXGXXFXGX

SEQ ID NO: 7810 - protein, 53 aa, Homo sapiens
  MISC_FEATURE (14): Xaa equals any of the naturally occurring L-amino acids
  MISC_FEATURE (16): Xaa equals any of the naturally occurring L-amino acids
  MISC_FEATURE (24): Xaa equals any of the naturally occurring L-amino acids
  MISC_FEATURE (31): Xaa equals any of the naturally occurring L-amino acids
  MISC_FEATURE (39): Xaa equals any of the naturally occurring L-amino acids
  MISC_FEATURE (40): Xaa equals any of the naturally occurring L-amino acids
  MISC_FEATURE (51): Xaa equals any of the naturally occurring L-amino acids
KFTKCLVQLNILLXKXCVAKIFYXHYLNNLXGKNVWSSXXPLLFLSSYFQXVK

SEQ ID NO: 7811 - protein, 15 aa, Homo sapiens
  MISC_FEATURE (8): Xaa equals any of the naturally occurring L-amino acids
  MISC_FEATURE (9): Xaa equals any of the naturally occurring L-amino acids
  MISC_FEATURE (11): Xaa equals any of the naturally occurring L-amino acids
  MISC_FEATURE (14): Xaa equals any of the naturally occurring L-amino acids
  MISC_FEATURE (15): Xaa equals any of the naturally occurring L-amino acids
WIELSGWXXAXHGXX

SEQ ID NO: 7812 - protein, 30 aa, Homo sapiens
  MISC_FEATURE (10): Xaa equals any of the naturally occurring L-amino acids
  MISC_FEATURE (21): Xaa equals any of the naturally occurring L-amino acids
  MISC_FEATURE (28): Xaa equals any of the naturally occurring L-amino acids
  MISC_FEATURE (29): Xaa equals any of the naturally occurring L-amino acids
GKPPIFGLKXPHFTLISVVKXPGAHRHXXR

SEQ ID NO: 7813 - protein, 45 aa, Homo sapiens
  MISC_FEATURE (1): Xaa equals any of the naturally occurring L-amino acids
  MISC_FEATURE (5): Xaa equals any of the naturally occurring L-amino acids
  MISC_FEATURE (8): Xaa equals any of the naturally occurring L-amino acids
  MISC_FEATURE (17): Xaa equals any of the naturally occurring L-amino acids
  MISC_FEATURE (28): Xaa equals any of the naturally occurring L-amino acids
  MISC_FEATURE (30): Xaa equals any of the naturally occurring L-amino acids
  MISC_FEATURE (31): Xaa equals any of the naturally occurring L-amino acids
  MISC_FEATURE (32): Xaa equals any of the naturally occurring L-amino acids
XWVSXSRXREEDGLHTXCPPAPSPASLXPXXXRWPKECKYLMKYV

SEQ ID NO: 7814 - protein, 30 aa, Homo sapiens
  MISC_FEATURE (11): Xaa equals any of the naturally occurring L-amino acids
  MISC_FEATURE (18): Xaa equals any of the naturally occurring L-amino acids
  MISC_FEATURE (19): Xaa equals any of the naturally occurring L-amino acids
NVNKWREKGLXDKPDTWXXGITPGGTRGKM

SEQ ID NO: 7815 - protein, 16 aa, Homo sapiens
  MISC_FEATURE (10): Xaa equals any of the naturally occurring L-amino acids
  MISC_FEATURE (11): Xaa equals any of the naturally occurring L-amino acids
  MISC_FEATURE (15): Xaa equals any of the naturally occurring L-amino acids
VAIACVVGVXXFCLXK

SEQ ID NO: 7816 - protein, 84 aa, Homo sapiens
  MISC_FEATURE (2): Xaa equals any of the naturally occurring L-amino acids
  MISC_FEATURE (14): Xaa equals any of the naturally occurring L-amino acids
  MISC_FEATURE (31): Xaa equals any of the naturally occurring L-amino acids
  MISC_FEATURE (39): Xaa equals any of the naturally occurring L-amino acids
  MISC_FEATURE (41): Xaa equals any of the naturally occurring L-amino acids
  MISC_FEATURE (43): Xaa equals any of the naturally occurring L-amino acids
  MISC_FEATURE (65): Xaa equals any of the naturally occurring L-amino acids
  MISC_FEATURE (72): Xaa equals any of the naturally occurring L-amino acids
  MISC_FEATURE (77): Xaa equals any of the naturally occurring L-amino acids
  MISC_FEATURE (82): Xaa equals any of the naturally occurring L-amino acids
AXIAPPRGAPPLAXGARVSVTLCTPLTVVRXKVPPGRPXAXAXHRASVLQCNNWTRPCRSSRFLXLAPRLSXFAHKXEELAXGG

SEQ ID NO: 7817 - protein, 18 aa, Homo sapiens
  MISC_FEATURE (3): Xaa equals any of the naturally occurring L-amino acids
  MISC_FEATURE (8): Xaa equals any of the naturally occurring L-amino acids
  MISC_FEATURE (9): Xaa equals any of the naturally occurring L-amino acids
  MISC_FEATURE (13): Xaa equals any of the naturally occurring L-amino acids
GGXSLGSXXSTAXGPGMD

SEQ ID NO: 7818 - protein, 52 aa, Homo sapiens
  MISC_FEATURE (48): Xaa equals any of the naturally occurring L-amino acids
WTCFLHSSTVWKRWLTAAWLSEFQRNGLLLNIQVLLHTREHTLSLPLXVGVS

SEQ ID NO: 7819 - protein, 64 aa, Homo sapiens
  MISC_FEATURE (48): Xaa equals any of the naturally occurring L-amino acids
  MISC_FEATURE (51): Xaa equals any of the naturally occurring L-amino acids
  MISC_FEATURE (52): Xaa equals any of the naturally occurring L-amino acids
ILMLTRGENKTQVFSIYAAHPKLPQMILPSDNFIYKLGKIWCGPFRPXMPXXTPSCSNDQNMLE

SEQ ID NO: 7820 - protein, 166 aa, Homo sapiens
  MISC_FEATURE (162): Xaa equals any of the naturally occurring L-amino acids
  MISC_FEATURE (163): Xaa equals any of the naturally occurring L-amino acids
GAGLRAWQRLDHGVPAPGLARVQSQLQAVNTVSARVLLGSAAPRPPPASLLGAAPCWQPAPPSPPSLGWLGLLAYSTLLRSRSRSAALDARSLLFLKCLFVPPHLFPVIIYSLGPRPPTHTFMNPHFFFPSPFPSPPQGASSFSQSICPLIWPLLSLSPHGXXFTR

SEQ ID NO: 7821 - protein, 42 aa, Homo sapiens
RGYCEATAKMLIQKIRSNTYSFIDYMRIAQGLVKLWQTRDIE

SEQ ID NO: 7822 - protein, 39 aa, Homo sapiens
EDLRKKTFRFPLKNRTQNWLVNVFRMMNKSLINSVTYVF

SEQ ID NO: 7823 - protein, 77 aa, Homo sapiens
  MISC_FEATURE (71): Xaa equals any of the naturally occurring L-amino acids
KLAISEGEEGGQGEGAGMAAGSQAVSGAGAQEAHRRASWKEWTVSEARGKRHLLELVTPAWCPPKPEYEAXRMQVSS

SEQ ID NO: 7824 - protein, 58 aa, Homo sapiens
  MISC_FEATURE (2): Xaa equals any of the naturally occurring L-amino acids
  MISC_FEATURE (12): Xaa equals any of the naturally occurring L-amino acids
  MISC_FEATURE (21): Xaa equals any of the naturally occurring L-amino acids
  MISC_FEATURE (26): Xaa equals any of the naturally occurring L-amino acids
  MISC_FEATURE (29): Xaa equals any of the naturally occurring L-amino acids
  MISC_FEATURE (30): Xaa equals any of the naturally occurring L-amino acids
  MISC_FEATURE (34): Xaa equals any of the naturally occurring L-amino acids
  MISC_FEATURE (35): Xaa equals any of the naturally occurring L-amino acids
  MISC_FEATURE (38): Xaa equals any of the naturally occurring L-amino acids
  MISC_FEATURE (39): Xaa equals any of the naturally occurring L-amino acids
  MISC_FEATURE (40): Xaa equals any of the naturally occurring L-amino acids
  MISC_FEATURE (42): Xaa equals any of the naturally occurring L-amino acids
  MISC_FEATURE (45): Xaa equals any of the naturally occurring L-amino acids
  MISC_FEATURE (51): Xaa equals any of the naturally occurring L-amino acids
NXYGWKFKLRAXCCYLQRETXVMRMXKIXXLRIXXIEXXXYXMIXQKKGQXCNQRGRE

SEQ ID NO: 7825 - protein, 38 aa, Homo sapiens
IEKTCLYLMIPVLMFCVIGEVQKLRNIVDSIENSILEE

SEQ ID NO: 7826 - protein, 44 aa, Homo sapiens
  MISC_FEATURE (3): Xaa equals any of the naturally occurring L-amino acids
  MISC_FEATURE (18): Xaa equals any of the naturally occurring L-amino acids
  MISC_FEATURE (23): Xaa equals any of the naturally occurring L-amino acids
  MISC_FEATURE (33): Xaa equals any of the naturally occurring L-amino acids
  MISC_FEATURE (34): Xaa equals any of the naturally occurring L-amino acids
DYXRESWYACRYRSGIPXSTHSXGKKPLGPGIXXITFVRKCCAF

SEQ ID NO: 7827 - protein, 78 aa, Homo sapiens
ARARAGAIAVTEGSSLRPRLQLKSLDKHLTPASGMKGGNLDLNGLDHLTTARVTTAFVAGKKIAVSTQESSNFTVFVF

SEQ ID NO: 7828 - protein, 63 aa, Homo sapiens
GTSPVDEHVDINGLAWPKLPAQHALASAGYSENILFKTLYRTNRPRGSFVHSWPLKLSRLSKG

SEQ ID NO: 7829 - protein, 26 aa, Homo sapiens
CFTVRYKIKMKLCHADNVYQVILEIS

SEQ ID NO: 7830 - protein, 64 aa, Homo sapiens
NLYQCVHQLSNHRVLSTAKKSLEKEEELCLFTPLLCTSKIQWWEKICSSFSQRYSLGNALKRTK

SEQ ID NO: 7831 - protein, 51 aa, Homo sapiens
SPLFLPTLKKMSSYFFWERGGLIRKKCSVFHLKFWHMAFSNLGSHNVLGPS

SEQ ID NO: 7832 - protein, 123 aa, Homo sapiens
  MISC_FEATURE (120): Xaa equals any of the naturally occurring L-amino acids
  MISC_FEATURE (122): Xaa equals any of the naturally occurring L-amino acids
FGVTYLEDYSAEYIIQQGGWGTVFSLESEEEEYPGITAEDSNDIYILPSDNSGQVSPPESPTVTTSWQSESLPVSLSASQSWHTESLPVSLGPESWQQIAMDPEEVKSLDSNGAGEKSEXNXS

SEQ ID NO: 7833 - protein, 81 aa, Homo sapiens
  MISC_FEATURE (2): Xaa equals any of the naturally occurring L-amino acids
  MISC_FEATURE (6): Xaa equals any of the naturally occurring L-amino acids
PXPPPXVPTRAHPCHLCPQPPRLSATASFSTEDLGKGCCLCSFFHFCPLLALRVDGVVLQYWIVPALRTKEKFKLSVEKGI

SEQ ID NO: 7834 - protein, 32 aa, Homo sapiens
TYAYSYITISKIGGLRDAIVHSLNVLMKPKKS

SEQ ID NO: 7835 - protein, 50 aa, Homo sapiens
PLSYFFLSVSLSPASESPISSVSTCRIIIMPCTSSLITCTVFFLILYQMH

SEQ ID NO: 7836 - protein, 58 aa, Homo sapiens
TQVITPWAGPAPQGPIPLLPSLSSPTAQAGAKPTGRTCDHRQGPRTPAPGILTSRKET

SEQ ID NO: 7837 - protein, 65 aa, Homo sapiens
KWNEVPGDLNSHGGKRKRTLCKEMASRVPGEPIPLGRRCSVRWTWTWIKWVFNKYLLSRWWRRHD

SEQ ID NO: 7838 - protein, 57 aa, Homo sapiens
  MISC_FEATURE (7): Xaa equals any of the naturally occurring L-amino acids
  MISC_FEATURE (11): Xaa equals any of the naturally occurring L-amino acids
  MISC_FEATURE (12): Xaa equals any of the naturally occurring L-amino acids
WVPRAAXIRQXXLGSSFGSGAGSSSFSRTSSSRAVVVKKIETRDGKLVSESSDVLPK

SEQ ID NO: 7839 - protein, 58 aa, Homo sapiens
  MISC_FEATURE (42): Xaa equals any of the naturally occurring L-amino acids
KFTKCLVQLNILLFKCVLLNFLLSLLNNLCGKMCVSTFPSFXISYFQESNVAINCILV

SEQ ID NO: 7840 - protein, 118 aa, Homo sapiens
  MISC_FEATURE (58): Xaa equals any of the naturally occurring L-amino acids
  MISC_FEATURE (61): Xaa equals any of the naturally occurring L-amino acids
  MISC_FEATURE (62): Xaa equals any of the naturally occurring L-amino acids
  MISC_FEATURE (78): Xaa equals any of the naturally occurring L-amino acids
  MISC_FEATURE (81): Xaa equals any of the naturally occurring L-amino acids
  MISC_FEATURE (82): Xaa equals any of the naturally occurring L-amino acids
  MISC_FEATURE (101): Xaa equals any of the naturally occurring L-amino acids
  MISC_FEATURE (102): Xaa equals any of the naturally occurring L-amino acids
  MISC_FEATURE (106): Xaa equals any of the naturally occurring L-amino acids
  MISC_FEATURE (118): Xaa equals any of the naturally occurring L-amino acids
PRVRPRVRENQDQASFCPSAPREVSVLPELALGHLRYRLTGVPPQSNSPPGTVPGAGXARXXRGRALGARSESPSGLXPPXXRVSEKTIRVVVFHRRPARXXKPGXGAPSRGKRGGAX

SEQ ID NO: 7841 - protein, 19 aa, Homo sapiens
  MISC_FEATURE (6): Xaa equals any of the naturally occurring L-amino acids
  MISC_FEATURE (12): Xaa equals any of the naturally occurring L-amino acids
  MISC_FEATURE (18): Xaa equals any of the naturally occurring L-amino acids
ESRLRXPDSRPXARPHLXP

SEQ ID NO: 7842 - protein, 51 aa, Homo sapiens
  MISC_FEATURE (3): Xaa equals any of the naturally occurring L-amino acids
  MISC_FEATURE (8): Xaa equals any of the naturally occurring L-amino acids
  MISC_FEATURE (12): Xaa equals any of the naturally occurring L-amino acids
  MISC_FEATURE (17): Xaa equals any of the naturally occurring L-amino acids
  MISC_FEATURE (23): Xaa equals any of the naturally occurring L-amino acids
  MISC_FEATURE (35): Xaa equals any of the naturally occurring L-amino acids
  MISC_FEATURE (37): Xaa equals any of the naturally occurring L-amino acids
  MISC_FEATURE (46): Xaa equals any of the naturally occurring L-amino acids
  MISC_FEATURE (51): Xaa equals any of the naturally occurring L-amino acids
SLXGTNLXEYLXKEKLXKEAAKXLEQSKEADIDSXDXSDIEEDIDXPSAHX

SEQ ID NO: 7843 - protein, 63 aa, Homo sapiens
  MISC_FEATURE (62): Xaa equals any of the naturally occurring L-amino acids
  MISC_FEATURE (63): Xaa equals any of the naturally occurring L-amino acids
ILVQYDVIQLCIELNFGCIYMYYTCHASSCFNHFITIFVHILLENILNGNLNKHLIVYIKKXX

SEQ ID NO: 7844 - protein, 20 aa, Homo sapiens
  MISC_FEATURE (1): Xaa equals any of the naturally occurring L-amino acids
  MISC_FEATURE (4): Xaa equals any of the naturally occurring L-amino acids
  MISC_FEATURE (8): Xaa equals any of the naturally occurring L-amino acids
  MISC_FEATURE (18): Xaa equals any of the naturally occurring L-amino acids
  MISC_FEATURE (19): Xaa equals any of the naturally occurring L-amino acids
XKMXEQEXVAQLYMTLKXXE

SEQ ID NO: 7845 - protein, 64 aa, Homo sapiens
  MISC_FEATURE (46): Xaa equals any of the naturally occurring L-amino acids
  MISC_FEATURE (59): Xaa equals any of the naturally occurring L-amino acids
IPPCSVYLQDCIGNLSSSSPSPHYLLHTVLTDSVLILITRTINSSXGISGVYSRLSLIXVPKFF

SEQ ID NO: 7846 - protein, 49 aa, Homo sapiens
  MISC_FEATURE (23): Xaa equals any of the naturally occurring L-amino acids
  MISC_FEATURE (29): Xaa equals any of the naturally occurring L-amino acids
  MISC_FEATURE (35): Xaa equals any of the naturally occurring L-amino acids
  MISC_FEATURE (38): Xaa equals any of the naturally occurring L-amino acids
EEINILFQEELISLAKYLPFIMXSKSAIXFSFNFXKLXNYFKNSCRWWK

SEQ ID NO: 7847 - protein, 55 aa, Homo sapiens
  MISC_FEATURE (4): Xaa equals any of the naturally occurring L-amino acids
  MISC_FEATURE (41): Xaa equals any of the naturally occurring L-amino acids
  MISC_FEATURE (42): Xaa equals any of the naturally occurring L-amino acids
  MISC_FEATURE (45): Xaa equals any of the naturally occurring L-amino acids
  MISC_FEATURE (51): Xaa equals any of the naturally occurring L-amino acids
  MISC_FEATURE (55): Xaa equals any of the naturally occurring L-amino acids
GRWXSGDKFWHILSTLWVDRGGRMEHPWRGYVGDSIFPPAXXNKXLIWGKXWHTX

SEQ ID NO: 7848 - protein, 33 aa, Homo sapiens
  MISC_FEATURE (14): Xaa equals any of the naturally occurring L-amino acids
  MISC_FEATURE (20): Xaa equals any of the naturally occurring L-amino acids
  MISC_FEATURE (22): Xaa equals any of the naturally occurring L-amino acids
  MISC_FEATURE (27): Xaa equals any of the naturally occurring L-amino acids
  MISC_FEATURE (33): Xaa equals any of the naturally occurring L-amino acids
RKLHELIVLYGKIXLERYFXKXFFPSXNFMKLX

SEQ ID NO: 7849 - protein, 85 aa, Homo sapiens
  MISC_FEATURE (79): Xaa equals any of the naturally occurring L-amino acids
RTYFPVKMPTTKKTLMFLSSFFTSLGSFIVICSILGTQAWITSTIAVRDSASNGSIFITYGLFRGESSEELSHGLAEPXKKFCSF

SEQ ID NO: 7850 - protein, 36 aa, Homo sapiens
  MISC_FEATURE (15): Xaa equals any of the naturally occurring L-amino acids
LTIRNEYSNFPFSRXPTMAGGLFAMNRQYFHGTWTV

SEQ ID NO: 7851 - protein, 52 aa, Homo sapiens
  MISC_FEATURE (2): Xaa equals any of the naturally occurring L-amino acids
  MISC_FEATURE (7): Xaa equals any of the naturally occurring L-amino acids
  MISC_FEATURE (13): Xaa equals any of the naturally occurring L-amino acids
  MISC_FEATURE (29): Xaa equals any of the naturally occurring L-amino acids
  MISC_FEATURE (36): Xaa equals any of the naturally occurring L-amino acids
  MISC_FEATURE (41): Xaa equals any of the naturally occurring L-amino acids
  MISC_FEATURE (43): Xaa equals any of the naturally occurring L-amino acids
  MISC_FEATURE (51): Xaa equals any of the naturally occurring L-amino acids
QXHISPXASCEVXAPQPSPAGRPRGHWRXPDLGPVXLPAFXEXGGRRAAPXV

SEQ ID NO: 7852 - protein, 25 aa, Homo sapiens
  MISC_FEATURE (11): Xaa equals any of the naturally occurring L-amino acids
  MISC_FEATURE (15): Xaa equals any of the naturally occurring L-amino acids
  MISC_FEATURE (20): Xaa equals any of the naturally occurring L-amino acids
RPTRPPTRPVXSIPXLWAAXVSPPK

SEQ ID NO: 7853 - protein, 39 aa, Homo sapiens
  MISC_FEATURE (1): Xaa equals any of the naturally occurring L-amino acids
  MISC_FEATURE (6): Xaa equals any of the naturally occurring L-amino acids
  MISC_FEATURE (13): Xaa equals any of the naturally occurring L-amino acids
  MISC_FEATURE (17): Xaa equals any of the naturally occurring L-amino acids
  MISC_FEATURE (27): Xaa equals any of the naturally occurring L-amino acids
  MISC_FEATURE (38): Xaa equals any of the naturally occurring L-amino acids
XLNYQXITGVILXYDRXTYLTNKQTVXFSMGQGLPYNXS

SEQ ID NO: 7854 - protein, 82 aa, Homo sapiens
GPCPAVLTEACFPLPLLLCWNSTGTRATAGTVSEDLIFPSLFLHTPLTNVPSGFHLWGFKCFQAQPTTTSKCISVVVLFCLC

SEQ ID NO: 7855 - protein, 146 aa, Homo sapiens
  MISC_FEATURE (124): Xaa equals any of the naturally occurring L-amino acids
  MISC_FEATURE (127): Xaa equals any of the naturally occurring L-amino acids
LAEIGAVTLVSAPRPDSRHHSLALTSFKRQQEESFQEQSALAAEARETRRQELLEKITEGQAAKKQKLEQASGASSSQEAGSSQAAKEDETSDGQASGEQEEAGPSSSQAGPSNGVAPLPDLLXLSXWPLQASTGQGQAPGLACPV

SEQ ID NO: 7856 - protein, 22 aa, Homo sapiens
  MISC_FEATURE (3): Xaa equals any of the naturally occurring L-amino acids
  MISC_FEATURE (18): Xaa equals any of the naturally occurring L-amino acids
  MISC_FEATURE (19): Xaa equals any of the naturally occurring L-amino acids
  MISC_FEATURE (20): Xaa equals any of the naturally occurring L-amino acids
GRXAGLAARDHGGSAKRXXXLP

SEQ ID NO: 7857 - protein, 52 aa, Homo sapiens
  MISC_FEATURE (14): Xaa equals any of the naturally occurring L-amino acids
  MISC_FEATURE (21): Xaa equals any of the naturally occurring L-amino acids
STIKERGLQRTKGXKPSIRAXAHYVNHHPNQVFWGRGAVKALNRNPKGSPRF

SEQ ID NO: 7858 - protein, 58 aa, Homo sapiens
  MISC_FEATURE (7): Xaa equals any of the naturally occurring L-amino acids
  MISC_FEATURE (13): Xaa equals any of the naturally occurring L-amino acids
  MISC_FEATURE (16): Xaa equals any of the naturally occurring L-amino acids
  MISC_FEATURE (17): Xaa equals any of the naturally occurring L-amino acids
  MISC_FEATURE (19): Xaa equals any of the naturally occurring L-amino acids
  MISC_FEATURE (32): Xaa equals any of the naturally occurring L-amino acids
  MISC_FEATURE (41): Xaa equals any of the naturally occurring L-amino acids
  MISC_FEATURE (42): Xaa equals any of the naturally occurring L-amino acids
  MISC_FEATURE (48): Xaa equals any of the naturally occurring L-amino acids
  MISC_FEATURE (56): Xaa equals any of the naturally occurring L-amino acids
GAMRGDXGRGRGXRFXXRXGPEEGSSPLLPHXPLDFYLCEXXLFPGQXQQLWKLSXMR

SEQ ID NO: 7859 - protein, 71 aa, Homo sapiens
  MISC_FEATURE (26): Xaa equals any of the naturally occurring L-amino acids
  MISC_FEATURE (31): Xaa equals any of the naturally occurring L-amino acids
  MISC_FEATURE (34): Xaa equals any of the naturally occurring L-amino acids
  MISC_FEATURE (45): Xaa equals any of the naturally occurring L-amino acids
  MISC_FEATURE (60): Xaa equals any of the naturally occurring L-amino acids
  MISC_FEATURE (63): Xaa equals any of the naturally occurring L-amino acids
LCLCIKLTVLWSFGMDQEEKVNTNLXTTSEXSTXSCYRRICSRLXPAGCPGRGHKMPSTXTRXENLRDGRC

SEQ ID NO: 7860 - protein, 41 aa, Homo sapiens
  MISC_FEATURE (14): Xaa equals any of the naturally occurring L-amino acids
  MISC_FEATURE (22): Xaa equals any of the naturally occurring L-amino acids
  MISC_FEATURE (26): Xaa equals any of the naturally occurring L-amino acids
  MISC_FEATURE (41): Xaa equals any of the naturally occurring L-amino acids
SCSTSLKHLRKALXSVIPTSLXSRQXLSSSKSQLLFNTVLX

SEQ ID NO: 7861 - protein, 46 aa, Homo sapiens
  MISC_FEATURE (2): Xaa equals any of the naturally occurring L-amino acids
  MISC_FEATURE (21): Xaa equals any of the naturally occurring L-amino acids
  MISC_FEATURE (23): Xaa equals any of the naturally occurring L-amino acids
  MISC_FEATURE (28): Xaa equals any of the naturally occurring L-amino acids
  MISC_FEATURE (39): Xaa equals any of the naturally occurring L-amino acids
NXTPCRVPVRNSRVDPRVRAXLXVSTLXAICIINSENRXAMCMGGT

SEQ ID NO: 7862 - protein, 44 aa, Homo sapiens
  MISC_FEATURE (2): Xaa equals any of the naturally occurring L-amino acids
  MISC_FEATURE (5): Xaa equals any of the naturally occurring L-amino acids
  MISC_FEATURE (6): Xaa equals any of the naturally occurring L-amino acids
  MISC_FEATURE (21): Xaa equals any of the naturally occurring L-amino acids
  MISC_FEATURE (30): Xaa equals any of the naturally occurring L-amino acids
  MISC_FEATURE (40): Xaa equals any of the naturally occurring L-amino acids
WXTAXXGRLQVPVRNSRAQQXAQPEWRMGXLPVTGALSRXGVWR

SEQ ID NO: 7863 - protein, 95 aa, Homo sapiens
  MISC_FEATURE (68): Xaa equals any of the naturally occurring L-amino acids
  MISC_FEATURE (78): Xaa equals any of the naturally occurring L-amino acids
  MISC_FEATURE (89): Xaa equals any of the naturally occurring L-amino acids
  MISC_FEATURE (90): Xaa equals any of the naturally occurring L-amino acids
  MISC_FEATURE (94): Xaa equals any of the naturally occurring L-amino acids
APGGACAGRVGLTQNRHPSSFLQLPAPTGPDLASPRLCRDKAEAQCHDCPRIEKQKHKTLTLTCEIEXRFSFLLSLGXSSQKRKNPDLXXEGPXE

SEQ ID NO: 7864 - protein, 47 aa, Homo sapiens
EQFTLTHSCCTSENEALQACTYYITCAWLMAMHFQSEFIYKYMHPFF

SEQ ID NO: 7865 - protein, 29 aa, Homo sapiens
  MISC_FEATURE (13): Xaa equals any of the naturally occurring L-amino acids
  MISC_FEATURE (18): Xaa equals any of the naturally occurring L-amino acids
  MISC_FEATURE (20): Xaa equals any of the naturally occurring L-amino acids
  MISC_FEATURE (23): Xaa equals any of the naturally occurring L-amino acids
ARAGGPGAAGRGXWAARXPXDWXPGTPRQ

SEQ ID NO: 7866 - protein, 90 aa, Homo sapiens
  MISC_FEATURE (35): Xaa equals any of the naturally occurring L-amino acids
  MISC_FEATURE (40): Xaa equals any of the naturally occurring L-amino acids
  MISC_FEATURE (53): Xaa equals any of the naturally occurring L-amino acids
  MISC_FEATURE (80): Xaa equals any of the naturally occurring L-amino acids
  MISC_FEATURE (81): Xaa equals any of the naturally occurring L-amino acids
  MISC_FEATURE (84): Xaa equals any of the naturally occurring L-amino acids
  MISC_FEATURE (90): Xaa equals any of the naturally occurring L-amino acids
AHASAVRVGKHLSFRGDSPSPSSFAEVTQGWSREXADDIXSNPCLLPSRTVGXRACTPVGSKGSHRSKTPPHPKKRGKKXXSVXDKPVFX

SEQ ID NO: 7867 - protein, 41 aa, Homo sapiens
  MISC_FEATURE (16): Xaa equals any of the naturally occurring L-amino acids
  MISC_FEATURE (25): Xaa equals any of the naturally occurring L-amino acids
  MISC_FEATURE (28): Xaa equals any of the naturally occurring L-amino acids
  MISC_FEATURE (32): Xaa equals any of the naturally occurring L-amino acids
  MISC_FEATURE (38): Xaa equals any of the naturally occurring L-amino acids
NHTVQTFFSPVNNGQXPNYINIHRXEQXVCVXGAPQTXSPH

SEQ ID NO: 7868 - protein, 32 aa, Homo sapiens
  MISC_FEATURE (22): Xaa equals any of the naturally occurring L-amino acids
ADAWADAWADAWAGRWNAPTLXLCGYMPGLSI

SEQ ID NO: 7869 - protein, 114 aa, Homo sapiens
  MISC_FEATURE (7): Xaa equals any of the naturally occurring L-amino acids
  MISC_FEATURE (11): Xaa equals any of the naturally occurring L-amino acids
  MISC_FEATURE (20): Xaa equals any of the naturally occurring L-amino acids
  MISC_FEATURE (21): Xaa equals any of the naturally occurring L-amino acids
  MISC_FEATURE (28): Xaa equals any of the naturally occurring L-amino acids
  MISC_FEATURE (37): Xaa equals any of the naturally occurring L-amino acids
  MISC_FEATURE (38): Xaa equals any of the naturally occurring L-amino acids
  MISC_FEATURE (39): Xaa equals any of the naturally occurring L-amino acids
  MISC_FEATURE (66): Xaa equals any of the naturally occurring L-amino acids
  MISC_FEATURE (70): Xaa equals any of the naturally occurring L-amino acids
  MISC_FEATURE (80): Xaa equals any of the naturally occurring L-amino acids
  MISC_FEATURE (88): Xaa equals any of the naturally occurring L-amino acids
  MISC_FEATURE (90): Xaa equals any of the naturally occurring L-amino acids
  MISC_FEATURE (91): Xaa equals any of the naturally occurring L-amino acids
FLKLTHXHLIXGKKAWVTAXXGLPGSGXNFPRGSEPXXXVPELKFLKNPRKAGPASLRKGIPKGLXPFTXRLAIAERFHXASFLIKLXHXXKFQISTGAGPFLTNRSVNLGGKN

SEQ ID NO: 7870 - protein, 55 aa, Homo sapiens
  MISC_FEATURE (2): Xaa equals any of the naturally occurring L-amino acids
  MISC_FEATURE (3): Xaa equals any of the naturally occurring L-amino acids
  MISC_FEATURE (9): Xaa equals any of the naturally occurring L-amino acids
  MISC_FEATURE (21): Xaa equals any of the naturally occurring L-amino acids
  MISC_FEATURE (26): Xaa equals any of the naturally occurring L-amino acids
  MISC_FEATURE (42): Xaa equals any of the naturally occurring L-amino acids
  MISC_FEATURE (43): Xaa equals any of the naturally occurring L-amino acids
  MISC_FEATURE (51): Xaa equals any of the naturally occurring L-amino acids
PXXHFNFLXEKKLWGLTALWXTRLTXGFPGGKFPPGGFPNPXXRFPGGERXVWGA

SEQ ID NO: 7871 - protein, 64 aa, Homo sapiens
  MISC_FEATURE (45): Xaa equals any of the naturally occurring L-amino acids
DICIFLCTCFYKMYLIKLTFTCYMILFSFFMVIRERTTKKRVLKXQVRMFFGHLKPKLNVFQPN

SEQ ID NO: 7872 - protein, 21 aa, Homo sapiens
  MISC_FEATURE (4): Xaa equals any of the naturally occurring L-amino acids
  MISC_FEATURE (11): Xaa equals any of the naturally occurring L-amino acids
GVSXARTLRGXGLRLYTLRPP

SEQ ID NO: 7873 - protein, 51 aa, Homo sapiens
  MISC_FEATURE (3): Xaa equals any of the naturally occurring L-amino acids
  MISC_FEATURE (7): Xaa equals any of the naturally occurring L-amino acids
  MISC_FEATURE (11): Xaa equals any of the naturally occurring L-amino acids
  MISC_FEATURE (13): Xaa equals any of the naturally occurring L-amino acids
  MISC_FEATURE (32): Xaa equals any of the naturally occurring L-amino acids
  MISC_FEATURE (37): Xaa equals any of the naturally occurring L-amino acids
  MISC_FEATURE (38): Xaa equals any of the naturally occurring L-amino acids
  MISC_FEATURE (41): Xaa equals any of the naturally occurring L-amino acids
DGXSNLXLLIXKXGTPAGTGPEFPGRPTRPGXVSWDXXVMXGKTQRLAPIF

SEQ ID NO: 7874 - protein, 58 aa, Homo sapiens
  MISC_FEATURE (20): Xaa equals any of the naturally occurring L-amino acids
  MISC_FEATURE (24): Xaa equals any of the naturally occurring L-amino acids
  MISC_FEATURE (28): Xaa equals any of the naturally occurring L-amino acids
  MISC_FEATURE (38): Xaa equals any of the naturally occurring L-amino acids
  MISC_FEATURE (42): Xaa equals any of the naturally occurring L-amino acids
TIMDMYFLVSLTPKGNGGLXQIDXLSKXICFSKQNLCXIEDXSLFTYRVNRLYCLLRS

SEQ ID NO: 7875 - protein, 28 aa, Homo sapiens
  MISC_FEATURE (7): Xaa equals any of the naturally occurring L-amino acids
  MISC_FEATURE (19): Xaa equals any of the naturally occurring L-amino acids
  MISC_FEATURE (23): Xaa equals any of the naturally occurring L-amino acids
  MISC_FEATURE (27): Xaa equals any of the naturally occurring L-amino acids
GKEGRVXGVSVSLTGKTQXLLLXLVAXL

SEQ ID NO: 7876 - protein, 59 aa, Homo sapiens
  MISC_FEATURE (5): Xaa equals any of the naturally occurring L-amino acids
  MISC_FEATURE (24): Xaa equals any of the naturally occurring L-amino acids
  MISC_FEATURE (29): Xaa equals any of the naturally occurring L-amino acids
  MISC_FEATURE (36): Xaa equals any of the naturally occurring L-amino acids
  MISC_FEATURE (55): Xaa equals any of the naturally occurring L-amino acids
  MISC_FEATURE (59): Xaa equals any of the naturally occurring L-amino acids
PLGRXLVRVQVPVRNSRVDPRFRXEEGQXKVVLSLXGNSCPSPISLKLNKVSLSXTGSX

SEQ ID NO: 7877 - protein, 33 aa, Homo sapiens
  MISC_FEATURE (1): Xaa equals any of the naturally occurring L-amino acids
  MISC_FEATURE (7): Xaa equals any of the naturally occurring L-amino acids
  MISC_FEATURE (11): Xaa equals any of the naturally occurring L-amino acids
  MISC_FEATURE (12): Xaa equals any of the naturally occurring L-amino acids
  MISC_FEATURE (19): Xaa equals any of the naturally occurring L-amino acids
  MISC_FEATURE (23): Xaa equals any of the naturally occurring L-amino acids
  MISC_FEATURE (25): Xaa equals any of the naturally occurring L-amino acids
  MISC_FEATURE (32): Xaa equals any of the naturally occurring L-amino acids
XWGKGKXYAWXXPVRNSRXDPRXRXRVGGRVXQ

SEQ ID NO: 7878 - protein, 17 aa, Homo sapiens
  MISC_FEATURE (9): Xaa equals any of the naturally occurring L-amino acids
ADAWVRMVXRQVPHERA

SEQ ID NO: 7879 - protein, 33 aa, Homo sapiens
  MISC_FEATURE (4): Xaa equals any of the naturally occurring L-amino acids
  MISC_FEATURE (6): Xaa equals any of the naturally occurring L-amino acids
  MISC_FEATURE (8): Xaa equals any of the naturally occurring L-amino acids
  MISC_FEATURE (9): Xaa equals any of the naturally occurring L-amino acids
  MISC_FEATURE (15): Xaa equals any of the naturally occurring L-amino acids
  MISC_FEATURE (17): Xaa equals any of the naturally occurring L-amino acids
  MISC_FEATURE (18): Xaa equals any of the naturally occurring L-amino acids
GGGXGXTXXFKSEPXKXXWYACRYRSGIPGSTH

SEQ ID NO: 7880 - protein, 96 aa, Homo sapiens
  MISC_FEATURE (27): Xaa equals any of the naturally occurring L-amino acids
  MISC_FEATURE (33): Xaa equals any of the naturally occurring L-amino acids
  MISC_FEATURE (38): Xaa equals any of the naturally occurring L-amino acids
  MISC_FEATURE (40): Xaa equals any of the naturally occurring L-amino acids
  MISC_FEATURE (54): Xaa equals any of the naturally occurring L-amino acids
  MISC_FEATURE (62): Xaa equals any of the naturally occurring L-amino acids
  MISC_FEATURE (76): Xaa equals any of the naturally occurring L-amino acids
  MISC_FEATURE (87): Xaa equals any of the naturally occurring L-amino acids
  MISC_FEATURE (91): Xaa equals any of the naturally occurring L-amino acids
  MISC_FEATURE (94): Xaa equals any of the naturally occurring L-amino acids
PRVRGRVGCSTCPKQPASPGHRLPFGXEGWPIXAAGSXGXGWASGGGGFLLSTXGHPGNKGXQGILLPAPLCRWHXGRVPTVKDERXKALXEPXSQ

SEQ ID NO: 7881 - protein, 36 aa, Homo sapiens
  MISC_FEATURE (4): Xaa equals any of the naturally occurring L-amino acids
  MISC_FEATURE (6): Xaa equals any of the naturally occurring L-amino acids
  MISC_FEATURE (14): Xaa equals any of the naturally occurring L-amino acids
GGGXGXDYGLSNTXHYRESWYACRYRSGNSRVDPRV

SEQ ID NO: 7882 - protein, 20 aa, Homo sapiens
  MISC_FEATURE (9): Xaa equals any of the naturally occurring L-amino acids
  MISC_FEATURE (13): Xaa equals any of the naturally occurring L-amino acids
  MISC_FEATURE (20): Xaa equals any of the naturally occurring L-amino acids
DPRVRVTRXRTRXSKKKKKX

SEQ ID NO: 7883 - protein, 32 aa, Homo sapiens
  MISC_FEATURE (1): Xaa equals any of the naturally occurring L-amino acids
  MISC_FEATURE (2): Xaa equals any of the naturally occurring L-amino acids
  MISC_FEATURE (8): Xaa equals any of the naturally occurring L-amino acids
  MISC_FEATURE (10): Xaa equals any of the naturally occurring L-amino acids
  MISC_FEATURE (15): Xaa equals any of the naturally occurring L-amino acids
  MISC_FEATURE (22): Xaa equals any of the naturally occurring L-amino acids
  MISC_FEATURE (32): Xaa equals any of the naturally occurring L-amino acids
XXNGMHRXLXLKGRXDRSRQVXLPCSGNVHGX

SEQ ID NO: 7884 - protein, 36 aa, Homo sapiens
  MISC_FEATURE (3): Xaa equals any of the naturally occurring L-amino acids
  MISC_FEATURE (18): Xaa equals any of the naturally occurring L-amino acids
  MISC_FEATURE (19): Xaa equals any of the naturally occurring L-amino acids
AIXWTSSSSMLAPSRSLXXRLTLDMSTGPSWDRTVP

SEQ ID NO: 7885 - protein, 33 aa, Homo sapiens
  MISC_FEATURE (1): Xaa equals any of the naturally occurring L-amino acids
  MISC_FEATURE (5): Xaa equals any of the naturally occurring L-amino acids
  MISC_FEATURE (11): Xaa equals any of the naturally occurring L-amino acids
  MISC_FEATURE (27): Xaa equals any of the naturally occurring L-amino acids
  MISC_FEATURE (29): Xaa equals any of the naturally occurring L-amino acids
XHEKXHGTPAXTGPEFTGRDWENPDHXRXGNLA

SEQ ID NO: 7886 - protein, 21 aa, Homo sapiens
  MISC_FEATURE (2): Xaa equals any of the naturally occurring L-amino acids
  MISC_FEATURE (10): Xaa equals any of the naturally occurring L-amino acids
  MISC_FEATURE (12): Xaa equals any of the naturally occurring L-amino acids
  MISC_FEATURE (15): Xaa equals any of the naturally occurring L-amino acids
GXDYTVLTGXTXLHXMLCGSY

SEQ ID NO: 7887 - protein, 82 aa, Homo sapiens
  MISC_FEATURE (11): Xaa equals any of the naturally occurring L-amino acids
  MISC_FEATURE (17): Xaa equals any of the naturally occurring L-amino acids
  MISC_FEATURE (39): Xaa equals any of the naturally occurring L-amino acids
  MISC_FEATURE (49): Xaa equals any of the naturally occurring L-amino acids
  MISC_FEATURE (53): Xaa equals any of the naturally occurring L-amino acids
  MISC_FEATURE (72): Xaa equals any of the naturally occurring L-amino acids
  MISC_FEATURE (74): Xaa equals any of the naturally occurring L-amino acids
  MISC_FEATURE (80): Xaa equals any of the naturally occurring L-amino acids
LSPHCGLPNPXLLPFGXFGKSNSCLPMASLRPNSFPHVXHSKPRFSLPXDLLXSNLFIFLVYKSQNIEFWEXFXHYVSKXKR

SEQ ID NO: 7888 - protein, 34 aa, Homo sapiens
  MISC_FEATURE (4): Xaa equals any of the naturally occurring L-amino acids
  MISC_FEATURE (26): Xaa equals any of the naturally occurring L-amino acids
  MISC_FEATURE (30): Xaa equals any of the naturally occurring L-amino acids
  MISC_FEATURE (31): Xaa equals any of the naturally occurring L-amino acids
IIEXHGSLHVPVRNSRVVTGKTQTIXLSRXXALL

SEQ ID NO: 7889 - protein, 76 aa, Homo sapiens
  MISC_FEATURE (20): Xaa equals any of the naturally occurring L-amino acids
  MISC_FEATURE (21): Xaa equals any of the naturally occurring L-amino acids
  MISC_FEATURE (23): Xaa equals any of the naturally occurring L-amino acids
  MISC_FEATURE (24): Xaa equals any of the naturally occurring L-amino acids
  MISC_FEATURE (31): Xaa equals any of the naturally occurring L-amino acids
  MISC_FEATURE (46): Xaa equals any of the naturally occurring L-amino acids
  MISC_FEATURE (71): Xaa equals any of the naturally occurring L-amino acids
  MISC_FEATURE (75): Xaa equals any of the naturally occurring L-amino acids
SLKSSTIFWGVLNTNIAWAXXKXXLPSLAIXGVGQTICSWCVLQEXQTLYLTREGGRNSVEDEVERVITIXAESXT

SEQ ID NO: 7890 - protein, 104 aa, Homo sapiens
  MISC_FEATURE (2): Xaa equals any of the naturally occurring L-amino acids
  MISC_FEATURE (9): Xaa equals any of the naturally occurring L-amino acids
GXLTTFGKXHACRYRSGIPGSTHAFDFSLQPGPNSHLPGRISSKEVPGGWGPGRLWTPISRGPSQPDPCPPSSGGGRCRVWLSFPPTFPGPNPFLSYTQLGLLP

SEQ ID NO: 7891 - protein, 53 aa, Homo sapiens
  MISC_FEATURE (33): Xaa equals any of the naturally occurring L-amino acids
  MISC_FEATURE (43): Xaa equals any of the naturally occurring L-amino acids
  MISC_FEATURE (46): Xaa equals any of the naturally occurring L-amino acids
PALTGNSSFMGNNCNPRSPSRMGFNGLPAPAAXGRHTLSHSMXARXARTSKGS

SEQ ID NO: 7892 - protein, 62 aa, Homo sapiens
  MISC_FEATURE (3): Xaa equals any of the naturally occurring L-amino acids
  MISC_FEATURE (4): Xaa equals any of the naturally occurring L-amino acids
  MISC_FEATURE (12): Xaa equals any of the naturally occurring L-amino acids
  MISC_FEATURE (18): Xaa equals any of the naturally occurring L-amino acids
  MISC_FEATURE (21): Xaa equals any of the naturally occurring L-amino acids
  MISC_FEATURE (40): Xaa equals any of the naturally occurring L-amino acids
  MISC_FEATURE (45): Xaa equals any of the naturally occurring L-amino acids
  MISC_FEATURE (53): Xaa equals any of the naturally occurring L-amino acids
  MISC_FEATURE (56): Xaa equals any of the naturally occurring L-amino acids
PRXXPRVRSRKXVPALLXPLXAPPPAQGQRQRQRRLGRFXREASXDRWPCGIXDNXTLSRRR

SEQ ID NO: 7893 - protein, 58 aa, Homo sapiens
  MISC_FEATURE (7): Xaa equals any of the naturally occurring L-amino acids
  MISC_FEATURE (15): Xaa equals any of the naturally occurring L-amino acids
  MISC_FEATURE (36): Xaa equals any of the naturally occurring L-amino acids
  MISC_FEATURE (56): Xaa equals any of the naturally occurring L-amino acids
TTRTPLXVVLHREAXLVVAPTESTTIMCVWDTSVVXLKRYMHFYGIKISKKKMGAXHA

SEQ ID NO: 7894 - protein, 76 aa, Homo sapiens
  MISC_FEATURE (29): Xaa equals any of the naturally occurring L-amino acids
  MISC_FEATURE (41): Xaa equals any of the naturally occurring L-amino acids
  MISC_FEATURE (57): Xaa equals any of the naturally occurring L-amino acids
  MISC_FEATURE (63): Xaa equals any of the naturally occurring L-amino acids
TAAAPLPAYPSCAAPEPGKEAAMQGSTGXQETHLRLSPSPXPTWGVYYLGTPLAHAXSLQNNXNCFFFLVQNKTSV

SEQ ID NO: 7895 - protein, 65 aa, Homo sapiens
  MISC_FEATURE (21): Xaa equals any of the naturally occurring L-amino acids
  MISC_FEATURE (22): Xaa equals any of the naturally occurring L-amino acids
  MISC_FEATURE (24): Xaa equals any of the naturally occurring L-amino acids
  MISC_FEATURE (25): Xaa equals any of the naturally occurring L-amino acids
  MISC_FEATURE (26): Xaa equals any of the naturally occurring L-amino acids
  MISC_FEATURE (29): Xaa equals any of the naturally occurring L-amino acids
  MISC_FEATURE (30): Xaa equals any of the naturally occurring L-amino acids
  MISC_FEATURE (32): Xaa equals any of the naturally occurring L-amino acids
  MISC_FEATURE (33): Xaa equals any of the naturally occurring L-amino acids
  MISC_FEATURE (35): Xaa equals any of the naturally occurring L-amino acids
  MISC_FEATURE (36): Xaa equals any of the naturally occurring L-amino acids
  MISC_FEATURE (37): Xaa equals any of the naturally occurring L-amino acids
  MISC_FEATURE (40): Xaa equals any of the naturally occurring L-amino acids
  MISC_FEATURE (41): Xaa equals any of the naturally occurring L-amino acids
  MISC_FEATURE (46): Xaa equals any of the naturally occurring L-amino acids
  MISC_FEATURE (48): Xaa equals any of the naturally occurring L-amino acids
  MISC_FEATURE (49): Xaa equals any of the naturally occurring L-amino acids
  MISC_FEATURE (50): Xaa equals any of the naturally occurring L-amino acids
  MISC_FEATURE (52): Xaa equals any of the naturally occurring L-amino acids
  MISC_FEATURE (56): Xaa equals any of the naturally occurring L-amino acids
  MISC_FEATURE (63): Xaa equals any of the naturally occurring L-amino acids
  MISC_FEATURE (64): Xaa equals any of the naturally occurring L-amino acids
MGAGQVPVDLTRGPEQYGKGXXEXXXPPXXIXXVXXXFRXXPNLVXVXXXRXKGFXKFKRVSXXK

SEQ ID NO: 7896 - protein, 80 aa, Homo sapiens
  MISC_FEATURE (5): Xaa equals any of the naturally occurring L-amino acids
  MISC_FEATURE (61): Xaa equals any of the naturally occurring L-amino acids
NSAEXCRALPTCVCRIRSKSPAWPQSWPISRGMAKPRCAGHSHLIFVTVAGSCSDPPWSEXPGIDWGQMMPVFIEQKYWF

SEQ ID NO: 7897 - protein, 96 aa, Homo sapiens
  MISC_FEATURE (3): Xaa equals any of the naturally occurring L-amino acids
  MISC_FEATURE (5): Xaa equals any of the naturally occurring L-amino acids
  MISC_FEATURE (24): Xaa equals any of the naturally occurring L-amino acids
  MISC_FEATURE (78): Xaa equals any of the naturally occurring L-amino acids
  MISC_FEATURE (85): Xaa equals any of the naturally occurring L-amino acids
  MISC_FEATURE (93): Xaa equals any of the naturally occurring L-amino acids
IRXRXQRGLRAPALGVGPNGAGKXPSTGPEGVMEAASMGCPCAEGCSRACGHKEGGTRRNPWAGTSGVWTGGLHHRKXNLCVCVXCLRTHGCXCVQ

SEQ ID NO: 7898 - protein, 71 aa, Homo sapiens
  MISC_FEATURE (9): Xaa equals any of the naturally occurring L-amino acids
  MISC_FEATURE (17): Xaa equals any of the naturally occurring L-amino acids
  MISC_FEATURE (23): Xaa equals any of the naturally occurring L-amino acids
  MISC_FEATURE (26): Xaa equals any of the naturally occurring L-amino acids
  MISC_FEATURE (27): Xaa equals any of the naturally occurring L-amino acids
  MISC_FEATURE (29): Xaa equals any of the naturally occurring L-amino acids
  MISC_FEATURE (30): Xaa equals any of the naturally occurring L-amino acids
  MISC_FEATURE (40): Xaa equals any of the naturally occurring L-amino acids
  MISC_FEATURE (48): Xaa equals any of the naturally occurring L-amino acids
  MISC_FEATURE (49): Xaa equals any of the naturally occurring L-amino acids
  MISC_FEATURE (54): Xaa equals any of the naturally occurring L-amino acids
  MISC_FEATURE (59): Xaa equals any of the naturally occurring L-amino acids
  MISC_FEATURE (60): Xaa equals any of the naturally occurring L-amino acids
  MISC_FEATURE (67): Xaa equals any of the naturally occurring L-amino acids
  MISC_FEATURE (69): Xaa equals any of the naturally occurring L-amino acids
KAIFALFLXRLLARRSXLRRGLXPPXXLXXALSPESLNSXFLFNPLHXXTGVPXHVRRXXRHQLPKXPXRT

SEQ ID NO: 7899 - protein, 111 aa, Homo sapiens
  MISC_FEATURE (27): Xaa equals any of the naturally occurring L-amino acids
  MISC_FEATURE (53): Xaa equals any of the naturally occurring L-amino acids
  MISC_FEATURE (72): Xaa equals any of the naturally occurring L-amino acids
  MISC_FEATURE (90): Xaa equals any of the naturally occurring L-amino acids
  MISC_FEATURE (98): Xaa equals any of the naturally occurring L-amino acids
  MISC_FEATURE (107): Xaa equals any of the naturally occurring L-amino acids
GSTITRCTAEAQGLLRTPARPQRSPSXPLDPALSCQGVLGGRFSLVQTWLPVXPLAAQGRLHRSAEWLQGRXLNRRPMGDGEEMVSSTTXLTDGGAEXSGSPGGLGXTTRF

SEQ ID NO: 7900 - protein, 159 aa, Homo sapiens
  MISC_FEATURE (5): Xaa equals any of the naturally occurring L-amino acids
  MISC_FEATURE (11): Xaa equals any of the naturally occurring L-amino acids
  MISC_FEATURE (51): Xaa equals any of the naturally occurring L-amino acids
  MISC_FEATURE (59): Xaa equals any of the naturally occurring L-amino acids
  MISC_FEATURE (95): Xaa equals any of the naturally occurring L-amino acids
  MISC_FEATURE (106): Xaa equals any of the naturally occurring L-amino acids
  MISC_FEATURE (108): Xaa equals any of the naturally occurring L-amino acids
  MISC_FEATURE (113): Xaa equals any of the naturally occurring L-amino acids
  MISC_FEATURE (114): Xaa equals any of the naturally occurring L-amino acids
  MISC_FEATURE (116): Xaa equals any of the naturally occurring L-amino acids
  MISC_FEATURE (123): Xaa equals any of the naturally occurring L-amino acids
  MISC_FEATURE (137): Xaa equals any of the naturally occurring L-amino acids
  MISC_FEATURE (140): Xaa equals any of the naturally occurring L-amino acids
  MISC_FEATURE (150): Xaa equals any of the naturally occurring L-amino acids
  MISC_FEATURE (158): Xaa equals any of the naturally occurring L-amino acids
IRQSXPTRRRXGWPLGLHPGPDHLLEGPGGAMPPRTGRHSLSGAGPESASXWWGEKALXPLSELVEGKIVCERCCLPSHLLTEKPRMVEWNEAVXPMPVPPGQPSXCXWTRGXXLXVPWLWVXRICIRSIRALEDFXFWXKKKKKFGGAXTIGLRGVXN

SEQ ID NO: 7901 - protein, 28 aa, Homo sapiens
  MISC_FEATURE (3): Xaa equals any of the naturally occurring L-amino acids
  MISC_FEATURE (18): Xaa equals any of the naturally occurring L-amino acids
  MISC_FEATURE (19): Xaa equals any of the naturally occurring L-amino acids
  MISC_FEATURE (28): Xaa equals any of the naturally occurring L-amino acids
FGXSSIKVRQPKKKKKKXXGGGPVPHLX

SEQ ID NO: 7902 - protein, 141 aa, Homo sapiens
  MISC_FEATURE (13): Xaa equals any of the naturally occurring L-amino acids
  MISC_FEATURE (47): Xaa equals any of the naturally occurring L-amino acids
  MISC_FEATURE (56): Xaa equals any of the naturally occurring L-amino acids
  MISC_FEATURE (58): Xaa equals any of the naturally occurring L-amino acids
  MISC_FEATURE (60): Xaa equals any of the naturally occurring L-amino acids
  MISC_FEATURE (67): Xaa equals any of the naturally occurring L-amino acids
  MISC_FEATURE (71): Xaa equals any of the naturally occurring L-amino acids
  MISC_FEATURE (82): Xaa equals any of the naturally occurring L-amino acids
  MISC_FEATURE (83): Xaa equals any of the naturally occurring L-amino acids
  MISC_FEATURE (87): Xaa equals any of the naturally occurring L-amino acids
  MISC_FEATURE (92): Xaa equals any of the naturally occurring L-amino acids
  MISC_FEATURE (95): Xaa equals any of the naturally occurring L-amino acids
  MISC_FEATURE (97): Xaa equals any of the naturally occurring L-amino acids
  MISC_FEATURE (101): Xaa equals any of the naturally occurring L-amino acids
  MISC_FEATURE (102): Xaa equals any of the naturally occurring L-amino acids
  MISC_FEATURE (105): Xaa equals any of the naturally occurring L-amino acids
  MISC_FEATURE (106): Xaa equals any of the naturally occurring L-amino acids
  MISC_FEATURE (107): Xaa equals any of the naturally occurring L-amino acids
  MISC_FEATURE (110): Xaa equals any of the naturally occurring L-amino acids
  MISC_FEATURE (111): Xaa equals any of the naturally occurring L-amino acids
  MISC_FEATURE (112): Xaa equals any of the naturally occurring L-amino acids
  MISC_FEATURE (115): Xaa equals any of the naturally occurring L-amino acids
  MISC_FEATURE (118): Xaa equals any of the naturally occurring L-amino acids
  MISC_FEATURE (125): Xaa equals any of the naturally occurring L-amino acids
  MISC_FEATURE (127): Xaa equals any of the naturally occurring L-amino acids
  MISC_FEATURE (128): Xaa equals any of the naturally occurring L-amino acids
  MISC_FEATURE (129): Xaa equals any of the naturally occurring L-amino acids
  MISC_FEATURE (131): Xaa equals any of the naturally occurring L-amino acids
  MISC_FEATURE (132): Xaa equals any of the naturally occurring L-amino acids
  MISC_FEATURE (134): Xaa equals any of the naturally occurring L-amino acids
  MISC_FEATURE (135): Xaa equals any of the naturally occurring L-amino acids
  MISC_FEATURE (137): Xaa equals any of the naturally occurring L-amino acids
ELVDPPGCREFGXGSCLGLSHAILVSSFGTREGYSGVGLTFPPVPHXKVSYGHRRXRXHXSREGRGXLWLXFELRLCLVNNXXDLNXRSEVXGNXLXVTGXXLGXXXPFXXXFPXKGXLVFPRKXPXXXLXXGXXPXNGGA

SEQ ID NO: 7903 - protein, 41 aa, Homo sapiens
  MISC_FEATURE (3): Xaa equals any of the naturally occurring L-amino acids
  MISC_FEATURE (4): Xaa equals any of the naturally occurring L-amino acids
  MISC_FEATURE (11): Xaa equals any of the naturally occurring L-amino acids
  MISC_FEATURE (25): Xaa equals any of the naturally occurring L-amino acids
  MISC_FEATURE (27): Xaa equals any of the naturally occurring L-amino acids
  MISC_FEATURE (30): Xaa equals any of the naturally occurring L-amino acids
  MISC_FEATURE (31): Xaa equals any of the naturally occurring L-amino acids
  MISC_FEATURE (37): Xaa equals any of the naturally occurring L-amino acids
  MISC_FEATURE (38): Xaa equals any of the naturally occurring L-amino acids
YGXXEIVELKXKFSLEVTEGAKSVXIXKYXXVVIRSXXSLG

SEQ ID NO: 7904 - protein, 130 aa, Homo sapiens
  MISC_FEATURE (20): Xaa equals any of the naturally occurring L-amino acids
  MISC_FEATURE (39): Xaa equals any of the naturally occurring L-amino acids
  MISC_FEATURE (47): Xaa equals any of the naturally occurring L-amino acids
  MISC_FEATURE (76): Xaa equals any of the naturally occurring L-amino acids
  MISC_FEATURE (85): Xaa equals any of the naturally occurring L-amino acids
  MISC_FEATURE (91): Xaa equals any of the naturally occurring L-amino acids
  MISC_FEATURE (92): Xaa equals any of the naturally occurring L-amino acids
  MISC_FEATURE (93): Xaa equals any of the naturally occurring L-amino acids
  MISC_FEATURE (96): Xaa equals any of the naturally occurring L-amino acids
  MISC_FEATURE (99): Xaa equals any of the naturally occurring L-amino acids
  MISC_FEATURE (100): Xaa equals any of the naturally occurring L-amino acids
  MISC_FEATURE (101): Xaa equals any of the naturally occurring L-amino acids
  MISC_FEATURE (104): Xaa equals any of the naturally occurring L-amino acids
  MISC_FEATURE (107): Xaa equals any of the naturally occurring L-amino acids
  MISC_FEATURE (108): Xaa equals any of the naturally occurring L-amino acids
  MISC_FEATURE (110): Xaa equals any of the naturally occurring L-amino acids
  MISC_FEATURE (111): Xaa equals any of the naturally occurring L-amino acids
  MISC_FEATURE (112): Xaa equals any of the naturally occurring L-amino acids
  MISC_FEATURE (113): Xaa equals any of the naturally occurring L-amino acids
  MISC_FEATURE (115): Xaa equals any of the naturally occurring L-amino acids
  MISC_FEATURE (119): Xaa equals any of the naturally occurring L-amino acids
  MISC_FEATURE (120): Xaa equals any of the naturally occurring L-amino acids
  MISC_FEATURE (122): Xaa equals any of the naturally occurring L-amino acids
  MISC_FEATURE (129): Xaa equals any of the naturally occurring L-amino acids
LATSCFKQLDCAFYFFSSYXILWEAPPCATVISPGCHLXWFPGRDVXCSVVCGVPSDFLVHIARWSGVWGTRTGWXGLSLGLPPXKAGAQXXXKCXLPXXXPNXDRXXSXXXXLXLLEXXLXSIRLLGXG

SEQ ID NO: 7905 - protein, 99 aa, Homo sapiens
  MISC_FEATURE (16): Xaa equals any of the naturally occurring L-amino acids
  MISC_FEATURE (21): Xaa equals any of the naturally occurring L-amino acids
  MISC_FEATURE (23): Xaa equals any of the naturally occurring L-amino acids
  MISC_FEATURE (34): Xaa equals any of the naturally occurring L-amino acids
  MISC_FEATURE (38): Xaa equals any of the naturally occurring L-amino acids
  MISC_FEATURE (40): Xaa equals any of the naturally occurring L-amino acids
  MISC_FEATURE (47): Xaa equals any of the naturally occurring L-amino acids
  MISC_FEATURE (49): Xaa equals any of the naturally occurring L-amino acids
  MISC_FEATURE (54): Xaa equals any of the naturally occurring L-amino acids
  MISC_FEATURE (58): Xaa equals any of the naturally occurring L-amino acids
  MISC_FEATURE (60): Xaa equals any of the naturally occurring L-amino acids
  MISC_FEATURE (61): Xaa equals any of the naturally occurring L-amino acids
  MISC_FEATURE (63): Xaa equals any of the naturally occurring L-amino acids
  MISC_FEATURE (64): Xaa equals any of the naturally occurring L-amino acids
  MISC_FEATURE (65): Xaa equals any of the naturally occurring L-amino acids
  MISC_FEATURE (67): Xaa equals any of the naturally occurring L-amino acids
  MISC_FEATURE (68): Xaa equals any of the naturally occurring L-amino acids
  MISC_FEATURE (69): Xaa equals any of the naturally occurring L-amino acids
  MISC_FEATURE (72): Xaa equals any of the naturally occurring L-amino acids
  MISC_FEATURE (73): Xaa equals any of the naturally occurring L-amino acids
  MISC_FEATURE (74): Xaa equals any of the naturally occurring L-amino acids
  MISC_FEATURE (75): Xaa equals any of the naturally occurring L-amino acids
  MISC_FEATURE (76): Xaa equals any of the naturally occurring L-amino acids
  MISC_FEATURE (78): Xaa equals any of the naturally occurring L-amino acids
  MISC_FEATURE (79): Xaa equals any of the naturally occurring L-amino acids
  MISC_FEATURE (81): Xaa equals any of the naturally occurring L-amino acids
  MISC_FEATURE (82): Xaa equals any of the naturally occurring L-amino acids
  MISC_FEATURE (83): Xaa equals any of the naturally occurring L-amino acids
  MISC_FEATURE (86): Xaa equals any of the naturally occurring L-amino acids
  MISC_FEATURE (88): Xaa equals any of the naturally occurring L-amino acids
  MISC_FEATURE (92): Xaa equals any of the naturally occurring L-amino acids
  MISC_FEATURE (97): Xaa equals any of the naturally occurring L-amino acids
GWQGGAGRVAISKATXLHWPXLXSPREGPGDDTXWGLXKXSGIIYGXSXDSQGXVLGXLXXWXXXTXXXGPXXXXXMXXRXXXGSXLXMPSXLGVLXRK

SEQ ID NO: 7906 - protein, 63 aa, Homo sapiens
  MISC_FEATURE (10): Xaa equals any of the naturally occurring L-amino acids
  MISC_FEATURE (12): Xaa equals any of the naturally occurring L-amino acids
  MISC_FEATURE (17): Xaa equals any of the naturally occurring L-amino acids
  MISC_FEATURE (24): Xaa equals any of the naturally occurring L-amino acids
  MISC_FEATURE (47): Xaa equals any of the naturally occurring L-amino acids
  MISC_FEATURE (49): Xaa equals any of the naturally occurring L-amino acids
  MISC_FEATURE (53): Xaa equals any of the naturally occurring L-amino acids
VYIPLSWPLXLXWTKRXGTKSDLXYGSIWIKTNQQVLPSSRWGSQLXSXPQLXFLQGSQLRTN

SEQ ID NO: 7907 - protein, 62 aa, Homo sapiens
  MISC_FEATURE (52): Xaa equals any of the naturally occurring L-amino acids
MSRTLTNQSFLLLWKGANKAMGMKSCMCFAQCGASYLCGRGGIGKNFSGEQXKKKKGRGGGG

SEQ ID NO: 7908 - protein, 75 aa, Homo sapiens
VPMLRLSSRPEEVTDWLQAENFSTATVLDTWVPDGEPAYFGIKTWGATDAYVHRRAPRNPVPAGGCSEGCWGISP

SEQ ID NO: 7909 - protein, 100 aa, Homo sapiens
  MISC_FEATURE (13): Xaa equals any of the naturally occurring L-amino acids
  MISC_FEATURE (18): Xaa equals any of the naturally occurring L-amino acids
  MISC_FEATURE (20): Xaa equals any of the naturally occurring L-amino acids
  MISC_FEATURE (22): Xaa equals any of the naturally occurring L-amino acids
  MISC_FEATURE (27): Xaa equals any of the naturally occurring L-amino acids
  MISC_FEATURE (28): Xaa equals any of the naturally occurring L-amino acids
  MISC_FEATURE (29): Xaa equals any of the naturally occurring L-amino acids
  MISC_FEATURE (35): Xaa equals any of the naturally occurring L-amino acids
  MISC_FEATURE (37): Xaa equals any of the naturally occurring L-amino acids
  MISC_FEATURE (40): Xaa equals any of the naturally occurring L-amino acids
  MISC_FEATURE (42): Xaa equals any of the naturally occurring L-amino acids
  MISC_FEATURE (44): Xaa equals any of the naturally occurring L-amino acids
  MISC_FEATURE (45): Xaa equals any of the naturally occurring L-amino acids
  MISC_FEATURE (50): Xaa equals any of the naturally occurring L-amino acids
  MISC_FEATURE (58): Xaa equals any of the naturally occurring L-amino acids
  MISC_FEATURE (59): Xaa equals any of the naturally occurring L-amino acids
  MISC_FEATURE (64): Xaa equals any of the naturally occurring L-amino acids
  MISC_FEATURE (82): Xaa equals any of the naturally occurring L-amino acids
  MISC_FEATURE (83): Xaa equals any of the naturally occurring L-amino acids
  MISC_FEATURE (93): Xaa equals any of the naturally occurring L-amino acids
  MISC_FEATURE (94): Xaa equals any of the naturally occurring L-amino acids
  MISC_FEATURE (100): Xaa equals any of the naturally occurring L-amino acids
SGPPILPRKVDTXAFKTXQXVXSPFFXXXSPSSPXHXSQXSXLXXQLLLXSPTVVNCXXVSPSXKIMSILQGLPQILGNLVXXLQPGAVVRLXXLTHWGX

SEQ ID NO: 7910 - protein, 140 aa, Homo sapiens
  MISC_FEATURE (17): Xaa equals any of the naturally occurring L-amino acids
  MISC_FEATURE (18): Xaa equals any of the naturally occurring L-amino acids
  MISC_FEATURE (23): Xaa equals any of the naturally occurring L-amino acids
  MISC_FEATURE (24): Xaa equals any of the naturally occurring L-amino acids
  MISC_FEATURE (29): Xaa equals any of the naturally occurring L-amino acids
  MISC_FEATURE (37): Xaa equals any of the naturally occurring L-amino acids
  MISC_FEATURE (41): Xaa equals any of the naturally occurring L-amino acids
  MISC_FEATURE (46): Xaa equals any of the naturally occurring L-amino acids
  MISC_FEATURE (50): Xaa equals any of the naturally occurring L-amino acids
  MISC_FEATURE (58): Xaa equals any of the naturally occurring L-amino acids
  MISC_FEATURE (59): Xaa equals any of the naturally occurring L-amino acids
  MISC_FEATURE (64): Xaa equals any of the naturally occurring L-amino acids
  MISC_FEATURE (70): Xaa equals any of the naturally occurring L-amino acids
  MISC_FEATURE (72): Xaa equals any of the naturally occurring L-amino acids
  MISC_FEATURE (76): Xaa equals any of the naturally occurring L-amino acids
  MISC_FEATURE (77): Xaa equals any of the naturally occurring L-amino acids
  MISC_FEATURE (86): Xaa equals any of the naturally occurring L-amino acids
  MISC_FEATURE (91): Xaa equals any of the naturally occurring L-amino acids
  MISC_FEATURE (97): Xaa equals any of the naturally occurring L-amino acids
  MISC_FEATURE (98): Xaa equals any of the naturally occurring L-amino acids
  MISC_FEATURE (102): Xaa equals any of the naturally occurring L-amino acids
  MISC_FEATURE (105): Xaa equals any of the naturally occurring L-amino acids
  MISC_FEATURE (110): Xaa equals any of the naturally occurring L-amino acids
  MISC_FEATURE (112): Xaa equals any of the naturally occurring L-amino acids
  MISC_FEATURE (116): Xaa equals any of the naturally occurring L-amino acids
  MISC_FEATURE (117): Xaa equals any of the naturally occurring L-amino acids
  MISC_FEATURE (118): Xaa equals any of the naturally occurring L-amino acids
  MISC_FEATURE (121): Xaa equals any of the naturally occurring L-amino acids
  MISC_FEATURE (124): Xaa equals any of the naturally occurring L-amino acids
  MISC_FEATURE (126): Xaa equals any of the naturally occurring L-amino acids
  MISC_FEATURE (129): Xaa equals any of the naturally occurring L-amino acids
ELGPAPAGTQSRYGEGXXTDPIXXRKRTXADKEGPWXPCPXKDPLXAGLXGSWPSGTXXGYRLXYRFRPXPXRSPXXPFRLEQRGXKGGQXGGKLRXXSGPXLGXKLTTXLXFKRXXXIPXGNXVXFPXCSKTNLFFIYF

SEQ ID NO: 7911 - protein, 85 aa, Homo sapiens
  MISC_FEATURE (3): Xaa equals any of the naturally occurring L-amino acids
  MISC_FEATURE (8): Xaa equals any of the naturally occurring L-amino acids
  MISC_FEATURE (10): Xaa equals any of the naturally occurring L-amino acids
  MISC_FEATURE (36): Xaa equals any of the naturally occurring L-amino acids
  MISC_FEATURE (39): Xaa equals any of the naturally occurring L-amino acids
  MISC_FEATURE (57): Xaa equals any of the naturally occurring L-amino acids
  MISC_FEATURE (65): Xaa equals any of the naturally occurring L-amino acids
  MISC_FEATURE (76): Xaa equals any of the naturally occurring L-amino acids
  MISC_FEATURE (82): Xaa equals any of the naturally occurring L-amino acids
  MISC_FEATURE (84): Xaa equals any of the naturally occurring L-amino acids
ACXIILGXSXGTAWKKIRFPYRIGPKRKLILVKFLXLGXADINPHLGCFIKLWLQQXGLEFVTVXVPFGNFWSLFXSVDNSXWXS

SEQ ID NO: 7912 - protein, 46 aa, Homo sapiens
  MISC_FEATURE (1): Xaa equals any of the naturally occurring L-amino acids
  MISC_FEATURE (16): Xaa equals any of the naturally occurring L-amino acids
  MISC_FEATURE (20): Xaa equals any of the naturally occurring L-amino acids
  MISC_FEATURE (27): Xaa equals any of the naturally occurring L-amino acids
  MISC_FEATURE (32): Xaa equals any of the naturally occurring L-amino acids
  MISC_FEATURE (34): Xaa equals any of the naturally occurring L-amino acids
  MISC_FEATURE (35): Xaa equals any of the naturally occurring L-amino acids
  MISC_FEATURE (38): Xaa equals any of the naturally occurring L-amino acids
  MISC_FEATURE (40): Xaa equals any of the naturally occurring L-amino acids
  MISC_FEATURE (43): Xaa equals any of the naturally occurring L-amino acids
  MISC_FEATURE (46): Xaa equals any of the naturally occurring L-amino acids
XHLFSHSMDVQLLSSXGQIXGAKLLAXYVKLXHXXISXNXSPXFVX

SEQ ID NO: 7913 - protein, 81 aa, Homo sapiens
  MISC_FEATURE (7): Xaa equals any of the naturally occurring L-amino acids
  MISC_FEATURE (9): Xaa equals any of the naturally occurring L-amino acids
  MISC_FEATURE (13): Xaa equals any of the naturally occurring L-amino acids
  MISC_FEATURE (29): Xaa equals any of the naturally occurring L-amino acids
  MISC_FEATURE (31): Xaa equals any of the naturally occurring L-amino acids
  MISC_FEATURE (39): Xaa equals any of the naturally occurring L-amino acids
  MISC_FEATURE (43): Xaa equals any of the naturally occurring L-amino acids
  MISC_FEATURE (44): Xaa equals any of the naturally occurring L-amino acids
  MISC_FEATURE (46): Xaa equals any of the naturally occurring L-amino acids
  MISC_FEATURE (47): Xaa equals any of the naturally occurring L-amino acids
  MISC_FEATURE (48): Xaa equals any of the naturally occurring L-amino acids
  MISC_FEATURE (52): Xaa equals any of the naturally occurring L-amino acids
  MISC_FEATURE (63): Xaa equals any of the naturally occurring L-amino acids
  MISC_FEATURE (73): Xaa equals any of the naturally occurring L-amino acids
  MISC_FEATURE (74): Xaa equals any of the naturally occurring L-amino acids
  MISC_FEATURE (77): Xaa equals any of the naturally occurring L-amino acids
  MISC_FEATURE (79): Xaa equals any of the naturally occurring L-amino acids
  MISC_FEATURE (80): Xaa equals any of the naturally occurring L-amino acids
HLETLSXSXLRVXEYALRTLYPSGLQEKXRXLPGHEGSXLSRXXFXXXQVKXQVVASNSLLLXQVAVANSFSXXFLXPXXS

SEQ ID NO: 7914 - protein, 93 aa, Homo sapiens
  MISC_FEATURE (51): Xaa equals any of the naturally occurring L-amino acids
  MISC_FEATURE (55): Xaa equals any of the naturally occurring L-amino acids
  MISC_FEATURE (59): Xaa equals any of the naturally occurring L-amino acids
  MISC_FEATURE (60): Xaa equals any of the naturally occurring L-amino acids
  MISC_FEATURE (62): Xaa equals any of the naturally occurring L-amino acids
  MISC_FEATURE (70): Xaa equals any of the naturally occurring L-amino acids
  MISC_FEATURE (71): Xaa equals any of the naturally occurring L-amino acids
  MISC_FEATURE (80): Xaa equals any of the naturally occurring L-amino acids
  MISC_FEATURE (84): Xaa equals any of the naturally occurring L-amino acids
  MISC_FEATURE (89): Xaa equals any of the naturally occurring L-amino acids
  MISC_FEATURE (92): Xaa equals any of the naturally occurring L-amino acids
GGKEGEYTLLVNSGYSCILSCLDSTGGFLSFFESLLTLGMRDRNRVREEVXFKCXFFPXXTXTQPYFWDXXIPTFPLDLXPKIXGGTPXNLXP

SEQ ID NO: 7915 - protein, 91 aa, Homo sapiens
  MISC_FEATURE (14): Xaa equals any of the naturally occurring L-amino acids
  MISC_FEATURE (18): Xaa equals any of the naturally occurring L-amino acids
  MISC_FEATURE (19): Xaa equals any of the naturally occurring L-amino acids
  MISC_FEATURE (20): Xaa equals any of the naturally occurring L-amino acids
  MISC_FEATURE (66): Xaa equals any of the naturally occurring L-amino acids
  MISC_FEATURE (67): Xaa equals any of the naturally occurring L-amino acids
  MISC_FEATURE (69): Xaa equals any of the naturally occurring L-amino acids
  MISC_FEATURE (74): Xaa equals any of the naturally occurring L-amino acids
  MISC_FEATURE (81): Xaa equals any of the naturally occurring L-amino acids
  MISC_FEATURE (84): Xaa equals any of the naturally occurring L-amino acids
  MISC_FEATURE (90): Xaa equals any of the naturally occurring L-amino acids
MLLQAAKAHACCWXSLCXXXDLGAGALNAGSYASLGKRTDYGKLYHVLSLISVKTSSYTLIISIHXXNXRLVPXGLKKILXLGXQNFWGXF

SEQ ID NO: 7916 - protein, 97 aa, Homo sapiens
  MISC_FEATURE (23): Xaa equals any of the naturally occurring L-amino acids
  MISC_FEATURE (25): Xaa equals any of the naturally occurring L-amino acids
  MISC_FEATURE (30): Xaa equals any of the naturally occurring L-amino acids
  MISC_FEATURE (34): Xaa equals any of the naturally occurring L-amino acids
  MISC_FEATURE (39): Xaa equals any of the naturally occurring L-amino acids
  MISC_FEATURE (45): Xaa equals any of the naturally occurring L-amino acids
  MISC_FEATURE (46): Xaa equals any of the naturally occurring L-amino acids
  MISC_FEATURE (50): Xaa equals any of the naturally occurring L-amino acids
  MISC_FEATURE (51): Xaa equals any of the naturally occurring L-amino acids
  MISC_FEATURE (52): Xaa equals any of the naturally occurring L-amino acids
  MISC_FEATURE (53): Xaa equals any of the naturally occurring L-amino acids
  MISC_FEATURE (54): Xaa equals any of the naturally occurring L-amino acids
  MISC_FEATURE (63): Xaa equals any of the naturally occurring L-amino acids
  MISC_FEATURE (64): Xaa equals any of the naturally occurring L-amino acids
  MISC_FEATURE (67): Xaa equals any of the naturally occurring L-amino acids
  MISC_FEATURE (68): Xaa equals any of the naturally occurring L-amino acids
  MISC_FEATURE (71): Xaa equals any of the naturally occurring L-amino acids
  MISC_FEATURE (75): Xaa equals any of the naturally occurring L-amino acids
  MISC_FEATURE (81): Xaa equals any of the naturally occurring L-amino acids
  MISC_FEATURE (87): Xaa equals any of the naturally occurring L-amino acids
  MISC_FEATURE (91): Xaa equals any of the naturally occurring L-amino acids
  MISC_FEATURE (92): Xaa equals any of the naturally occurring L-amino acids
  MISC_FEATURE (93): Xaa equals any of the naturally occurring L-amino acids
  MISC_FEATURE (96): Xaa equals any of the naturally occurring L-amino acids
  MISC_FEATURE (97): Xaa equals any of the naturally occurring L-amino acids
FLTSDVIIYLPALILGVQTANLXFXFQALXRLGXSFHLXFRRTGXXPAVXXXXXGSRVPASVXXPIXXFRXRTVXSWGFGXGRVSWXFQRXXXGGXX

SEQ ID NO: 7917 - protein, 61 aa, Homo sapiens
  MISC_FEATURE (3): Xaa equals any of the naturally occurring L-amino acids
  MISC_FEATURE (4): Xaa equals any of the naturally occurring L-amino acids
  MISC_FEATURE (7): Xaa equals any of the naturally occurring L-amino acids
  MISC_FEATURE (10): Xaa equals any of the naturally occurring L-amino acids
  MISC_FEATURE (21): Xaa equals any of the naturally occurring L-amino acids
  MISC_FEATURE (22): Xaa equals any of the naturally occurring L-amino acids
  MISC_FEATURE (24): Xaa equals any of the naturally occurring L-amino acids
  MISC_FEATURE (48): Xaa equals any of the naturally occurring L-amino acids
  MISC_FEATURE (61): Xaa equals any of the naturally occurring L-amino acids
TSXXSLXWRXGCFSLCTKRRXXGXGVNVNFSTLCLNVYHLTNIIKETXLKLEFPKHYSGCX

SEQ ID NO: 7918 - protein, 19 aa, Homo sapiens
  MISC_FEATURE (4): Xaa equals any of the naturally occurring L-amino acids
  MISC_FEATURE (5): Xaa equals any of the naturally occurring L-amino acids
  MISC_FEATURE (9): Xaa equals any of the naturally occurring L-amino acids
  MISC_FEATURE (11): Xaa equals any of the naturally occurring L-amino acids
IRHXXSRKXLXPRKSRCCP

SEQ ID NO: 7919 - protein, 72 aa, Homo sapiens
  MISC_FEATURE (9): Xaa equals any of the naturally occurring L-amino acids
  MISC_FEATURE (10): Xaa equals any of the naturally occurring L-amino acids
  MISC_FEATURE (15): Xaa equals any of the naturally occurring L-amino acids
  MISC_FEATURE (16): Xaa equals any of the naturally occurring L-amino acids
  MISC_FEATURE (71): Xaa equals any of the naturally occurring L-amino acids
SQLLSLLSXXDGHLXXHTTANWLGVVGLSNDYLLMITYEKQQQKSHLEAAFNERTNVLPSNRAAKIFLLLXF

SEQ ID NO: 7920 - protein, 70 aa, Homo sapiens
  MISC_FEATURE (3): Xaa equals any of the naturally occurring L-amino acids
  MISC_FEATURE (30): Xaa equals any of the naturally occurring L-amino acids
FGXGIHEVGQGYTNAKLSCMFFNRNCGTSXIYLINGNLLRECFGDTWAVSSLCVLQRFCLCNLFIHLVIR

SEQ ID NO: 7921 - protein, 41 aa, Homo sapiens
  MISC_FEATURE (2): Xaa equals any of the naturally occurring L-amino acids
  MISC_FEATURE (5): Xaa equals any of the naturally occurring L-amino acids
  MISC_FEATURE (9): Xaa equals any of the naturally occurring L-amino acids
  MISC_FEATURE (17): Xaa equals any of the naturally occurring L-amino acids
  MISC_FEATURE (21): Xaa equals any of the naturally occurring L-amino acids
  MISC_FEATURE (28): Xaa equals any of the naturally occurring L-amino acids
  MISC_FEATURE (32): Xaa equals any of the naturally occurring L-amino acids
  MISC_FEATURE (34): Xaa equals any of the naturally occurring L-amino acids
  MISC_FEATURE (39): Xaa equals any of the naturally occurring L-amino acids
SXNLXGFFXFGQKIIKXFFFXKKKKKNXGGGXRXPFGPXGG

SEQ ID NO: 7922 - protein, 81 aa, Homo sapiens
PNGLGHQILSHSVHESSSPHTIIHIYSPNSNTGESLEHPVLALWERGRWRSGCMYLNNTDPVLSPSAGISPCEGAAGHPGI

SEQ ID NO: 7923 - protein, 126 aa, Homo sapiens
  MISC_FEATURE (23): Xaa equals any of the naturally occurring L-amino acids
  MISC_FEATURE (31): Xaa equals any of the naturally occurring L-amino acids
  MISC_FEATURE (49): Xaa equals any of the naturally occurring L-amino acids
  MISC_FEATURE (64): Xaa equals any of the naturally occurring L-amino acids
  MISC_FEATURE (68): Xaa equals any of the naturally occurring L-amino acids
  MISC_FEATURE (72): Xaa equals any of the naturally occurring L-amino acids
  MISC_FEATURE (82): Xaa equals any of the naturally occurring L-amino acids
  MISC_FEATURE (86): Xaa equals any of the naturally occurring L-amino acids
  MISC_FEATURE (90): Xaa equals any of the naturally occurring L-amino acids
  MISC_FEATURE (93): Xaa equals any of the naturally occurring L-amino acids
  MISC_FEATURE (95): Xaa equals any of the naturally occurring L-amino acids
  MISC_FEATURE (97): Xaa equals any of the naturally occurring L-amino acids
  MISC_FEATURE (99): Xaa equals any of the naturally occurring L-amino acids
  MISC_FEATURE (100): Xaa equals any of the naturally occurring L-amino acids
  MISC_FEATURE (101): Xaa equals any of the naturally occurring L-amino acids
  MISC_FEATURE (104): Xaa equals any of the naturally occurring L-amino acids
  MISC_FEATURE (105): Xaa equals any of the naturally occurring L-amino acids
  MISC_FEATURE (106): Xaa equals any of the naturally occurring L-amino acids
  MISC_FEATURE (108): Xaa equals any of the naturally occurring L-amino acids
  MISC_FEATURE (109): Xaa equals any of the naturally occurring L-amino acids
  MISC_FEATURE (110): Xaa equals any of the naturally occurring L-amino acids
  MISC_FEATURE (113): Xaa equals any of the naturally occurring L-amino acids
  MISC_FEATURE (114): Xaa equals any of the naturally occurring L-amino acids
  MISC_FEATURE (115): Xaa equals any of the naturally occurring L-amino acids
  MISC_FEATURE (117): Xaa equals any of the naturally occurring L-amino acids
  MISC_FEATURE (118): Xaa equals any of the naturally occurring L-amino acids
  MISC_FEATURE (119): Xaa equals any of the naturally occurring L-amino acids
  MISC_FEATURE (122): Xaa equals any of the naturally occurring L-amino acids
NSTRGDFYNPVVPEVQKRRMGAXPVRGLGGXGAAAAGGRAALLLVSPTXRRSTRPPRSSTPRRXHRPXKPAXAQLRPQDYVXRDRXKVDXTTXTXSXNXXXIGXXXGXXXSFXXXKXXXWLXKSIF

SEQ ID NO: 7924 - protein, 93 aa, Homo sapiens
  MISC_FEATURE (78): Xaa equals any of the naturally occurring L-amino acids
  MISC_FEATURE (81): Xaa equals any of the naturally occurring L-amino acids
SGKHCIMFALYSFNGKRKGKNTYEKKAVPWHCLFSMLCAVDWGHFNYHVQFYGLFMRSFFLTFSWIAVKGKYRRIEEXFSXRWAGTVPPWSMG

SEQ ID NO: 7925 - protein, 75 aa, Homo sapiens
  MISC_FEATURE (11): Xaa equals any of the naturally occurring L-amino acids
  MISC_FEATURE (13): Xaa equals any of the naturally occurring L-amino acids
  MISC_FEATURE (39): Xaa equals any of the naturally occurring L-amino acids
  MISC_FEATURE (54): Xaa equals any of the naturally occurring L-amino acids
FGREATRTCQXWXLVISEGERGKSRRAGWPGASGQRGQXFRVKVFRMRARTRSXLRVGLLRWNGAEGHGLTGEET

SEQ ID NO: 7926 - protein, 109 aa, Homo sapiens
  MISC_FEATURE (3): Xaa equals any of the naturally occurring L-amino acids
  MISC_FEATURE (20): Xaa equals any of the naturally occurring L-amino acids
  MISC_FEATURE (27): Xaa equals any of the naturally occurring L-amino acids
  MISC_FEATURE (43): Xaa equals any of the naturally occurring L-amino acids
  MISC_FEATURE (67): Xaa equals any of the naturally occurring L-amino acids
  MISC_FEATURE (72): Xaa equals any of the naturally occurring L-amino acids
  MISC_FEATURE (73): Xaa equals any of the naturally occurring L-amino acids
  MISC_FEATURE (75): Xaa equals any of the naturally occurring L-amino acids
  MISC_FEATURE (78): Xaa equals any of the naturally occurring L-amino acids
  MISC_FEATURE (83): Xaa equals any of the naturally occurring L-amino acids
  MISC_FEATURE (86): Xaa equals any of the naturally occurring L-amino acids
  MISC_FEATURE (91): Xaa equals any of the naturally occurring L-amino acids
  MISC_FEATURE (99): Xaa equals any of the naturally occurring L-amino acids
  MISC_FEATURE (100): Xaa equals any of the naturally occurring L-amino acids
  MISC_FEATURE (102): Xaa equals any of the naturally occurring L-amino acids
  MISC_FEATURE (103): Xaa equals any of the naturally occurring L-amino acids
  MISC_FEATURE (106): Xaa equals any of the naturally occurring L-amino acids
  MISC_FEATURE (109): Xaa equals any of the naturally occurring L-amino acids
LCXVGGRGGWRKKWSELLGXRAKGPEXIEIPPSWNAGIWPRMXFGQRGEEEEVSPDIPSLSIHLLTXKLFTXXYXALXNFSQXPFXVTFRXFYPPFNLXXFXXFLXFKX

SEQ ID NO: 7927 - protein, 87 aa, Homo sapiens
  MISC_FEATURE (27): Xaa equals any of the naturally occurring L-amino acids
  MISC_FEATURE (38): Xaa equals any of the naturally occurring L-amino acids
  MISC_FEATURE (55): Xaa equals any of the naturally occurring L-amino acids
  MISC_FEATURE (73): Xaa equals any of the naturally occurring L-amino acids
  MISC_FEATURE (75): Xaa equals any of the naturally occurring L-amino acids
  MISC_FEATURE (76): Xaa equals any of the naturally occurring L-amino acids
  MISC_FEATURE (80): Xaa equals any of the naturally occurring L-amino acids
  MISC_FEATURE (85): Xaa equals any of the naturally occurring L-amino acids
LSTAEDQGGRNSSLKVALSGPWPGRPXAFLVGTTRGQXHMVLPFHLCWPPPGGIXPLTPMLEGGSVNGRGTLXIXXLKGXLGKVXRN

SEQ ID NO: 7928 - protein, 39 aa, Homo sapiens
  MISC_FEATURE (12): Xaa equals any of the naturally occurring L-amino acids
  MISC_FEATURE (13): Xaa equals any of the naturally occurring L-amino acids
  MISC_FEATURE (14): Xaa equals any of the naturally occurring L-amino acids
  MISC_FEATURE (16): Xaa equals any of the naturally occurring L-amino acids
  MISC_FEATURE (23): Xaa equals any of the naturally occurring L-amino acids
  MISC_FEATURE (37): Xaa equals any of the naturally occurring L-amino acids
CWSLCALWLLNXXXAXSWHHILXTCFLGKFPWKNDCXVK

SEQ ID NO: 7929 - protein, 50 aa, Homo sapiens
  MISC_FEATURE (38): Xaa equals any of the naturally occurring L-amino acids
VKLHEKLNMLPLFFTLCRGLTLFSILACGKLSLTYDLXIHSNKVTSQMCL

SEQ ID NO: 7930 - protein, 62 aa, Homo sapiens
  MISC_FEATURE (20): Xaa equals any of the naturally occurring L-amino acids
  MISC_FEATURE (25): Xaa equals any of the naturally occurring L-amino acids
  MISC_FEATURE (28): Xaa equals any of the naturally occurring L-amino acids
  MISC_FEATURE (32): Xaa equals any of the naturally occurring L-amino acids
  MISC_FEATURE (40): Xaa equals any of the naturally occurring L-amino acids
  MISC_FEATURE (42): Xaa equals any of the naturally occurring L-amino acids
EVSISVLPEFFPSSEDVTDXLLELXMRXKEWXLKAFGLKXVXNKIVSGFYSKKKKKIWGGGP

SEQ ID NO: 7931 - protein, 71 aa, Homo sapiens
  MISC_FEATURE (58): Xaa equals any of the naturally occurring L-amino acids
  MISC_FEATURE (70): Xaa equals any of the naturally occurring L-amino acids
RNILMHLFKTVFMFPVKLCNVSTWEKVWKGTFVTILTYFLMFLHYFSFMWAGHIGNQXLKQGGHKSVCGXE

SEQ ID NO: 7932 - protein, 50 aa, Homo sapiens
  MISC_FEATURE (43): Xaa equals any of the naturally occurring L-amino acids
  MISC_FEATURE (50): Xaa equals any of the naturally occurring L-amino acids
DDSLRPVSGGTKSSGEHNFYQPGVLLGRPLHSLTHPWQPCGLXFVLDHQX

SEQ ID NO: 7933 - protein, 70 aa, Homo sapiens
  MISC_FEATURE (37): Xaa equals any of the naturally occurring L-amino acids
  MISC_FEATURE (44): Xaa equals any of the naturally occurring L-amino acids
  MISC_FEATURE (46): Xaa equals any of the naturally occurring L-amino acids
  MISC_FEATURE (67): Xaa equals any of the naturally occurring L-amino acids
CQECRLVYVPGGGTQRGAPGFPCPPAALPLFPFFPDXRPEPVPXLXINLCEIKKKKKKNSGGGPVPXWAL

SEQ ID NO: 7934 - protein, 145 aa, Homo sapiens
  MISC_FEATURE (1): Xaa equals any of the naturally occurring L-amino acids
  MISC_FEATURE (17): Xaa equals any of the naturally occurring L-amino acids
  MISC_FEATURE (33): Xaa equals any of the naturally occurring L-amino acids
  MISC_FEATURE (36): Xaa equals any of the naturally occurring L-amino acids
  MISC_FEATURE (40): Xaa equals any of the naturally occurring L-amino acids
  MISC_FEATURE (43): Xaa equals any of the naturally occurring L-amino acids
  MISC_FEATURE (44): Xaa equals any of the naturally occurring L-amino acids
  MISC_FEATURE (48): Xaa equals any of the naturally occurring L-amino acids
  MISC_FEATURE (49): Xaa equals any of the naturally occurring L-amino acids
  MISC_FEATURE (51): Xaa equals any of the naturally occurring L-amino acids
  MISC_FEATURE (57): Xaa equals any of the naturally occurring L-amino acids
  MISC_FEATURE (60): Xaa equals any of the naturally occurring L-amino acids
  MISC_FEATURE (62): Xaa equals any of the naturally occurring L-amino acids
  MISC_FEATURE (70): Xaa equals any of the naturally occurring L-amino acids
  MISC_FEATURE (71): Xaa equals any of the naturally occurring L-amino acids
  MISC_FEATURE (96): Xaa equals any of the naturally occurring L-amino acids
  MISC_FEATURE (113): Xaa equals any of the naturally occurring L-amino acids
  MISC_FEATURE (138): Xaa equals any of the naturally occurring L-amino acids
  MISC_FEATURE (143): Xaa equals any of the naturally occurring L-amino acids
XPTLYTAACRHGPAFPXSYVPPRRCTCRTLIRXDWXSFWXLFXXWVCXXCXVLVFCXSLXCXLHHNANLXXLQISMKPAHSAVCPGHLASCRTKRXCTPLRAHVVGALPWQVXLCSEAISGTGPTRPQPSRTGLTLLXHPGCXSV

SEQ ID NO: 7935 - protein, 29 aa, Homo sapiens
  MISC_FEATURE (2): Xaa equals any of the naturally occurring L-amino acids
MXLSITKITGYYLQDIKKHLKKRKRTISV

SEQ ID NO: 7936 - protein, 55 aa, Homo sapiens
  MISC_FEATURE (21): Xaa equals any of the naturally occurring L-amino acids
  MISC_FEATURE (22): Xaa equals any of the naturally occurring L-amino acids
  MISC_FEATURE (39): Xaa equals any of the naturally occurring L-amino acids
  MISC_FEATURE (42): Xaa equals any of the naturally occurring L-amino acids
  MISC_FEATURE (46): Xaa equals any of the naturally occurring L-amino acids
  MISC_FEATURE (55): Xaa equals any of the naturally occurring L-amino acids
DIKIYIDYILKLLNALILATXXEIVNSFTEINSTDRCRXRSXGSRXVFALHTEWX

SEQ ID NO: 7937 - protein, 105 aa, Homo sapiens
  MISC_FEATURE (7): Xaa equals any of the naturally occurring L-amino acids
  MISC_FEATURE (41): Xaa equals any of the naturally occurring L-amino acids
  MISC_FEATURE (44): Xaa equals any of the naturally occurring L-amino acids
  MISC_FEATURE (52): Xaa equals any of the naturally occurring L-amino acids
  MISC_FEATURE (54): Xaa equals any of the naturally occurring L-amino acids
  MISC_FEATURE (64): Xaa equals any of the naturally occurring L-amino acids
  MISC_FEATURE (81): Xaa equals any of the naturally occurring L-amino acids
  MISC_FEATURE (83): Xaa equals any of the naturally occurring L-amino acids
  MISC_FEATURE (92): Xaa equals any of the naturally occurring L-amino acids
  MISC_FEATURE (101): Xaa equals any of the naturally occurring L-amino acids
ARGEASXPALQVRGWRRPGFLPPGDGTGPGPAPRVAPGGPXPPXESWPPRAXTXPAGRSLDTPXAPQSPAAAPPGMAQGPXLXYGQQHGDKXGSYLMLGGXKVDG

SEQ ID NO: 7938 - protein, 50 aa, Homo sapiens
  MISC_FEATURE (17): Xaa equals any of the naturally occurring L-amino acids
  MISC_FEATURE (34): Xaa equals any of the naturally occurring L-amino acids
  MISC_FEATURE (39): Xaa equals any of the naturally occurring L-amino acids
AEVQMTTFKEEPSAPAXQDEKLSHLALILPQELXQDQVXTGSATLQKMSS

SEQ ID NO: 7939 - protein, 46 aa, Homo sapiens
QYHSNIIWIRAFILGRKTVVITGILLNLKLCRKQTKLFLGENQLLD

SEQ ID NO: 7940 - protein, 74 aa, Homo sapiens
  MISC_FEATURE (12): Xaa equals any of the naturally occurring L-amino acids
  MISC_FEATURE (18): Xaa equals any of the naturally occurring L-amino acids
  MISC_FEATURE (20): Xaa equals any of the naturally occurring L-amino acids
  MISC_FEATURE (21): Xaa equals any of the naturally occurring L-amino acids
  MISC_FEATURE (23): Xaa equals any of the naturally occurring L-amino acids
  MISC_FEATURE (28): Xaa equals any of the naturally occurring L-amino acids
  MISC_FEATURE (34): Xaa equals any of the naturally occurring L-amino acids
  MISC_FEATURE (36): Xaa equals any of the naturally occurring L-amino acids
  MISC_FEATURE (38): Xaa equals any of the naturally occurring L-amino acids
  MISC_FEATURE (39): Xaa equals any of the naturally occurring L-amino acids
  MISC_FEATURE (40): Xaa equals any of the naturally occurring L-amino acids
  MISC_FEATURE (42): Xaa equals any of the naturally occurring L-amino acids
  MISC_FEATURE (43): Xaa equals any of the naturally occurring L-amino acids
  MISC_FEATURE (52): Xaa equals any of the naturally occurring L-amino acids
  MISC_FEATURE (60): Xaa equals any of the naturally occurring L-amino acids
  MISC_FEATURE (61): Xaa equals any of the naturally occurring L-amino acids
  MISC_FEATURE (62): Xaa equals any of the naturally occurring L-amino acids
  MISC_FEATURE (63): Xaa equals any of the naturally occurring L-amino acids
  MISC_FEATURE (66): Xaa equals any of the naturally occurring L-amino acids
  MISC_FEATURE (67): Xaa equals any of the naturally occurring L-amino acids
  MISC_FEATURE (72): Xaa equals any of the naturally occurring L-amino acids
PARKAQSILHSXCFPVLXLXXRXMGVPXKTFAVXPXFXXXFXXKFDRLNYCXHSLFLGLXXXXGNXXRADAXLF

SEQ ID NO: 7941 - protein, 136 aa, Homo sapiens
  MISC_FEATURE (30): Xaa equals any of the naturally occurring L-amino acids
  MISC_FEATURE (56): Xaa equals any of the naturally occurring L-amino acids
  MISC_FEATURE (87): Xaa equals any of the naturally occurring L-amino acids
  MISC_FEATURE (103): Xaa equals any of the naturally occurring L-amino acids
RIKDGSDYLKRNLIISHNGNRKKKTHNTFXRSGKTKESRFRLPKEGPLRSYLHEAXRLVPERTSVQVWEFPWELAPSHSPPQLRSLXGLPLLGSIILDKPHCXENPWGDTGLAFPAEGQCLKRNWGSPRDQIRLRW

SEQ ID NO: 7942 - protein, 150 aa, Homo sapiens
  MISC_FEATURE (13): Xaa equals any of the naturally occurring L-amino acids
  MISC_FEATURE (78): Xaa equals any of the naturally occurring L-amino acids
  MISC_FEATURE (82): Xaa equals any of the naturally occurring L-amino acids
  MISC_FEATURE (97): Xaa equals any of the naturally occurring L-amino acids
  MISC_FEATURE (106): Xaa equals any of the naturally occurring L-amino acids
  MISC_FEATURE (109): Xaa equals any of the naturally occurring L-amino acids
  MISC_FEATURE (141): Xaa equals any of the naturally occurring L-amino acids
  MISC_FEATURE (143): Xaa equals any of the naturally occurring L-amino acids
  MISC_FEATURE (148): Xaa equals any of the naturally occurring L-amino acids
RHLTRRCGLLHAXVRRPLYGFSILVEILSPWPFGVPCCISEVNFNYSTFHQCWSGKKKEEQIWGEKFCFLGLTNCKMXKIAXMGEKKTRALWTFAKXFSRITCFSXPHXVTLISGSSYVGDKRSTGSSGMLEQMVDQNGLXHXSVEVXLD

SEQ ID NO: 7943 - protein, 117 aa, Homo sapiens
NWVEDSSCCLNNALTPFSPQKGPTFLKLFSAPPHLLTCNTCHNRKPVSYTVIPKHIAPTRGEREGLSEERGGQAFQKLEGLSTEPLPRWGVPTPKPRIQKPESTSRHSWFPFSCSCW

SEQ ID NO: 7944 - protein, 113 aa, Homo sapiens
  MISC_FEATURE (4): Xaa equals any of the naturally occurring L-amino acids
  MISC_FEATURE (96): Xaa equals any of the naturally occurring L-amino acids
  MISC_FEATURE (113): Xaa equals any of the naturally occurring L-amino acids
GASXVALEGWLGQHGPVANPLFWCVCVCHLPMLVSAPRRTWRGPGRKCSGGWVAGPDQSSVLLGNWCWRARSEEAEGVAPGYEGVSGCSSCSLGCXWWPSAGGWSTPTKATSX

SEQ ID NO: 7945 - protein, 50 aa, Homo sapiens
  MISC_FEATURE (6): Xaa equals any of the naturally occurring L-amino acids
  MISC_FEATURE (18): Xaa equals any of the naturally occurring L-amino acids
  MISC_FEATURE (36): Xaa equals any of the naturally occurring L-amino acids
  MISC_FEATURE (38): Xaa equals any of the naturally occurring L-amino acids
GENCIXETHNVRILDFYXQIILSCTEWKTVYLYINXCXDYESFNPYPLFL

SEQ ID NO: 7946 - protein, 49 aa, Homo sapiens
LLHLIFNIDIKMQMNQSFCNENHFRRNISDPTPSPPACRMRPEINSVSV

SEQ ID NO: 7947 - protein, 63 aa, Homo sapiens
  MISC_FEATURE (46): Xaa equals any of the naturally occurring L-amino acids
RSHFTKAKKHVMIYPLLKLISPFACIGHRFHGKSKAFSLLSDIFIXSLNYLNKKKLLPLCRVK

SEQ ID NO: 7948 - protein, 153 aa, Homo sapiens
  MISC_FEATURE (1): Xaa equals any of the naturally occurring L-amino acids
  MISC_FEATURE (4): Xaa equals any of the naturally occurring L-amino acids
  MISC_FEATURE (7): Xaa equals any of the naturally occurring L-amino acids
  MISC_FEATURE (16): Xaa equals any of the naturally occurring L-amino acids
  MISC_FEATURE (17): Xaa equals any of the naturally occurring L-amino acids
  MISC_FEATURE (57): Xaa equals any of the naturally occurring L-amino acids
  MISC_FEATURE (105): Xaa equals any of the naturally occurring L-amino acids
  MISC_FEATURE (110): Xaa equals any of the naturally occurring L-amino acids
  MISC_FEATURE (124): Xaa equals any of the naturally occurring L-amino acids
  MISC_FEATURE (143): Xaa equals any of the naturally occurring L-amino acids
  MISC_FEATURE (148): Xaa equals any of the naturally occurring L-amino acids
XTPXSQXRRQCLKDIXXFLLLCNVILWIMPAFGARPHFSNTVEVDFYGYSLWAVISXHLPPFRHLLPHARCVQPAGGLRAVLRPPTEAWGAGRGGSAHVPTQTPXGNESXLVPYDSPFPSGPKXEFSQKLFFQVQFLNHSQDXPIHPXINVGH

SEQ ID NO: 7949 - protein, 21 aa, Homo sapiens
  MISC_FEATURE (10): Xaa equals any of the naturally occurring L-amino acids
  MISC_FEATURE (11): Xaa equals any of the naturally occurring L-amino acids
  MISC_FEATURE (12): Xaa equals any of the naturally occurring L-amino acids
  MISC_FEATURE (18): Xaa equals any of the naturally occurring L-amino acids
GLVLDRERTXXXWKYFEXVSA

SEQ ID NO: 7950 - protein, 33 aa, Homo sapiens
  MISC_FEATURE (6): Xaa equals any of the naturally occurring L-amino acids
  MISC_FEATURE (17): Xaa equals any of the naturally occurring L-amino acids
  MISC_FEATURE (19): Xaa equals any of the naturally occurring L-amino acids
  MISC_FEATURE (24): Xaa equals any of the naturally occurring L-amino acids
LWARGXGGPGAGALSSXLXSARIXIWNMLLSYL

SEQ ID NO: 7951 - protein, 120 aa, Homo sapiens
  MISC_FEATURE (92): Xaa equals any of the naturally occurring L-amino acids
VIDTLSNPGSHTPSQVFPREQQQIHGLISVLVALCSSSGLEDRYSWTELLKTFQNTPSPCPALPLGSTGTPVGWHNIVYPCRSRAGIFTSVXKGLCQGQSRWSPLPALSHIRVLAFHCDV

SEQ ID NO: 7952 - protein, 128 aa, Homo sapiens
  MISC_FEATURE (1): Xaa equals any of the naturally occurring L-amino acids
  MISC_FEATURE (6): Xaa equals any of the naturally occurring L-amino acids
  MISC_FEATURE (7): Xaa equals any of the naturally occurring L-amino acids
  MISC_FEATURE (8): Xaa equals any of the naturally occurring L-amino acids
  MISC_FEATURE (99): Xaa equals any of the naturally occurring L-amino acids
  MISC_FEATURE (120): Xaa equals any of the naturally occurring L-amino acids
  MISC_FEATURE (121): Xaa equals any of the naturally occurring L-amino acids
  MISC_FEATURE (122): Xaa equals any of the naturally occurring L-amino acids
XLEHMXXXRPASKCLGTRKTVTSGTLFKCLLFLQHRLGKSCQDEKESWRFFKSLFALLYFQVPKLGLFFFSFNLEGLPLGGIGWGQAKAPLGTSPRKMXLKGVPFFPKGGSFPLGGSQGXXXRGPYFP

SEQ ID NO: 7953 - protein, 46 aa, Homo sapiens
  MISC_FEATURE (3): Xaa equals any of the naturally occurring L-amino acids
  MISC_FEATURE (5): Xaa equals any of the naturally occurring L-amino acids
  MISC_FEATURE (19): Xaa equals any of the naturally occurring L-amino acids
  MISC_FEATURE (21): Xaa equals any of the naturally occurring L-amino acids
  MISC_FEATURE (40): Xaa equals any of the naturally occurring L-amino acids
  MISC_FEATURE (42): Xaa equals any of the naturally occurring L-amino acids
STXKXGHSVEKIGHSCTHXHXHFDHVVLNKSTDHNETLRXSXRLPL

SEQ ID NO: 7954 - protein, 59 aa, Homo sapiens
  MISC_FEATURE (38): Xaa equals any of the naturally occurring L-amino acids
IGKPLHTCVPVEHFHHLQFFLNISTVLNTCEQVTWEFXHGRVSSKEESSRSSWVTHYQL

SEQ ID NO: 7955 - protein, 34 aa, Homo sapiens
  MISC_FEATURE (3): Xaa equals any of the naturally occurring L-amino acids
  MISC_FEATURE (12): Xaa equals any of the naturally occurring L-amino acids
  MISC_FEATURE (25): Xaa equals any of the naturally occurring L-amino acids
  MISC_FEATURE (28): Xaa equals any of the naturally occurring L-amino acids
ALXDPSLRTIVXYWYIWFYMRTLNXYYXASKIYK

SEQ ID NO: 7956 - protein, 31 aa, Homo sapiens
QCGGKEVRPGMEKGGVSEISGGCRGPAMLKV

SEQ ID NO: 7957 - protein, 27 aa, Homo sapiens
  MISC_FEATURE (1): Xaa equals any of the naturally occurring L-amino acids
  MISC_FEATURE (2): Xaa equals any of the naturally occurring L-amino acids
  MISC_FEATURE (4): Xaa equals any of the naturally occurring L-amino acids
  MISC_FEATURE (6): Xaa equals any of the naturally occurring L-amino acids
XXKXLXRTGIIKTVTEPLYEVKRNMIT

SEQ ID NO: 7958 - protein, 24 aa, Homo sapiens
  MISC_FEATURE (2): Xaa equals any of the naturally occurring L-amino acids
  MISC_FEATURE (15): Xaa equals any of the naturally occurring L-amino acids
  MISC_FEATURE (18): Xaa equals any of the naturally occurring L-amino acids
SXYWILFGMSIKVYXYVXTDLRKK

SEQ ID NO: 7959 - protein, 34 aa, Homo sapiens
  MISC_FEATURE (9): Xaa equals any of the naturally occurring L-amino acids
  MISC_FEATURE (28): Xaa equals any of the naturally occurring L-amino acids
  MISC_FEATURE (29): Xaa equals any of the naturally occurring L-amino acids
  MISC_FEATURE (31): Xaa equals any of the naturally occurring L-amino acids
YQEDVMINXPIPMPCDYSTMTDYALLMXXAXSLW

SEQ ID NO: 7960 - protein, 52 aa, Homo sapiens
  MISC_FEATURE (37): Xaa equals any of the naturally occurring L-amino acids
NLHRNVCKICICIILASICYPPSCTQKSFPPYVISNXQVQIKSSCKLWFSFS

SEQ ID NO: 7961 - protein, 17 aa, Homo sapiens
  MISC_FEATURE (9): Xaa equals any of the naturally occurring L-amino acids
  MISC_FEATURE (10): Xaa equals any of the naturally occurring L-amino acids
  MISC_FEATURE (13): Xaa equals any of the naturally occurring L-amino acids
  MISC_FEATURE (16): Xaa equals any of the naturally occurring L-amino acids
GERFCLYFXXSSXSGXI

SEQ ID NO: 7962 - protein, 20 aa, Homo sapiens
  MISC_FEATURE (1): Xaa equals any of the naturally occurring L-amino acids
  MISC_FEATURE (14): Xaa equals any of the naturally occurring L-amino acids
  MISC_FEATURE (16): Xaa equals any of the naturally occurring L-amino acids
XCREHICINIGQLXFXWRHI

SEQ ID NO: 7963 - protein, 86 aa, Homo sapiens
AELALSFFCIRLIYFCSQMWADSHHSGLPSPAVRRSGRQSRSPFCRIPINIIEDGCIFKAKIDCGYRSYGVIYHGEYYLDLGCTRL

SEQ ID NO: 7964 - protein, 71 aa, Homo sapiens
  MISC_FEATURE (2): Xaa equals any of the naturally occurring L-amino acids
  MISC_FEATURE (60): Xaa equals any of the naturally occurring L-amino acids
  MISC_FEATURE (63): Xaa equals any of the naturally occurring L-amino acids
GXSKGRASSSGNQESSGQSCIILLFDVIKSAIRYEKTISEAWIKAIENTASVSEHKVCIXFIXIFNDCILV

SEQ ID NO: 7965 - protein, 49 aa, Homo sapiens
  MISC_FEATURE (12): Xaa equals any of the naturally occurring L-amino acids
  MISC_FEATURE (30): Xaa equals any of the naturally occurring L-amino acids
  MISC_FEATURE (35): Xaa equals any of the naturally occurring L-amino acids
  MISC_FEATURE (43): Xaa equals any of the naturally occurring L-amino acids
  MISC_FEATURE (45): Xaa equals any of the naturally occurring L-amino acids
DDIAGVDKTACXRQEDGEKKFSKAGMGKCXPGLNXKGLYQPQXRXWTLC

SEQ ID NO: 7966 - protein, 46 aa, Homo sapiens
  MISC_FEATURE (38): Xaa equals any of the naturally occurring L-amino acids
  MISC_FEATURE (41): Xaa equals any of the naturally occurring L-amino acids
FDSRVEPVHAVFIFYLRIVEYVTNVSSARLASRLPVEXQIXGMNVN

SEQ ID NO: 7967 - protein, 31 aa, Homo sapiens
  MISC_FEATURE (21): Xaa equals any of the naturally occurring L-amino acids
  MISC_FEATURE (28): Xaa equals any of the naturally occurring L-amino acids
  MISC_FEATURE (31): Xaa equals any of the naturally occurring L-amino acids
SCRIRHEGSEAPASGCNGALXNNQREAXANX

SEQ ID NO: 7968 - protein, 127 aa, Homo sapiens
  MISC_FEATURE (47): Xaa equals any of the naturally occurring L-amino acids
  MISC_FEATURE (86): Xaa equals any of the naturally occurring L-amino acids
  MISC_FEATURE (116): Xaa equals any of the naturally occurring L-amino acids
  MISC_FEATURE (117): Xaa equals any of the naturally occurring L-amino acids
  MISC_FEATURE (122): Xaa equals any of the naturally occurring L-amino acids
GNSEYLQLASVTDSTQVNVPRCLHFSGVGKVRQAACGGTGCAVLNGXGHVFVWGYGILGKGPNLVESAVPEMIPPTLFGLTEFNPXIQVSRIRCGLSHFAALTNKGELFVWGKNIXXVPGNXFALKD

SEQ ID NO: 7969 - protein, 133 aa, Homo sapiens
  MISC_FEATURE (75): Xaa equals any of the naturally occurring L-amino acids
  MISC_FEATURE (112): Xaa equals any of the naturally occurring L-amino acids
  MISC_FEATURE (113): Xaa equals any of the naturally occurring L-amino acids
  MISC_FEATURE (114): Xaa equals any of the naturally occurring L-amino acids
  MISC_FEATURE (123): Xaa equals any of the naturally occurring L-amino acids
  MISC_FEATURE (129): Xaa equals any of the naturally occurring L-amino acids
ATSQPRRRPKRGARHQSPRCLSPGGAPERFLSQQSHSACACLSVSPTLRWKKNFPRAGRTAAPPLSDSGSFGCSXLCAPFQRIIEIVNFNNPEQANEALLSRPELKLPRSVXXXERCLLGLQXSELCPXGSEG

SEQ ID NO: 7970 - protein, 58 aa, Homo sapiens
  MISC_FEATURE (5): Xaa equals any of the naturally occurring L-amino acids
  MISC_FEATURE (15): Xaa equals any of the naturally occurring L-amino acids
  MISC_FEATURE (22): Xaa equals any of the naturally occurring L-amino acids
  MISC_FEATURE (25): Xaa equals any of the naturally occurring L-amino acids
  MISC_FEATURE (36): Xaa equals any of the naturally occurring L-amino acids
  MISC_FEATURE (43): Xaa equals any of the naturally occurring L-amino acids
  MISC_FEATURE (46): Xaa equals any of the naturally occurring L-amino acids
  MISC_FEATURE (48): Xaa equals any of the naturally occurring L-amino acids
  MISC_FEATURE (56): Xaa equals any of the naturally occurring L-amino acids
VTMAXANGARGKTGXRTGNPPXLPXPILNLEVKFTXIFIINGXARXPXLGKKFATXNP

SEQ ID NO: 7971 - protein, 140 aa, Homo sapiens
  MISC_FEATURE (48): Xaa equals any of the naturally occurring L-amino acids
  MISC_FEATURE (74): Xaa equals any of the naturally occurring L-amino acids
  MISC_FEATURE (86): Xaa equals any of the naturally occurring L-amino acids
  MISC_FEATURE (99): Xaa equals any of the naturally occurring L-amino acids
  MISC_FEATURE (103): Xaa equals any of the naturally occurring L-amino acids
  MISC_FEATURE (106): Xaa equals any of the naturally occurring L-amino acids
  MISC_FEATURE (131): Xaa equals any of the naturally occurring L-amino acids
  MISC_FEATURE (132): Xaa equals any of the naturally occurring L-amino acids
  MISC_FEATURE (135): Xaa equals any of the naturally occurring L-amino acids
  MISC_FEATURE (138): Xaa equals any of the naturally occurring L-amino acids
PDPEHRPDIFQVSYFAFKFAKKDCPVSNINNSSIPSALPEPMTASEAXARKSQIKARITDTIGPTETSIAPRQXPKANSATTATPXVLTIQSSATPVKXLAPXEFXNHRPKGALRPGNGPEILLGQGPPQXXAQXHRXLQ

SEQ ID NO: 7972 - protein, 55 aa, Homo sapiens
  MISC_FEATURE (1): Xaa equals any of the naturally occurring L-amino acids
  MISC_FEATURE (11): Xaa equals any of the naturally occurring L-amino acids
  MISC_FEATURE (12): Xaa equals any of the naturally occurring L-amino acids
  MISC_FEATURE (17): Xaa equals any of the naturally occurring L-amino acids
  MISC_FEATURE (22): Xaa equals any of the naturally occurring L-amino acids
  MISC_FEATURE (37): Xaa equals any of the naturally occurring L-amino acids
  MISC_FEATURE (48): Xaa equals any of the naturally occurring L-amino acids
  MISC_FEATURE (51): Xaa equals any of the naturally occurring L-amino acids
  MISC_FEATURE (52): Xaa equals any of the naturally occurring L-amino acids
XGRAFPREGRXXSHAYXRSFCXGRTDVPGSSPCRNHXALRTPFTVYLXYIXXCKT

SEQ ID NO: 7973 - protein, 106 aa, Homo sapiens
  MISC_FEATURE (61): Xaa equals any of the naturally occurring L-amino acids
  MISC_FEATURE (62): Xaa equals any of the naturally occurring L-amino acids
  MISC_FEATURE (104): Xaa equals any of the naturally occurring L-amino acids
RGETREMAGNLLSGAGRRLWDWVPLACRSFSLGVPRLIGIRLTLPPPKVVDRWNEKRAMFXXYDNIGILGNFEKHPKELIRGPIWLRGWKGNELQRCIPKRKMXGK

SEQ ID NO: 7974 - protein, 79 aa, Homo sapiens
  MISC_FEATURE (35): Xaa equals any of the naturally occurring L-amino acids
  MISC_FEATURE (70): Xaa equals any of the naturally occurring L-amino acids
  MISC_FEATURE (71): Xaa equals any of the naturally occurring L-amino acids
  MISC_FEATURE (76): Xaa equals any of the naturally occurring L-amino acids
  MISC_FEATURE (79): Xaa equals any of the naturally occurring L-amino acids
FLSFQGCPVQLHKTSCILGISYLHLHYYLPMCCLXKWVYSATHLVSPQCSTQCVSLIKLALLPCQYYIQXXWSLAXWQX

SEQ ID NO: 7975 - protein, 126 aa, Homo sapiens
  MISC_FEATURE (51): Xaa equals any of the naturally occurring L-amino acids
  MISC_FEATURE (52): Xaa equals any of the naturally occurring L-amino acids
  MISC_FEATURE (67): Xaa equals any of the naturally occurring L-amino acids
  MISC_FEATURE (71): Xaa equals any of the naturally occurring L-amino acids
  MISC_FEATURE (75): Xaa equals any of the naturally occurring L-amino acids
  MISC_FEATURE (76): Xaa equals any of the naturally occurring L-amino acids
  MISC_FEATURE (78): Xaa equals any of the naturally occurring L-amino acids
  MISC_FEATURE (85): Xaa equals any of the naturally occurring L-amino acids
  MISC_FEATURE (89): Xaa equals any of the naturally occurring L-amino acids
  MISC_FEATURE (90): Xaa equals any of the naturally occurring L-amino acids
  MISC_FEATURE (92): Xaa equals any of the naturally occurring L-amino acids
  MISC_FEATURE (93): Xaa equals any of the naturally occurring L-amino acids
  MISC_FEATURE (95): Xaa equals any of the naturally occurring L-amino acids
  MISC_FEATURE (102): Xaa equals any of the naturally occurring L-amino acids
  MISC_FEATURE (107): Xaa equals any of the naturally occurring L-amino acids
  MISC_FEATURE (108): Xaa equals any of the naturally occurring L-amino acids
  MISC_FEATURE (109): Xaa equals any of the naturally occurring L-amino acids
  MISC_FEATURE (112): Xaa equals any of the naturally occurring L-amino acids
  MISC_FEATURE (113): Xaa equals any of the naturally occurring L-amino acids
  MISC_FEATURE (116): Xaa equals any of the naturally occurring L-amino acids
  MISC_FEATURE (117): Xaa equals any of the naturally occurring L-amino acids
  MISC_FEATURE (119): Xaa equals any of the naturally occurring L-amino acids
  MISC_FEATURE (120): Xaa equals any of the naturally occurring L-amino acids
SKCKHHRDPFYTEQDCTASCATPSFSISTPSSNSKSRTTDRCLFLFGDMGXXIFCSILCFSPIPLHXVGVXHSIXXWXGFRDWVXPKNXXGXXFXKKKKKFXGGGPXXXWAXXGGXXAXXGGGGGC

SEQ ID NO: 7976 - protein, 118 aa, Homo sapiens
  MISC_FEATURE (65): Xaa equals any of the naturally occurring L-amino acids
  MISC_FEATURE (80): Xaa equals any of the naturally occurring L-amino acids
  MISC_FEATURE (112): Xaa equals any of the naturally occurring L-amino acids
WGWRTHLNMWNPNAGQPGPNPYPPNIGCPGGSNPAHPPPINPPFPPGPCPPPPGAPHGNPAFPPXGAPHPVHSQGIQDAXRWVLPSPYQRCPGILCESLVWHVDHMIVDKRXEKMKKS

SEQ ID NO: 7977 - protein, 45 aa, Homo sapiens
  MISC_FEATURE (1): Xaa equals any of the naturally occurring L-amino acids
  MISC_FEATURE (12): Xaa equals any of the naturally occurring L-amino acids
  MISC_FEATURE (23): Xaa equals any of the naturally occurring L-amino acids
  MISC_FEATURE (24): Xaa equals any of the naturally occurring L-amino acids
  MISC_FEATURE (29): Xaa equals any of the naturally occurring L-amino acids
  MISC_FEATURE (39): Xaa equals any of the naturally occurring L-amino acids
XRTRGLGETAAXAGRGTAIFAGXXPPADXKKCAGSRRAXGLALGL

SEQ ID NO: 7978 - protein, 58 aa, Homo sapiens
  MISC_FEATURE (30): Xaa equals any of the naturally occurring L-amino acids
  MISC_FEATURE (51): Xaa equals any of the naturally occurring L-amino acids
PLYLLHNELTRNNFARRAKAKTPETRRATXEQLKEHTRLCCKIVGKIYRLXRQTYRAW

SEQ ID NO: 7979 - protein, 61 aa, Homo sapiens
  MISC_FEATURE (13): Xaa equals any of the naturally occurring L-amino acids
  MISC_FEATURE (45): Xaa equals any of the naturally occurring L-amino acids
  MISC_FEATURE (55): Xaa equals any of the naturally occurring L-amino acids
DPRNQTSYLRTAXRAHPSMLQNMGKIYRLRRTNLPSLVILVVPRXNLISTFNLPXNPLIPC

SEQ ID NO: 7980 - protein, 30 aa, Homo sapiens
  MISC_FEATURE (28): Xaa equals any of the naturally occurring L-amino acids
NLKLTLNLPQNPSKSLGNLTGSPKRNSXWT

SEQ ID NO: 7981 - protein, 121 aa, Homo sapiens
  MISC_FEATURE (9): Xaa equals any of the naturally occurring L-amino acids
  MISC_FEATURE (21): Xaa equals any of the naturally occurring L-amino acids
  MISC_FEATURE (71): Xaa equals any of the naturally occurring L-amino acids
  MISC_FEATURE (75): Xaa equals any of the naturally occurring L-amino acids
  MISC_FEATURE (107): Xaa equals any of the naturally occurring L-amino acids
  MISC_FEATURE (110): Xaa equals any of the naturally occurring L-amino acids
  MISC_FEATURE (111): Xaa equals any of the naturally occurring L-amino acids
  MISC_FEATURE (114): Xaa equals any of the naturally occurring L-amino acids
  MISC_FEATURE (119): Xaa equals any of the naturally occurring L-amino acids
DIKLIDTVXPRVFFFFFSFFXFFFEMESHSVAQAGYLRTCNPMSRNVGTPFMAVNLPVLRSLYKSLNPKGXNPIXPLVSFSVAFAHWLWKQGSFFLLGYLWIWGSVXCAXXGNXFQAWXRH

SEQ ID NO: 7982 - protein, 167 aa, Homo sapiens
  MISC_FEATURE (1): Xaa equals any of the naturally occurring L-amino acids
  MISC_FEATURE (7): Xaa equals any of the naturally occurring L-amino acids
  MISC_FEATURE (34): Xaa equals any of the naturally occurring L-amino acids
  MISC_FEATURE (41): Xaa equals any of the naturally occurring L-amino acids
  MISC_FEATURE (54): Xaa equals any of the naturally occurring L-amino acids
  MISC_FEATURE (64): Xaa equals any of the naturally occurring L-amino acids
  MISC_FEATURE (66): Xaa equals any of the naturally occurring L-amino acids
  MISC_FEATURE (104): Xaa equals any of the naturally occurring L-amino acids
  MISC_FEATURE (107): Xaa equals any of the naturally occurring L-amino acids
  MISC_FEATURE (119): Xaa equals any of the naturally occurring L-amino acids
  MISC_FEATURE (122): Xaa equals any of the naturally occurring L-amino acids
  MISC_FEATURE (126): Xaa equals any of the naturally occurring L-amino acids
  MISC_FEATURE (127): Xaa equals any of the naturally occurring L-amino acids
  MISC_FEATURE (135): Xaa equals any of the naturally occurring L-amino acids
  MISC_FEATURE (136): Xaa equals any of the naturally occurring L-amino acids
  MISC_FEATURE (139): Xaa equals any of the naturally occurring L-amino acids
  MISC_FEATURE (152): Xaa equals any of the naturally occurring L-amino acids
  MISC_FEATURE (154): Xaa equals any of the naturally occurring L-amino acids
  MISC_FEATURE (155): Xaa equals any of the naturally occurring L-amino acids
  MISC_FEATURE (156): Xaa equals any of the naturally occurring L-amino acids
  MISC_FEATURE (158): Xaa equals any of the naturally occurring L-amino acids
  MISC_FEATURE (162): Xaa equals any of the naturally occurring L-amino acids
XSPGGAXGGKINRPRTVTVWGPRTFFPQAFLSPXISHEMGXVKGPGLPGGGAPXAASPLHLNSXLXPRQELKKKLFKRRRVLNRERRLRHRVVGAVIDQGLIQXAPXQEAGVPLQVAKXNIXKEEXXKILPAIPXXPEXEGSLGIGSPFKAXQXXXQXKRKXGKAPS

SEQ ID NO: 7983 - protein, 48 aa, Homo sapiens
  MISC_FEATURE (7): Xaa equals any of the naturally occurring L-amino acids
  MISC_FEATURE (10): Xaa equals any of the naturally occurring L-amino acids
  MISC_FEATURE (15): Xaa equals any of the naturally occurring L-amino acids
  MISC_FEATURE (16): Xaa equals any of the naturally occurring L-amino acids
  MISC_FEATURE (17): Xaa equals any of the naturally occurring L-amino acids
  MISC_FEATURE (31): Xaa equals any of the naturally occurring L-amino acids
  MISC_FEATURE (36): Xaa equals any of the naturally occurring L-amino acids
VSSDERXVNXNETCXXXKLSQVRQSYPIFLXVVRLXGNSHCHIIFKGI

SEQ ID NO: 7984 - protein, 85 aa, Homo sapiens
  MISC_FEATURE (75): Xaa equals any of the naturally occurring L-amino acids
EPHRVRRMCIHWDASGRDVESHKRQGGLQHREWPSSHGVTGLCAGVVWPGIVSGSSDGMKRAAPRLEHMEGDECXAEAEGGAAES

SEQ ID NO: 7985 - protein, 106 aa, Homo sapiens
  MISC_FEATURE (93): Xaa equals any of the naturally occurring L-amino acids
  MISC_FEATURE (94): Xaa equals any of the naturally occurring L-amino acids
  MISC_FEATURE (95): Xaa equals any of the naturally occurring L-amino acids
EVSESRNLEKKDVETTSSVSVKRKRRLEDAFIVISDSDGEEPKEENGLQKTKTKQSNRAKCLAKRKIAQMTEEEQFALALKMSEQEAREVNSXXXEEEELLRKAIA

SEQ ID NO: 7986 - protein, 78 aa, Homo sapiens
  MISC_FEATURE (9): Xaa equals any of the naturally occurring L-amino acids
  MISC_FEATURE (13): Xaa equals any of the naturally occurring L-amino acids
  MISC_FEATURE (22): Xaa equals any of the naturally occurring L-amino acids
  MISC_FEATURE (29): Xaa equals any of the naturally occurring L-amino acids
  MISC_FEATURE (45): Xaa equals any of the naturally occurring L-amino acids
  MISC_FEATURE (63): Xaa equals any of the naturally occurring L-amino acids
  MISC_FEATURE (66): Xaa equals any of the naturally occurring L-amino acids
  MISC_FEATURE (67): Xaa equals any of the naturally occurring L-amino acids
  MISC_FEATURE (68): Xaa equals any of the naturally occurring L-amino acids
  MISC_FEATURE (73): Xaa equals any of the naturally occurring L-amino acids
GTKVGTSPXVLAXLELVDPPGXRNSARDXEQLHDCLQVATAWMQXAGEDRRLGGSPHRGQGAXGQXXXPRTWXPYFPV

SEQ ID NO: 7987 - protein, 63 aa, Homo sapiens
  MISC_FEATURE (3): Xaa equals any of the naturally occurring L-amino acids
  MISC_FEATURE (5): Xaa equals any of the naturally occurring L-amino acids
  MISC_FEATURE (17): Xaa equals any of the naturally occurring L-amino acids
  MISC_FEATURE (22): Xaa equals any of the naturally occurring L-amino acids
  MISC_FEATURE (35): Xaa equals any of the naturally occurring L-amino acids
  MISC_FEATURE (36): Xaa equals any of the naturally occurring L-amino acids
  MISC_FEATURE (55): Xaa equals any of the naturally occurring L-amino acids
  MISC_FEATURE (62): Xaa equals any of the naturally occurring L-amino acids
  MISC_FEATURE (63): Xaa equals any of the naturally occurring L-amino acids
IRXPXSSVQVGGWLVVXSEAEXAGTRGSGPRELSXXSPPYLLPVTVRIMALLTLXTWASSTXX

SEQ ID NO: 7988 - protein, 48 aa, Homo sapiens
  MISC_FEATURE (1): Xaa equals any of the naturally occurring L-amino acids
  MISC_FEATURE (17): Xaa equals any of the naturally occurring L-amino acids
  MISC_FEATURE (20): Xaa equals any of the naturally occurring L-amino acids
  MISC_FEATURE (27): Xaa equals any of the naturally occurring L-amino acids
XCRIWIGLIPNSACLLXNLXMVKHLHXMHKMYGYNNVYMDMIYFISLL

SEQ ID NO: 7989 - protein, 63 aa, Homo sapiens
LAALRSSLLRVYFNLAFKAVVTAPPKVLKAIFGAYCTVVLLLQIFSYGRMVFSSCKSLELILR

SEQ ID NO: 7990 - protein, 78 aa, Homo sapiens
  MISC_FEATURE (15): Xaa equals any of the naturally occurring L-amino acids
  MISC_FEATURE (19): Xaa equals any of the naturally occurring L-amino acids
  MISC_FEATURE (20): Xaa equals any of the naturally occurring L-amino acids
  MISC_FEATURE (28): Xaa equals any of the naturally occurring L-amino acids
  MISC_FEATURE (30): Xaa equals any of the naturally occurring L-amino acids
  MISC_FEATURE (41): Xaa equals any of the naturally occurring L-amino acids
  MISC_FEATURE (45): Xaa equals any of the naturally occurring L-amino acids
  MISC_FEATURE (60): Xaa equals any of the naturally occurring L-amino acids
  MISC_FEATURE (69): Xaa equals any of the naturally occurring L-amino acids
  MISC_FEATURE (71): Xaa equals any of the naturally occurring L-amino acids
  MISC_FEATURE (77): Xaa equals any of the naturally occurring L-amino acids
MTFPSNSEVIFLKEXLVNXXAGFFHTNXPXPGKKKPKPPLXKKPXLFLGEKIPPKGGKKXPFNQNWAPXGXGGGGNXL

SEQ ID NO: 7991 - protein, 50 aa, Homo sapiens
  MISC_FEATURE (17): Xaa equals any of the naturally occurring L-amino acids
  MISC_FEATURE (24): Xaa equals any of the naturally occurring L-amino acids
  MISC_FEATURE (29): Xaa equals any of the naturally occurring L-amino acids
  MISC_FEATURE (31): Xaa equals any of the naturally occurring L-amino acids
  MISC_FEATURE (35): Xaa equals any of the naturally occurring L-amino acids
  MISC_FEATURE (46): Xaa equals any of the naturally occurring L-amino acids
PKNVSYNVSLKNKQKRXLPKTKIXQMIFXGXLGFXFSVLIGSTALXTGIL

SEQ ID NO: 7992 - protein, 62 aa, Homo sapiens
  MISC_FEATURE (9): Xaa equals any of the naturally occurring L-amino acids
  MISC_FEATURE (16): Xaa equals any of the naturally occurring L-amino acids
  MISC_FEATURE (27): Xaa equals any of the naturally occurring L-amino acids
  MISC_FEATURE (28): Xaa equals any of the naturally occurring L-amino acids
  MISC_FEATURE (29): Xaa equals any of the naturally occurring L-amino acids
  MISC_FEATURE (35): Xaa equals any of the naturally occurring L-amino acids
  MISC_FEATURE (44): Xaa equals any of the naturally occurring L-amino acids
  MISC_FEATURE (53): Xaa equals any of the naturally occurring L-amino acids
  MISC_FEATURE (57): Xaa equals any of the naturally occurring L-amino acids
ISLINLLEXIGLKKKXVNGKNLKKYFXXXQLFYYXEYPTGFFKXVAPPFFPLXPLGXVKKFP

SEQ ID NO: 7993 - protein, 103 aa, Homo sapiens
  MISC_FEATURE (13): Xaa equals any of the naturally occurring L-amino acids
  MISC_FEATURE (24): Xaa equals any of the naturally occurring L-amino acids
  MISC_FEATURE (42): Xaa equals any of the naturally occurring L-amino acids
  MISC_FEATURE (57): Xaa equals any of the naturally occurring L-amino acids
  MISC_FEATURE (61): Xaa equals any of the naturally occurring L-amino acids
  MISC_FEATURE (66): Xaa equals any of the naturally occurring L-amino acids
  MISC_FEATURE (67): Xaa equals any of the naturally occurring L-amino acids
GNDLPIPLPCYSXTPCVSLASGGXMFEEKELCQESGDRVYGXGFLLGMLFVAFWASXMETXTLEPXXWNSPPNPPIFLKIYFPLLFLAFKTCYSFFGKILTNF

SEQ ID NO: 7994 - protein, 65 aa, Homo sapiens
  MISC_FEATURE (42): Xaa equals any of the naturally occurring L-amino acids
RTAVKPRILARPAISKAVSRNWTRYQMMGKQTHRPKNIEERXVDINRKAKGAMQHLLPSSWVFPP

SEQ ID NO: 7995 - protein, 39 aa, Homo sapiens
VFFLVYKNQCLYKCCSGFQYNRWLGFLEQRVFGFLFFLG

SEQ ID NO: 7996 - protein, 56 aa, Homo sapiens
  MISC_FEATURE (40): Xaa equals any of the naturally occurring L-amino acids
  MISC_FEATURE (48): Xaa equals any of the naturally occurring L-amino acids
  MISC_FEATURE (49): Xaa equals any of the naturally occurring L-amino acids
  MISC_FEATURE (54): Xaa equals any of the naturally occurring L-amino acids
ENHFSKCLKNYFLDLFFFSFPNKLWLHTKTVTEPYESRTXLPRKTNYXXFSPEXKL

SEQ ID NO: 7997 - protein, 145 aa, Homo sapiens
  MISC_FEATURE (2): Xaa equals any of the naturally occurring L-amino acids
  MISC_FEATURE (13): Xaa equals any of the naturally occurring L-amino acids
  MISC_FEATURE (20): Xaa equals any of the naturally occurring L-amino acids
  MISC_FEATURE (32): Xaa equals any of the naturally occurring L-amino acids
  MISC_FEATURE (40): Xaa equals any of the naturally occurring L-amino acids
  MISC_FEATURE (44): Xaa equals any of the naturally occurring L-amino acids
  MISC_FEATURE (52): Xaa equals any of the naturally occurring L-amino acids
  MISC_FEATURE (60): Xaa equals any of the naturally occurring L-amino acids
  MISC_FEATURE (85): Xaa equals any of the naturally occurring L-amino acids
  MISC_FEATURE (94): Xaa equals any of the naturally occurring L-amino acids
  MISC_FEATURE (97): Xaa equals any of the naturally occurring L-amino acids
  MISC_FEATURE (100): Xaa equals any of the naturally occurring L-amino acids
  MISC_FEATURE (111): Xaa equals any of the naturally occurring L-amino acids
  MISC_FEATURE (123): Xaa equals any of the naturally occurring L-amino acids
  MISC_FEATURE (133): Xaa equals any of the naturally occurring L-amino acids
RXTTFEKSLLMGXEFQRRAXAMMLRAAVLRNXIHVKSPPXKRTXGNLLHQHXSRMNTNMXRVNLASKTSAPPPHLHGTRNSRRSXLPAATKGPXHGXPPXLFSSLGLKKQXFYFCLPGKKSSXSTFCFFPGTXVAPAMDIPNLFP

SEQ ID NO: 7998 - protein, 37 aa, Homo sapiens
LKSIFFIKLILIVFEIIIQFTYGRGISILMTSKNVTN

SEQ ID NO: 7999 - protein, 33 aa, Homo sapiens
QDYWKFVIMNETFCHIRFIFTSYTFDKVRHGCG

SEQ ID NO: 8000 - protein, 52 aa, Homo sapiens
  MISC_FEATURE (29): Xaa equals any of the naturally occurring L-amino acids
AGAAAVLPITRGEARPGEVQALAEVTAAXLEPRTLSAPKHSVPYLQHLSPIV

SEQ ID NO: 8001 - protein, 74 aa, Homo sapiens
  MISC_FEATURE (43): Xaa equals any of the naturally occurring L-amino acids
  MISC_FEATURE (52): Xaa equals any of the naturally occurring L-amino acids
  MISC_FEATURE (63): Xaa equals any of the naturally occurring L-amino acids
  MISC_FEATURE (70): Xaa equals any of the naturally occurring L-amino acids
QGESTGDMSLIRYRVCLQGVHSLMRNRNFSLVPKTLKYKVLQXVPCIMFPSXITRNSMEKKCXMLTIDLXIESP

SEQ ID NO: 8002 - protein, 28 aa, Homo sapiens
  MISC_FEATURE (14): Xaa equals any of the naturally occurring L-amino acids
  MISC_FEATURE (19): Xaa equals any of the naturally occurring L-amino acids
PMGSPAPGGTCCNXNKCGXMRDDHVYPP

SEQ ID NO: 8003 - protein, 28 aa, Homo sapiens
  MISC_FEATURE (5): Xaa equals any of the naturally occurring L-amino acids
  MISC_FEATURE (26): Xaa equals any of the naturally occurring L-amino acids
FETSXFPSKKMKKFLDGPIPPPPPQXAL

SEQ ID NO: 8004 - protein, 37 aa, Homo sapiens
  MISC_FEATURE (11): Xaa equals any of the naturally occurring L-amino acids
  MISC_FEATURE (21): Xaa equals any of the naturally occurring L-amino acids
  MISC_FEATURE (24): Xaa equals any of the naturally occurring L-amino acids
NPNASRNRSGXPGSTHASDFXVFXMPISTGGFLKIVK

SEQ ID NO: 8005 - protein, 51 aa, Homo sapiens
  MISC_FEATURE (47): Xaa equals any of the naturally occurring L-amino acids
  MISC_FEATURE (48): Xaa equals any of the naturally occurring L-amino acids
  MISC_FEATURE (49): Xaa equals any of the naturally occurring L-amino acids
  MISC_FEATURE (51): Xaa equals any of the naturally occurring L-amino acids
AQIQPAPAAPGTEELTEAPVQGLLLPLLFPSVCPGPGARHGGGGEAXXXGX

SEQ ID NO: 8006 - protein, 82 aa, Homo sapiens
  MISC_FEATURE (2): Xaa equals any of the naturally occurring L-amino acids
  MISC_FEATURE (8): Xaa equals any of the naturally occurring L-amino acids
  MISC_FEATURE (13): Xaa equals any of the naturally occurring L-amino acids
  MISC_FEATURE (15): Xaa equals any of the naturally occurring L-amino acids
LXLTKLNXIRGEXAXVTALGQGYPGPGEISRGSGPTRPPTRPGEEHFAYVLKVCIGVRGALYMGTSHKTGDYFLIILNFHPE

SEQ ID NO: 8007 - protein, 35 aa, Homo sapiens
  MISC_FEATURE (9): Xaa equals any of the naturally occurring L-amino acids
  MISC_FEATURE (15): Xaa equals any of the naturally occurring L-amino acids
  MISC_FEATURE (21): Xaa equals any of the naturally occurring L-amino acids
  MISC_FEATURE (25): Xaa equals any of the naturally occurring L-amino acids
PNAGEPIRXPGHPRXHKLHVXEISXGALIKFSDPN

SEQ ID NO: 8008 - protein, 66 aa, Homo sapiens
  MISC_FEATURE (1): Xaa equals any of the naturally occurring L-amino acids
  MISC_FEATURE (29): Xaa equals any of the naturally occurring L-amino acids
  MISC_FEATURE (45): Xaa equals any of the naturally occurring L-amino acids
  MISC_FEATURE (61): Xaa equals any of the naturally occurring L-amino acids
  MISC_FEATURE (62): Xaa equals any of the naturally occurring L-amino acids
  MISC_FEATURE (63): Xaa equals any of the naturally occurring L-amino acids
  MISC_FEATURE (64): Xaa equals any of the naturally occurring L-amino acids
XNCLITWCVLRNLTSTPVNSLQLNSKNSXARKFSTFSAHETFAPXESYDYLKTSGLAMFIXXXXRL

SEQ ID NO: 8009 - protein, 45 aa, Homo sapiens
  MISC_FEATURE (2): Xaa equals any of the naturally occurring L-amino acids
  MISC_FEATURE (23): Xaa equals any of the naturally occurring L-amino acids
  MISC_FEATURE (29): Xaa equals any of the naturally occurring L-amino acids
  MISC_FEATURE (36): Xaa equals any of the naturally occurring L-amino acids
  MISC_FEATURE (39): Xaa equals any of the naturally occurring L-amino acids
  MISC_FEATURE (45): Xaa equals any of the naturally occurring L-amino acids
FXFTELHLIRGKKGWVYRPLARXYPGSRXISRGSEXHVXLGKKKX

SEQ ID NO: 8010 - protein, 83 aa, Homo sapiens
GGDLGESVRKTEKGRTGPPLPPIPGPGPHSLLCHNQLRYPRSDYPHSLFEQLFIEQLEYVSLCQLLARSRKYQMSEIIGHYPW

SEQ ID NO: 8011 - protein, 33 aa, Homo sapiens
  MISC_FEATURE (1): Xaa equals any of the naturally occurring L-amino acids
  MISC_FEATURE (8): Xaa equals any of the naturally occurring L-amino acids
  MISC_FEATURE (9): Xaa equals any of the naturally occurring L-amino acids
  MISC_FEATURE (17): Xaa equals any of the naturally occurring L-amino acids
  MISC_FEATURE (24): Xaa equals any of the naturally occurring L-amino acids
  MISC_FEATURE (32): Xaa equals any of the naturally occurring L-amino acids
XRRGGKKXXGRSQVPPXRKRGRGXPGSTHASXS

SEQ ID NO: 8012 - protein, 131 aa, Homo sapiens
  MISC_FEATURE (128): Xaa equals any of the naturally occurring L-amino acids
VPSGGRPTHTSADSPARQKRPPAGPASRSRGCLQGGQAQHPGVLRLLFISHHRQARRVAPKRTPGRASPSPHGDPPPAKGGAPGPRQWSDHQVRGISQGLEPDSWSSGSGPPHAGCKSTQETWKASLXPNL

SEQ ID NO: 8013 - protein, 48 aa, Homo sapiens
  MISC_FEATURE (2): Xaa equals any of the naturally occurring L-amino acids
QXAICFIGIVFIGKDEFIPESIEYLLGYLILLILGTEPFAAHCTSGNS

SEQ ID NO: 8014 - protein, 43 aa, Homo sapiens
  MISC_FEATURE (2): Xaa equals any of the naturally occurring L-amino acids
  MISC_FEATURE (3): Xaa equals any of the naturally occurring L-amino acids
  MISC_FEATURE (8): Xaa equals any of the naturally occurring L-amino acids
  MISC_FEATURE (15): Xaa equals any of the naturally occurring L-amino acids
  MISC_FEATURE (17): Xaa equals any of the naturally occurring L-amino acids
  MISC_FEATURE (18): Xaa equals any of the naturally occurring L-amino acids
  MISC_FEATURE (21): Xaa equals any of the naturally occurring L-amino acids
  MISC_FEATURE (26): Xaa equals any of the naturally occurring L-amino acids
  MISC_FEATURE (32): Xaa equals any of the naturally occurring L-amino acids
  MISC_FEATURE (40): Xaa equals any of the naturally occurring L-amino acids
LXXFLLAXLHWLVPXRXXIEXGIMDXLDLFPXSWGKLLIXIIK

SEQ ID NO: 8015 - protein, 23 aa, Homo sapiens
  MISC_FEATURE (7): Xaa equals any of the naturally occurring L-amino acids
  MISC_FEATURE (10): Xaa equals any of the naturally occurring L-amino acids
  MISC_FEATURE (14): Xaa equals any of the naturally occurring L-amino acids
ALGTIQXAIXWSNXMRIKGNACT

SEQ ID NO: 8016 - protein, 37 aa, Homo sapiens
WIYQRSQIHFFQNLKTKGHHECTQKLGQVYYIWDFHL

SEQ ID NO: 8017 - protein, 20 aa, Homo sapiens
  MISC_FEATURE (6): Xaa equals any of the naturally occurring L-amino acids
  MISC_FEATURE (7): Xaa equals any of the naturally occurring L-amino acids
  MISC_FEATURE (15): Xaa equals any of the naturally occurring L-amino acids
  MISC_FEATURE (16): Xaa equals any of the naturally occurring L-amino acids
  MISC_FEATURE (20): Xaa equals any of the naturally occurring L-amino acids
KTVECXXTILPRFLXXHLKX

SEQ ID NO: 8018 - protein, 17 aa, Homo sapiens
  MISC_FEATURE (3): Xaa equals any of the naturally occurring L-amino acids
  MISC_FEATURE (7): Xaa equals any of the naturally occurring L-amino acids
  MISC_FEATURE (10): Xaa equals any of the naturally occurring L-amino acids
  MISC_FEATURE (17): Xaa equals any of the naturally occurring L-amino acids
DTXSKHXKTXNTTVNKX

SEQ ID NO: 8019 - protein, 47 aa, Homo sapiens
GLFWPFPRECLPLYLPGPIDKDVLPCRRLASITACPLLCPLQPPLTL

SEQ ID NO: 8020 - protein, 82 aa, Homo sapiens
GEISSLNGDLKTLGLHYVHNGSASFIMQKSLPLLKIPVAAACRGLVASCLLGTEQELHSPAWSKLWPRDRGPKSQPPSYTGA

SEQ ID NO: 8021 - protein, 40 aa, Homo sapiens
SLAFPSLSHRTYPSPRKCPSLASACPSESAFFALNISTLY

SEQ ID NO: 8022 - protein, 33 aa, Homo sapiens
  MISC_FEATURE (8): Xaa equals any of the naturally occurring L-amino acids
  MISC_FEATURE (9): Xaa equals any of the naturally occurring L-amino acids
  MISC_FEATURE (13): Xaa equals any of the naturally occurring L-amino acids
  MISC_FEATURE (15): Xaa equals any of the naturally occurring L-amino acids
  MISC_FEATURE (21): Xaa equals any of the naturally occurring L-amino acids
  MISC_FEATURE (23): Xaa equals any of the naturally occurring L-amino acids
  MISC_FEATURE (30): Xaa equals any of the naturally occurring L-amino acids
KRGRSSRXXYTDXYXGNDWSXLXVLGPLIXGST

SEQ ID NO: 8023 - protein, 92 aa, Homo sapiens
  MISC_FEATURE (81): Xaa equals any of the naturally occurring L-amino acids
  MISC_FEATURE (90): Xaa equals any of the naturally occurring L-amino acids
  MISC_FEATURE (91): Xaa equals any of the naturally occurring L-amino acids
  MISC_FEATURE (92): Xaa equals any of the naturally occurring L-amino acids
RVSPGPWPGWGWGHRSAQSRRRPGFLGSVLSSQFLALCTLKPSLVVELARDLLEFLGSVNGLCSRASLVTSVVWAIGESCXDLRSGGAPXXX

SEQ ID NO: 8024 - protein, 60 aa, Homo sapiens
GSSYPGRSRARCPLQTSAVYGCEYVAVLGSCEFVILDVLHCPRGPKKDGKRSPSALVLNM

SEQ ID NO: 8025 - protein, 63 aa, Homo sapiens
KASCFPIPLHEGNDYNISYVYFQINFTYLIAYVLKIFSTNRIIILILLSFSYCILLFLLHDFS

SEQ ID NO: 8026 - protein, 16 aa, Homo sapiens
  MISC_FEATURE (5): Xaa equals any of the naturally occurring L-amino acids
  MISC_FEATURE (13): Xaa equals any of the naturally occurring L-amino acids
AHASXHASEKKKXGNF

SEQ ID NO: 8027 - protein, 37 aa, Homo sapiens
  MISC_FEATURE (2): Xaa equals any of the naturally occurring L-amino acids
  MISC_FEATURE (23): Xaa equals any of the naturally occurring L-amino acids
  MISC_FEATURE (25): Xaa equals any of the naturally occurring L-amino acids
  MISC_FEATURE (31): Xaa equals any of the naturally occurring L-amino acids
  MISC_FEATURE (35): Xaa equals any of the naturally occurring L-amino acids
QXRKRTPEDRPENPGRPTRPFSXNXSTFNWXQRKXKE

SEQ ID NO: 8028 - protein, 34 aa, Homo sapiens
EKNDIISTYYIVGSLYTKVIVMRKNGLGILFKIN

SEQ ID NO: 8029 - protein, 67 aa, Homo sapiens
  MISC_FEATURE (17): Xaa equals any of the naturally occurring L-amino acids
  MISC_FEATURE (30): Xaa equals any of the naturally occurring L-amino acids
  MISC_FEATURE (46): Xaa equals any of the naturally occurring L-amino acids
  MISC_FEATURE (50): Xaa equals any of the naturally occurring L-amino acids
  MISC_FEATURE (60): Xaa equals any of the naturally occurring L-amino acids
  MISC_FEATURE (65): Xaa equals any of the naturally occurring L-amino acids
  MISC_FEATURE (67): Xaa equals any of the naturally occurring L-amino acids
FRFCLCGHFKTCVTYIXTFILLYFVSPPTXNFFCFLKNDSLTPQQXKVIXYTYISIFVIXKSNPXSX

SEQ ID NO: 8030 - protein, 63 aa, Homo sapiens
  MISC_FEATURE (4): Xaa equals any of the naturally occurring L-amino acids
  MISC_FEATURE (9): Xaa equals any of the naturally occurring L-amino acids
  MISC_FEATURE (11): Xaa equals any of the naturally occurring L-amino acids
  MISC_FEATURE (13): Xaa equals any of the naturally occurring L-amino acids
  MISC_FEATURE (27): Xaa equals any of the naturally occurring L-amino acids
  MISC_FEATURE (31): Xaa equals any of the naturally occurring L-amino acids
  MISC_FEATURE (40): Xaa equals any of the naturally occurring L-amino acids
  MISC_FEATURE (44): Xaa equals any of the naturally occurring L-amino acids
  MISC_FEATURE (56): Xaa equals any of the naturally occurring L-amino acids
  MISC_FEATURE (61): Xaa equals any of the naturally occurring L-amino acids
VENXTIGFXWXAXRYRSGIPGSTHAFXHAFXEHLLVQADXPNTXGKGGNERPGVQXSILNXLC

SEQ ID NO: 8031 - protein, 16 aa, Homo sapiens
  MISC_FEATURE (10): Xaa equals any of the naturally occurring L-amino acids
  MISC_FEATURE (11): Xaa equals any of the naturally occurring L-amino acids
  MISC_FEATURE (13): Xaa equals any of the naturally occurring L-amino acids
AAMLPEASFXXPXRAT

SEQ ID NO: 8032 - protein, 21 aa, Homo sapiens
  MISC_FEATURE (5): Xaa equals any of the naturally occurring L-amino acids
FGMPXGTSAGTGPEFPGRPTR

SEQ ID NO: 8033 - protein, 60 aa, Homo sapiens
  MISC_FEATURE (13): Xaa equals any of the naturally occurring L-amino acids
  MISC_FEATURE (29): Xaa equals any of the naturally occurring L-amino acids
  MISC_FEATURE (31): Xaa equals any of the naturally occurring L-amino acids
  MISC_FEATURE (43): Xaa equals any of the naturally occurring L-amino acids
  MISC_FEATURE (55): Xaa equals any of the naturally occurring L-amino acids
AFNESRSIEENKXFQLMDFHMEVGETNNXIXPHTTYKSNWRCXIHQNLKVKDIKXFKDTL

SEQ ID NO: 8034 - protein, 51 aa, Homo sapiens
  MISC_FEATURE (1): Xaa equals any of the naturally occurring L-amino acids
  MISC_FEATURE (13): Xaa equals any of the naturally occurring L-amino acids
  MISC_FEATURE (35): Xaa equals any of the naturally occurring L-amino acids
  MISC_FEATURE (43): Xaa equals any of the naturally occurring L-amino acids
XRQALIRLTIWKXGTPAGTGPEFPGRPTRPLPLSXNIDKLPGXKENIGLIV

SEQ ID NO: 8035 - protein, 22 aa, Homo sapiens
  MISC_FEATURE (18): Xaa equals any of the naturally occurring L-amino acids
  MISC_FEATURE (20): Xaa equals any of the naturally occurring L-amino acids
  MISC_FEATURE (22): Xaa equals any of the naturally occurring L-amino acids
EKIRVFKAGPRGRSRGKXWXAX

SEQ ID NO: 8036 - protein, 115 aa, Homo sapiens
  MISC_FEATURE (106): Xaa equals any of the naturally occurring L-amino acids
GVGGRDPVPDTGEEIPSLVFMLPVRHCLLDIIIPTLCSFVSQIQYIVKASWSFFNISHLCHSLHSHKPQQLLKVLLDPLLPVFEIFLAYDCLITFLKSSSLAYSRXHRGLLWCIR

SEQ ID NO: 8037 - protein, 34 aa, Homo sapiens
  MISC_FEATURE (10): Xaa equals any of the naturally occurring L-amino acids
  MISC_FEATURE (12): Xaa equals any of the naturally occurring L-amino acids
  MISC_FEATURE (23): Xaa equals any of the naturally occurring L-amino acids
  MISC_FEATURE (29): Xaa equals any of the naturally occurring L-amino acids
GPPGKHLGKXPXGPSRDRTGRPXPTHVFXPFKTK

SEQ ID NO: 8038 - protein, 34 aa, Homo sapiens
  MISC_FEATURE (5): Xaa equals any of the naturally occurring L-amino acids
ATKNXSGTSKARHKVQIPARRHQTEANSCASKPT

SEQ ID NO: 8039 - protein, 37 aa, Homo sapiens
  MISC_FEATURE (1): Xaa equals any of the naturally occurring L-amino acids
  MISC_FEATURE (8): Xaa equals any of the naturally occurring L-amino acids
  MISC_FEATURE (21): Xaa equals any of the naturally occurring L-amino acids
  MISC_FEATURE (28): Xaa equals any of the naturally occurring L-amino acids
  MISC_FEATURE (35): Xaa equals any of the naturally occurring L-amino acids
XFPVRFTXPTRGSPRESWVRXGKATPEXEAGSPRXPD

SEQ ID NO: 8040 - protein, 36 aa, Homo sapiens
  MISC_FEATURE (12): Xaa equals any of the naturally occurring L-amino acids
  MISC_FEATURE (15): Xaa equals any of the naturally occurring L-amino acids
  MISC_FEATURE (29): Xaa equals any of the naturally occurring L-amino acids
DRYTCQRPSARXFRXLPFLSRHVRRLSPXALNRGLP

SEQ ID NO: 8041 - protein, 32 aa, Homo sapiens
  MISC_FEATURE (5): Xaa equals any of the naturally occurring L-amino acids
  MISC_FEATURE (14): Xaa equals any of the naturally occurring L-amino acids
  MISC_FEATURE (19): Xaa equals any of the naturally occurring L-amino acids
YIFNXNTAPLHTLXNVGDXISELGKNLKKHIR

SEQ ID NO: 8042 - protein, 40 aa, Homo sapiens
  MISC_FEATURE (2): Xaa equals any of the naturally occurring L-amino acids
  MISC_FEATURE (3): Xaa equals any of the naturally occurring L-amino acids
  MISC_FEATURE (7): Xaa equals any of the naturally occurring L-amino acids
  MISC_FEATURE (18): Xaa equals any of the naturally occurring L-amino acids
  MISC_FEATURE (28): Xaa equals any of the naturally occurring L-amino acids
  MISC_FEATURE (37): Xaa equals any of the naturally occurring L-amino acids
  MISC_FEATURE (39): Xaa equals any of the naturally occurring L-amino acids
  MISC_FEATURE (40): Xaa equals any of the naturally occurring L-amino acids
PXXATVXPGPVRRRSRSXERRSAPAGAXGPSASVLTXPXX

SEQ ID NO: 8043 - protein, 69 aa, Homo sapiens
GAYLANSTLNLSAWKLLMQCPRWRKVRVDPEEPREDVQHGDLGSSQGPYFSDFWSENTSSGKSPLTHPG

SEQ ID NO: 8044 - protein, 67 aa, Homo sapiens
  MISC_FEATURE (1): Xaa equals any of the naturally occurring L-amino acids
  MISC_FEATURE (2): Xaa equals any of the naturally occurring L-amino acids
  MISC_FEATURE (3): Xaa equals any of the naturally occurring L-amino acids
  MISC_FEATURE (42): Xaa equals any of the naturally occurring L-amino acids
  MISC_FEATURE (60): Xaa equals any of the naturally occurring L-amino acids
XXXKSIMKQQKSTPLLGLDNEHGISPKLVAWNGSIFACVILXSYSQKEIFRNSVFHLAGXAVILLCN

SEQ ID NO: 8045 - protein, 31 aa, Homo sapiens
  MISC_FEATURE (7): Xaa equals any of the naturally occurring L-amino acids
  MISC_FEATURE (14): Xaa equals any of the naturally occurring L-amino acids
  MISC_FEATURE (17): Xaa equals any of the naturally occurring L-amino acids
  MISC_FEATURE (21): Xaa equals any of the naturally occurring L-amino acids
PSQPKTXNVEPEDXRSXHVHXMEICAYLYIK

SEQ ID NO: 8046 - protein, 69 aa, Homo sapiens
  MISC_FEATURE (53): Xaa equals any of the naturally occurring L-amino acids
LYLFQLLIFCCCLIFLACLLVELYIRSHSKKANSKTPKEYYRLNYRRQIPSLXWENGLEGRNVARVPQK

SEQ ID NO: 8047 - protein, 33 aa, Homo sapiens
  MISC_FEATURE (5): Xaa equals any of the naturally occurring L-amino acids
  MISC_FEATURE (7): Xaa equals any of the naturally occurring L-amino acids
  MISC_FEATURE (8): Xaa equals any of the naturally occurring L-amino acids
  MISC_FEATURE (16): Xaa equals any of the naturally occurring L-amino acids
  MISC_FEATURE (19): Xaa equals any of the naturally occurring L-amino acids
  MISC_FEATURE (23): Xaa equals any of the naturally occurring L-amino acids
  MISC_FEATURE (28): Xaa equals any of the naturally occurring L-amino acids
  MISC_FEATURE (30): Xaa equals any of the naturally occurring L-amino acids
GRHVXDXXGPRPRRDXNSXFRPXALYPXGXKPQ

SEQ ID NO: 8048 - protein, 47 aa, Homo sapiens
  MISC_FEATURE (12): Xaa equals any of the naturally occurring L-amino acids
  MISC_FEATURE (21): Xaa equals any of the naturally occurring L-amino acids
  MISC_FEATURE (25): Xaa equals any of the naturally occurring L-amino acids
  MISC_FEATURE (29): Xaa equals any of the naturally occurring L-amino acids
  MISC_FEATURE (45): Xaa equals any of the naturally occurring L-amino acids
QNINAYNLGGTXRGKGAPNPXFGDXSKYXQKCIPLMETITLINAXIY

SEQ ID NO: 8049 - protein, 91 aa, Homo sapiens
  MISC_FEATURE (1): Xaa equals any of the naturally occurring L-amino acids
  MISC_FEATURE (17): Xaa equals any of the naturally occurring L-amino acids
  MISC_FEATURE (27): Xaa equals any of the naturally occurring L-amino acids
  MISC_FEATURE (30): Xaa equals any of the naturally occurring L-amino acids
  MISC_FEATURE (38): Xaa equals any of the naturally occurring L-amino acids
  MISC_FEATURE (40): Xaa equals any of the naturally occurring L-amino acids
  MISC_FEATURE (42): Xaa equals any of the naturally occurring L-amino acids
  MISC_FEATURE (43): Xaa equals any of the naturally occurring L-amino acids
  MISC_FEATURE (45): Xaa equals any of the naturally occurring L-amino acids
  MISC_FEATURE (54): Xaa equals any of the naturally occurring L-amino acids
  MISC_FEATURE (74): Xaa equals any of the naturally occurring L-amino acids
  MISC_FEATURE (81): Xaa equals any of the naturally occurring L-amino acids
  MISC_FEATURE (84): Xaa equals any of the naturally occurring L-amino acids
XCRTGRNSRVDPCVRAXLNKTNKNVKXEQXTESHKADXTXAXXTXTLGSGYKGXKDYVDPWGLCKYLPHKSCCXKTGGLGXNLXIKEFATH

SEQ ID NO: 8050 - protein, 61 aa, Homo sapiens
  MISC_FEATURE (5): Xaa equals any of the naturally occurring L-amino acids
  MISC_FEATURE (28): Xaa equals any of the naturally occurring L-amino acids
  MISC_FEATURE (36): Xaa equals any of the naturally occurring L-amino acids
  MISC_FEATURE (51): Xaa equals any of the naturally occurring L-amino acids
  MISC_FEATURE (58): Xaa equals any of the naturally occurring L-amino acids
EKIGXSRHRKPYSTVVLSKKALLICGCXLQKQLQVXSWFTCPFRSINLIGXAEAGAIXIQV

SEQ ID NO: 8051 - protein, 64 aa, Homo sapiens
  MISC_FEATURE (6): Xaa equals any of the naturally occurring L-amino acids
  MISC_FEATURE (43): Xaa equals any of the naturally occurring L-amino acids
  MISC_FEATURE (49): Xaa equals any of the naturally occurring L-amino acids
  MISC_FEATURE (57): Xaa equals any of the naturally occurring L-amino acids
LLIKNXLCLREIYAFLKSTSEHVPRSSHRFCLVGTGKFSRKYXLCVMTXQYCQSAMXYFAFFYP

SEQ ID NO: 8052 - protein, 40 aa, Homo sapiens
  MISC_FEATURE (1): Xaa equals any of the naturally occurring L-amino acids
  MISC_FEATURE (2): Xaa equals any of the naturally occurring L-amino acids
  MISC_FEATURE (9): Xaa equals any of the naturally occurring L-amino acids
  MISC_FEATURE (19): Xaa equals any of the naturally occurring L-amino acids
  MISC_FEATURE (38): Xaa equals any of the naturally occurring L-amino acids
  MISC_FEATURE (40): Xaa equals any of the naturally occurring L-amino acids
XXSQSEDAXTAEETEAERXAPRLALPAPAAASGGPPKXRX

SEQ ID NO: 8053 - protein, 69 aa, Homo sapiens
  MISC_FEATURE (6): Xaa equals any of the naturally occurring L-amino acids
  MISC_FEATURE (7): Xaa equals any of the naturally occurring L-amino acids
  MISC_FEATURE (24): Xaa equals any of the naturally occurring L-amino acids
  MISC_FEATURE (25): Xaa equals any of the naturally occurring L-amino acids
  MISC_FEATURE (31): Xaa equals any of the naturally occurring L-amino acids
  MISC_FEATURE (34): Xaa equals any of the naturally occurring L-amino acids
  MISC_FEATURE (48): Xaa equals any of the naturally occurring L-amino acids
  MISC_FEATURE (61): Xaa equals any of the naturally occurring L-amino acids
  MISC_FEATURE (68): Xaa equals any of the naturally occurring L-amino acids
LYWITXXTETQTHYDDNLTLLEEXXDNLHAXHNXISGTWHMHSSMEHXLALPLSFKAQGTXTITVKPXP

SEQ ID NO: 8054 - protein, 48 aa, Homo sapiens
  MISC_FEATURE (2): Xaa equals any of the naturally occurring L-amino acids
  MISC_FEATURE (5): Xaa equals any of the naturally occurring L-amino acids
  MISC_FEATURE (8): Xaa equals any of the naturally occurring L-amino acids
  MISC_FEATURE (13): Xaa equals any of the naturally occurring L-amino acids
  MISC_FEATURE (34): Xaa equals any of the naturally occurring L-amino acids
  MISC_FEATURE (36): Xaa equals any of the naturally occurring L-amino acids
  MISC_FEATURE (37): Xaa equals any of the naturally occurring L-amino acids
  MISC_FEATURE (44): Xaa equals any of the naturally occurring L-amino acids
NXPGXLIXVEKRXWGTPLAGVTPGSPGIFPGGSXPXXGPAFISXMIGK

SEQ ID NO: 8055 - protein, 35 aa, Homo sapiens
  MISC_FEATURE (2): Xaa equals any of the naturally occurring L-amino acids
  MISC_FEATURE (6): Xaa equals any of the naturally occurring L-amino acids
  MISC_FEATURE (33): Xaa equals any of the naturally occurring L-amino acids
KXATAXRSLNGEWLLCLVSGIFKPGAERGAGGXDF

SEQ ID NO: 8056 - protein, 52 aa, Homo sapiens
  MISC_FEATURE (1): Xaa equals any of the naturally occurring L-amino acids
  MISC_FEATURE (3): Xaa equals any of the naturally occurring L-amino acids
  MISC_FEATURE (36): Xaa equals any of the naturally occurring L-amino acids
  MISC_FEATURE (44): Xaa equals any of the naturally occurring L-amino acids
  MISC_FEATURE (46): Xaa equals any of the naturally occurring L-amino acids
  MISC_FEATURE (49): Xaa equals any of the naturally occurring L-amino acids
XSXKGPGPGPKGPPGPGGPKGGAPKGGFLRGKAQRXLSKPPNWXGXNWXRGK

SEQ ID NO: 8057 - protein, 56 aa, Homo sapiens
  MISC_FEATURE (44): Xaa equals any of the naturally occurring L-amino acids
  MISC_FEATURE (56): Xaa equals any of the naturally occurring L-amino acids
PKLVLLEATTSTETLKNIPSSMLRLTFDTGMGISIWSYLSCVTXQLYHSHCQEVLX

SEQ ID NO: 8058 - protein, 24 aa, Homo sapiens
  MISC_FEATURE (3): Xaa equals any of the naturally occurring L-amino acids
  MISC_FEATURE (18): Xaa equals any of the naturally occurring L-amino acids
  MISC_FEATURE (19): Xaa equals any of the naturally occurring L-amino acids
  MISC_FEATURE (23): Xaa equals any of the naturally occurring L-amino acids
PSXANSRNLWFFHRAVLXXTSMXQ

SEQ ID NO: 8059 - protein, 18 aa, Homo sapiens
  MISC_FEATURE (3): Xaa equals any of the naturally occurring L-amino acids
  MISC_FEATURE (18): Xaa equals any of the naturally occurring L-amino acids
AHXLLSIPESWFLFITEX

SEQ ID NO: 8060 - protein, 50 aa, Homo sapiens
AAWAAASCQPPPPRPCLRRTHKNHASFLPQPLMESSARSATKPRKMILAC

SEQ ID NO: 8061 - protein, 33 aa, Homo sapiens
  MISC_FEATURE (3): Xaa equals any of the naturally occurring L-amino acids
  MISC_FEATURE (6): Xaa equals any of the naturally occurring L-amino acids
  MISC_FEATURE (11): Xaa equals any of the naturally occurring L-amino acids
  MISC_FEATURE (17): Xaa equals any of the naturally occurring L-amino acids
  MISC_FEATURE (30): Xaa equals any of the naturally occurring L-amino acids
EPXRRXRSNIXTIHNGXAKNINEILYIRNXQAL

SEQ ID NO: 8062 - protein, 29 aa, Homo sapiens
  MISC_FEATURE (10): Xaa equals any of the naturally occurring L-amino acids
  MISC_FEATURE (11): Xaa equals any of the naturally occurring L-amino acids
  MISC_FEATURE (13): Xaa equals any of the naturally occurring L-amino acids
  MISC_FEATURE (23): Xaa equals any of the naturally occurring L-amino acids
LPELTTTLLXXLXTDAPSTLSDXGNANYI

SEQ ID NO: 8063 - protein, 33 aa, Homo sapiens
  MISC_FEATURE (9): Xaa equals any of the naturally occurring L-amino acids
  MISC_FEATURE (22): Xaa equals any of the naturally occurring L-amino acids
  MISC_FEATURE (30): Xaa equals any of the naturally occurring L-amino acids
MTTYGEYSXNSHDPHYGRQTHXLWETLMGXCKK

SEQ ID NO: 8064 - protein, 25 aa, Homo sapiens
  MISC_FEATURE (6): Xaa equals any of the naturally occurring L-amino acids
  MISC_FEATURE (18): Xaa equals any of the naturally occurring L-amino acids
  MISC_FEATURE (25): Xaa equals any of the naturally occurring L-amino acids
GLGSAXAKTEWLDAKHHXLAHSTFX

SEQ ID NO: 8065 - protein, 127 aa, Homo sapiens
  MISC_FEATURE (105): Xaa equals any of the naturally occurring L-amino acids
  MISC_FEATURE (108): Xaa equals any of the naturally occurring L-amino acids
  MISC_FEATURE (111): Xaa equals any of the naturally occurring L-amino acids
  MISC_FEATURE (113): Xaa equals any of the naturally occurring L-amino acids
  MISC_FEATURE (126): Xaa equals any of the naturally occurring L-amino acids
PTRPVRSRFSRGGRRWRERAPESLRARWGGAGESGRPEDVGVYVWKSGRVLLFVRAFENCLPLSEESTRNLPSSAGSPALSSPTQASVGEVGSAPDPRLELLPRXPMXTKXAXHEPPAWDPVAPIXP

SEQ ID NO: 8066 - protein, 22 aa, Homo sapiens
  MISC_FEATURE (17): Xaa equals any of the naturally occurring L-amino acids
  MISC_FEATURE (18): Xaa equals any of the naturally occurring L-amino acids
  MISC_FEATURE (20): Xaa equals any of the naturally occurring L-amino acids
  MISC_FEATURE (21): Xaa equals any of the naturally occurring L-amino acids
  MISC_FEATURE (22): Xaa equals any of the naturally occurring L-amino acids
EEIDKVKASLYISFWEXXSXXX

SEQ ID NO: 8067 - protein, 52 aa, Homo sapiens
  MISC_FEATURE (17): Xaa equals any of the naturally occurring L-amino acids
  MISC_FEATURE (24): Xaa equals any of the naturally occurring L-amino acids
  MISC_FEATURE (33): Xaa equals any of the naturally occurring L-amino acids
  MISC_FEATURE (46): Xaa equals any of the naturally occurring L-amino acids
  MISC_FEATURE (50): Xaa equals any of the naturally occurring L-amino acids
  MISC_FEATURE (51): Xaa equals any of the naturally occurring L-amino acids
GGGVKKRALWGFKPGPXWAQRGFXPPGVSPRGXKFFPPGGGFPGNXPNRXXF

SEQ ID NO: 8068 - protein, 17 aa, Homo sapiens
  MISC_FEATURE (3): Xaa equals any of the naturally occurring L-amino acids
  MISC_FEATURE (6): Xaa equals any of the naturally occurring L-amino acids
  MISC_FEATURE (10): Xaa equals any of the naturally occurring L-amino acids
  MISC_FEATURE (16): Xaa equals any of the naturally occurring L-amino acids
GLXLDXERPXFLGVRXT

SEQ ID NO: 8069 - protein, 75 aa, Homo sapiens
  MISC_FEATURE (2): Xaa equals any of the naturally occurring L-amino acids
EXPEGLRPLLRGSGAWRDGPPPTLYPPTPEEDGGKKITLPACSPAAFLLFPLFVLSSPCPLSSRRRGGVATGLPV

SEQ ID NO: 8070 - protein, 66 aa, Homo sapiens
  MISC_FEATURE (13): Xaa equals any of the naturally occurring L-amino acids
  MISC_FEATURE (46): Xaa equals any of the naturally occurring L-amino acids
  MISC_FEATURE (60): Xaa equals any of the naturally occurring L-amino acids
  MISC_FEATURE (62): Xaa equals any of the naturally occurring L-amino acids
LGEFWFWFFKIFXTQNDFSCFLLLTIFPDGVQRPLLKQLLAPLASXVESFKDRTPMFRKXEXGLLQ

SEQ ID NO: 8071 - protein, 52 aa, Homo sapiens
  MISC_FEATURE (30): Xaa equals any of the naturally occurring L-amino acids
  MISC_FEATURE (34): Xaa equals any of the naturally occurring L-amino acids
  MISC_FEATURE (50): Xaa equals any of the naturally occurring L-amino acids
CFKCCSWKADDVSCRRWTLKNIPGNHGSMXSLLXIVSALVLWKIYLFWCXKA

SEQ ID NO: 8072 - protein, 75 aa, Homo sapiens
  MISC_FEATURE (68): Xaa equals any of the naturally occurring L-amino acids
  MISC_FEATURE (72): Xaa equals any of the naturally occurring L-amino acids
  MISC_FEATURE (75): Xaa equals any of the naturally occurring L-amino acids
AWFRPAVWQTMGSLCVVLGAGFRQYLAFPWWKSLSPPALGRNWFLLGGAWLLPHPHPAGTLTGSSPDXSLPXPLX

SEQ ID NO: 8073 - protein, 31 aa, Homo sapiens
  MISC_FEATURE (29): Xaa equals any of the naturally occurring L-amino acids
  MISC_FEATURE (30): Xaa equals any of the naturally occurring L-amino acids
  MISC_FEATURE (31): Xaa equals any of the naturally occurring L-amino acids
GNIRSSLVQEKGRRLRQQERLSGSKPSGXXX

SEQ ID NO: 8074 - protein, 16 aa, Homo sapiens
  MISC_FEATURE (6): Xaa equals any of the naturally occurring L-amino acids
  MISC_FEATURE (13): Xaa equals any of the naturally occurring L-amino acids
  MISC_FEATURE (16): Xaa equals any of the naturally occurring L-amino acids
LSFRSXAAALFFXFYX

SEQ ID NO: 8075 - protein, 28 aa, Homo sapiens
  MISC_FEATURE (5): Xaa equals any of the naturally occurring L-amino acids
  MISC_FEATURE (11): Xaa equals any of the naturally occurring L-amino acids
  MISC_FEATURE (13): Xaa equals any of the naturally occurring L-amino acids
  MISC_FEATURE (28): Xaa equals any of the naturally occurring L-amino acids
ALVSXYNQPLXKXCITETPGFTENFLRX

SEQ ID NO: 8076 - protein, 43 aa, Homo sapiens
  MISC_FEATURE (5): Xaa equals any of the naturally occurring L-amino acids
  MISC_FEATURE (16): Xaa equals any of the naturally occurring L-amino acids
  MISC_FEATURE (18): Xaa equals any of the naturally occurring L-amino acids
  MISC_FEATURE (35): Xaa equals any of the naturally occurring L-amino acids
  MISC_FEATURE (40): Xaa equals any of the naturally occurring L-amino acids
  MISC_FEATURE (41): Xaa equals any of the naturally occurring L-amino acids
LEVDXEESTRCYPARXKXILFPWFSLSLRTSYFIXPSSRXXLL

SEQ ID NO: 8077 - protein, 20 aa, Homo sapiens
  MISC_FEATURE (6): Xaa equals any of the naturally occurring L-amino acids
  MISC_FEATURE (11): Xaa equals any of the naturally occurring L-amino acids
  MISC_FEATURE (12): Xaa equals any of the naturally occurring L-amino acids
QMRSQXLKEQXXSYKLAFDF

SEQ ID NO: 8078 - protein, 53 aa, Homo sapiens
  MISC_FEATURE (39): Xaa equals any of the naturally occurring L-amino acids
  MISC_FEATURE (42): Xaa equals any of the naturally occurring L-amino acids
  MISC_FEATURE (46): Xaa equals any of the naturally occurring L-amino acids
  MISC_FEATURE (48): Xaa equals any of the naturally occurring L-amino acids
  MISC_FEATURE (50): Xaa equals any of the naturally occurring L-amino acids
RFWMATMRSTRLCYYFLSFASCVHNNSKEVTLFAMHQIXMMXFFLXYXIXVTV

SEQ ID NO: 8079 - protein, 17 aa, Homo sapiens
  MISC_FEATURE (3): Xaa equals any of the naturally occurring L-amino acids
  MISC_FEATURE (11): Xaa equals any of the naturally occurring L-amino acids
  MISC_FEATURE (14): Xaa equals any of the naturally occurring L-amino acids
  MISC_FEATURE (17): Xaa equals any of the naturally occurring L-amino acids
AVXQTVSDLVXPRXFYX

SEQ ID NO: 8080 - protein, 22 aa, Homo sapiens
  MISC_FEATURE (16): Xaa equals any of the naturally occurring L-amino acids
  MISC_FEATURE (19): Xaa equals any of the naturally occurring L-amino acids
  MISC_FEATURE (21): Xaa equals any of the naturally occurring L-amino acids
PIPIKVCDLTWCILVXPGXAXD

SEQ ID NO: 8081 - protein, 29 aa, Homo sapiens
  MISC_FEATURE (2): Xaa equals any of the naturally occurring L-amino acids
  MISC_FEATURE (18): Xaa equals any of the naturally occurring L-amino acids
  MISC_FEATURE (21): Xaa equals any of the naturally occurring L-amino acids
GXCCCPGCPNQGVGIRNXGPXWEGERRKT

SEQ ID NO: 8082 - protein, 27 aa, Homo sapiens
  MISC_FEATURE (15): Xaa equals any of the naturally occurring L-amino acids
  MISC_FEATURE (21): Xaa equals any of the naturally occurring L-amino acids
  MISC_FEATURE (22): Xaa equals any of the naturally occurring L-amino acids
  MISC_FEATURE (24): Xaa equals any of the naturally occurring L-amino acids
QLHSQRVASCHEGPXMTTSYXXRXKRG

SEQ ID NO: 8083 - protein, 59 aa, Homo sapiens
  MISC_FEATURE (1): Xaa equals any of the naturally occurring L-amino acids
  MISC_FEATURE (6): Xaa equals any of the naturally occurring L-amino acids
  MISC_FEATURE (7): Xaa equals any of the naturally occurring L-amino acids
  MISC_FEATURE (10): Xaa equals any of the naturally occurring L-amino acids
  MISC_FEATURE (29): Xaa equals any of the naturally occurring L-amino acids
  MISC_FEATURE (45): Xaa equals any of the naturally occurring L-amino acids
  MISC_FEATURE (50): Xaa equals any of the naturally occurring L-amino acids
  MISC_FEATURE (51): Xaa equals any of the naturally occurring L-amino acids
XGMCYXXYQXCVMPRSHSMETHVHADNTXTASLPWRICHGRSWQXGNILXXFPFGRQLV

SEQ ID NO: 8084 - protein, 31 aa, Homo sapiens
  MISC_FEATURE (3): Xaa equals any of the naturally occurring L-amino acids
  MISC_FEATURE (11): Xaa equals any of the naturally occurring L-amino acids
  MISC_FEATURE (13): Xaa equals any of the naturally occurring L-amino acids
  MISC_FEATURE (14): Xaa equals any of the naturally occurring L-amino acids
  MISC_FEATURE (22): Xaa equals any of the naturally occurring L-amino acids
FFXGGGFKKKXRXXPPRGKTLXKKTSWKGLF

SEQ ID NO: 8085 - protein, 79 aa, Homo sapiens
  MISC_FEATURE (1): Xaa equals any of the naturally occurring L-amino acids
  MISC_FEATURE (6): Xaa equals any of the naturally occurring L-amino acids
  MISC_FEATURE (7): Xaa equals any of the naturally occurring L-amino acids
  MISC_FEATURE (27): Xaa equals any of the naturally occurring L-amino acids
  MISC_FEATURE (54): Xaa equals any of the naturally occurring L-amino acids
  MISC_FEATURE (57): Xaa equals any of the naturally occurring L-amino acids
XSGPTXXFLPCLRRDITHMPQLSDPAXLCPRPQQRSVEPLPPFPVIWVLWILLXLEXGSALPLATTGKPLTVAALLAFC

SEQ ID NO: 8086 - protein, 29 aa, Homo sapiens
  MISC_FEATURE (3): Xaa equals any of the naturally occurring L-amino acids
SFXRPVHTGLWEYIEQAIKIKQALKKKKK

SEQ ID NO: 8087 - protein, 60 aa, Homo sapiens
  MISC_FEATURE (8): Xaa equals any of the naturally occurring L-amino acids
  MISC_FEATURE (14): Xaa equals any of the naturally occurring L-amino acids
  MISC_FEATURE (15): Xaa equals any of the naturally occurring L-amino acids
  MISC_FEATURE (24): Xaa equals any of the naturally occurring L-amino acids
  MISC_FEATURE (49): Xaa equals any of the naturally occurring L-amino acids
  MISC_FEATURE (57): Xaa equals any of the naturally occurring L-amino acids
  MISC_FEATURE (60): Xaa equals any of the naturally occurring L-amino acids
NYRISHWXHCQVIXXNDESVLFPXDHKTMDPFCYDGFKLSIVTFYAISXYKGARTSXVFX

SEQ ID NO: 8088 - protein, 18 aa, Homo sapiens
  MISC_FEATURE (4): Xaa equals any of the naturally occurring L-amino acids
  MISC_FEATURE (11): Xaa equals any of the naturally occurring L-amino acids
  MISC_FEATURE (14): Xaa equals any of the naturally occurring L-amino acids
GATXCTGVSKXTTXGNFL

SEQ ID NO: 8089 - protein, 79 aa, Homo sapiens
  MISC_FEATURE (7): Xaa equals any of the naturally occurring L-amino acids
  MISC_FEATURE (9): Xaa equals any of the naturally occurring L-amino acids
  MISC_FEATURE (10): Xaa equals any of the naturally occurring L-amino acids
  MISC_FEATURE (11): Xaa equals any of the naturally occurring L-amino acids
DAWAEAXEXXXRPQQLPGKATVLAGGCGAGPRPLKSGRQGKESWGRGSPEHKADSTKRKPSVPNKPRNQHPQARMAQTH

SEQ ID NO: 8090 - protein, 33 aa, Homo sapiens
  MISC_FEATURE (19): Xaa equals any of the naturally occurring L-amino acids
  MISC_FEATURE (20): Xaa equals any of the naturally occurring L-amino acids
PTRGKKRGEIKNTRGEKRXXRKNKSISLYGRRT

SEQ ID NO: 8091 - protein, 41 aa, Homo sapiens
  MISC_FEATURE (1): Xaa equals any of the naturally occurring L-amino acids
  MISC_FEATURE (22): Xaa equals any of the naturally occurring L-amino acids
  MISC_FEATURE (25): Xaa equals any of the naturally occurring L-amino acids
  MISC_FEATURE (41): Xaa equals any of the naturally occurring L-amino acids
XSKDWTSSTMRHGQRVHGKGLXSPXVRMMLRLKGPFGTERX

SEQ ID NO: 8092 - protein, 36 aa, Homo sapiens
  MISC_FEATURE (11): Xaa equals any of the naturally occurring L-amino acids
  MISC_FEATURE (16): Xaa equals any of the naturally occurring L-amino acids
  MISC_FEATURE (19): Xaa equals any of the naturally occurring L-amino acids
  MISC_FEATURE (20): Xaa equals any of the naturally occurring L-amino acids
  MISC_FEATURE (24): Xaa equals any of the naturally occurring L-amino acids
QLQGTLESHHXKGIYXETXXGGIXLGREVLKWAQQK

SEQ ID NO: 8093 - protein, 97 aa, Homo sapiens
  MISC_FEATURE (82): Xaa equals any of the naturally occurring L-amino acids
RPVWPFLPLQTHYETPHFSHHQLLHSYNPCALSSLGAFAVAIVSIWNALPPVLPMADSFESFWCWLNCHLFLEPFSDHPSMXISSVILTLCVFFLAV

SEQ ID NO: 8094 - protein, 56 aa, Homo sapiens
  MISC_FEATURE (13): Xaa equals any of the naturally occurring L-amino acids
  MISC_FEATURE (16): Xaa equals any of the naturally occurring L-amino acids
FGIVIDHSFVCIXHSXHMIISNFVYKFISNFVQVNLNFNTMLKFQKPEKREMQSYI

SEQ ID NO: 8095 - protein, 24 aa, Homo sapiens
  MISC_FEATURE (8): Xaa equals any of the naturally occurring L-amino acids
  MISC_FEATURE (10): Xaa equals any of the naturally occurring L-amino acids
  MISC_FEATURE (11): Xaa equals any of the naturally occurring L-amino acids
  MISC_FEATURE (16): Xaa equals any of the naturally occurring L-amino acids
  MISC_FEATURE (24): Xaa equals any of the naturally occurring L-amino acids
LEYYCGSXKXXLIGSXLMETSHWX

SEQ ID NO: 8096 - protein, 57 aa, Homo sapiens
  MISC_FEATURE (15): Xaa equals any of the naturally occurring L-amino acids
  MISC_FEATURE (56): Xaa equals any of the naturally occurring L-amino acids
LLGLALHKAQFLSVXEKDFDPLGILRGQHVIVVRTHCALECLFIEIIVRPVINFKXI

SEQ ID NO: 8097 - protein, 72 aa, Homo sapiens
  MISC_FEATURE (64): Xaa equals any of the naturally occurring L-amino acids
  MISC_FEATURE (68): Xaa equals any of the naturally occurring L-amino acids
  MISC_FEATURE (71): Xaa equals any of the naturally occurring L-amino acids
LEYGISRTIWECGGGEAVLAPLAAVIHQAPPLLPEQLLRVRGTDWRRSRNVVCVEGVGWGVTDXLGGXLPXL

SEQ ID NO: 8098 - protein, 41 aa, Homo sapiens
  MISC_FEATURE (7): Xaa equals any of the naturally occurring L-amino acids
  MISC_FEATURE (9): Xaa equals any of the naturally occurring L-amino acids
  MISC_FEATURE (10): Xaa equals any of the naturally occurring L-amino acids
  MISC_FEATURE (24): Xaa equals any of the naturally occurring L-amino acids
  MISC_FEATURE (25): Xaa equals any of the naturally occurring L-amino acids
CRDPIWXTXXYRESWYACRYRTGXXGSTHAFEQGQGDLPLS

SEQ ID NO: 8099 - protein, 45 aa, Homo sapiens
  MISC_FEATURE (10): Xaa equals any of the naturally occurring L-amino acids
  MISC_FEATURE (22): Xaa equals any of the naturally occurring L-amino acids
  MISC_FEATURE (44): Xaa equals any of the naturally occurring L-amino acids
TVFRPLTLEXTFLIVDSCSKLXQHSTLSRSILLIYKGFCRFWPXG

SEQ ID NO: 8100 - protein, 49 aa, Homo sapiens
  MISC_FEATURE (40): Xaa equals any of the naturally occurring L-amino acids
GKLVRLQVPVRNSRVDPRVRFHIKCYITQERESISRKSAXHPKKFKLKC

SEQ ID NO: 8101 - protein, 35 aa, Homo sapiens
  MISC_FEATURE (7): Xaa equals any of the naturally occurring L-amino acids
  MISC_FEATURE (17): Xaa equals any of the naturally occurring L-amino acids
  MISC_FEATURE (22): Xaa equals any of the naturally occurring L-amino acids
  MISC_FEATURE (23): Xaa equals any of the naturally occurring L-amino acids
  MISC_FEATURE (31): Xaa equals any of the naturally occurring L-amino acids
YRGSVVXDAHLDWAAAXEKDRXXEQCEKDEXKIWG

SEQ ID NO: 8102 - protein, 41 aa, Homo sapiens
  MISC_FEATURE (2): Xaa equals any of the naturally occurring L-amino acids
  MISC_FEATURE (4): Xaa equals any of the naturally occurring L-amino acids
  MISC_FEATURE (26): Xaa equals any of the naturally occurring L-amino acids
  MISC_FEATURE (34): Xaa equals any of the naturally occurring L-amino acids
  MISC_FEATURE (35): Xaa equals any of the naturally occurring L-amino acids
  MISC_FEATURE (37): Xaa equals any of the naturally occurring L-amino acids
YXTXLECRYACCTGPEFPGRPTRPLXHIVHKIGXXTXTVTM

SEQ ID NO: 8103 - protein, 79 aa, Homo sapiens
  MISC_FEATURE (14): Xaa equals any of the naturally occurring L-amino acids
  MISC_FEATURE (16): Xaa equals any of the naturally occurring L-amino acids
  MISC_FEATURE (22): Xaa equals any of the naturally occurring L-amino acids
  MISC_FEATURE (24): Xaa equals any of the naturally occurring L-amino acids
  MISC_FEATURE (28): Xaa equals any of the naturally occurring L-amino acids
  MISC_FEATURE (39): Xaa equals any of the naturally occurring L-amino acids
  MISC_FEATURE (57): Xaa equals any of the naturally occurring L-amino acids
  MISC_FEATURE (65): Xaa equals any of the naturally occurring L-amino acids
  MISC_FEATURE (72): Xaa equals any of the naturally occurring L-amino acids
  MISC_FEATURE (78): Xaa equals any of the naturally occurring L-amino acids
TLQLQMIVEKKPQXRXRSRRRXFXGQAXDRQPGNLSGPXDTIRVTSMKKMLCCFLNXLYLHVHMXHIIQKLXCIKWLXT

SEQ ID NO: 8104 - protein, 50 aa, Homo sapiens
  MISC_FEATURE (6): Xaa equals any of the naturally occurring L-amino acids
  MISC_FEATURE (7): Xaa equals any of the naturally occurring L-amino acids
  MISC_FEATURE (10): Xaa equals any of the naturally occurring L-amino acids
  MISC_FEATURE (27): Xaa equals any of the naturally occurring L-amino acids
  MISC_FEATURE (40): Xaa equals any of the naturally occurring L-amino acids
  MISC_FEATURE (45): Xaa equals any of the naturally occurring L-amino acids
  MISC_FEATURE (47): Xaa equals any of the naturally occurring L-amino acids
VGNAIXXGTXSRLYDKSTGAWPEKPIXRTTFLPLDWTSDXGPSIXIXAKV

SEQ ID NO: 8105 - protein, 69 aa, Homo sapiens
  MISC_FEATURE (6): Xaa equals any of the naturally occurring L-amino acids
  MISC_FEATURE (18): Xaa equals any of the naturally occurring L-amino acids
  MISC_FEATURE (19): Xaa equals any of the naturally occurring L-amino acids
  MISC_FEATURE (20): Xaa equals any of the naturally occurring L-amino acids
  MISC_FEATURE (24): Xaa equals any of the naturally occurring L-amino acids
  MISC_FEATURE (58): Xaa equals any of the naturally occurring L-amino acids
  MISC_FEATURE (62): Xaa equals any of the naturally occurring L-amino acids
  MISC_FEATURE (63): Xaa equals any of the naturally occurring L-amino acids
ENKRCXRGTLTFGTHMHXXXYLPXWPDMSRIVPQTWHQRIALKEELIGCQIHKVMIHXEWCXXKSEHQF

SEQ ID NO: 8106 - protein, 39 aa, Homo sapiens
  MISC_FEATURE (1): Xaa equals any of the naturally occurring L-amino acids
XGTPTIGKAGTPAGTGPEFPGRPTRPPTRPNSHNAKYTM

SEQ ID NO: 8107 - protein, 93 aa, Homo sapiens
  MISC_FEATURE (37): Xaa equals any of the naturally occurring L-amino acids
  MISC_FEATURE (60): Xaa equals any of the naturally occurring L-amino acids
  MISC_FEATURE (70): Xaa equals any of the naturally occurring L-amino acids
  MISC_FEATURE (74): Xaa equals any of the naturally occurring L-amino acids
  MISC_FEATURE (78): Xaa equals any of the naturally occurring L-amino acids
  MISC_FEATURE (82): Xaa equals any of the naturally occurring L-amino acids
  MISC_FEATURE (83): Xaa equals any of the naturally occurring L-amino acids
TLFSAGTTSIHVLNSNSAKLHSSPGRSPGINGISVGXHHSHPSVLGKGGRSPQNHTAEIXKFCLKSDKVXVALXLCKXGDIXXYISLYLHRVQ

SEQ ID NO: 8108 - protein, 25 aa, Homo sapiens
  MISC_FEATURE (21): Xaa equals any of the naturally occurring L-amino acids
  MISC_FEATURE (22): Xaa equals any of the naturally occurring L-amino acids
  MISC_FEATURE (25): Xaa equals any of the naturally occurring L-amino acids
QNVCAKKQMHKHITATLRHFXXWTX

SEQ ID NO: 8109 - protein, 22 aa, Homo sapiens
  MISC_FEATURE (12): Xaa equals any of the naturally occurring L-amino acids
  MISC_FEATURE (13): Xaa equals any of the naturally occurring L-amino acids
  MISC_FEATURE (18): Xaa equals any of the naturally occurring L-amino acids
ETHTAGQVDVYXXPFEYXIHES

SEQ ID NO: 8110 - protein, 121 aa, Homo sapiens
  MISC_FEATURE (8): Xaa equals any of the naturally occurring L-amino acids
DLICLGPXLLESFVANPLSYLGPHTLGFTAARSLSPPEDLPARDLACWGPRLLGTSPAGDLTCWGPWLLEAAPTEDVGGRGLYLLGPAPRDLATLNLTCWGPHPGGPGPGELAYFGAPTRE

SEQ ID NO: 8111 - protein, 52 aa, Homo sapiens
  MISC_FEATURE (1): Xaa equals any of the naturally occurring L-amino acids
  MISC_FEATURE (10): Xaa equals any of the naturally occurring L-amino acids
  MISC_FEATURE (11): Xaa equals any of the naturally occurring L-amino acids
  MISC_FEATURE (13): Xaa equals any of the naturally occurring L-amino acids
  MISC_FEATURE (34): Xaa equals any of the naturally occurring L-amino acids
XGNLMEAFWXXCXYRSGIPGSTHASATERWGCPXRKSGSRETDPLTNSPDKL

SEQ ID NO: 8112 - protein, 74 aa, Homo sapiens
  MISC_FEATURE (67): Xaa equals any of the naturally occurring L-amino acids
  MISC_FEATURE (68): Xaa equals any of the naturally occurring L-amino acids
FPFTPSSLALAGQCTMNWRSAGESQSCPDSASPQGPLPSGLPSPAIPVAGKVGLALPPDLFPQEGPXXTGAGSG

SEQ ID NO: 8113 - protein, 42 aa, Homo sapiens
  MISC_FEATURE (3): Xaa equals any of the naturally occurring L-amino acids
  MISC_FEATURE (4): Xaa equals any of the naturally occurring L-amino acids
  MISC_FEATURE (7): Xaa equals any of the naturally occurring L-amino acids
  MISC_FEATURE (17): Xaa equals any of the naturally occurring L-amino acids
  MISC_FEATURE (36): Xaa equals any of the naturally occurring L-amino acids
  MISC_FEATURE (37): Xaa equals any of the naturally occurring L-amino acids
  MISC_FEATURE (39): Xaa equals any of the naturally occurring L-amino acids
RDXXGGXLMGKLIIGNXGTPAGTGPEFPGRPTRPTXXRXRAV

SEQ ID NO: 8114 - protein, 54 aa, Homo sapiens
  MISC_FEATURE (4): Xaa equals any of the naturally occurring L-amino acids
RGEXYWEGHSGTLAGTGPEFPGRPTRPRKRKRVGHRREMVHFLTAVLIYIIVFL

SEQ ID NO: 8115 - protein, 79 aa, Homo sapiens
  MISC_FEATURE (42): Xaa equals any of the naturally occurring L-amino acids
  MISC_FEATURE (44): Xaa equals any of the naturally occurring L-amino acids
  MISC_FEATURE (45): Xaa equals any of the naturally occurring L-amino acids
  MISC_FEATURE (52): Xaa equals any of the naturally occurring L-amino acids
  MISC_FEATURE (67): Xaa equals any of the naturally occurring L-amino acids
  MISC_FEATURE (69): Xaa equals any of the naturally occurring L-amino acids
  MISC_FEATURE (76): Xaa equals any of the naturally occurring L-amino acids
KKFICIYAFRIILYLSNLFYHCYRFLKKNLSLASTCQRFTSXLXXKQVVAVXIGHASRGNAQYKCFXLXRKGPILXLKS

SEQ ID NO: 8116 - protein, 18 aa, Homo sapiens
  MISC_FEATURE (2): Xaa equals any of the naturally occurring L-amino acids
  MISC_FEATURE (5): Xaa equals any of the naturally occurring L-amino acids
  MISC_FEATURE (7): Xaa equals any of the naturally occurring L-amino acids
  MISC_FEATURE (9): Xaa equals any of the naturally occurring L-amino acids
  MISC_FEATURE (17): Xaa equals any of the naturally occurring L-amino acids
AXIKXWXGXGKLKKGFXL

SEQ ID NO: 8117 - protein, 52 aa, Homo sapiens
TNCWFDIYVNISLPCFNFAHSYYREPIGSLLVLWVFCLKRSHGICLHLPYQT

SEQ ID NO: 8118 - protein, 82 aa, Homo sapiens
  MISC_FEATURE (24): Xaa equals any of the naturally occurring L-amino acids
  MISC_FEATURE (56): Xaa equals any of the naturally occurring L-amino acids
  MISC_FEATURE (60): Xaa equals any of the naturally occurring L-amino acids
  MISC_FEATURE (69): Xaa equals any of the naturally occurring L-amino acids
  MISC_FEATURE (75): Xaa equals any of the naturally occurring L-amino acids
ISLFFSDLHLCSQCLAGPALILQXIQALFERLVIIRCCNAASRFFMVTWDAPAHLXLKVXTFTPMRDIXINSFFXLLVPKHR

SEQ ID NO: 8119 - protein, 58 aa, Homo sapiens
  MISC_FEATURE (24): Xaa equals any of the naturally occurring L-amino acids
  MISC_FEATURE (34): Xaa equals any of the naturally occurring L-amino acids
  MISC_FEATURE (36): Xaa equals any of the naturally occurring L-amino acids
  MISC_FEATURE (52): Xaa equals any of the naturally occurring L-amino acids
RACEGRFQVWFYKPVNYLLSSLTXTNFSSFCCQXVXRKETFPSLDRICLRDXGTIVFK

SEQ ID NO: 8120 - protein, 66 aa, Homo sapiens
  MISC_FEATURE (20): Xaa equals any of the naturally occurring L-amino acids
  MISC_FEATURE (22): Xaa equals any of the naturally occurring L-amino acids
  MISC_FEATURE (23): Xaa equals any of the naturally occurring L-amino acids
  MISC_FEATURE (25): Xaa equals any of the naturally occurring L-amino acids
  MISC_FEATURE (26): Xaa equals any of the naturally occurring L-amino acids
  MISC_FEATURE (32): Xaa equals any of the naturally occurring L-amino acids
  MISC_FEATURE (40): Xaa equals any of the naturally occurring L-amino acids
  MISC_FEATURE (42): Xaa equals any of the naturally occurring L-amino acids
  MISC_FEATURE (55): Xaa equals any of the naturally occurring L-amino acids
  MISC_FEATURE (56): Xaa equals any of the naturally occurring L-amino acids
  MISC_FEATURE (65): Xaa equals any of the naturally occurring L-amino acids
DLPTEFHCMMILLSLLVALXSXXKXXLGLVRXSREDFSFXLXREKAFYQHSSSSXXERLQALRKXA

SEQ ID NO: 8121 - protein, 38 aa, Homo sapiens
  MISC_FEATURE (3): Xaa equals any of the naturally occurring L-amino acids
  MISC_FEATURE (10): Xaa equals any of the naturally occurring L-amino acids
  MISC_FEATURE (14): Xaa equals any of the naturally occurring L-amino acids
  MISC_FEATURE (27): Xaa equals any of the naturally occurring L-amino acids
  MISC_FEATURE (36): Xaa equals any of the naturally occurring L-amino acids
PSXRAVRNQXYYGXSHITVSSNSYMPXPKMITTHCXCL

SEQ ID NO: 8122 - protein, 23 aa, Homo sapiens
  MISC_FEATURE (12): Xaa equals any of the naturally occurring L-amino acids
FKGWEPRPPGQXTRGAAEIFSGG

SEQ ID NO: 8123 - protein, 22 aa, Homo sapiens
  MISC_FEATURE (19): Xaa equals any of the naturally occurring L-amino acids
  MISC_FEATURE (20): Xaa equals any of the naturally occurring L-amino acids
  MISC_FEATURE (21): Xaa equals any of the naturally occurring L-amino acids
AFKNRTFYTGGFSFLWGQXXXR

SEQ ID NO: 8124 - protein, 17 aa, Homo sapiens
  MISC_FEATURE (2): Xaa equals any of the naturally occurring L-amino acids
  MISC_FEATURE (13): Xaa equals any of the naturally occurring L-amino acids
  MISC_FEATURE (16): Xaa equals any of the naturally occurring L-amino acids
  MISC_FEATURE (17): Xaa equals any of the naturally occurring L-amino acids
EXNEDQDHCWVRXALXX

SEQ ID NO: 8125 - protein, 38 aa, Homo sapiens
QCCNTDGNAIAYLKTLRDLIEMYIVFFFTITELFYLLC

SEQ ID NO: 8126 - protein, 60 aa, Homo sapiens
  MISC_FEATURE (3): Xaa equals any of the naturally occurring L-amino acids
  MISC_FEATURE (11): Xaa equals any of the naturally occurring L-amino acids
  MISC_FEATURE (16): Xaa equals any of the naturally occurring L-amino acids
  MISC_FEATURE (17): Xaa equals any of the naturally occurring L-amino acids
  MISC_FEATURE (38): Xaa equals any of the naturally occurring L-amino acids
  MISC_FEATURE (42): Xaa equals any of the naturally occurring L-amino acids
  MISC_FEATURE (50): Xaa equals any of the naturally occurring L-amino acids
  MISC_FEATURE (60): Xaa equals any of the naturally occurring L-amino acids
STXTRGGKKGXGFTGXXAKGLPGVSPGKIFPPGGFRNXQRAXSPGLVGNXKGFIFGFGHX

SEQ ID NO: 8127 - protein, 81 aa, Homo sapiens
DNKDEVKHPGYPLPVIRSDVRHFMSELIHLVLVFGKDNVSHLLVAVAWRRGLTNGGQGDHLEFASCEDRCWLFTILEGFTS

SEQ ID NO: 8128 - protein, 109 aa, Homo sapiens
  MISC_FEATURE (97): Xaa equals any of the naturally occurring L-amino acids
  MISC_FEATURE (99): Xaa equals any of the naturally occurring L-amino acids
  MISC_FEATURE (104): Xaa equals any of the naturally occurring L-amino acids
  MISC_FEATURE (108): Xaa equals any of the naturally occurring L-amino acids
VGCFLLPPLLRFPVTGSSGKPGQPTQINELGTEETSKDLGLRAEGPRWVGFEQGAPGPEPGIGASLPSKSCVHPNSEAHATASCSVCEVPGGCPGAXLXRRPQXRAWXA

SEQ ID NO: 8129 - protein, 32 aa, Homo sapiens
  MISC_FEATURE (15): Xaa equals any of the naturally occurring L-amino acids
  MISC_FEATURE (21): Xaa equals any of the naturally occurring L-amino acids
  MISC_FEATURE (26): Xaa equals any of the naturally occurring L-amino acids
  MISC_FEATURE (30): Xaa equals any of the naturally occurring L-amino acids
  MISC_FEATURE (32): Xaa equals any of the naturally occurring L-amino acids
TLQCYTSMLCCLLNXGTAVLXMHMIXSENXEX

SEQ ID NO: 8130 - protein, 21 aa, Homo sapiens
  MISC_FEATURE (14): Xaa equals any of the naturally occurring L-amino acids
  MISC_FEATURE (16): Xaa equals any of the naturally occurring L-amino acids
  MISC_FEATURE (17): Xaa equals any of the naturally occurring L-amino acids
  MISC_FEATURE (20): Xaa equals any of the naturally occurring L-amino acids
ADAWVALRSYGATXSXXWLXS

SEQ ID NO: 8131 - protein, 21 aa, Homo sapiens
  MISC_FEATURE (3): Xaa equals any of the naturally occurring L-amino acids
  MISC_FEATURE (7): Xaa equals any of the naturally occurring L-amino acids
  MISC_FEATURE (12): Xaa equals any of the naturally occurring L-amino acids
  MISC_FEATURE (14): Xaa equals any of the naturally occurring L-amino acids
  MISC_FEATURE (20): Xaa equals any of the naturally occurring L-amino acids
DGXIGPXIFHHXSXGPPVPXY

SEQ ID NO: 8132 - protein, 24 aa, Homo sapiens
  MISC_FEATURE (4): Xaa equals any of the naturally occurring L-amino acids
  MISC_FEATURE (5): Xaa equals any of the naturally occurring L-amino acids
  MISC_FEATURE (23): Xaa equals any of the naturally occurring L-amino acids
  MISC_FEATURE (24): Xaa equals any of the naturally occurring L-amino acids
KKTXXNENIEKILRKKYIWGGHXX

SEQ ID NO: 8133 - protein, 62 aa, Homo sapiens
  MISC_FEATURE (3): Xaa equals any of the naturally occurring L-amino acids
  MISC_FEATURE (4): Xaa equals any of the naturally occurring L-amino acids
  MISC_FEATURE (13): Xaa equals any of the naturally occurring L-amino acids
  MISC_FEATURE (24): Xaa equals any of the naturally occurring L-amino acids
  MISC_FEATURE (41): Xaa equals any of the naturally occurring L-amino acids
  MISC_FEATURE (46): Xaa equals any of the naturally occurring L-amino acids
  MISC_FEATURE (52): Xaa equals any of the naturally occurring L-amino acids
  MISC_FEATURE (57): Xaa equals any of the naturally occurring L-amino acids
  MISC_FEATURE (59): Xaa equals any of the naturally occurring L-amino acids
LIXXNLFRAFPFXHGQPHCPYGLXKGIRISFPFLNSGGTIXAFPTXPCLPAXQQPGXFXMNQ

SEQ ID NO: 8134 - protein, 22 aa, Homo sapiens
  MISC_FEATURE (8): Xaa equals any of the naturally occurring L-amino acids
  MISC_FEATURE (9): Xaa equals any of the naturally occurring L-amino acids
  MISC_FEATURE (13): Xaa equals any of the naturally occurring L-amino acids
AGNKPELXXEEKXYKNAREREK

SEQ ID NO: 8135 - protein, 78 aa, Homo sapiens
  MISC_FEATURE (4): Xaa equals any of the naturally occurring L-amino acids
  MISC_FEATURE (54): Xaa equals any of the naturally occurring L-amino acids
  MISC_FEATURE (56): Xaa equals any of the naturally occurring L-amino acids
  MISC_FEATURE (63): Xaa equals any of the naturally occurring L-amino acids
  MISC_FEATURE (64): Xaa equals any of the naturally occurring L-amino acids
  MISC_FEATURE (73): Xaa equals any of the naturally occurring L-amino acids
APAXRAARGPACAPASPEAPGPTPPLLSLSALSASGSAGARRREPVQGRGSAPXPXVGLRWPXXSDIFLPSWXSLEIY

SEQ ID NO: 8136 - protein, 17 aa, Homo sapiens
  MISC_FEATURE (15): Xaa equals any of the naturally occurring L-amino acids
  MISC_FEATURE (16): Xaa equals any of the naturally occurring L-amino acids
  MISC_FEATURE (17): Xaa equals any of the naturally occurring L-amino acids
AWIIMLIHRALLMIXXX

SEQ ID NO: 8137 - protein, 20 aa, Homo sapiens
  MISC_FEATURE (15): Xaa equals any of the naturally occurring L-amino acids
  MISC_FEATURE (16): Xaa equals any of the naturally occurring L-amino acids
GEKCPLLKLFVTGEXXVFDG

SEQ ID NO: 8138 - protein, 21 aa, Homo sapiens
  MISC_FEATURE (7): Xaa equals any of the naturally occurring L-amino acids
  MISC_FEATURE (9): Xaa equals any of the naturally occurring L-amino acids
  MISC_FEATURE (12): Xaa equals any of the naturally occurring L-amino acids
  MISC_FEATURE (18): Xaa equals any of the naturally occurring L-amino acids
AMSARRXGXPSXALRRRXVCD

SEQ ID NO: 8139 - protein, 36 aa, Homo sapiens
LRCALKYSVAYHSTLNPMIIQLTSCCSGLVHIAHMI

SEQ ID NO: 8140 - protein, 28 aa, Homo sapiens
  MISC_FEATURE (3): Xaa equals any of the naturally occurring L-amino acids
  MISC_FEATURE (13): Xaa equals any of the naturally occurring L-amino acids
  MISC_FEATURE (23): Xaa equals any of the naturally occurring L-amino acids
  MISC_FEATURE (24): Xaa equals any of the naturally occurring L-amino acids
  MISC_FEATURE (28): Xaa equals any of the naturally occurring L-amino acids
TLXKCYLIIILHXDKLGLSNMNXXNGYX

SEQ ID NO: 8141 - protein, 33 aa, Homo sapiens
  MISC_FEATURE (4): Xaa equals any of the naturally occurring L-amino acids
  MISC_FEATURE (13): Xaa equals any of the naturally occurring L-amino acids
  MISC_FEATURE (28): Xaa equals any of the naturally occurring L-amino acids
KYNXKKHFTYQRXLYLYKRLLNEGLLNXFGSIT

SEQ ID NO: 8142 - protein, 67 aa, Homo sapiens
  MISC_FEATURE (26): Xaa equals any of the naturally occurring L-amino acids
  MISC_FEATURE (38): Xaa equals any of the naturally occurring L-amino acids
  MISC_FEATURE (39): Xaa equals any of the naturally occurring L-amino acids
  MISC_FEATURE (45): Xaa equals any of the naturally occurring L-amino acids
  MISC_FEATURE (48): Xaa equals any of the naturally occurring L-amino acids
  MISC_FEATURE (59): Xaa equals any of the naturally occurring L-amino acids
  MISC_FEATURE (60): Xaa equals any of the naturally occurring L-amino acids
  MISC_FEATURE (63): Xaa equals any of the naturally occurring L-amino acids
VPASNHPARFLFGKISTGEPSSLPSXEMETIQDIKNAXXGQQLCXVQXMKFSRWCASLXXKSXKDRS

SEQ ID NO: 8143 - protein, 27 aa, Homo sapiens
  MISC_FEATURE (3): Xaa equals any of the naturally occurring L-amino acids
  MISC_FEATURE (5): Xaa equals any of the naturally occurring L-amino acids
  MISC_FEATURE (8): Xaa equals any of the naturally occurring L-amino acids
  MISC_FEATURE (10): Xaa equals any of the naturally occurring L-amino acids
  MISC_FEATURE (26): Xaa equals any of the naturally occurring L-amino acids
PPXRXQLXIXFSEVPFVSKIQLLKFXG

SEQ ID NO: 8144 - protein, 53 aa, Homo sapiens
  MISC_FEATURE (7): Xaa equals any of the naturally occurring L-amino acids
  MISC_FEATURE (17): Xaa equals any of the naturally occurring L-amino acids
  MISC_FEATURE (27): Xaa equals any of the naturally occurring L-amino acids
  MISC_FEATURE (30): Xaa equals any of the naturally occurring L-amino acids
  MISC_FEATURE (32): Xaa equals any of the naturally occurring L-amino acids
GSKYFLXFSLVFMPSLXIYILSVIIWXFLXVXGIYQVVNYEYLHLLFEKMTLI

SEQ ID NO: 8145 - protein, 105 aa, Homo sapiens
PRVRPRVRPRVRPGLNSCDQNSLLPHPAPSTSCPLFHLPPSQRPQPLFQAQGCRRGKEETGSPERAKGLPRGANHAPDYYLRAFWALTSAWPPAHALRPVGEGWS

SEQ ID NO: 8146 - protein, 20 aa, Homo sapiens
  MISC_FEATURE (4): Xaa equals any of the naturally occurring L-amino acids
  MISC_FEATURE (13): Xaa equals any of the naturally occurring L-amino acids
  MISC_FEATURE (16): Xaa equals any of the naturally occurring L-amino acids
  MISC_FEATURE (17): Xaa equals any of the naturally occurring L-amino acids
  MISC_FEATURE (18): Xaa equals any of the naturally occurring L-amino acids
GQPXYAHDTVLEXNQXXXVK

SEQ ID NO: 8147 - protein, 80 aa, Homo sapiens
IQLGEPAGLVRQHLGLCQQQEVKRSHSYLSLPLPPAPCVGTQTWRDPSAVNTSILFLPKEQIPRHLLLGLSRFICRPSQR

SEQ ID NO: 8148 - protein, 81 aa, Homo sapiens
  MISC_FEATURE (2): Xaa equals any of the naturally occurring L-amino acids
  MISC_FEATURE (3): Xaa equals any of the naturally occurring L-amino acids
  MISC_FEATURE (4): Xaa equals any of the naturally occurring L-amino acids
  MISC_FEATURE (5): Xaa equals any of the naturally occurring L-amino acids
  MISC_FEATURE (6): Xaa equals any of the naturally occurring L-amino acids
  MISC_FEATURE (8): Xaa equals any of the naturally occurring L-amino acids
  MISC_FEATURE (9): Xaa equals any of the naturally occurring L-amino acids
  MISC_FEATURE (15): Xaa equals any of the naturally occurring L-amino acids
  MISC_FEATURE (20): Xaa equals any of the naturally occurring L-amino acids
  MISC_FEATURE (21): Xaa equals any of the naturally occurring L-amino acids
NXXXXXNXXKIIYKXSSFPXXKTEPKGWQDRTLSRFLHHLHKFLVDGILLFEGCFESGFHVLVIFGFLGALHSAGIKQPWK

SEQ ID NO: 8149 - protein, 105 aa, Homo sapiens
  MISC_FEATURE (8): Xaa equals any of the naturally occurring L-amino acids
  MISC_FEATURE (14): Xaa equals any of the naturally occurring L-amino acids
  MISC_FEATURE (24): Xaa equals any of the naturally occurring L-amino acids
  MISC_FEATURE (26): Xaa equals any of the naturally occurring L-amino acids
  MISC_FEATURE (30): Xaa equals any of the naturally occurring L-amino acids
  MISC_FEATURE (36): Xaa equals any of the naturally occurring L-amino acids
  MISC_FEATURE (58): Xaa equals any of the naturally occurring L-amino acids
  MISC_FEATURE (84): Xaa equals any of the naturally occurring L-amino acids
  MISC_FEATURE (85): Xaa equals any of the naturally occurring L-amino acids
  MISC_FEATURE (86): Xaa equals any of the naturally occurring L-amino acids
  MISC_FEATURE (88): Xaa equals any of the naturally occurring L-amino acids
  MISC_FEATURE (93): Xaa equals any of the naturally occurring L-amino acids
GYGSHLSXHCLEHXTLPLNSLLRXKXSALXTPLALXLASAPQGSPSAPLASTPIKWTXVCKFNGHSFPPMSQLASSLPALISPXXXPXPLGLXPQLFKGSPALNR

SEQ ID NO: 8150 - protein, 60 aa, Homo sapiens
ENHVYLFPPYVKDFLLVVHSALILYSLPRRVSLGTILYRKQVYSDHIQDKCTEENTVFTL

SEQ ID NO: 8151 - protein, 66 aa, Homo sapiens
  MISC_FEATURE (2): Xaa equals any of the naturally occurring L-amino acids
  MISC_FEATURE (3): Xaa equals any of the naturally occurring L-amino acids
  MISC_FEATURE (4): Xaa equals any of the naturally occurring L-amino acids
  MISC_FEATURE (5): Xaa equals any of the naturally occurring L-amino acids
  MISC_FEATURE (7): Xaa equals any of the naturally occurring L-amino acids
  MISC_FEATURE (12): Xaa equals any of the naturally occurring L-amino acids
  MISC_FEATURE (13): Xaa equals any of the naturally occurring L-amino acids
  MISC_FEATURE (18): Xaa equals any of the naturally occurring L-amino acids
  MISC_FEATURE (30): Xaa equals any of the naturally occurring L-amino acids
  MISC_FEATURE (32): Xaa equals any of the naturally occurring L-amino acids
  MISC_FEATURE (43): Xaa equals any of the naturally occurring L-amino acids
  MISC_FEATURE (48): Xaa equals any of the naturally occurring L-amino acids
  MISC_FEATURE (51): Xaa equals any of the naturally occurring L-amino acids
  MISC_FEATURE (58): Xaa equals any of the naturally occurring L-amino acids
PXXXXEXCLAAXXVLDLXIALLEVLKTALXHXGLSRGIPQAAXDLYKXVYXSQYCGFXQHGTKLPP

SEQ ID NO: 8152 - protein, 35 aa, Homo sapiens
  MISC_FEATURE (5): Xaa equals any of the naturally occurring L-amino acids
  MISC_FEATURE (7): Xaa equals any of the naturally occurring L-amino acids
  MISC_FEATURE (26): Xaa equals any of the naturally occurring L-amino acids
YNTAXDXASASDVVYGNVLFQLNCNXKIWPHPFYS

SEQ ID NO: 8153 - protein, 24 aa, Homo sapiens
  MISC_FEATURE (7): Xaa equals any of the naturally occurring L-amino acids
  MISC_FEATURE (10): Xaa equals any of the naturally occurring L-amino acids
  MISC_FEATURE (19): Xaa equals any of the naturally occurring L-amino acids
GPGLCEXIKXWWPRCACSXCLHVP

SEQ ID NO: 8154 - protein, 55 aa, Homo sapiens
  MISC_FEATURE (4): Xaa equals any of the naturally occurring L-amino acids
  MISC_FEATURE (50): Xaa equals any of the naturally occurring L-amino acids
  MISC_FEATURE (51): Xaa equals any of the naturally occurring L-amino acids
  MISC_FEATURE (52): Xaa equals any of the naturally occurring L-amino acids
  MISC_FEATURE (55): Xaa equals any of the naturally occurring L-amino acids
PYIXICYTPPAPSPSETPVPSQGQLCQTPLPGLPSCHHKQKKKRGGPPKXXXIFX

SEQ ID NO: 8155 - protein, 102 aa, Homo sapiens
  MISC_FEATURE (9): Xaa equals any of the naturally occurring L-amino acids
  MISC_FEATURE (33): Xaa equals any of the naturally occurring L-amino acids
  MISC_FEATURE (43): Xaa equals any of the naturally occurring L-amino acids
  MISC_FEATURE (51): Xaa equals any of the naturally occurring L-amino acids
  MISC_FEATURE (53): Xaa equals any of the naturally occurring L-amino acids
  MISC_FEATURE (69): Xaa equals any of the naturally occurring L-amino acids
  MISC_FEATURE (73): Xaa equals any of the naturally occurring L-amino acids
  MISC_FEATURE (80): Xaa equals any of the naturally occurring L-amino acids
  MISC_FEATURE (88): Xaa equals any of the naturally occurring L-amino acids
PQKGLPLKXPPETFLTLNKKGGEKKGLWGVEPXPLWAQRGFKXPGGFPPGXKXFPPPRGGVFPEKPPPXRARXFSPGFGXPPPFFGGXSPPPPKKKKKKFFG

SEQ ID NO: 8156 - protein, 118 aa, Homo sapiens
  MISC_FEATURE (1): Xaa equals any of the naturally occurring L-amino acids
  MISC_FEATURE (3): Xaa equals any of the naturally occurring L-amino acids
  MISC_FEATURE (10): Xaa equals any of the naturally occurring L-amino acids
  MISC_FEATURE (11): Xaa equals any of the naturally occurring L-amino acids
  MISC_FEATURE (12): Xaa equals any of the naturally occurring L-amino acids
  MISC_FEATURE (13): Xaa equals any of the naturally occurring L-amino acids
  MISC_FEATURE (14): Xaa equals any of the naturally occurring L-amino acids
  MISC_FEATURE (16): Xaa equals any of the naturally occurring L-amino acids
  MISC_FEATURE (40): Xaa equals any of the naturally occurring L-amino acids
  MISC_FEATURE (43): Xaa equals any of the naturally occurring L-amino acids
  MISC_FEATURE (44): Xaa equals any of the naturally occurring L-amino acids
  MISC_FEATURE (55): Xaa equals any of the naturally occurring L-amino acids
  MISC_FEATURE (59): Xaa equals any of the naturally occurring L-amino acids
  MISC_FEATURE (62): Xaa equals any of the naturally occurring L-amino acids
  MISC_FEATURE (66): Xaa equals any of the naturally occurring L-amino acids
  MISC_FEATURE (72): Xaa equals any of the naturally occurring L-amino acids
  MISC_FEATURE (73): Xaa equals any of the naturally occurring L-amino acids
  MISC_FEATURE (74): Xaa equals any of the naturally occurring L-amino acids
  MISC_FEATURE (83): Xaa equals any of the naturally occurring L-amino acids
  MISC_FEATURE (92): Xaa equals any of the naturally occurring L-amino acids
  MISC_FEATURE (94): Xaa equals any of the naturally occurring L-amino acids
  MISC_FEATURE (95): Xaa equals any of the naturally occurring L-amino acids
  MISC_FEATURE (102): Xaa equals any of the naturally occurring L-amino acids
XMXRLNCCGXXXXXDXDDSPYFTYNRSFTPILLVITISPXHPXXPVPLRKDHDQXSIGXLLXTFCXTSELMXXXGVVLAVGIXGLELAAMIXSXXLLLQSTXNPLTASATNGCPPGNS

SEQ ID NO: 8157 - protein, 142 aa, Homo sapiens
  MISC_FEATURE (40): Xaa equals any of the naturally occurring L-amino acids
  MISC_FEATURE (55): Xaa equals any of the naturally occurring L-amino acids
  MISC_FEATURE (59): Xaa equals any of the naturally occurring L-amino acids
  MISC_FEATURE (60): Xaa equals any of the naturally occurring L-amino acids
  MISC_FEATURE (80): Xaa equals any of the naturally occurring L-amino acids
  MISC_FEATURE (108): Xaa equals any of the naturally occurring L-amino acids
  MISC_FEATURE (113): Xaa equals any of the naturally occurring L-amino acids
  MISC_FEATURE (125): Xaa equals any of the naturally occurring L-amino acids
  MISC_FEATURE (126): Xaa equals any of the naturally occurring L-amino acids
  MISC_FEATURE (134): Xaa equals any of the naturally occurring L-amino acids
  MISC_FEATURE (141): Xaa equals any of the naturally occurring L-amino acids
  MISC_FEATURE (142): Xaa equals any of the naturally occurring L-amino acids
TPGGSPGGKNFPPPGGVSGKPPQPGPGSPGKPPKKIFKKXIWGFKKETPFPWERXPPKXXFFFGFPPQIPFPLTPPPLSXPKTLGPFLTQGKNWGEIPNWVSPPPLFXFGFWXRGLGNPKPFLKXXGPFFPPLXPFPPFWXX

SEQ ID NO: 8158 - protein, 76 aa, Homo sapiens
  MISC_FEATURE (76): Xaa equals any of the naturally occurring L-amino acids
QRRAAEGGGVSNPPALRKNGALLISPLPFSPAPRTGPLLGGAVGPRLAHTENVRTTNKISIKLNFVSKKKKKGRPX

SEQ ID NO: 8159 - protein, 136 aa, Homo sapiens
  MISC_FEATURE (3): Xaa equals any of the naturally occurring L-amino acids
  MISC_FEATURE (11): Xaa equals any of the naturally occurring L-amino acids
  MISC_FEATURE (21): Xaa equals any of the naturally occurring L-amino acids
  MISC_FEATURE (42): Xaa equals any of the naturally occurring L-amino acids
  MISC_FEATURE (47): Xaa equals any of the naturally occurring L-amino acids
  MISC_FEATURE (50): Xaa equals any of the naturally occurring L-amino acids
  MISC_FEATURE (59): Xaa equals any of the naturally occurring L-amino acids
  MISC_FEATURE (61): Xaa equals any of the naturally occurring L-amino acids
  MISC_FEATURE (64): Xaa equals any of the naturally occurring L-amino acids
  MISC_FEATURE (65): Xaa equals any of the naturally occurring L-amino acids
  MISC_FEATURE (66): Xaa equals any of the naturally occurring L-amino acids
  MISC_FEATURE (75): Xaa equals any of the naturally occurring L-amino acids
  MISC_FEATURE (94): Xaa equals any of the naturally occurring L-amino acids
  MISC_FEATURE (95): Xaa equals any of the naturally occurring L-amino acids
  MISC_FEATURE (102): Xaa equals any of the naturally occurring L-amino acids
  MISC_FEATURE (105): Xaa equals any of the naturally occurring L-amino acids
  MISC_FEATURE (114): Xaa equals any of the naturally occurring L-amino acids
  MISC_FEATURE (121): Xaa equals any of the naturally occurring L-amino acids
  MISC_FEATURE (127): Xaa equals any of the naturally occurring L-amino acids
TPXGVSPGGEXIFPPPGGGFXGKTPPKPGPGFPPGPLGGFKXLGGPXTQXRPPFGGPKXPXVLXXXPPGPLKTPXPPRETNPLSPPSQPPTKPXXKPPFGKXGKXKGEGGGLGXKPLGGIXGFWAQXGEETSKGSL

SEQ ID NO: 8160 - protein, 149 aa, Homo sapiens
  MISC_FEATURE (2): Xaa equals any of the naturally occurring L-amino acids
  MISC_FEATURE (8): Xaa equals any of the naturally occurring L-amino acids
  MISC_FEATURE (9): Xaa equals any of the naturally occurring L-amino acids
  MISC_FEATURE (18): Xaa equals any of the naturally occurring L-amino acids
  MISC_FEATURE (28): Xaa equals any of the naturally occurring L-amino acids
  MISC_FEATURE (59): Xaa equals any of the naturally occurring L-amino acids
  MISC_FEATURE (61): Xaa equals any of the naturally occurring L-amino acids
  MISC_FEATURE (64): Xaa equals any of the naturally occurring L-amino acids
  MISC_FEATURE (66): Xaa equals any of the naturally occurring L-amino acids
  MISC_FEATURE (68): Xaa equals any of the naturally occurring L-amino acids
  MISC_FEATURE (87): Xaa equals any of the naturally occurring L-amino acids
  MISC_FEATURE (124): Xaa equals any of the naturally occurring L-amino acids
  MISC_FEATURE (129): Xaa equals any of the naturally occurring L-amino acids
  MISC_FEATURE (135): Xaa equals any of the naturally occurring L-amino acids
  MISC_FEATURE (137): Xaa equals any of the naturally occurring L-amino acids
  MISC_FEATURE (141): Xaa equals any of the naturally occurring L-amino acids
  MISC_FEATURE (143): Xaa equals any of the naturally occurring L-amino acids
  MISC_FEATURE (149): Xaa equals any of the naturally occurring L-amino acids
TXPLGPRXXNPGGFPGGXNFPPRGGFPXTPPNRAGFPRERGPNFPPPPFSQPKNQRFKXKXTPXNXTXGLGKTFFLGGGETFSLGKXNSQGPGSPFNPQKGKPPPKGPPQKPFQKGPLTQGPKXQGPTXFPPQKXPXGPWXPXTKVSNX

SEQ ID NO: 8161 - protein, 71 aa, Homo sapiens
  MISC_FEATURE (34): Xaa equals any of the naturally occurring L-amino acids
  MISC_FEATURE (50): Xaa equals any of the naturally occurring L-amino acids
  MISC_FEATURE (62): Xaa equals any of the naturally occurring L-amino acids
  MISC_FEATURE (63): Xaa equals any of the naturally occurring L-amino acids
AGRGLNSGGGSGAGCDTKHHQIGGGMWGKNRSLXEQSHPRQAGAPEWIEXVVPELGSLGRTXXLEMKPGVL

SEQ ID NO: 8162 - protein, 166 aa, Homo sapiens
  MISC_FEATURE (20): Xaa equals any of the naturally occurring L-amino acids
  MISC_FEATURE (24): Xaa equals any of the naturally occurring L-amino acids
  MISC_FEATURE (30): Xaa equals any of the naturally occurring L-amino acids
  MISC_FEATURE (31): Xaa equals any of the naturally occurring L-amino acids
  MISC_FEATURE (52): Xaa equals any of the naturally occurring L-amino acids
  MISC_FEATURE (59): Xaa equals any of the naturally occurring L-amino acids
  MISC_FEATURE (60): Xaa equals any of the naturally occurring L-amino acids
  MISC_FEATURE (61): Xaa equals any of the naturally occurring L-amino acids
  MISC_FEATURE (63): Xaa equals any of the naturally occurring L-amino acids
  MISC_FEATURE (65): Xaa equals any of the naturally occurring L-amino acids
  MISC_FEATURE (67): Xaa equals any of the naturally occurring L-amino acids
  MISC_FEATURE (70): Xaa equals any of the naturally occurring L-amino acids
  MISC_FEATURE (78): Xaa equals any of the naturally occurring L-amino acids
  MISC_FEATURE (87): Xaa equals any of the naturally occurring L-amino acids
  MISC_FEATURE (91): Xaa equals any of the naturally occurring L-amino acids
  MISC_FEATURE (93): Xaa equals any of the naturally occurring L-amino acids
  MISC_FEATURE (95): Xaa equals any of the naturally occurring L-amino acids
  MISC_FEATURE (97): Xaa equals any of the naturally occurring L-amino acids
  MISC_FEATURE (103): Xaa equals any of the naturally occurring L-amino acids
  MISC_FEATURE (104): Xaa equals any of the naturally occurring L-amino acids
  MISC_FEATURE (105): Xaa equals any of the naturally occurring L-amino acids
  MISC_FEATURE (116): Xaa equals any of the naturally occurring L-amino acids
  MISC_FEATURE (124): Xaa equals any of the naturally occurring L-amino acids
  MISC_FEATURE (125): Xaa equals any of the naturally occurring L-amino acids
  MISC_FEATURE (144): Xaa equals any of the naturally occurring L-amino acids
  MISC_FEATURE (154): Xaa equals any of the naturally occurring L-amino acids
IKGGEKKALGVGPPPFGPRXFNPXGFPRGXXFSPPGGVSRKPPQTGPGFPRXKGPLISXXXKXKXPXPNXPLGFLGKXWEKKGLGGXIWPXKXNXKXFFLNFXXXFGFFPLFGFPXNPWALFFXXFSPPPFLGLGLALGFPKKXFFLGGLISQXKKNLKKPNFWEK

SEQ ID NO: 8163 - protein, 33 aa, Homo sapiens
  MISC_FEATURE (8): Xaa equals any of the naturally occurring L-amino acids
  MISC_FEATURE (10): Xaa equals any of the naturally occurring L-amino acids
  MISC_FEATURE (28): Xaa equals any of the naturally occurring L-amino acids
  MISC_FEATURE (33): Xaa equals any of the naturally occurring L-amino acids
HRPKGFLXIXGTFNLNKGGKKGFGVGPXPWAKX

SEQ ID NO: 8164 - protein, 108 aa, Homo sapiens
  MISC_FEATURE (26): Xaa equals any of the naturally occurring L-amino acids
  MISC_FEATURE (45): Xaa equals any of the naturally occurring L-amino acids
  MISC_FEATURE (73): Xaa equals any of the naturally occurring L-amino acids
  MISC_FEATURE (87): Xaa equals any of the naturally occurring L-amino acids
  MISC_FEATURE (89): Xaa equals any of the naturally occurring L-amino acids
  MISC_FEATURE (92): Xaa equals any of the naturally occurring L-amino acids
  MISC_FEATURE (96): Xaa equals any of the naturally occurring L-amino acids
HVACGLLWIYLSPSAHLNLDGVGQMXEHLGYAFFKVIFFKNCHMXFVELWNLLLCLGLWTVNNIFLKICTIAXRVLLSKVLLTLIFXVXAWXPLQXTFSLLNWLPCLF

SEQ ID NO: 8165 - protein, 21 aa, Homo sapiens
  MISC_FEATURE (2): Xaa equals any of the naturally occurring L-amino acids
  MISC_FEATURE (4): Xaa equals any of the naturally occurring L-amino acids
  MISC_FEATURE (17): Xaa equals any of the naturally occurring L-amino acids
  MISC_FEATURE (18): Xaa equals any of the naturally occurring L-amino acids
NXFXDFVVFLIKNKGFXXPFF

SEQ ID NO: 8166 - protein, 35 aa, Homo sapiens
  MISC_FEATURE (5): Xaa equals any of the naturally occurring L-amino acids
  MISC_FEATURE (14): Xaa equals any of the naturally occurring L-amino acids
  MISC_FEATURE (34): Xaa equals any of the naturally occurring L-amino acids
KLRHXHFLPMWSLXTWETIHEVYILYGNIVIAQXQ

SEQ ID NO: 8167 - protein, 22 aa, Homo sapiens
  MISC_FEATURE (14): Xaa equals any of the naturally occurring L-amino acids
  MISC_FEATURE (17): Xaa equals any of the naturally occurring L-amino acids
  MISC_FEATURE (22): Xaa equals any of the naturally occurring L-amino acids
RKLVHYIFPDQAGXEQXVHIYX

SEQ ID NO: 8168 - protein, 48 aa, Homo sapiens
  MISC_FEATURE (8): Xaa equals any of the naturally occurring L-amino acids
  MISC_FEATURE (10): Xaa equals any of the naturally occurring L-amino acids
  MISC_FEATURE (28): Xaa equals any of the naturally occurring L-amino acids
  MISC_FEATURE (30): Xaa equals any of the naturally occurring L-amino acids
  MISC_FEATURE (37): Xaa equals any of the naturally occurring L-amino acids
  MISC_FEATURE (41): Xaa equals any of the naturally occurring L-amino acids
  MISC_FEATURE (48): Xaa equals any of the naturally occurring L-amino acids
PHFPAGIXKXTRVPRMGFCFLKKKKEGXLXGLKFAWXSIRXRILCPSX

SEQ ID NO: 8169 - protein, 32 aa, Homo sapiens
  MISC_FEATURE (2): Xaa equals any of the naturally occurring L-amino acids
  MISC_FEATURE (4): Xaa equals any of the naturally occurring L-amino acids
  MISC_FEATURE (11): Xaa equals any of the naturally occurring L-amino acids
  MISC_FEATURE (17): Xaa equals any of the naturally occurring L-amino acids
  MISC_FEATURE (31): Xaa equals any of the naturally occurring L-amino acids
AXVXTLLRKAXYGLQVXVRNSRVDPRVRSRXA

SEQ ID NO: 8170 - protein, 32 aa, Homo sapiens
  MISC_FEATURE (5): Xaa equals any of the naturally occurring L-amino acids
  MISC_FEATURE (13): Xaa equals any of the naturally occurring L-amino acids
  MISC_FEATURE (14): Xaa equals any of the naturally occurring L-amino acids
  MISC_FEATURE (31): Xaa equals any of the naturally occurring L-amino acids
FFGHXPPFFFLSXXPPFFFKKKKGGAPPPFXG

SEQ ID NO: 8171 - protein, 33 aa, Homo sapiens
  MISC_FEATURE (1): Xaa equals any of the naturally occurring L-amino acids
  MISC_FEATURE (4): Xaa equals any of the naturally occurring L-amino acids
  MISC_FEATURE (5): Xaa equals any of the naturally occurring L-amino acids
  MISC_FEATURE (12): Xaa equals any of the naturally occurring L-amino acids
  MISC_FEATURE (13): Xaa equals any of the naturally occurring L-amino acids
  MISC_FEATURE (31): Xaa equals any of the naturally occurring L-amino acids
XFGXXPPFFLIXXPPFFLKKKGGAPPLFWGXPK

SEQ ID NO: 8172 - protein, 34 aa, Homo sapiens
  MISC_FEATURE (1): Xaa equals any of the naturally occurring L-amino acids
  MISC_FEATURE (11): Xaa equals any of the naturally occurring L-amino acids
  MISC_FEATURE (15): Xaa equals any of the naturally occurring L-amino acids
  MISC_FEATURE (27): Xaa equals any of the naturally occurring L-amino acids
XPPFFFKKKKXIFFXFFFWGAPPPPFXFKKKKKK

SEQ ID NO: 8173 - protein, 62 aa, Homo sapiens
  MISC_FEATURE (4): Xaa equals any of the naturally occurring L-amino acids
  MISC_FEATURE (11): Xaa equals any of the naturally occurring L-amino acids
  MISC_FEATURE (28): Xaa equals any of the naturally occurring L-amino acids
  MISC_FEATURE (38): Xaa equals any of the naturally occurring L-amino acids
  MISC_FEATURE (39): Xaa equals any of the naturally occurring L-amino acids
  MISC_FEATURE (57): Xaa equals any of the naturally occurring L-amino acids
  MISC_FEATURE (62): Xaa equals any of the naturally occurring L-amino acids
QRKXGTAQVPXRNSRVDPRVRQGLGAAXPLLHPDQVPXXLPAFFHLKKHPPSPFDLXEPPGX

SEQ ID NO: 8174 - protein, 53 aa, Homo sapiens
KKCKLSLYFNICYSLMNRNLCRRKQNTFTHLKREYNILCHYNLLFFKLVYILL

SEQ ID NO: 8175 - protein, 72 aa, Homo sapiens
FTLTTSFAFLEAMQYRRDYRVNLLFTNEAKRSLIGSQSCSSYCPPLYSQMQDNCILVLFCGGAEYLLFLSNP

SEQ ID NO: 8176 - protein, 34 aa, Homo sapiens
  MISC_FEATURE (1): Xaa equals any of the naturally occurring L-amino acids
  MISC_FEATURE (7): Xaa equals any of the naturally occurring L-amino acids
  MISC_FEATURE (12): Xaa equals any of the naturally occurring L-amino acids
  MISC_FEATURE (22): Xaa equals any of the naturally occurring L-amino acids
XVWYPCXYRSGXPGSTHASGRXREVVKYVLFGPG

SEQ ID NO: 8177 - protein, 24 aa, Homo sapiens
  MISC_FEATURE (2): Xaa equals any of the naturally occurring L-amino acids
  MISC_FEATURE (3): Xaa equals any of the naturally occurring L-amino acids
  MISC_FEATURE (21): Xaa equals any of the naturally occurring L-amino acids
YXXEDLQKPARGYDGKKQMKXGQA

SEQ ID NO: 8178 - protein, 82 aa, Homo sapiens
  MISC_FEATURE (8): Xaa equals any of the naturally occurring L-amino acids
  MISC_FEATURE (22): Xaa equals any of the naturally occurring L-amino acids
  MISC_FEATURE (25): Xaa equals any of the naturally occurring L-amino acids
  MISC_FEATURE (57): Xaa equals any of the naturally occurring L-amino acids
  MISC_FEATURE (61): Xaa equals any of the naturally occurring L-amino acids
  MISC_FEATURE (62): Xaa equals any of the naturally occurring L-amino acids
  MISC_FEATURE (74): Xaa equals any of the naturally occurring L-amino acids
  MISC_FEATURE (79): Xaa equals any of the naturally occurring L-amino acids
ATAPCCPXPPLLPLSNDLLCPXSQXLLDPEHLEQPAGGFGRLTLVVLISWLHSSQWXEPAXXLSHRELEQKSCXSNSWXWTP

SEQ ID NO: 8179 - protein, 19 aa, Homo sapiens
  MISC_FEATURE (13): Xaa equals any of the naturally occurring L-amino acids
  MISC_FEATURE (17): Xaa equals any of the naturally occurring L-amino acids
KVKFLEDKNSHPXGAFXRI

SEQ ID NO: 8180 - protein, 29 aa, Homo sapiens
  MISC_FEATURE (18): Xaa equals any of the naturally occurring L-amino acids
  MISC_FEATURE (22): Xaa equals any of the naturally occurring L-amino acids
  MISC_FEATURE (24): Xaa equals any of the naturally occurring L-amino acids
  MISC_FEATURE (29): Xaa equals any of the naturally occurring L-amino acids
FCALKHWRERIRIEWETXFAQXFXGIGAX

SEQ ID NO: 8181 - protein, 48 aa, Homo sapiens
  MISC_FEATURE (30): Xaa equals any of the naturally occurring L-amino acids
  MISC_FEATURE (32): Xaa equals any of the naturally occurring L-amino acids
  MISC_FEATURE (36): Xaa equals any of the naturally occurring L-amino acids
DVKIQYKLEEFCIIIIIQNIGRVHNVIKCXSXSNEXTFDKLLLKMLPF

SEQ ID NO: 8182 - protein, 57 aa, Homo sapiens
  MISC_FEATURE (2): Xaa equals any of the naturally occurring L-amino acids
  MISC_FEATURE (6): Xaa equals any of the naturally occurring L-amino acids
  MISC_FEATURE (9): Xaa equals any of the naturally occurring L-amino acids
  MISC_FEATURE (54): Xaa equals any of the naturally occurring L-amino acids
  MISC_FEATURE (55): Xaa equals any of the naturally occurring L-amino acids
EXSSIXLGXYPCRYTVRNSRVDPRVRVVPPNISQASTKALSSSVRVWTGFTGPXXID

SEQ ID NO: 8183 - protein, 22 aa, Homo sapiens
  MISC_FEATURE (18): Xaa equals any of the naturally occurring L-amino acids
  MISC_FEATURE (20): Xaa equals any of the naturally occurring L-amino acids
PGDPCCEAKGGMTRGGKXSXRT

SEQ ID NO: 8184 - protein, 73 aa, Homo sapiens
  MISC_FEATURE (5): Xaa equals any of the naturally occurring L-amino acids
  MISC_FEATURE (15): Xaa equals any of the naturally occurring L-amino acids
  MISC_FEATURE (20): Xaa equals any of the naturally occurring L-amino acids
  MISC_FEATURE (25): Xaa equals any of the naturally occurring L-amino acids
  MISC_FEATURE (27): Xaa equals any of the naturally occurring L-amino acids
  MISC_FEATURE (32): Xaa equals any of the naturally occurring L-amino acids
  MISC_FEATURE (52): Xaa equals any of the naturally occurring L-amino acids
  MISC_FEATURE (60): Xaa equals any of the naturally occurring L-amino acids
  MISC_FEATURE (64): Xaa equals any of the naturally occurring L-amino acids
  MISC_FEATURE (68): Xaa equals any of the naturally occurring L-amino acids
GGCGXLGAFKNSNFXPVNPXGHWAXKXKGILXWLWERFVKNGEPGFKIKPWXFFKPKGKXGFFXLKKXKLLGP

SEQ ID NO: 8185 - protein, 41 aa, Homo sapiens
ASSSRDPRTPAGPGLGVNRASVSASIPFAFGNFSCHLFMNI

SEQ ID NO: 8186 - protein, 17 aa, Homo sapiens
  MISC_FEATURE (1): Xaa equals any of the naturally occurring L-amino acids
  MISC_FEATURE (14): Xaa equals any of the naturally occurring L-amino acids
  MISC_FEATURE (16): Xaa equals any of the naturally occurring L-amino acids
  MISC_FEATURE (17): Xaa equals any of the naturally occurring L-amino acids
XTIWHHFGGFWKIXPXX

SEQ ID NO: 8187 - protein, 71 aa, Homo sapiens
  MISC_FEATURE (57): Xaa equals any of the naturally occurring L-amino acids
TSEVSSCWGQDPCLVSMAGKAVSLPSCGHQPQPPSGGHPGSISPGEKYRSFTFPGYXPSRNVHRESGNLWS

SEQ ID NO: 8188 - protein, 124 aa, Homo sapiens
  MISC_FEATURE (50): Xaa equals any of the naturally occurring L-amino acids
  MISC_FEATURE (65): Xaa equals any of the naturally occurring L-amino acids
  MISC_FEATURE (72): Xaa equals any of the naturally occurring L-amino acids
  MISC_FEATURE (79): Xaa equals any of the naturally occurring L-amino acids
  MISC_FEATURE (86): Xaa equals any of the naturally occurring L-amino acids
  MISC_FEATURE (95): Xaa equals any of the naturally occurring L-amino acids
  MISC_FEATURE (110): Xaa equals any of the naturally occurring L-amino acids
QAPQEDGPWTKAVTPPVKDDNEDVFSARIQKMLGSCVSHATFDDDLPGVXNLSEFKKLPEMIRPXSAISSFXVRSPGPXPQGLLAXLCKRHTDSXSSDMQACSQDKAKIXLGSSIDSVSEMASS

SEQ ID NO: 8189 - protein, 35 aa, Homo sapiens
PNISPLIGIFSKNQLITCVLDLVICAPGRHTFSWF

SEQ ID NO: 8190 - protein, 17 aa, Homo sapiens
  MISC_FEATURE (7): Xaa equals any of the naturally occurring L-amino acids
  MISC_FEATURE (8): Xaa equals any of the naturally occurring L-amino acids
  MISC_FEATURE (14): Xaa equals any of the naturally occurring L-amino acids
  MISC_FEATURE (16): Xaa equals any of the naturally occurring L-amino acids
ETYLIMXXMEITLXLXY

SEQ ID NO: 8191 - protein, 31 aa, Homo sapiens
  MISC_FEATURE (2): Xaa equals any of the naturally occurring L-amino acids
  MISC_FEATURE (7): Xaa equals any of the naturally occurring L-amino acids
  MISC_FEATURE (8): Xaa equals any of the naturally occurring L-amino acids
  MISC_FEATURE (16): Xaa equals any of the naturally occurring L-amino acids
WXSLALXXKCMPWMDXMSYSSYGEYDAWAHI

SEQ ID NO: 8192 - protein, 152 aa, Homo sapiens
  MISC_FEATURE (122): Xaa equals any of the naturally occurring L-amino acids
  MISC_FEATURE (138): Xaa equals any of the naturally occurring L-amino acids
  MISC_FEATURE (150): Xaa equals any of the naturally occurring L-amino acids
  MISC_FEATURE (152): Xaa equals any of the naturally occurring L-amino acids
GRQLPRSRRSRVFADRPTKSSMRSAAKPWNPAIRAGGHGPDRVRPLPAASSGMKSSKSSTSLAFESRLSRLKRASSEDTLNKPGSTAASGVVRLKKTATAGAISELTESRLRSGTGAFTTTXRTGIPAPREFSVTAQXRGLVPRGPSNLXKX

SEQ ID NO: 8193 - protein, 23 aa, Homo sapiens
  MISC_FEATURE (16): Xaa equals any of the naturally occurring L-amino acids
  MISC_FEATURE (20): Xaa equals any of the naturally occurring L-amino acids
AQGLLLPSPPPPVTWXINLXGIC

SEQ ID NO: 8194 - protein, 25 aa, Homo sapiens
  MISC_FEATURE (1): Xaa equals any of the naturally occurring L-amino acids
  MISC_FEATURE (8): Xaa equals any of the naturally occurring L-amino acids
  MISC_FEATURE (13): Xaa equals any of the naturally occurring L-amino acids
  MISC_FEATURE (22): Xaa equals any of the naturally occurring L-amino acids
XVTLVTGXVPRWXRAAAARDAXEEA

SEQ ID NO: 8195 - protein, 50 aa, Homo sapiens
NIRTLCFTKNDERILPHVLLCLEHFYGPKRWRRCCMSAGFFFSYTRARKN

SEQ ID NO: 8196 - protein, 34 aa, Homo sapiens
  MISC_FEATURE (1): Xaa equals any of the naturally occurring L-amino acids
  MISC_FEATURE (26): Xaa equals any of the naturally occurring L-amino acids
  MISC_FEATURE (29): Xaa equals any of the naturally occurring L-amino acids
  MISC_FEATURE (30): Xaa equals any of the naturally occurring L-amino acids
  MISC_FEATURE (33): Xaa equals any of the naturally occurring L-amino acids
  MISC_FEATURE (34): Xaa equals any of the naturally occurring L-amino acids
XYPWTIRLLRESWYACRYRSGIPGSXHAXXYIXX

SEQ ID NO: 8197 - protein, 29 aa, Homo sapiens
  MISC_FEATURE (4): Xaa equals any of the naturally occurring L-amino acids
  MISC_FEATURE (14): Xaa equals any of the naturally occurring L-amino acids
  MISC_FEATURE (16): Xaa equals any of the naturally occurring L-amino acids
  MISC_FEATURE (22): Xaa equals any of the naturally occurring L-amino acids
  MISC_FEATURE (26): Xaa equals any of the naturally occurring L-amino acids
NSHXLFGKLPACRXRXGIPGSXHAFXTDA

SEQ ID NO: 8198 - protein, 55 aa, Homo sapiens
  MISC_FEATURE (33): Xaa equals any of the naturally occurring L-amino acids
  MISC_FEATURE (34): Xaa equals any of the naturally occurring L-amino acids
  MISC_FEATURE (42): Xaa equals any of the naturally occurring L-amino acids
  MISC_FEATURE (43): Xaa equals any of the naturally occurring L-amino acids
  MISC_FEATURE (52): Xaa equals any of the naturally occurring L-amino acids
SVCNLAYVNAVMKLVCSSITVVFKHSFSEIVIXXSVLMCASXXFTCFSPGIXKWR

SEQ ID NO: 8199 - protein, 21 aa, Homo sapiens
  MISC_FEATURE (3): Xaa equals any of the naturally occurring L-amino acids
  MISC_FEATURE (9): Xaa equals any of the naturally occurring L-amino acids
  MISC_FEATURE (10): Xaa equals any of the naturally occurring L-amino acids
ARXITTPVXXVLIKYLVSWGL

SEQ ID NO: 8200 - protein, 35 aa, Homo sapiens
  MISC_FEATURE (1): Xaa equals any of the naturally occurring L-amino acids
  MISC_FEATURE (30): Xaa equals any of the naturally occurring L-amino acids
  MISC_FEATURE (32): Xaa equals any of the naturally occurring L-amino acids
  MISC_FEATURE (34): Xaa equals any of the naturally occurring L-amino acids
  MISC_FEATURE (35): Xaa equals any of the naturally occurring L-amino acids
XRIKSHEFLVKNFAALLLGGGGGQYTTEMXYXKXX

SEQ ID NO: 8201 - protein, 186 aa, Homo sapiens
  MISC_FEATURE (132): Xaa equals any of the naturally occurring L-amino acids
  MISC_FEATURE (133): Xaa equals any of the naturally occurring L-amino acids
  MISC_FEATURE (134): Xaa equals any of the naturally occurring L-amino acids
  MISC_FEATURE (140): Xaa equals any of the naturally occurring L-amino acids
  MISC_FEATURE (168): Xaa equals any of the naturally occurring L-amino acids
  MISC_FEATURE (178): Xaa equals any of the naturally occurring L-amino acids
  MISC_FEATURE (181): Xaa equals any of the naturally occurring L-amino acids
  MISC_FEATURE (182): Xaa equals any of the naturally occurring L-amino acids
PGLGRFPLPSRHFHGPSCPETRLQNPTRPEWHLPSQRGAFAKSTPTAGRQARAWKSKRGPACPAPWSLGFTTRHRQNPGGDTGGKGPNGARAGCCVHPLALAWPWLPASPLAGDTVCRQSPSLGCKAFHTRXXXREDPGXGPGKPCMLGTQVVLGKGQAWKGGQVPKXNVTGLGIFLXALXXKSLK

SEQ ID NO: 8202 - protein, 23 aa, Homo sapiens
  MISC_FEATURE (8): Xaa equals any of the naturally occurring L-amino acids
  MISC_FEATURE (20): Xaa equals any of the naturally occurring L-amino acids
  MISC_FEATURE (23): Xaa equals any of the naturally occurring L-amino acids
EPRLWKMXRRIWGWNDLMEXNTX

SEQ ID NO: 8203 - protein, 29 aa, Homo sapiens
  MISC_FEATURE (10): Xaa equals any of the naturally occurring L-amino acids
  MISC_FEATURE (14): Xaa equals any of the naturally occurring L-amino acids
  MISC_FEATURE (23): Xaa equals any of the naturally occurring L-amino acids
  MISC_FEATURE (24): Xaa equals any of the naturally occurring L-amino acids
  MISC_FEATURE (26): Xaa equals any of the naturally occurring L-amino acids
AQGLLLPSPXPPRXGLIGQKLQXXLXCLQ

SEQ ID NO: 8204 - protein, 76 aa, Homo sapiens
  MISC_FEATURE (49): Xaa equals any of the naturally occurring L-amino acids
  MISC_FEATURE (54): Xaa equals any of the naturally occurring L-amino acids
KIVRAKLTSGTETSAQRSNHQIILNTNLIFFFLNEKHEGNCGVSLLWSXPPVVXGIEENINTLTPFFNLCHLKVLA

SEQ ID NO: 8205 - protein, 49 aa, Homo sapiens
  MISC_FEATURE (13): Xaa equals any of the naturally occurring L-amino acids
  MISC_FEATURE (16): Xaa equals any of the naturally occurring L-amino acids
  MISC_FEATURE (29): Xaa equals any of the naturally occurring L-amino acids
  MISC_FEATURE (34): Xaa equals any of the naturally occurring L-amino acids
  MISC_FEATURE (39): Xaa equals any of the naturally occurring L-amino acids
  MISC_FEATURE (45): Xaa equals any of the naturally occurring L-amino acids
  MISC_FEATURE (49): Xaa equals any of the naturally occurring L-amino acids
KQIFLKRYFCNLXNLXFKSYFALGKSFGXCSCFXWFTCXPSSPKXFGLX

SEQ ID NO: 8206 - protein, 64 aa, Homo sapiens
  MISC_FEATURE (64): Xaa equals any of the naturally occurring L-amino acids
RYLSSELKLPLILIYLSIGHWPFFSKYSIKWEFSGRWVSYEVIGVCLIICNSNMLYFLKSMGKX

SEQ ID NO: 8207 - protein, 62 aa, Homo sapiens
  MISC_FEATURE (1): Xaa equals any of the naturally occurring L-amino acids
  MISC_FEATURE (7): Xaa equals any of the naturally occurring L-amino acids
  MISC_FEATURE (31): Xaa equals any of the naturally occurring L-amino acids
  MISC_FEATURE (41): Xaa equals any of the naturally occurring L-amino acids
  MISC_FEATURE (55): Xaa equals any of the naturally occurring L-amino acids
  MISC_FEATURE (60): Xaa equals any of the naturally occurring L-amino acids
  MISC_FEATURE (62): Xaa equals any of the naturally occurring L-amino acids
XVSFDLXLTSVSFFKPFMARVSTIPIKEFSXHPRIHKCVLXHSVIRHQELPLIHXDFTYXNX

SEQ ID NO: 8208 - protein, 26 aa, Homo sapiens
  MISC_FEATURE (2): Xaa equals any of the naturally occurring L-amino acids
  MISC_FEATURE (16): Xaa equals any of the naturally occurring L-amino acids
  MISC_FEATURE (20): Xaa equals any of the naturally occurring L-amino acids
GXWPACRYRSGISGSXYATXLRPGDN

SEQ ID NO: 8209 - protein, 46 aa, Homo sapiens
  MISC_FEATURE (5): Xaa equals any of the naturally occurring L-amino acids
  MISC_FEATURE (6): Xaa equals any of the naturally occurring L-amino acids
  MISC_FEATURE (9): Xaa equals any of the naturally occurring L-amino acids
  MISC_FEATURE (24): Xaa equals any of the naturally occurring L-amino acids
  MISC_FEATURE (34): Xaa equals any of the naturally occurring L-amino acids
  MISC_FEATURE (40): Xaa equals any of the naturally occurring L-amino acids
  MISC_FEATURE (41): Xaa equals any of the naturally occurring L-amino acids
  MISC_FEATURE (45): Xaa equals any of the naturally occurring L-amino acids
EEREXXRPXGAEQNQGTQQTKERXRRTGPNPTRXAKKPEXXRTRXA

SEQ ID NO: 8210 - protein, 87 aa, Homo sapiens
  MISC_FEATURE (1): Xaa equals any of the naturally occurring L-amino acids
  MISC_FEATURE (10): Xaa equals any of the naturally occurring L-amino acids
  MISC_FEATURE (13): Xaa equals any of the naturally occurring L-amino acids
  MISC_FEATURE (16): Xaa equals any of the naturally occurring L-amino acids
  MISC_FEATURE (28): Xaa equals any of the naturally occurring L-amino acids
  MISC_FEATURE (42): Xaa equals any of the naturally occurring L-amino acids
  MISC_FEATURE (43): Xaa equals any of the naturally occurring L-amino acids
  MISC_FEATURE (45): Xaa equals any of the naturally occurring L-amino acids
  MISC_FEATURE (51): Xaa equals any of the naturally occurring L-amino acids
  MISC_FEATURE (60): Xaa equals any of the naturally occurring L-amino acids
  MISC_FEATURE (61): Xaa equals any of the naturally occurring L-amino acids
  MISC_FEATURE (64): Xaa equals any of the naturally occurring L-amino acids
  MISC_FEATURE (73): Xaa equals any of the naturally occurring L-amino acids
XLKARPARTXRRXRCXRPPRNPRQRRSXWRTRAQGLARRRRXXRXPRTPRXHRTPRIQRXXGPXWPRWIPRTXRPARARWAPWGKGP

SEQ ID NO: 8211 - protein, 88 aa, Homo sapiens
  MISC_FEATURE (5): Xaa equals any of the naturally occurring L-amino acids
  MISC_FEATURE (12): Xaa equals any of the naturally occurring L-amino acids
  MISC_FEATURE (18): Xaa equals any of the naturally occurring L-amino acids
  MISC_FEATURE (25): Xaa equals any of the naturally occurring L-amino acids
  MISC_FEATURE (28): Xaa equals any of the naturally occurring L-amino acids
  MISC_FEATURE (36): Xaa equals any of the naturally occurring L-amino acids
  MISC_FEATURE (39): Xaa equals any of the naturally occurring L-amino acids
  MISC_FEATURE (44): Xaa equals any of the naturally occurring L-amino acids
  MISC_FEATURE (64): Xaa equals any of the naturally occurring L-amino acids
  MISC_FEATURE (66): Xaa equals any of the naturally occurring L-amino acids
  MISC_FEATURE (88): Xaa equals any of the naturally occurring L-amino acids
NWATXVNPRGVXPGGKKXSPRGGVXGKXLQTGPGFXTGXFFGKXKLVKLGGQLKGPFFLNQRGXTXMGAQMGFLKGGPKRVKFPKKGX

SEQ ID NO: 8212 - protein, 21 aa, Homo sapiens
  MISC_FEATURE (2): Xaa equals any of the naturally occurring L-amino acids
VXFLSHDYLTAKHLIGLLLYH

SEQ ID NO: 8213 - protein, 34 aa, Homo sapiens
  MISC_FEATURE (5): Xaa equals any of the naturally occurring L-amino acids
  MISC_FEATURE (15): Xaa equals any of the naturally occurring L-amino acids
  MISC_FEATURE (16): Xaa equals any of the naturally occurring L-amino acids
  MISC_FEATURE (24): Xaa equals any of the naturally occurring L-amino acids
  MISC_FEATURE (26): Xaa equals any of the naturally occurring L-amino acids
GPEFXGRPTRPGFQXXLALIHFQXDXQQAFFPQE

SEQ ID NO: 8214 - protein, 33 aa, Homo sapiens
  MISC_FEATURE (2): Xaa equals any of the naturally occurring L-amino acids
  MISC_FEATURE (7): Xaa equals any of the naturally occurring L-amino acids
  MISC_FEATURE (13): Xaa equals any of the naturally occurring L-amino acids
  MISC_FEATURE (19): Xaa equals any of the naturally occurring L-amino acids
  MISC_FEATURE (27): Xaa equals any of the naturally occurring L-amino acids
  MISC_FEATURE (28): Xaa equals any of the naturally occurring L-amino acids
  MISC_FEATURE (33): Xaa equals any of the naturally occurring L-amino acids
NXEPLAXTPGKSXQTFPEXCPACRYRXXNSRVX

SEQ ID NO: 8215 - protein, 33 aa, Homo sapiens
  MISC_FEATURE (7): Xaa equals any of the naturally occurring L-amino acids
  MISC_FEATURE (14): Xaa equals any of the naturally occurring L-amino acids
  MISC_FEATURE (15): Xaa equals any of the naturally occurring L-amino acids
  MISC_FEATURE (25): Xaa equals any of the naturally occurring L-amino acids
  MISC_FEATURE (29): Xaa equals any of the naturally occurring L-amino acids
  MISC_FEATURE (30): Xaa equals any of the naturally occurring L-amino acids
  MISC_FEATURE (33): Xaa equals any of the naturally occurring L-amino acids
VGEPLRXTPGESPXXFPENSPAGRXTVRXXRVX

SEQ ID NO: 8216 - protein, 68 aa, Homo sapiens
SFRIMETWNWNTVLVAFRTISTRQQDTPTRAVCLRHFLKPKSNKKAQLKNMAASLTFPHYVAFEFLNS

SEQ ID NO: 8217 - protein, 51 aa, Homo sapiens
  MISC_FEATURE (1): Xaa equals any of the naturally occurring L-amino acids
XAASVIHALPGPSTHCCECASPEPVKRQLSILETQIIRALPCTEEKGSTRP

SEQ ID NO: 8218 - protein, 36 aa, Homo sapiens
  MISC_FEATURE (5): Xaa equals any of the naturally occurring L-amino acids
  MISC_FEATURE (17): Xaa equals any of the naturally occurring L-amino acids
  MISC_FEATURE (25): Xaa equals any of the naturally occurring L-amino acids
HWDFXRLYSYIVPIILXVLTNSFIXIRTKWKNRKVG

SEQ ID NO: 8219 - protein, 33 aa, Homo sapiens
  MISC_FEATURE (1): Xaa equals any of the naturally occurring L-amino acids
  MISC_FEATURE (24): Xaa equals any of the naturally occurring L-amino acids
  MISC_FEATURE (25): Xaa equals any of the naturally occurring L-amino acids
  MISC_FEATURE (28): Xaa equals any of the naturally occurring L-amino acids
  MISC_FEATURE (29): Xaa equals any of the naturally occurring L-amino acids
  MISC_FEATURE (32): Xaa equals any of the naturally occurring L-amino acids
XRRHLLTLKEGTLPLQVPVRNSRXXPRXXKNXK

SEQ ID NO: 8220 - protein, 33 aa, Homo sapiens
  MISC_FEATURE (10): Xaa equals any of the naturally occurring L-amino acids
  MISC_FEATURE (11): Xaa equals any of the naturally occurring L-amino acids
  MISC_FEATURE (20): Xaa equals any of the naturally occurring L-amino acids
  MISC_FEATURE (28): Xaa equals any of the naturally occurring L-amino acids
  MISC_FEATURE (31): Xaa equals any of the naturally occurring L-amino acids
LQHARHIVEXXTPCTYRSGXPGSTHAFXTMXEG

SEQ ID NO: 8221 - protein, 33 aa, Homo sapiens
  MISC_FEATURE (3): Xaa equals any of the naturally occurring L-amino acids
  MISC_FEATURE (6): Xaa equals any of the naturally occurring L-amino acids
  MISC_FEATURE (23): Xaa equals any of the naturally occurring L-amino acids
  MISC_FEATURE (25): Xaa equals any of the naturally occurring L-amino acids
  MISC_FEATURE (26): Xaa equals any of the naturally occurring L-amino acids
  MISC_FEATURE (27): Xaa equals any of the naturally occurring L-amino acids
RFXTLXSGTPPGTGPEFPGRPTXPXXXSNQKKK

SEQ ID NO: 8222 - protein, 17 aa, Homo sapiens
  MISC_FEATURE (3): Xaa equals any of the naturally occurring L-amino acids
  MISC_FEATURE (13): Xaa equals any of the naturally occurring L-amino acids
SEXAGPLRAGGEXESLT

SEQ ID NO: 8223 - protein, 28 aa, Homo sapiens
  MISC_FEATURE (11): Xaa equals any of the naturally occurring L-amino acids
  MISC_FEATURE (12): Xaa equals any of the naturally occurring L-amino acids
  MISC_FEATURE (15): Xaa equals any of the naturally occurring L-amino acids
  MISC_FEATURE (18): Xaa equals any of the naturally occurring L-amino acids
  MISC_FEATURE (21): Xaa equals any of the naturally occurring L-amino acids
FLIRNMIRMCXXTTXAFXITXLTYIFFE

SEQ ID NO: 8224 - protein, 22 aa, Homo sapiens
  MISC_FEATURE (14): Xaa equals any of the naturally occurring L-amino acids
  MISC_FEATURE (17): Xaa equals any of the naturally occurring L-amino acids
  MISC_FEATURE (18): Xaa equals any of the naturally occurring L-amino acids
  MISC_FEATURE (19): Xaa equals any of the naturally occurring L-amino acids
LVKPPNQIVDDWFXIGXXXDLL

SEQ ID NO: 8225 - protein, 21 aa, Homo sapiens
  MISC_FEATURE (11): Xaa equals any of the naturally occurring L-amino acids
DQEFGVDVGPXELFINQTLYE

SEQ ID NO: 8226 - protein, 29 aa, Homo sapiens
  MISC_FEATURE (1): Xaa equals any of the naturally occurring L-amino acids
  MISC_FEATURE (5): Xaa equals any of the naturally occurring L-amino acids
  MISC_FEATURE (9): Xaa equals any of the naturally occurring L-amino acids
  MISC_FEATURE (18): Xaa equals any of the naturally occurring L-amino acids
  MISC_FEATURE (21): Xaa equals any of the naturally occurring L-amino acids
XINFXYSWXYCIHESHSXNDXTPGKGNIA

SEQ ID NO: 8227 - protein, 33 aa, Homo sapiens
  MISC_FEATURE (8): Xaa equals any of the naturally occurring L-amino acids
  MISC_FEATURE (21): Xaa equals any of the naturally occurring L-amino acids
  MISC_FEATURE (22): Xaa equals any of the naturally occurring L-amino acids
  MISC_FEATURE (27): Xaa equals any of the naturally occurring L-amino acids
  MISC_FEATURE (30): Xaa equals any of the naturally occurring L-amino acids
ANSTIISXEKNCTGKKYTKLXXKKKKXLGXGTR

SEQ ID NO: 8228 - protein, 132 aa, Homo sapiens
  MISC_FEATURE (78): Xaa equals any of the naturally occurring L-amino acids
  MISC_FEATURE (89): Xaa equals any of the naturally occurring L-amino acids
  MISC_FEATURE (96): Xaa equals any of the naturally occurring L-amino acids
  MISC_FEATURE (115): Xaa equals any of the naturally occurring L-amino acids
  MISC_FEATURE (126): Xaa equals any of the naturally occurring L-amino acids
  MISC_FEATURE (130): Xaa equals any of the naturally occurring L-amino acids
  MISC_FEATURE (131): Xaa equals any of the naturally occurring L-amino acids
  MISC_FEATURE (132): Xaa equals any of the naturally occurring L-amino acids
KGGPGQMCPHILSGEENGQEREADPCSPCCYVRRCGTEEPRCGQGQARRGTKRNESHIGGGCSEHNSLATARSPLRTXRIPGRQQVAPXRAPAPAXCKECKCTFCKKSCCSCCPXGCPSVPMLRLXRGIXXX

SEQ ID NO: 8229 - protein, 43 aa, Homo sapiens
  MISC_FEATURE (4): Xaa equals any of the naturally occurring L-amino acids
  MISC_FEATURE (24): Xaa equals any of the naturally occurring L-amino acids
  MISC_FEATURE (38): Xaa equals any of the naturally occurring L-amino acids
ENIXESVSAMECPMGHLLCTYCLXFPQTVIFLNTINYXDEKKN

SEQ ID NO: 8230 - protein, 52 aa, Homo sapiens
  MISC_FEATURE (7): Xaa equals any of the naturally occurring L-amino acids
  MISC_FEATURE (20): Xaa equals any of the naturally occurring L-amino acids
  MISC_FEATURE (24): Xaa equals any of the naturally occurring L-amino acids
  MISC_FEATURE (27): Xaa equals any of the naturally occurring L-amino acids
  MISC_FEATURE (31): Xaa equals any of the naturally occurring L-amino acids
  MISC_FEATURE (37): Xaa equals any of the naturally occurring L-amino acids
  MISC_FEATURE (50): Xaa equals any of the naturally occurring L-amino acids
PTRVSAXLKTLLGKMGTVPXESHXSDXQYFXIAFDFXVLWNKCVMLCLMXCS

SEQ ID NO: 8231 - protein, 17 aa, Homo sapiens
  MISC_FEATURE (4): Xaa equals any of the naturally occurring L-amino acids
  MISC_FEATURE (5): Xaa equals any of the naturally occurring L-amino acids
  MISC_FEATURE (7): Xaa equals any of the naturally occurring L-amino acids
  MISC_FEATURE (10): Xaa equals any of the naturally occurring L-amino acids
  MISC_FEATURE (11): Xaa equals any of the naturally occurring L-amino acids
DIHXXQXAGXXTYTDPV

SEQ ID NO: 8232 - protein, 49 aa, Homo sapiens
  MISC_FEATURE (36): Xaa equals any of the naturally occurring L-amino acids
IGLYYKTLFSNLYFCSNVNDNRTLLEKRPMILNIVXCQLIVLHQSPYSC

SEQ ID NO: 8233 - protein, 48 aa, Homo sapiens
  MISC_FEATURE (1): Xaa equals any of the naturally occurring L-amino acids
  MISC_FEATURE (2): Xaa equals any of the naturally occurring L-amino acids
  MISC_FEATURE (6): Xaa equals any of the naturally occurring L-amino acids
  MISC_FEATURE (30): Xaa equals any of the naturally occurring L-amino acids
  MISC_FEATURE (43): Xaa equals any of the naturally occurring L-amino acids
  MISC_FEATURE (45): Xaa equals any of the naturally occurring L-amino acids
  MISC_FEATURE (47): Xaa equals any of the naturally occurring L-amino acids
XXWNLXYRLSWYACRYRSGIPGSTHASVKXSYSLIFVISLMGXIXEXG

SEQ ID NO: 8234 - protein, 22 aa, Homo sapiens
  MISC_FEATURE (5): Xaa equals any of the naturally occurring L-amino acids
  MISC_FEATURE (8): Xaa equals any of the naturally occurring L-amino acids
  MISC_FEATURE (9): Xaa equals any of the naturally occurring L-amino acids
  MISC_FEATURE (20): Xaa equals any of the naturally occurring L-amino acids
KEGFXNYXXVRAGLTIECNXYV

SEQ ID NO: 8235 - protein, 111 aa, Homo sapiens
  MISC_FEATURE (90): Xaa equals any of the naturally occurring L-amino acids
  MISC_FEATURE (92): Xaa equals any of the naturally occurring L-amino acids
  MISC_FEATURE (105): Xaa equals any of the naturally occurring L-amino acids
  MISC_FEATURE (110): Xaa equals any of the naturally occurring L-amino acids
LPPYRELLVGHLDLLPFLEQLYCWAPWVQTHLHLDLLGAIVQAFPPDSSLLDSASHADCCPQKRRLHHRPPCPACPFVQAQWSRQQVKEXLXTWLGPLTLAELQXWLGIXG

SEQ ID NO: 8236 - protein, 42 aa, Homo sapiens
  MISC_FEATURE (14): Xaa equals any of the naturally occurring L-amino acids
  MISC_FEATURE (31): Xaa equals any of the naturally occurring L-amino acids
  MISC_FEATURE (37): Xaa equals any of the naturally occurring L-amino acids
  MISC_FEATURE (39): Xaa equals any of the naturally occurring L-amino acids
  MISC_FEATURE (40): Xaa equals any of the naturally occurring L-amino acids
YMPSLTWYALRHTXDCYTSISIENPLLPIRXILIHFXEXXSW

SEQ ID NO: 8237 - protein, 19 aa, Homo sapiens
  MISC_FEATURE (4): Xaa equals any of the naturally occurring L-amino acids
  MISC_FEATURE (13): Xaa equals any of the naturally occurring L-amino acids
  MISC_FEATURE (19): Xaa equals any of the naturally occurring L-amino acids
NGVXKLAVYTIIXIYFMKX

SEQ ID NO: 8238 - protein, 104 aa, Homo sapiens
  MISC_FEATURE (3): Xaa equals any of the naturally occurring L-amino acids
APXDHLPFPEAGSPELGLLVPGLRQLLTQQCISRCSQGFWAPVTAASPVLHRPWAPRGWLSGIEAAGSCTLFMYYPSVGRAERAAGSSWLQPSPTQSSSGGGDP

SEQ ID NO: 8239 - protein, 44 aa, Homo sapiens
  MISC_FEATURE (42): Xaa equals any of the naturally occurring L-amino acids
  MISC_FEATURE (43): Xaa equals any of the naturally occurring L-amino acids
  MISC_FEATURE (44): Xaa equals any of the naturally occurring L-amino acids
SYTRTLQIVFLKVNYNVEFETISMNLYSYIKSHCFTFKKKKXXX

SEQ ID NO: 8240 - protein, 37 aa, Homo sapiens
  MISC_FEATURE (12): Xaa equals any of the naturally occurring L-amino acids
  MISC_FEATURE (14): Xaa equals any of the naturally occurring L-amino acids
  MISC_FEATURE (22): Xaa equals any of the naturally occurring L-amino acids
  MISC_FEATURE (28): Xaa equals any of the naturally occurring L-amino acids
  MISC_FEATURE (35): Xaa equals any of the naturally occurring L-amino acids
VKSVIKHNPTVXIXGPIKNLTXDSKCDXNEIIKVXYL

SEQ ID NO: 8241 - protein, 130 aa, Homo sapiens
  MISC_FEATURE (65): Xaa equals any of the naturally occurring L-amino acids
  MISC_FEATURE (120): Xaa equals any of the naturally occurring L-amino acids
  MISC_FEATURE (125): Xaa equals any of the naturally occurring L-amino acids
  MISC_FEATURE (128): Xaa equals any of the naturally occurring L-amino acids
  MISC_FEATURE (129): Xaa equals any of the naturally occurring L-amino acids
  MISC_FEATURE (130): Xaa equals any of the naturally occurring L-amino acids
ASLSVVHRVLHGVPFLPEIFLGSLFLPRVPSRCRLLLPRVPSLHADFSSRASRLSTPPFPPARPXSPPPFAPARPVSAPTFPPARPVSMSPPCNIWRDFLHFVPFSPSIDFFVLRLTIKXLISKXKKXXX

SEQ ID NO: 8242 - protein, 45 aa, Homo sapiens
  MISC_FEATURE (4): Xaa equals any of the naturally occurring L-amino acids
  MISC_FEATURE (18): Xaa equals any of the naturally occurring L-amino acids
  MISC_FEATURE (22): Xaa equals any of the naturally occurring L-amino acids
  MISC_FEATURE (24): Xaa equals any of the naturally occurring L-amino acids
  MISC_FEATURE (36): Xaa equals any of the naturally occurring L-amino acids
VQYXVHKTELLMVTSTTXIFRXEXDQIFMKYWLCAXISYKSEYAV

SEQ ID NO: 8243 - protein, 50 aa, Homo sapiens
  MISC_FEATURE (13): Xaa equals any of the naturally occurring L-amino acids
  MISC_FEATURE (14): Xaa equals any of the naturally occurring L-amino acids
  MISC_FEATURE (15): Xaa equals any of the naturally occurring L-amino acids
  MISC_FEATURE (27): Xaa equals any of the naturally occurring L-amino acids
  MISC_FEATURE (39): Xaa equals any of the naturally occurring L-amino acids
  MISC_FEATURE (46): Xaa equals any of the naturally occurring L-amino acids
  MISC_FEATURE (49): Xaa equals any of the naturally occurring L-amino acids
IYIRHIGRDALTXXXGCTIAVILTRVXGEVIEISSECTXLYCYMEXSSXP

SEQ ID NO: 8244 - protein, 38 aa, Homo sapiens
  MISC_FEATURE (2): Xaa equals any of the naturally occurring L-amino acids
  MISC_FEATURE (14): Xaa equals any of the naturally occurring L-amino acids
  MISC_FEATURE (23): Xaa equals any of the naturally occurring L-amino acids
  MISC_FEATURE (29): Xaa equals any of the naturally occurring L-amino acids
  MISC_FEATURE (38): Xaa equals any of the naturally occurring L-amino acids
LXKWGENKCCQVLXLSAIMNMSXRASCTXSGNTITCLX

SEQ ID NO: 8245 - protein, 42 aa, Homo sapiens
  MISC_FEATURE (1): Xaa equals any of the naturally occurring L-amino acids
  MISC_FEATURE (7): Xaa equals any of the naturally occurring L-amino acids
  MISC_FEATURE (15): Xaa equals any of the naturally occurring L-amino acids
  MISC_FEATURE (22): Xaa equals any of the naturally occurring L-amino acids
  MISC_FEATURE (27): Xaa equals any of the naturally occurring L-amino acids
  MISC_FEATURE (35): Xaa equals any of the naturally occurring L-amino acids
  MISC_FEATURE (39): Xaa equals any of the naturally occurring L-amino acids
XKLKMLXSGMIRVTXNMKGSTXQTVMXFPSGPFAXFVGXNLT

SEQ ID NO: 8246 - protein, 49 aa, Homo sapiens
  MISC_FEATURE (37): Xaa equals any of the naturally occurring L-amino acids
SFVFMACVKLLQDVCCQKRLDGFKKMGLSLPSYASIXFCTPQLLLNSLF

SEQ ID NO: 8247 - protein, 35 aa, Homo sapiens
  MISC_FEATURE (13): Xaa equals any of the naturally occurring L-amino acids
  MISC_FEATURE (14): Xaa equals any of the naturally occurring L-amino acids
  MISC_FEATURE (22): Xaa equals any of the naturally occurring L-amino acids
  MISC_FEATURE (35): Xaa equals any of the naturally occurring L-amino acids
DYHRPCPHLWWTXXYTGGPVIXLSYKDFNGLKKFX

SEQ ID NO: 8248 - protein, 18 aa, Homo sapiens
  MISC_FEATURE (9): Xaa equals any of the naturally occurring L-amino acids
  MISC_FEATURE (12): Xaa equals any of the naturally occurring L-amino acids
  MISC_FEATURE (14): Xaa equals any of the naturally occurring L-amino acids
  MISC_FEATURE (17): Xaa equals any of the naturally occurring L-amino acids
IKCTPLKKXNKXKXVLXK

SEQ ID NO: 8249 - protein, 50 aa, Homo sapiens
  MISC_FEATURE (4): Xaa equals any of the naturally occurring L-amino acids
  MISC_FEATURE (41): Xaa equals any of the naturally occurring L-amino acids
  MISC_FEATURE (43): Xaa equals any of the naturally occurring L-amino acids
  MISC_FEATURE (47): Xaa equals any of the naturally occurring L-amino acids
  MISC_FEATURE (50): Xaa equals any of the naturally occurring L-amino acids
APPXLAAGPARPAPGVRPPRSRALRARRDVSSLPARGPARXGXRPEXQRX

SEQ ID NO: 8250 - protein, 72 aa, Homo sapiens
  MISC_FEATURE (8): Xaa equals any of the naturally occurring L-amino acids
  MISC_FEATURE (9): Xaa equals any of the naturally occurring L-amino acids
  MISC_FEATURE (16): Xaa equals any of the naturally occurring L-amino acids
  MISC_FEATURE (26): Xaa equals any of the naturally occurring L-amino acids
  MISC_FEATURE (36): Xaa equals any of the naturally occurring L-amino acids
  MISC_FEATURE (60): Xaa equals any of the naturally occurring L-amino acids
  MISC_FEATURE (65): Xaa equals any of the naturally occurring L-amino acids
  MISC_FEATURE (70): Xaa equals any of the naturally occurring L-amino acids
  MISC_FEATURE (71): Xaa equals any of the naturally occurring L-amino acids
VRQLQVNXXRGKRIGXIPGPVETRPXHCIVLYEARXTSFARREQVDASLHMYSKMTAGQXMNKCXSNACXXR

SEQ ID NO: 8251 - protein, 40 aa, Homo sapiens
  MISC_FEATURE (3): Xaa equals any of the naturally occurring L-amino acids
  MISC_FEATURE (13): Xaa equals any of the naturally occurring L-amino acids
  MISC_FEATURE (14): Xaa equals any of the naturally occurring L-amino acids
  MISC_FEATURE (15): Xaa equals any of the naturally occurring L-amino acids
  MISC_FEATURE (38): Xaa equals any of the naturally occurring L-amino acids
TKXDIYYEMVIFXXXIFCLKCIGLKEICMLLINVTSYXNF

SEQ ID NO: 8252 - protein, 22 aa, Homo sapiens
  MISC_FEATURE (6): Xaa equals any of the naturally occurring L-amino acids
  MISC_FEATURE (12): Xaa equals any of the naturally occurring L-amino acids
  MISC_FEATURE (17): Xaa equals any of the naturally occurring L-amino acids
  MISC_FEATURE (19): Xaa equals any of the naturally occurring L-amino acids
  MISC_FEATURE (22): Xaa equals any of the naturally occurring L-amino acids
HDYMKXQYALTXGILKXNXEEX

SEQ ID NO: 8253 - protein, 39 aa, Homo sapiens
  MISC_FEATURE (1): Xaa equals any of the naturally occurring L-amino acids
  MISC_FEATURE (5): Xaa equals any of the naturally occurring L-amino acids
  MISC_FEATURE (15): Xaa equals any of the naturally occurring L-amino acids
  MISC_FEATURE (20): Xaa equals any of the naturally occurring L-amino acids
  MISC_FEATURE (38): Xaa equals any of the naturally occurring L-amino acids
  MISC_FEATURE (39): Xaa equals any of the naturally occurring L-amino acids
XVTLXPCEVVYSQDXAGKRXYSCPVYQMISDSLRNGGXX

SEQ ID NO: 8254 - protein, 24 aa, Homo sapiens
  MISC_FEATURE (3): Xaa equals any of the naturally occurring L-amino acids
  MISC_FEATURE (10): Xaa equals any of the naturally occurring L-amino acids
  MISC_FEATURE (14): Xaa equals any of the naturally occurring L-amino acids
  MISC_FEATURE (19): Xaa equals any of the naturally occurring L-amino acids
LQXHVLMNAXNTYXKQKWXEDFEI

SEQ ID NO: 8255 - protein, 46 aa, Homo sapiens
SQMTCRKYCHIVHFIIFCCRKPLHHRMLICQWYPVPLVYRLLQILF

SEQ ID NO: 8256 - protein, 18 aa, Homo sapiens
  MISC_FEATURE (12): Xaa equals any of the naturally occurring L-amino acids
  MISC_FEATURE (15): Xaa equals any of the naturally occurring L-amino acids
  MISC_FEATURE (16): Xaa equals any of the naturally occurring L-amino acids
  MISC_FEATURE (17): Xaa equals any of the naturally occurring L-amino acids
GLKTFIGWVWYXRFXXXD

SEQ ID NO: 8257 - protein, 16 aa, Homo sapiens
  MISC_FEATURE (5): Xaa equals any of the naturally occurring L-amino acids
  MISC_FEATURE (6): Xaa equals any of the naturally occurring L-amino acids
  MISC_FEATURE (12): Xaa equals any of the naturally occurring L-amino acids
ETIHXXIESITXFKLI

SEQ ID NO: 8258 - protein, 27 aa, Homo sapiens
  MISC_FEATURE (7): Xaa equals any of the naturally occurring L-amino acids
  MISC_FEATURE (11): Xaa equals any of the naturally occurring L-amino acids
  MISC_FEATURE (14): Xaa equals any of the naturally occurring L-amino acids
VLYIERXLSIXNQXFRFYCGSIFNAHI

SEQ ID NO: 8259 - protein, 40 aa, Homo sapiens
LTNFHFKKKAYKVTYMIFPLRSALISWIPLCNIFIIIISK

SEQ ID NO: 8260 - protein, 50 aa, Homo sapiens
  MISC_FEATURE (1): Xaa equals any of the naturally occurring L-amino acids
  MISC_FEATURE (8): Xaa equals any of the naturally occurring L-amino acids
  MISC_FEATURE (10): Xaa equals any of the naturally occurring L-amino acids
  MISC_FEATURE (14): Xaa equals any of the naturally occurring L-amino acids
  MISC_FEATURE (40): Xaa equals any of the naturally occurring L-amino acids
  MISC_FEATURE (44): Xaa equals any of the naturally occurring L-amino acids
  MISC_FEATURE (47): Xaa equals any of the naturally occurring L-amino acids
  MISC_FEATURE (48): Xaa equals any of the naturally occurring L-amino acids
  MISC_FEATURE (49): Xaa equals any of the naturally occurring L-amino acids
XTPMGNTXRXYAKXDRSGIPGSTHASGGGGLYFIPALGLXDESXTQXXXL

SEQ ID NO: 8261 - protein, 51 aa, Homo sapiens
  MISC_FEATURE (8): Xaa equals any of the naturally occurring L-amino acids
  MISC_FEATURE (17): Xaa equals any of the naturally occurring L-amino acids
  MISC_FEATURE (40): Xaa equals any of the naturally occurring L-amino acids
  MISC_FEATURE (43): Xaa equals any of the naturally occurring L-amino acids
  MISC_FEATURE (44): Xaa equals any of the naturally occurring L-amino acids
  MISC_FEATURE (50): Xaa equals any of the naturally occurring L-amino acids
THATMSFXTPAVKRLCXACVLFADLSLTWPWQAVGRHLVXADXXDHSYLXM

SEQ ID NO: 8262 - protein, 32 aa, Homo sapiens
  MISC_FEATURE (3): Xaa equals any of the naturally occurring L-amino acids
  MISC_FEATURE (13): Xaa equals any of the naturally occurring L-amino acids
  MISC_FEATURE (14): Xaa equals any of the naturally occurring L-amino acids
GTXLSPMRAQWNXXSRMQPVHLRPCLEGVYLN

SEQ ID NO: 8263 - protein, 22 aa, Homo sapiens
  MISC_FEATURE (3): Xaa equals any of the naturally occurring L-amino acids
  MISC_FEATURE (9): Xaa equals any of the naturally occurring L-amino acids
  MISC_FEATURE (17): Xaa equals any of the naturally occurring L-amino acids
  MISC_FEATURE (19): Xaa equals any of the naturally occurring L-amino acids
ERXDVTEAXWNPLPSPXTXGTS

SEQ ID NO: 8264 - protein, 47 aa, Homo sapiens
GNSIEMLNTISESYVFFLSSGIPLLYFYKLFSHCHWNRYLRLCRYAI

SEQ ID NO: 8265 - protein, 59 aa, Homo sapiens
AACTPAAYIFLATKLPATGSAEPSSWSVITEQCILALDVSVDKLAEFLYHILSTRSLLF

SEQ ID NO: 8266 - protein, 41 aa, Homo sapiens
  MISC_FEATURE (34): Xaa equals any of the naturally occurring L-amino acids
  MISC_FEATURE (38): Xaa equals any of the naturally occurring L-amino acids
SEKVKTAFTKPGRWGLCEPLCTGSLRDSAWCSRXILAXVGE

SEQ ID NO: 8267 - protein, 19 aa, Homo sapiens
  MISC_FEATURE (17): Xaa equals any of the naturally occurring L-amino acids
  MISC_FEATURE (18): Xaa equals any of the naturally occurring L-amino acids
  MISC_FEATURE (19): Xaa equals any of the naturally occurring L-amino acids
AQGLLLPSPPPPVYLSXXX

SEQ ID NO: 8268 - protein, 27 aa, Homo sapiens
  MISC_FEATURE (4): Xaa equals any of the naturally occurring L-amino acids
  MISC_FEATURE (15): Xaa equals any of the naturally occurring L-amino acids
  MISC_FEATURE (22): Xaa equals any of the naturally occurring L-amino acids
  MISC_FEATURE (27): Xaa equals any of the naturally occurring L-amino acids
GRGXAAGLRGRTTGXGRRQTLXWGFPX

SEQ ID NO: 8269 - protein, 34 aa, Homo sapiens
KTQVCPCVSYKVHLKLVSVCHISLSWYIKCSLHI

SEQ ID NO: 8270 - protein, 44 aa, Homo sapiens
  MISC_FEATURE (6): Xaa equals any of the naturally occurring L-amino acids
  MISC_FEATURE (26): Xaa equals any of the naturally occurring L-amino acids
  MISC_FEATURE (30): Xaa equals any of the naturally occurring L-amino acids
  MISC_FEATURE (35): Xaa equals any of the naturally occurring L-amino acids
LEKPCXTSPGTPPEFPGRPTRPPPLXGFRXACPRXGFPRDSGVW

SEQ ID NO: 8271 - protein, 51 aa, Homo sapiens
  MISC_FEATURE (21): Xaa equals any of the naturally occurring L-amino acids
AGTPAGTGPEFPGRPTRPGGXIGEGPESVLGGGIGEGPECGLGGGIGEGPE

SEQ ID NO: 8272 - protein, 56 aa, Homo sapiens
  MISC_FEATURE (3): Xaa equals any of the naturally occurring L-amino acids
  MISC_FEATURE (4): Xaa equals any of the naturally occurring L-amino acids
  MISC_FEATURE (5): Xaa equals any of the naturally occurring L-amino acids
  MISC_FEATURE (14): Xaa equals any of the naturally occurring L-amino acids
  MISC_FEATURE (18): Xaa equals any of the naturally occurring L-amino acids
  MISC_FEATURE (30): Xaa equals any of the naturally occurring L-amino acids
  MISC_FEATURE (31): Xaa equals any of the naturally occurring L-amino acids
  MISC_FEATURE (33): Xaa equals any of the naturally occurring L-amino acids
  MISC_FEATURE (37): Xaa equals any of the naturally occurring L-amino acids
  MISC_FEATURE (38): Xaa equals any of the naturally occurring L-amino acids
  MISC_FEATURE (40): Xaa equals any of the naturally occurring L-amino acids
  MISC_FEATURE (46): Xaa equals any of the naturally occurring L-amino acids
  MISC_FEATURE (49): Xaa equals any of the naturally occurring L-amino acids
FLXXXLLGFMQRQXCVNXQKTLIWKYENQXXLXIKNXXTXVIILKXILXKITHLIK

SEQ ID NO: 8273 - protein, 18 aa, Homo sapiens
  MISC_FEATURE (2): Xaa equals any of the naturally occurring L-amino acids
  MISC_FEATURE (14): Xaa equals any of the naturally occurring L-amino acids
  MISC_FEATURE (15): Xaa equals any of the naturally occurring L-amino acids
  MISC_FEATURE (17): Xaa equals any of the naturally occurring L-amino acids
AXGLLLPSPPPPVXXLXQ

SEQ ID NO: 8274 - protein, 24 aa, Homo sapiens
  MISC_FEATURE (14): Xaa equals any of the naturally occurring L-amino acids
  MISC_FEATURE (21): Xaa equals any of the naturally occurring L-amino acids
APTGPEFPGRPTRXEVLRCRXRIG

SEQ ID NO: 8275 - protein, 33 aa, Homo sapiens
  MISC_FEATURE (7): Xaa equals any of the naturally occurring L-amino acids
  MISC_FEATURE (17): Xaa equals any of the naturally occurring L-amino acids
  MISC_FEATURE (19): Xaa equals any of the naturally occurring L-amino acids
DTQTHAXCPNSCRTLNXEXDGTLTKSVTEPLRM

SEQ ID NO: 8276 - protein, 34 aa, Homo sapiens
  MISC_FEATURE (18): Xaa equals any of the naturally occurring L-amino acids
  MISC_FEATURE (22): Xaa equals any of the naturally occurring L-amino acids
  MISC_FEATURE (27): Xaa equals any of the naturally occurring L-amino acids
ESMLMKPVTPCRPIGKEXGPRXSVTPXTGALYLS

SEQ ID NO: 8277 - protein, 28 aa, Homo sapiens
  MISC_FEATURE (2): Xaa equals any of the naturally occurring L-amino acids
  MISC_FEATURE (3): Xaa equals any of the naturally occurring L-amino acids
  MISC_FEATURE (23): Xaa equals any of the naturally occurring L-amino acids
KXXTPFLSLPSFLALHPSSFMLXVVLNK

SEQ ID NO: 8278 - protein, 22 aa, Homo sapiens
  MISC_FEATURE (3): Xaa equals any of the naturally occurring L-amino acids
  MISC_FEATURE (21): Xaa equals any of the naturally occurring L-amino acids
APXCPSWRSSCIRPNNDMARXL

SEQ ID NO: 8279 - protein, 42 aa, Homo sapiens
  MISC_FEATURE (11): Xaa equals any of the naturally occurring L-amino acids
  MISC_FEATURE (27): Xaa equals any of the naturally occurring L-amino acids
  MISC_FEATURE (28): Xaa equals any of the naturally occurring L-amino acids
EPPYRVGGRSXAPDGHTGTADANGASXXHPATRACAGSTQGG

SEQ ID NO: 8280 - protein, 48 aa, Homo sapiens
  MISC_FEATURE (9): Xaa equals any of the naturally occurring L-amino acids
  MISC_FEATURE (12): Xaa equals any of the naturally occurring L-amino acids
  MISC_FEATURE (43): Xaa equals any of the naturally occurring L-amino acids
  MISC_FEATURE (46): Xaa equals any of the naturally occurring L-amino acids
SPPIGLRDXPEXPGRPTRPTLLGLRLPGSLSPPEDLPVRDLAXWGXSL

SEQ ID NO: 8281 - protein, 44 aa, Homo sapiens
  MISC_FEATURE (7): Xaa equals any of the naturally occurring L-amino acids
  MISC_FEATURE (11): Xaa equals any of the naturally occurring L-amino acids
  MISC_FEATURE (14): Xaa equals any of the naturally occurring L-amino acids
  MISC_FEATURE (25): Xaa equals any of the naturally occurring L-amino acids
  MISC_FEATURE (35): Xaa equals any of the naturally occurring L-amino acids
  MISC_FEATURE (38): Xaa equals any of the naturally occurring L-amino acids
LRVLKGXGKQXVHXSKNYNILEEYXLPYVNTFPAXFEXVGWGET

SEQ ID NO: 8282 - protein, 36 aa, Homo sapiens
  MISC_FEATURE (1): Xaa equals any of the naturally occurring L-amino acids
  MISC_FEATURE (2): Xaa equals any of the naturally occurring L-amino acids
  MISC_FEATURE (7): Xaa equals any of the naturally occurring L-amino acids
  MISC_FEATURE (8): Xaa equals any of the naturally occurring L-amino acids
  MISC_FEATURE (24): Xaa equals any of the naturally occurring L-amino acids
XXDKIGXXENGHDSTRTWGKYARXEEAKLNENGDAG

SEQ ID NO: 8283 - protein, 47 aa, Homo sapiens
MLFMISEPCSILWLFFFLIYLYFYCYYLKKNFLCLITNSSLKFPTIV

SEQ ID NO: 8284 - protein, 22 aa, Homo sapiens
  MISC_FEATURE (1): Xaa equals any of the naturally occurring L-amino acids
XKKKKKKRKSQKERDKEVSDDE

SEQ ID NO: 8285 - protein, 93 aa, Homo sapiens
  MISC_FEATURE (18): Xaa equals any of the naturally occurring L-amino acids
  MISC_FEATURE (31): Xaa equals any of the naturally occurring L-amino acids
  MISC_FEATURE (39): Xaa equals any of the naturally occurring L-amino acids
  MISC_FEATURE (41): Xaa equals any of the naturally occurring L-amino acids
  MISC_FEATURE (72): Xaa equals any of the naturally occurring L-amino acids
VKLVRLQVPVRNSRVDPXVRSGLPAPGPGNXLLKAEPRXCXSLLPVLPPQKPSSPGGADGARVQTRSLPPQXCLAPLDLCKGGVTAGSEPLAL

SEQ ID NO: 8286 - protein, 37 aa, Homo sapiens
  MISC_FEATURE (1): Xaa equals any of the naturally occurring L-amino acids
  MISC_FEATURE (2): Xaa equals any of the naturally occurring L-amino acids
  MISC_FEATURE (5): Xaa equals any of the naturally occurring L-amino acids
XXGKXRTIGQAGTPAGTGPEFPGRPIRPDFSFSDTRG

SEQ ID NO: 8287 - protein, 27 aa, Homo sapiens
  MISC_FEATURE (2): Xaa equals any of the naturally occurring L-amino acids
  MISC_FEATURE (11): Xaa equals any of the naturally occurring L-amino acids
  MISC_FEATURE (12): Xaa equals any of the naturally occurring L-amino acids
  MISC_FEATURE (20): Xaa equals any of the naturally occurring L-amino acids
  MISC_FEATURE (26): Xaa equals any of the naturally occurring L-amino acids
GXFNLKMSKFXXRLNAVQFXGMNDIXR

SEQ ID NO: 8288 - protein, 29 aa, Homo sapiens
  MISC_FEATURE (14): Xaa equals any of the naturally occurring L-amino acids
  MISC_FEATURE (16): Xaa equals any of the naturally occurring L-amino acids
  MISC_FEATURE (25): Xaa equals any of the naturally occurring L-amino acids
HSYNASKLDTSSFXRXVKCMQNNIXKSID

SEQ ID NO: 8289 - protein, 75 aa, Homo sapiens
HIKEGFCRGELSLNYGRTFQADTNAKALQCEELTTHKDGEQFIVTGAQGAAKELERGKGHTKESLIQRVWTIKGF

SEQ ID NO: 8290 - protein, 52 aa, Homo sapiens
  MISC_FEATURE (13): Xaa equals any of the naturally occurring L-amino acids
  MISC_FEATURE (16): Xaa equals any of the naturally occurring L-amino acids
  MISC_FEATURE (23): Xaa equals any of the naturally occurring L-amino acids
  MISC_FEATURE (25): Xaa equals any of the naturally occurring L-amino acids
  MISC_FEATURE (28): Xaa equals any of the naturally occurring L-amino acids
  MISC_FEATURE (42): Xaa equals any of the naturally occurring L-amino acids
  MISC_FEATURE (48): Xaa equals any of the naturally occurring L-amino acids
SIIAFKNEGCLIXPFXLYSVGLXTXNCXLQLLKGQRVNLTYXTARIWXSELF

SEQ ID NO: 8291 - protein, 52 aa, Homo sapiens
  MISC_FEATURE (47): Xaa equals any of the naturally occurring L-amino acids
  MISC_FEATURE (48): Xaa equals any of the naturally occurring L-amino acids
  MISC_FEATURE (49): Xaa equals any of the naturally occurring L-amino acids
  MISC_FEATURE (52): Xaa equals any of the naturally occurring L-amino acids
SVRFRVNIWVCLTLKPMFFLLLSVTSSLVFNSNRSTVIKLCLSGKKXXXKKX

SEQ ID NO: 8292 - protein, 62 aa, Homo sapiens
KLSFAAINRYGNICRIGLTDFVKQMSCYFAIVRHAVVLKITLIEGKNIGIRLNRYRFSDNDH

SEQ ID NO: 8293 - protein, 52 aa, Homo sapiens
  MISC_FEATURE (2): Xaa equals any of the naturally occurring L-amino acids
  MISC_FEATURE (21): Xaa equals any of the naturally occurring L-amino acids
  MISC_FEATURE (32): Xaa equals any of the naturally occurring L-amino acids
  MISC_FEATURE (44): Xaa equals any of the naturally occurring L-amino acids
  MISC_FEATURE (50): Xaa equals any of the naturally occurring L-amino acids
EXPQVPVRNSRVDPRVRLCPXVEFLAPLPVPXCVPGRRAGLGAXEPPCLXEA

SEQ ID NO: 8294 - protein, 40 aa, Homo sapiens
  MISC_FEATURE (1): Xaa equals any of the naturally occurring L-amino acids
  MISC_FEATURE (3): Xaa equals any of the naturally occurring L-amino acids
  MISC_FEATURE (4): Xaa equals any of the naturally occurring L-amino acids
  MISC_FEATURE (29): Xaa equals any of the naturally occurring L-amino acids
  MISC_FEATURE (34): Xaa equals any of the naturally occurring L-amino acids
  MISC_FEATURE (35): Xaa equals any of the naturally occurring L-amino acids
  MISC_FEATURE (36): Xaa equals any of the naturally occurring L-amino acids
XGXXERPQVPVRNSRVDPRVRIFKFGQPXSARNXXXTDLT

SEQ ID NO: 8295 - protein, 47 aa, Homo sapiens
  MISC_FEATURE (3): Xaa equals any of the naturally occurring L-amino acids
  MISC_FEATURE (11): Xaa equals any of the naturally occurring L-amino acids
  MISC_FEATURE (36): Xaa equals any of the naturally occurring L-amino acids
  MISC_FEATURE (42): Xaa equals any of the naturally occurring L-amino acids
  MISC_FEATURE (43): Xaa equals any of the naturally occurring L-amino acids
  MISC_FEATURE (45): Xaa equals any of the naturally occurring L-amino acids
  MISC_FEATURE (46): Xaa equals any of the naturally occurring L-amino acids
ASXGTLWIGLXGNVSRYRPGIPGSTHASGIKTWNRXKRNPIXXQXXA

SEQ ID NO: 8296 - protein, 44 aa, Homo sapiens
  MISC_FEATURE (2): Xaa equals any of the naturally occurring L-amino acids
  MISC_FEATURE (7): Xaa equals any of the naturally occurring L-amino acids
  MISC_FEATURE (24): Xaa equals any of the naturally occurring L-amino acids
  MISC_FEATURE (25): Xaa equals any of the naturally occurring L-amino acids
  MISC_FEATURE (31): Xaa equals any of the naturally occurring L-amino acids
  MISC_FEATURE (37): Xaa equals any of the naturally occurring L-amino acids
  MISC_FEATURE (41): Xaa equals any of the naturally occurring L-amino acids
TXGKAYXESFPGTAPEFPGRPTRXXSPVSPXAPDPTXLLLXPLL

SEQ ID NO: 8297 - protein, 56 aa, Homo sapiens
  MISC_FEATURE (3): Xaa equals any of the naturally occurring L-amino acids
  MISC_FEATURE (16): Xaa equals any of the naturally occurring L-amino acids
  MISC_FEATURE (24): Xaa equals any of the naturally occurring L-amino acids
  MISC_FEATURE (34): Xaa equals any of the naturally occurring L-amino acids
LLXLGGTAPQVPVRNXRVDPRVRXFIGAIQNSSXPTIQEYRRQFESHSFFLKFSTS

SEQ ID NO: 8298 - protein, 50 aa, Homo sapiens
  MISC_FEATURE (8): Xaa equals any of the naturally occurring L-amino acids
  MISC_FEATURE (15): Xaa equals any of the naturally occurring L-amino acids
  MISC_FEATURE (31): Xaa equals any of the naturally occurring L-amino acids
  MISC_FEATURE (32): Xaa equals any of the naturally occurring L-amino acids
  MISC_FEATURE (42): Xaa equals any of the naturally occurring L-amino acids
  MISC_FEATURE (49): Xaa equals any of the naturally occurring L-amino acids
DTTCILIXSDLFDLXLQGKILNEKRGSEMMXXTRYLDFLWAXTCETSIXT

SEQ ID NO: 8299 - protein, 62 aa, Homo sapiens
GWFCLFLFGSLFFIFFLTYPFPPLSVEDFLFSDSLTQFQTEPSFTDYFGVLVVLNLTQQPFM

SEQ ID NO: 8300 - protein, 63 aa, Homo sapiens
GNFGGGNYGGGGNYNDFGNYSGQQQSNYGPMKGGSFGGRSSGSPYGGGYGSGGGSGGYGSRRF

SEQ ID NO: 8301 - protein, 75 aa, Homo sapiens
  MISC_FEATURE (6): Xaa equals any of the naturally occurring L-amino acids
  MISC_FEATURE (21): Xaa equals any of the naturally occurring L-amino acids
  MISC_FEATURE (38): Xaa equals any of the naturally occurring L-amino acids
  MISC_FEATURE (59): Xaa equals any of the naturally occurring L-amino acids
  MISC_FEATURE (64): Xaa equals any of the naturally occurring L-amino acids
  MISC_FEATURE (75): Xaa equals any of the naturally occurring L-amino acids
DRMCCXVSDPMIQVMSSRTLXTRLHTPPPFQPQHWHHXKAGYPRGHGMIASSSWSLVHXHLHAXEESGWILGALX

SEQ ID NO: 8302 - protein, 21 aa, Homo sapiens
  MISC_FEATURE (14): Xaa equals any of the naturally occurring L-amino acids
  MISC_FEATURE (19): Xaa equals any of the naturally occurring L-amino acids
  MISC_FEATURE (20): Xaa equals any of the naturally occurring L-amino acids
SRSPPSLPPPPREXLLKIXXC

SEQ ID NO: 8303 - protein, 30 aa, Homo sapiens
  MISC_FEATURE (3): Xaa equals any of the naturally occurring L-amino acids
  MISC_FEATURE (14): Xaa equals any of the naturally occurring L-amino acids
  MISC_FEATURE (19): Xaa equals any of the naturally occurring L-amino acids
  MISC_FEATURE (28): Xaa equals any of the naturally occurring L-amino acids
  MISC_FEATURE (30): Xaa equals any of the naturally occurring L-amino acids
EPXELCFVIQGSWXEQPSXSLTQSTKCXLX

SEQ ID NO: 8304 - protein, 33 aa, Homo sapiens
  MISC_FEATURE (2): Xaa equals any of the naturally occurring L-amino acids
  MISC_FEATURE (11): Xaa equals any of the naturally occurring L-amino acids
  MISC_FEATURE (15): Xaa equals any of the naturally occurring L-amino acids
  MISC_FEATURE (23): Xaa equals any of the naturally occurring L-amino acids
  MISC_FEATURE (28): Xaa equals any of the naturally occurring L-amino acids
PXCCCRNSLVXTLMXSRMDGEYXIELCXLPSLF

SEQ ID NO: 8305 - protein, 75 aa, Homo sapiens
  MISC_FEATURE (14): Xaa equals any of the naturally occurring L-amino acids
  MISC_FEATURE (19): Xaa equals any of the naturally occurring L-amino acids
  MISC_FEATURE (39): Xaa equals any of the naturally occurring L-amino acids
  MISC_FEATURE (58): Xaa equals any of the naturally occurring L-amino acids
  MISC_FEATURE (59): Xaa equals any of the naturally occurring L-amino acids
  MISC_FEATURE (60): Xaa equals any of the naturally occurring L-amino acids
  MISC_FEATURE (62): Xaa equals any of the naturally occurring L-amino acids
  MISC_FEATURE (69): Xaa equals any of the naturally occurring L-amino acids
RLRYRAGTGPEFPXRPTRXALPPLLPWNVRDPGAAASPXATGIPGTYEAGSKERVLVXXXRXCLKALGXLCTCHL

SEQ ID NO: 8306 - protein, 33 aa, Homo sapiens
  MISC_FEATURE (9): Xaa equals any of the naturally occurring L-amino acids
  MISC_FEATURE (11): Xaa equals any of the naturally occurring L-amino acids
  MISC_FEATURE (15): Xaa equals any of the naturally occurring L-amino acids
PNSMCTWSXIXKILXALFALVLFSMVTTATTTC

SEQ ID NO: 8307 - protein, 35 aa, Homo sapiens
  MISC_FEATURE (2): Xaa equals any of the naturally occurring L-amino acids
  MISC_FEATURE (18): Xaa equals any of the naturally occurring L-amino acids
  MISC_FEATURE (23): Xaa equals any of the naturally occurring L-amino acids
  MISC_FEATURE (24): Xaa equals any of the naturally occurring L-amino acids
  MISC_FEATURE (32): Xaa equals any of the naturally occurring L-amino acids
  MISC_FEATURE (35): Xaa equals any of the naturally occurring L-amino acids
YXNMSKRSDSVKGKHRYXSAFCXXSWQRDSEXCTX

SEQ ID NO: 8308 - protein, 23 aa, Homo sapiens
  MISC_FEATURE (16): Xaa equals any of the naturally occurring L-amino acids
  MISC_FEATURE (19): Xaa equals any of the naturally occurring L-amino acids
  MISC_FEATURE (21): Xaa equals any of the naturally occurring L-amino acids
HDILKMEAKGYKFYNXLEXFXPC

SEQ ID NO: 8309 - protein, 19 aa, Homo sapiens
  MISC_FEATURE (15): Xaa equals any of the naturally occurring L-amino acids
  MISC_FEATURE (16): Xaa equals any of the naturally occurring L-amino acids
  MISC_FEATURE (18): Xaa equals any of the naturally occurring L-amino acids
AQGLLLPSPPPHVFXXGXL

SEQ ID NO: 8310 - protein, 44 aa, Homo sapiens
  MISC_FEATURE (1): Xaa equals any of the naturally occurring L-amino acids
  MISC_FEATURE (11): Xaa equals any of the naturally occurring L-amino acids
XGTPARTGPEXPGRPTRPILSYLHSVKIEKRTIESIIGQMNKRR

SEQ ID NO: 8311 - protein, 40 aa, Homo sapiens
QENIKYNSLFFVKNIFLTNGKTKSLAINNKMGAILRVVKA

SEQ ID NO: 8312 - protein, 33 aa, Homo sapiens
  MISC_FEATURE (14): Xaa equals any of the naturally occurring L-amino acids
PRYFLCFWDLMLFXKCYCPMLDYCFGFRHLLNR

SEQ ID NO: 8313 - protein, 36 aa, Homo sapiens
  MISC_FEATURE (6): Xaa equals any of the naturally occurring L-amino acids
  MISC_FEATURE (14): Xaa equals any of the naturally occurring L-amino acids
  MISC_FEATURE (19): Xaa equals any of the naturally occurring L-amino acids
  MISC_FEATURE (36): Xaa equals any of the naturally occurring L-amino acids
RVDPRXPAELICKXLRNKXYEGGDGCKTIGPGRKRX

SEQ ID NO: 8314 - protein, 34 aa, Homo sapiens
  MISC_FEATURE (13): Xaa equals any of the naturally occurring L-amino acids
  MISC_FEATURE (20): Xaa equals any of the naturally occurring L-amino acids
  MISC_FEATURE (21): Xaa equals any of the naturally occurring L-amino acids
  MISC_FEATURE (26): Xaa equals any of the naturally occurring L-amino acids
  MISC_FEATURE (34): Xaa equals any of the naturally occurring L-amino acids
GGRLKMSIISQHXNETWCPXXPEDLXLQHAWAFX

SEQ ID NO: 8315 - protein, 23 aa, Homo sapiens
  MISC_FEATURE (4): Xaa equals any of the naturally occurring L-amino acids
  MISC_FEATURE (12): Xaa equals any of the naturally occurring L-amino acids
  MISC_FEATURE (23): Xaa equals any of the naturally occurring L-amino acids
LECXRSTCSEEXHSDSVEEESGX

SEQ ID NO: 8316 - protein, 82 aa, Homo sapiens
  MISC_FEATURE (14): Xaa equals any of the naturally occurring L-amino acids
  MISC_FEATURE (42): Xaa equals any of the naturally occurring L-amino acids
  MISC_FEATURE (54): Xaa equals any of the naturally occurring L-amino acids
ILCDMIFWIYRTLXHVPCASHSSEVIIYTEGFQNSTRSGDIXFIYALYWILYCXLKLLSWPHLLKHKMFYLLLIYDAIKIHQ

SEQ ID NO: 8317 - protein, 23 aa, Homo sapiens
  MISC_FEATURE (3): Xaa equals any of the naturally occurring L-amino acids
  MISC_FEATURE (14): Xaa equals any of the naturally occurring L-amino acids
  MISC_FEATURE (16): Xaa equals any of the naturally occurring L-amino acids
  MISC_FEATURE (21): Xaa equals any of the naturally occurring L-amino acids
LPXVLMHMWTALKXAXGLNHXDL

SEQ ID NO: 8318 - protein, 130 aa, Homo sapiens
  MISC_FEATURE (18): Xaa equals any of the naturally occurring L-amino acids
GTAGTPAGTGPEFPGRLXRPEQTAQRVSAQCRGGGRKTGRVKVLEREGGREGKGLWGATGVRETREGRLSGGGARRPALRRRQAGPSALLDAPARTAPGGCSEASLLEPTQHPARPSFPRNSPQPDQASW

SEQ ID NO: 8319 - protein, 83 aa, Homo sapiens
  MISC_FEATURE (2): Xaa equals any of the naturally occurring L-amino acids
  MISC_FEATURE (18): Xaa equals any of the naturally occurring L-amino acids
  MISC_FEATURE (31): Xaa equals any of the naturally occurring L-amino acids
QXLQIQNVQRKSPPCLPXLPPLPSADWGSVXPQSKSATPEGSELHRGPHGNRFLSCLGGKMATTPAQALPRHNSTGIACEAAA

SEQ ID NO: 8320 - protein, 30 aa, Homo sapiens
  MISC_FEATURE (20): Xaa equals any of the naturally occurring L-amino acids
  MISC_FEATURE (22): Xaa equals any of the naturally occurring L-amino acids
  MISC_FEATURE (26): Xaa equals any of the naturally occurring L-amino acids
RYPVRNSRVDPRVRRLSASXDXRCCXLTHT

SEQ ID NO: 8321 - protein, 82 aa, Homo sapiens
  MISC_FEATURE (5): Xaa equals any of the naturally occurring L-amino acids
  MISC_FEATURE (22): Xaa equals any of the naturally occurring L-amino acids
  MISC_FEATURE (45): Xaa equals any of the naturally occurring L-amino acids
  MISC_FEATURE (61): Xaa equals any of the naturally occurring L-amino acids
  MISC_FEATURE (68): Xaa equals any of the naturally occurring L-amino acids
  MISC_FEATURE (71): Xaa equals any of the naturally occurring L-amino acids
  MISC_FEATURE (77): Xaa equals any of the naturally occurring L-amino acids
AGSPXGTGPEFPGRPTRPKDSXDNSGGDPPAQMHPRDKPFTYRYXQSHIETPTWTQGMLLXRLNDMQXVKXYTVYTXPGKRS

SEQ ID NO: 8322 - protein, 80 aa, Homo sapiens
  MISC_FEATURE (1): Xaa equals any of the naturally occurring L-amino acids
  MISC_FEATURE (2): Xaa equals any of the naturally occurring L-amino acids
  MISC_FEATURE (3): Xaa equals any of the naturally occurring L-amino acids
  MISC_FEATURE (5): Xaa equals any of the naturally occurring L-amino acids
  MISC_FEATURE (53): Xaa equals any of the naturally occurring L-amino acids
  MISC_FEATURE (59): Xaa equals any of the naturally occurring L-amino acids
  MISC_FEATURE (80): Xaa equals any of the naturally occurring L-amino acids
XXXGXTPTIGNAGTPAGTGPEFPGRPTRSLIDSRPISADCDTSATCKFYTLEXIFYTNXVHLRCGLNISTNNIQLQQKMX

SEQ ID NO: 8323 - protein, 51 aa, Homo sapiens
  MISC_FEATURE (9): Xaa equals any of the naturally occurring L-amino acids
SGSSTLFTXKMDIIAFNRRNGYGLSKKNVSMTWCRLKKLHVCEYFIMWNDH

SEQ ID NO: 8324 - protein, 58 aa, Homo sapiens
  MISC_FEATURE (3): Xaa equals any of the naturally occurring L-amino acids
  MISC_FEATURE (4): Xaa equals any of the naturally occurring L-amino acids
  MISC_FEATURE (7): Xaa equals any of the naturally occurring L-amino acids
  MISC_FEATURE (20): Xaa equals any of the naturally occurring L-amino acids
  MISC_FEATURE (34): Xaa equals any of the naturally occurring L-amino acids
  MISC_FEATURE (36): Xaa equals any of the naturally occurring L-amino acids
  MISC_FEATURE (44): Xaa equals any of the naturally occurring L-amino acids
  MISC_FEATURE (48): Xaa equals any of the naturally occurring L-amino acids
  MISC_FEATURE (49): Xaa equals any of the naturally occurring L-amino acids
LEXXHYXVKLVRLQVPVRNXRVDPRVPRPTFSRXEXTMFSRAGXHWAXXVWTFAERKW

SEQ ID NO: 8325 - protein, 57 aa, Homo sapiens
  MISC_FEATURE (5): Xaa equals any of the naturally occurring L-amino acids
  MISC_FEATURE (8): Xaa equals any of the naturally occurring L-amino acids
  MISC_FEATURE (16): Xaa equals any of the naturally occurring L-amino acids
  MISC_FEATURE (21): Xaa equals any of the naturally occurring L-amino acids
  MISC_FEATURE (38): Xaa equals any of the naturally occurring L-amino acids
  MISC_FEATURE (40): Xaa equals any of the naturally occurring L-amino acids
  MISC_FEATURE (46): Xaa equals any of the naturally occurring L-amino acids
  MISC_FEATURE (56): Xaa equals any of the naturally occurring L-amino acids
LLPVXIQXSFETFVSXRILIXPYASNTALNSHGEYVGXTXTRFPAXTTHTPTHLKXK

SEQ ID NO: 8326 - protein, 28 aa, Homo sapiens
  MISC_FEATURE (2): Xaa equals any of the naturally occurring L-amino acids
  MISC_FEATURE (27): Xaa equals any of the naturally occurring L-amino acids
  MISC_FEATURE (28): Xaa equals any of the naturally occurring L-amino acids
IXRRQSSFIRNKNHVGRPTRGNSCLIXX

SEQ ID NO: 8327 - protein, 13 aa, Homo sapiens
  MISC_FEATURE (13): Xaa equals any of the naturally occurring L-amino acids
ILSLINKKKKGAX

SEQ ID NO: 8328 - protein, 34 aa, Homo sapiens
  MISC_FEATURE (4): Xaa equals any of the naturally occurring L-amino acids
  MISC_FEATURE (5): Xaa equals any of the naturally occurring L-amino acids
  MISC_FEATURE (9): Xaa equals any of the naturally occurring L-amino acids
KNTXXKSPXFLGKKTPAPWETLIKGAGKRPWGVN

SEQ ID NO: 8329 - protein, 89 aa, Homo sapiens
  MISC_FEATURE (44): Xaa equals any of the naturally occurring L-amino acids
  MISC_FEATURE (53): Xaa equals any of the naturally occurring L-amino acids
  MISC_FEATURE (54): Xaa equals any of the naturally occurring L-amino acids
  MISC_FEATURE (66): Xaa equals any of the naturally occurring L-amino acids
  MISC_FEATURE (73): Xaa equals any of the naturally occurring L-amino acids
  MISC_FEATURE (79): Xaa equals any of the naturally occurring L-amino acids
  MISC_FEATURE (83): Xaa equals any of the naturally occurring L-amino acids
  MISC_FEATURE (89): Xaa equals any of the naturally occurring L-amino acids
VTKTSGLPCVRATVSKQRLCKGVSRITWNLEDTSWLANCLCLLXGTVLSLHCXXVVTSWGVRFCLXGTYFGRXMDPLPXLCAXKERCFX

SEQ ID NO: 8330 - protein, 36 aa, Homo sapiens
  MISC_FEATURE (17): Xaa equals any of the naturally occurring L-amino acids
  MISC_FEATURE (19): Xaa equals any of the naturally occurring L-amino acids
  MISC_FEATURE (30): Xaa equals any of the naturally occurring L-amino acids
SPRSYTWAKTRILIRFXLXPWKLNGTDPDXFHYDWA

SEQ ID NO: 8331 - protein, 18 aa, Homo sapiens
  MISC_FEATURE (6): Xaa equals any of the naturally occurring L-amino acids
  MISC_FEATURE (17): Xaa equals any of the naturally occurring L-amino acids
VAHDCXSMLSLSFKWGXR

SEQ ID NO: 8332 - protein, 55 aa, Homo sapiens
  MISC_FEATURE (4): Xaa equals any of the naturally occurring L-amino acids
  MISC_FEATURE (18): Xaa equals any of the naturally occurring L-amino acids
  MISC_FEATURE (20): Xaa equals any of the naturally occurring L-amino acids
  MISC_FEATURE (21): Xaa equals any of the naturally occurring L-amino acids
  MISC_FEATURE (25): Xaa equals any of the naturally occurring L-amino acids
  MISC_FEATURE (28): Xaa equals any of the naturally occurring L-amino acids
  MISC_FEATURE (35): Xaa equals any of the naturally occurring L-amino acids
  MISC_FEATURE (38): Xaa equals any of the naturally occurring L-amino acids
  MISC_FEATURE (55): Xaa equals any of the naturally occurring L-amino acids
IDAXFLFSLAVNKSAPNXKXXKRAXALXDPSLRTXCMXRHSSSIGVHLNSIHWAX

SEQ ID NO: 8333 - protein, 17 aa, Homo sapiens
  MISC_FEATURE (7): Xaa equals any of the naturally occurring L-amino acids
  MISC_FEATURE (13): Xaa equals any of the naturally occurring L-amino acids
  MISC_FEATURE (15): Xaa equals any of the naturally occurring L-amino acids
  MISC_FEATURE (17): Xaa equals any of the naturally occurring L-amino acids
GKLEKNXIFKLWXPXTX

SEQ ID NO: 8334 - protein, 72 aa, Homo sapiens
  MISC_FEATURE (33): Xaa equals any of the naturally occurring L-amino acids
  MISC_FEATURE (60): Xaa equals any of the naturally occurring L-amino acids
TNNKQREHWVDFQVLNTSTYGIMVDWVSLYSTXMVRRCFTKFVHQTPVQLSQCGLKMQLXFIFFCKCLGFFV

SEQ ID NO: 8335 - protein, 95 aa, Homo sapiens
VKSNGTGSQLPWPTRAALGLLPTLPDPTLAQAALGLHPPNLRAGWLVPQHIRQASGQGPLTCPIPAGKLQSIRAVVTGSLTSVLCSRPGILHWAL

SEQ ID NO: 8336 - protein, 41 aa, Homo sapiens
  MISC_FEATURE (2): Xaa equals any of the naturally occurring L-amino acids
  MISC_FEATURE (25): Xaa equals any of the naturally occurring L-amino acids
  MISC_FEATURE (34): Xaa equals any of the naturally occurring L-amino acids
  MISC_FEATURE (35): Xaa equals any of the naturally occurring L-amino acids
RXTGPEFPGRPTRPEKKNILRMKYXMGRGYKRHXXKPNLQP

SEQ ID NO: 8337 - protein, 54 aa, Homo sapiens
  MISC_FEATURE (50): Xaa equals any of the naturally occurring L-amino acids
  MISC_FEATURE (52): Xaa equals any of the naturally occurring L-amino acids
GPGWVTCPLWTCFFNWRRSLPMLTFHCRKMGPLVSLYQGQVPLCGGGKAXGXLS

SEQ ID NO: 8338 - protein, 33 aa, Homo sapiens
  MISC_FEATURE (14): Xaa equals any of the naturally occurring L-amino acids
  MISC_FEATURE (18): Xaa equals any of the naturally occurring L-amino acids
  MISC_FEATURE (21): Xaa equals any of the naturally occurring L-amino acids
FTITMALRFDLSWXLVLXMVXRLLPLANNWPHH

SEQ ID NO: 8339 - protein, 47 aa, Homo sapiens
  MISC_FEATURE (9): Xaa equals any of the naturally occurring L-amino acids
  MISC_FEATURE (33): Xaa equals any of the naturally occurring L-amino acids
  MISC_FEATURE (35): Xaa equals any of the naturally occurring L-amino acids
  MISC_FEATURE (40): Xaa equals any of the naturally occurring L-amino acids
MPTHFRESXYACRYRSGIPGFDPRFRQSNPLLXHXDTKAXHGAGKPT

SEQ ID NO: 8340 - protein, 35 aa, Homo sapiens
  MISC_FEATURE (6): Xaa equals any of the naturally occurring L-amino acids
  MISC_FEATURE (34): Xaa equals any of the naturally occurring L-amino acids
THYYLXSWPACRYRSGIPGSTHAFAEMRVLAYRXF

SEQ ID NO: 8341 - protein, 69 aa, Homo sapiens
AVLIDQFLTLDCLLMLYPSPPGLLHPHCGIRHQPHNVPDKAWKGVDPDVEWSDSLDVYIYLCVSPSFQS

SEQ ID NO: 8342 - protein, 52 aa, Homo sapiens
  MISC_FEATURE (2): Xaa equals any of the naturally occurring L-amino acids
  MISC_FEATURE (9): Xaa equals any of the naturally occurring L-amino acids
  MISC_FEATURE (19): Xaa equals any of the naturally occurring L-amino acids
  MISC_FEATURE (27): Xaa equals any of the naturally occurring L-amino acids
  MISC_FEATURE (31): Xaa equals any of the naturally occurring L-amino acids
  MISC_FEATURE (36): Xaa equals any of the naturally occurring L-amino acids
  MISC_FEATURE (37): Xaa equals any of the naturally occurring L-amino acids
  MISC_FEATURE (45): Xaa equals any of the naturally occurring L-amino acids
GXPTGFGWXGPAWWGLLKXPLTQPLFXEKFXPWWGXXGWALPLGXMPPMKKR

SEQ ID NO: 8343 - protein, 103 aa, Homo sapiens
  MISC_FEATURE (58): Xaa equals any of the naturally occurring L-amino acids
  MISC_FEATURE (78): Xaa equals any of the naturally occurring L-amino acids
  MISC_FEATURE (82): Xaa equals any of the naturally occurring L-amino acids
  MISC_FEATURE (84): Xaa equals any of the naturally occurring L-amino acids
  MISC_FEATURE (99): Xaa equals any of the naturally occurring L-amino acids
  MISC_FEATURE (102): Xaa equals any of the naturally occurring L-amino acids
GERGAGGVLGGLLAPGGNRVLLRSTQVFICTSPLLKYHHCVGEKYRWVEQHLGPQFVXRIILTRDKTVVLGDLLIDDXDTVXGXEDDPKLGAHLVYLLXQSXP

SEQ ID NO: 8344 - protein, 56 aa, Homo sapiens
  MISC_FEATURE (22): Xaa equals any of the naturally occurring L-amino acids
  MISC_FEATURE (30): Xaa equals any of the naturally occurring L-amino acids
  MISC_FEATURE (48): Xaa equals any of the naturally occurring L-amino acids
  MISC_FEATURE (50): Xaa equals any of the naturally occurring L-amino acids
  MISC_FEATURE (52): Xaa equals any of the naturally occurring L-amino acids
RWMRVPVCVWGGGEGRAGPRAXVEGAGGRXAVRRGHPGPWGLAGRRVXSXRXRGGG

SEQ ID NO: 8345 - protein, 65 aa, Homo sapiens
  MISC_FEATURE (3): Xaa equals any of the naturally occurring L-amino acids
  MISC_FEATURE (12): Xaa equals any of the naturally occurring L-amino acids
  MISC_FEATURE (25): Xaa equals any of the naturally occurring L-amino acids
  MISC_FEATURE (27): Xaa equals any of the naturally occurring L-amino acids
  MISC_FEATURE (30): Xaa equals any of the naturally occurring L-amino acids
  MISC_FEATURE (37): Xaa equals any of the naturally occurring L-amino acids
  MISC_FEATURE (39): Xaa equals any of the naturally occurring L-amino acids
  MISC_FEATURE (42): Xaa equals any of the naturally occurring L-amino acids
CQXGLGMMTVGXEIHRTDSSPQCTXIXVAXRCCCTWXRXLIXEPSAVTSHLYATEHIMSQEGFGG

SEQ ID NO: 8346 - protein, 54 aa, Homo sapiens
  MISC_FEATURE (36): Xaa equals any of the naturally occurring L-amino acids
  MISC_FEATURE (49): Xaa equals any of the naturally occurring L-amino acids
LGDYKVLNVLVTISQYTSRKRFRFLFLKYFHFFLEXYIRLFTRTCLAYXRGYIL

SEQ ID NO: 8347 - protein, 61 aa, Homo sapiens
  MISC_FEATURE (23): Xaa equals any of the naturally occurring L-amino acids
  MISC_FEATURE (58): Xaa equals any of the naturally occurring L-amino acids
  MISC_FEATURE (59): Xaa equals any of the naturally occurring L-amino acids
  MISC_FEATURE (61): Xaa equals any of the naturally occurring L-amino acids
SAACTPAAYIFLATKLPATGSAXPMSWSVITEQLHSWLWMLSADNLAEDLYHILSTRXXLX

SEQ ID NO: 8348 - protein, 74 aa, Homo sapiens
  MISC_FEATURE (21): Xaa equals any of the naturally occurring L-amino acids
  MISC_FEATURE (27): Xaa equals any of the naturally occurring L-amino acids
  MISC_FEATURE (33): Xaa equals any of the naturally occurring L-amino acids
  MISC_FEATURE (54): Xaa equals any of the naturally occurring L-amino acids
  MISC_FEATURE (58): Xaa equals any of the naturally occurring L-amino acids
  MISC_FEATURE (59): Xaa equals any of the naturally occurring L-amino acids
  MISC_FEATURE (63): Xaa equals any of the naturally occurring L-amino acids
  MISC_FEATURE (67): Xaa equals any of the naturally occurring L-amino acids
YLPSQTLCSFHFRVLAACGLXQVACRXAKGSNXHTMLSRMVLGLEAQLVGEIPXEPTXXNVVXLRLXLRERFWG

SEQ ID NO: 8349 - protein, 34 aa, Homo sapiens
  MISC_FEATURE (18): Xaa equals any of the naturally occurring L-amino acids
  MISC_FEATURE (22): Xaa equals any of the naturally occurring L-amino acids
  MISC_FEATURE (28): Xaa equals any of the naturally occurring L-amino acids
GKKGPWGLSVSLAKGVNXRGSXGENISXRGGSVS

SEQ ID NO: 8350 - protein, 49 aa, Homo sapiens
  MISC_FEATURE (29): Xaa equals any of the naturally occurring L-amino acids
  MISC_FEATURE (33): Xaa equals any of the naturally occurring L-amino acids
  MISC_FEATURE (42): Xaa equals any of the naturally occurring L-amino acids
  MISC_FEATURE (48): Xaa equals any of the naturally occurring L-amino acids
  MISC_FEATURE (49): Xaa equals any of the naturally occurring L-amino acids
WQHTGTLIRKTWARHRQKSLFIHPCQRVXFRRXEMMDYQHLXPTTQIXX

SEQ ID NO: 8351 - protein, 24 aa, Homo sapiens
  MISC_FEATURE (7): Xaa equals any of the naturally occurring L-amino acids
  MISC_FEATURE (21): Xaa equals any of the naturally occurring L-amino acids
  MISC_FEATURE (24): Xaa equals any of the naturally occurring L-amino acids
FWEKAPXFLGGKKSPGTCKRXFFX

SEQ ID NO: 8352 - protein, 33 aa, Homo sapiens
  MISC_FEATURE (12): Xaa equals any of the naturally occurring L-amino acids
  MISC_FEATURE (13): Xaa equals any of the naturally occurring L-amino acids
  MISC_FEATURE (22): Xaa equals any of the naturally occurring L-amino acids
  MISC_FEATURE (27): Xaa equals any of the naturally occurring L-amino acids
  MISC_FEATURE (31): Xaa equals any of the naturally occurring L-amino acids
RSLYQFVSINVXXYQHFAKTVXGTRFXSESXLH

SEQ ID NO: 8353 - protein, 23 aa, Homo sapiens
  MISC_FEATURE (17): Xaa equals any of the naturally occurring L-amino acids
  MISC_FEATURE (18): Xaa equals any of the naturally occurring L-amino acids
  MISC_FEATURE (22): Xaa equals any of the naturally occurring L-amino acids
AQGLLLPSPPPPVISFXXFFKXR

SEQ ID NO: 8354 - protein, 17 aa, Homo sapiens
  MISC_FEATURE (4): Xaa equals any of the naturally occurring L-amino acids
  MISC_FEATURE (10): Xaa equals any of the naturally occurring L-amino acids
RFLXPTVVGXGSRVAGC

SEQ ID NO: 8355 - protein, 53 aa, Homo sapiens
  MISC_FEATURE (2): Xaa equals any of the naturally occurring L-amino acids
  MISC_FEATURE (3): Xaa equals any of the naturally occurring L-amino acids
  MISC_FEATURE (4): Xaa equals any of the naturally occurring L-amino acids
  MISC_FEATURE (12): Xaa equals any of the naturally occurring L-amino acids
  MISC_FEATURE (51): Xaa equals any of the naturally occurring L-amino acids
  MISC_FEATURE (53): Xaa equals any of the naturally occurring L-amino acids
NXXXWGHEIYGXINYRTQYSKNKVLLRFLPDSPWGTHRCILPASHPSRENXLX

SEQ ID NO: 8356 - protein, 59 aa, Homo sapiens
  MISC_FEATURE (38): Xaa equals any of the naturally occurring L-amino acids
  MISC_FEATURE (51): Xaa equals any of the naturally occurring L-amino acids
  MISC_FEATURE (53): Xaa equals any of the naturally occurring L-amino acids
  MISC_FEATURE (58): Xaa equals any of the naturally occurring L-amino acids
  MISC_FEATURE (59): Xaa equals any of the naturally occurring L-amino acids
ILHSFTINGLDFKTQKPKNKMKLDNFRFCVVCTSMCTXCKLSFIGLLNRIXKXKFNSXX

SEQ ID NO: 8357 - protein, 38 aa, Homo sapiens
  MISC_FEATURE (2): Xaa equals any of the naturally occurring L-amino acids
  MISC_FEATURE (24): Xaa equals any of the naturally occurring L-amino acids
  MISC_FEATURE (25): Xaa equals any of the naturally occurring L-amino acids
  MISC_FEATURE (32): Xaa equals any of the naturally occurring L-amino acids
  MISC_FEATURE (33): Xaa equals any of the naturally occurring L-amino acids
  MISC_FEATURE (37): Xaa equals any of the naturally occurring L-amino acids
RXQKGHGINGHPTRDKHRDTQGKXXTQRDTEXXTGRXT

SEQ ID NO: 8358 - protein, 13 aa, Homo sapiens
  MISC_FEATURE (9): Xaa equals any of the naturally occurring L-amino acids
DGSNLDLEXSYIK

SEQ ID NO: 8359 - protein, 29 aa, Homo sapiens
  MISC_FEATURE (19): Xaa equals any of the naturally occurring L-amino acids
  MISC_FEATURE (26): Xaa equals any of the naturally occurring L-amino acids
  MISC_FEATURE (27): Xaa equals any of the naturally occurring L-amino acids
  MISC_FEATURE (28): Xaa equals any of the naturally occurring L-amino acids
LFLSGGQGLGSGLSLSGLXDPRVESXXXA

SEQ ID NO: 8360 - protein, 32 aa, Homo sapiens
  MISC_FEATURE (9): Xaa equals any of the naturally occurring L-amino acids
  MISC_FEATURE (14): Xaa equals any of the naturally occurring L-amino acids
  MISC_FEATURE (22): Xaa equals any of the naturally occurring L-amino acids
  MISC_FEATURE (24): Xaa equals any of the naturally occurring L-amino acids
  MISC_FEATURE (26): Xaa equals any of the naturally occurring L-amino acids
RYRSGIPGXTHASXKASSCCGXEXVXLMTNGE

SEQ ID NO: 8361 - protein, 17 aa, Homo sapiens
  MISC_FEATURE (6): Xaa equals any of the naturally occurring L-amino acids
  MISC_FEATURE (7): Xaa equals any of the naturally occurring L-amino acids
  MISC_FEATURE (10): Xaa equals any of the naturally occurring L-amino acids
  MISC_FEATURE (13): Xaa equals any of the naturally occurring L-amino acids
  MISC_FEATURE (14): Xaa equals any of the naturally occurring L-amino acids
GVAFTXXADXVEXXVKS

SEQ ID NO: 8362 - protein, 79 aa, Homo sapiens
  MISC_FEATURE (1): Xaa equals any of the naturally occurring L-amino acids
  MISC_FEATURE (2): Xaa equals any of the naturally occurring L-amino acids
  MISC_FEATURE (40): Xaa equals any of the naturally occurring L-amino acids
  MISC_FEATURE (54): Xaa equals any of the naturally occurring L-amino acids
  MISC_FEATURE (55): Xaa equals any of the naturally occurring L-amino acids
  MISC_FEATURE (64): Xaa equals any of the naturally occurring L-amino acids
  MISC_FEATURE (70): Xaa equals any of the naturally occurring L-amino acids
  MISC_FEATURE (72): Xaa equals any of the naturally occurring L-amino acids
XXYNRESWYACRYRSGIPGSTHASAPPMQATSPPSSLNVXPSPPSKGNIPYPLXXEIVLSNSPXCWLPPXKXWGRHPAW

SEQ ID NO: 8363 - protein, 43 aa, Homo sapiens
  MISC_FEATURE (13): Xaa equals any of the naturally occurring L-amino acids
  MISC_FEATURE (16): Xaa equals any of the naturally occurring L-amino acids
  MISC_FEATURE (18): Xaa equals any of the naturally occurring L-amino acids
  MISC_FEATURE (19): Xaa equals any of the naturally occurring L-amino acids
  MISC_FEATURE (41): Xaa equals any of the naturally occurring L-amino acids
SGGSTFKSSFKHXIFXVXXFNLIDRRELAPLQELIEKLTSXDR

SEQ ID NO: 8364 - protein, 74 aa, Homo sapiens
  MISC_FEATURE (2): Xaa equals any of the naturally occurring L-amino acids
  MISC_FEATURE (4): Xaa equals any of the naturally occurring L-amino acids
  MISC_FEATURE (30): Xaa equals any of the naturally occurring L-amino acids
  MISC_FEATURE (46): Xaa equals any of the naturally occurring L-amino acids
  MISC_FEATURE (56): Xaa equals any of the naturally occurring L-amino acids
  MISC_FEATURE (58): Xaa equals any of the naturally occurring L-amino acids
  MISC_FEATURE (66): Xaa equals any of the naturally occurring L-amino acids
VXQXSQDLSLQEAETEQSDTLDNKEAVILXEKPPSGRQTPQPLRHXSYILAVNDQXTXSDTTCWLXNDARQRST

SEQ ID NO: 8365 - protein, 50 aa, Homo sapiens
  MISC_FEATURE (2): Xaa equals any of the naturally occurring L-amino acids
  MISC_FEATURE (4): Xaa equals any of the naturally occurring L-amino acids
  MISC_FEATURE (5): Xaa equals any of the naturally occurring L-amino acids
  MISC_FEATURE (7): Xaa equals any of the naturally occurring L-amino acids
  MISC_FEATURE (15): Xaa equals any of the naturally occurring L-amino acids
  MISC_FEATURE (38): Xaa equals any of the naturally occurring L-amino acids
  MISC_FEATURE (40): Xaa equals any of the naturally occurring L-amino acids
  MISC_FEATURE (49): Xaa equals any of the naturally occurring L-amino acids
RXKXXRXQVPVRNSXVDPRVRRSRADAGLLRAGPRASXPXRPGSLHLCXS

SEQ ID NO: 8366 - protein, 30 aa, Homo sapiens
  MISC_FEATURE (26): Xaa equals any of the naturally occurring L-amino acids
  MISC_FEATURE (29): Xaa equals any of the naturally occurring L-amino acids
  MISC_FEATURE (30): Xaa equals any of the naturally occurring L-amino acids
MLDIIIHVSGIEIETENKCFKVFYTXKKXX

SEQ ID NO: 8367 - protein, 32 aa, Homo sapiens
  MISC_FEATURE (16): Xaa equals any of the naturally occurring L-amino acids
  MISC_FEATURE (20): Xaa equals any of the naturally occurring L-amino acids
  MISC_FEATURE (24): Xaa equals any of the naturally occurring L-amino acids
  MISC_FEATURE (29): Xaa equals any of the naturally occurring L-amino acids
  MISC_FEATURE (31): Xaa equals any of the naturally occurring L-amino acids
VPVRNSRVDPRVRDIXGAIXQPAXTISQXDXI

SEQ ID NO: 8368 - protein, 45 aa, Homo sapiens
  MISC_FEATURE (2): Xaa equals any of the naturally occurring L-amino acids
  MISC_FEATURE (7): Xaa equals any of the naturally occurring L-amino acids
  MISC_FEATURE (19): Xaa equals any of the naturally occurring L-amino acids
  MISC_FEATURE (23): Xaa equals any of the naturally occurring L-amino acids
  MISC_FEATURE (24): Xaa equals any of the naturally occurring L-amino acids
  MISC_FEATURE (44): Xaa equals any of the naturally occurring L-amino acids
DXNEKNXAFLQRLNLRSRXSLSXXNLGTTLGCNLQKTFGFGGWXT

SEQ ID NO: 8369 - protein, 92 aa, Homo sapiens
  MISC_FEATURE (2): Xaa equals any of the naturally occurring L-amino acids
  MISC_FEATURE (6): Xaa equals any of the naturally occurring L-amino acids
  MISC_FEATURE (10): Xaa equals any of the naturally occurring L-amino acids
  MISC_FEATURE (13): Xaa equals any of the naturally occurring L-amino acids
  MISC_FEATURE (45): Xaa equals any of the naturally occurring L-amino acids
  MISC_FEATURE (48): Xaa equals any of the naturally occurring L-amino acids
  MISC_FEATURE (52): Xaa equals any of the naturally occurring L-amino acids
  MISC_FEATURE (67): Xaa equals any of the naturally occurring L-amino acids
  MISC_FEATURE (70): Xaa equals any of the naturally occurring L-amino acids
  MISC_FEATURE (73): Xaa equals any of the naturally occurring L-amino acids
  MISC_FEATURE (75): Xaa equals any of the naturally occurring L-amino acids
  MISC_FEATURE (80): Xaa equals any of the naturally occurring L-amino acids
GXCTGXSPCXYSXRNSRVDPRVRRSEILFWIRQMCLLACPEGEKXACXQAFXRKLVGSWPKDEDYCXRPXINXIXGKDYXTCGLKMKGTFLQ

SEQ ID NO: 8370 - protein, 63 aa, Homo sapiens
  MISC_FEATURE (33): Xaa equals any of the naturally occurring L-amino acids
  MISC_FEATURE (41): Xaa equals any of the naturally occurring L-amino acids
  MISC_FEATURE (59): Xaa equals any of the naturally occurring L-amino acids
  MISC_FEATURE (61): Xaa equals any of the naturally occurring L-amino acids
YGIDVTLYLQNILFLSLPQEKKQFYFYGTRLDXTFLINYMXVYSTFKIAMEKFNYFQQXLXLS

SEQ ID NO: 8371 - protein, 92 aa, Homo sapiens
  MISC_FEATURE (1): Xaa equals any of the naturally occurring L-amino acids
  MISC_FEATURE (6): Xaa equals any of the naturally occurring L-amino acids
  MISC_FEATURE (88): Xaa equals any of the naturally occurring L-amino acids
  MISC_FEATURE (89): Xaa equals any of the naturally occurring L-amino acids
  MISC_FEATURE (91): Xaa equals any of the naturally occurring L-amino acids
XLARLXVPVRNSRVDPRVRPRSSSGSPLVTRVPRASPAPEGPASGHGALPGGAGLRAGHERGAAARPRAHGGRSAARPGTLGQPRGGXXEXG

SEQ ID NO: 8372 - protein, 27 aa, Homo sapiens
  MISC_FEATURE (1): Xaa equals any of the naturally occurring L-amino acids
  MISC_FEATURE (5): Xaa equals any of the naturally occurring L-amino acids
  MISC_FEATURE (20): Xaa equals any of the naturally occurring L-amino acids
XSSYXSIHINISVLTCKKMXRYHTYIL

SEQ ID NO: 8373 - protein, 48 aa, Homo sapiens
  MISC_FEATURE (5): Xaa equals any of the naturally occurring L-amino acids
  MISC_FEATURE (8): Xaa equals any of the naturally occurring L-amino acids
  MISC_FEATURE (31): Xaa equals any of the naturally occurring L-amino acids
  MISC_FEATURE (42): Xaa equals any of the naturally occurring L-amino acids
  MISC_FEATURE (44): Xaa equals any of the naturally occurring L-amino acids
  MISC_FEATURE (47): Xaa equals any of the naturally occurring L-amino acids
CREYXEEXKRDCWRTVTRVSSITSLSYIIHXSISLAHGSRPXCXVCXD

SEQ ID NO: 8374 - protein, 32 aa, Homo sapiens
  MISC_FEATURE (6): Xaa equals any of the naturally occurring L-amino acids
  MISC_FEATURE (23): Xaa equals any of the naturally occurring L-amino acids
  MISC_FEATURE (25): Xaa equals any of the naturally occurring L-amino acids
  MISC_FEATURE (27): Xaa equals any of the naturally occurring L-amino acids
SLTGMXSASSLELNAAHAEKNNXYXFXWVLAL

SEQ ID NO: 8375 - protein, 40 aa, Homo sapiens
  MISC_FEATURE (33): Xaa equals any of the naturally occurring L-amino acids
  MISC_FEATURE (37): Xaa equals any of the naturally occurring L-amino acids
MSDNLEMIAYLKRYRKDHLNIWKNEIRVKLNKXLLTXLKK

SEQ ID NO: 8376 - protein, 82 aa, Homo sapiens
  MISC_FEATURE (13): Xaa equals any of the naturally occurring L-amino acids
SSLKTFTIFERWXPAGTGPEFPGRPTRPMVSFFLQRNLIFHFNLSLAYSSQWGLLKNSFPSYSPFELKVQKKKILLKCCDQI

SEQ ID NO: 8377 - protein, 17 aa, Homo sapiens
  MISC_FEATURE (15): Xaa equals any of the naturally occurring L-amino acids
  MISC_FEATURE (16): Xaa equals any of the naturally occurring L-amino acids
  MISC_FEATURE (17): Xaa equals any of the naturally occurring L-amino acids
AQGLLLPSPPPPVIXXX

SEQ ID NO: 8378 - protein, 88 aa, Homo sapiens
  MISC_FEATURE (1): Xaa equals any of the naturally occurring L-amino acids
XSPGPILIRRGVCQAAQVSLPPPGHPHQVASHRLQERKTRWSRFHSALAAASRFICTSLSMRACELPGRAEFKKMKYCMRRASLLKRV

SEQ ID NO: 8379 - protein, 59 aa, Homo sapiens
  MISC_FEATURE (12): Xaa equals any of the naturally occurring L-amino acids
  MISC_FEATURE (31): Xaa equals any of the naturally occurring L-amino acids
  MISC_FEATURE (59): Xaa equals any of the naturally occurring L-amino acids
LVHRESSYYIEXWYPCRYRSGIPGSTHASEXLQSPELIPIEGAMAFKIKMKGELKQLKX

SEQ ID NO: 8380 - protein, 32 aa, Homo sapiens
  MISC_FEATURE (3): Xaa equals any of the naturally occurring L-amino acids
  MISC_FEATURE (9): Xaa equals any of the naturally occurring L-amino acids
  MISC_FEATURE (10): Xaa equals any of the naturally occurring L-amino acids
  MISC_FEATURE (23): Xaa equals any of the naturally occurring L-amino acids
EGXWKPFRXXRPGTPAGTRSGIXGSTHAFANP

SEQ ID NO: 8381 - protein, 48 aa, Homo sapiens
  MISC_FEATURE (2): Xaa equals any of the naturally occurring L-amino acids
  MISC_FEATURE (6): Xaa equals any of the naturally occurring L-amino acids
  MISC_FEATURE (38): Xaa equals any of the naturally occurring L-amino acids
  MISC_FEATURE (40): Xaa equals any of the naturally occurring L-amino acids
  MISC_FEATURE (42): Xaa equals any of the naturally occurring L-amino acids
RXKWNXGTTLKAGTPAGTGPEFPGRPTRPVAWGKIEWXQXGXRSKALA

SEQ ID NO: 8382 - protein, 40 aa, Homo sapiens
LEYLLFDCFLLRNIRLGAMMNDLVKSCVFLRKFLNINFLN

SEQ ID NO: 8383 - protein, 54 aa, Homo sapiens
  MISC_FEATURE (22): Xaa equals any of the naturally occurring L-amino acids
  MISC_FEATURE (29): Xaa equals any of the naturally occurring L-amino acids
  MISC_FEATURE (35): Xaa equals any of the naturally occurring L-amino acids
  MISC_FEATURE (50): Xaa equals any of the naturally occurring L-amino acids
KIFNKYFHRTELTTGACNKNFXTGAGKTXLLGGNXPIWKGLPFMGPPWKXWEVG

SEQ ID NO: 8384 - protein, 74 aa, Homo sapiens
  MISC_FEATURE (57): Xaa equals any of the naturally occurring L-amino acids
  MISC_FEATURE (61): Xaa equals any of the naturally occurring L-amino acids
  MISC_FEATURE (63): Xaa equals any of the naturally occurring L-amino acids
  MISC_FEATURE (68): Xaa equals any of the naturally occurring L-amino acids
  MISC_FEATURE (71): Xaa equals any of the naturally occurring L-amino acids
ATISMSPRNGPNPESSPLDFMDHGADHLYLVLELKNCSLCENEPLDQSLLKQTNMKXKKKXLXKKKKXKKXKKK

SEQ ID NO: 8385 - protein, 78 aa, Homo sapiens
  MISC_FEATURE (4): Xaa equals any of the naturally occurring L-amino acids
  MISC_FEATURE (5): Xaa equals any of the naturally occurring L-amino acids
  MISC_FEATURE (41): Xaa equals any of the naturally occurring L-amino acids
  MISC_FEATURE (61): Xaa equals any of the naturally occurring L-amino acids
  MISC_FEATURE (70): Xaa equals any of the naturally occurring L-amino acids
  MISC_FEATURE (75): Xaa equals any of the naturally occurring L-amino acids
  MISC_FEATURE (76): Xaa equals any of the naturally occurring L-amino acids
RIDXXGTPTIGMLVRLQVPVRNSRVDPRVRGRVGEYGISSXDQKGETIKTRYIPKPNPKFXFKFFIIFQXLSHTXXIL

SEQ ID NO: 8386 - protein, 14 aa, Homo sapiens
  MISC_FEATURE (7): Xaa equals any of the naturally occurring L-amino acids
  MISC_FEATURE (9): Xaa equals any of the naturally occurring L-amino acids
  MISC_FEATURE (10): Xaa equals any of the naturally occurring L-amino acids
  MISC_FEATURE (14): Xaa equals any of the naturally occurring L-amino acids
KGEDRKXKXXMNVX

SEQ ID NO: 8387 - protein, 50 aa, Homo sapiens
IPAATWEKEVAGPGEKAVMKPIHFEGSTISTLFFELWQFQCLSLLLRGIS

SEQ ID NO: 8388 - protein, 21 aa, Homo sapiens
  MISC_FEATURE (2): Xaa equals any of the naturally occurring L-amino acids
  MISC_FEATURE (5): Xaa equals any of the naturally occurring L-amino acids
  MISC_FEATURE (9): Xaa equals any of the naturally occurring L-amino acids
  MISC_FEATURE (19): Xaa equals any of the naturally occurring L-amino acids
PXTIXHELXSLQNQEGAMXGS

SEQ ID NO: 8389 - protein, 17 aa, Homo sapiens
  MISC_FEATURE (13): Xaa equals any of the naturally occurring L-amino acids
  MISC_FEATURE (14): Xaa equals any of the naturally occurring L-amino acids
GSSPVKQSYIKPXXRKQ

SEQ ID NO: 8390 - protein, 57 aa, Homo sapiens
GLKHIVKDESSFGEKGSPVESSLVIACGSKFSASFTVACIVVLLLGHLCFIWKCRQE

SEQ ID NO: 8391 - protein, 75 aa, Homo sapiens
  MISC_FEATURE (22): Xaa equals any of the naturally occurring L-amino acids
  MISC_FEATURE (24): Xaa equals any of the naturally occurring L-amino acids
  MISC_FEATURE (42): Xaa equals any of the naturally occurring L-amino acids
  MISC_FEATURE (53): Xaa equals any of the naturally occurring L-amino acids
  MISC_FEATURE (64): Xaa equals any of the naturally occurring L-amino acids
  MISC_FEATURE (65): Xaa equals any of the naturally occurring L-amino acids
NAGTPAGTGPEFPGRPTRPIEXAXETSALTSLRRGRDPEPLXKATRPDVLRRXSPETSGQRQAXXGGERGLGLRL

SEQ ID NO: 8392 - protein, 48 aa, Homo sapiens
  MISC_FEATURE (1): Xaa equals any of the naturally occurring L-amino acids
  MISC_FEATURE (4): Xaa equals any of the naturally occurring L-amino acids
  MISC_FEATURE (8): Xaa equals any of the naturally occurring L-amino acids
  MISC_FEATURE (12): Xaa equals any of the naturally occurring L-amino acids
  MISC_FEATURE (45): Xaa equals any of the naturally occurring L-amino acids
XRAXVRDXNPQXAKTSLEKHRDRPGEMGRRYGVRHLLQKKPAFSXQGA

SEQ ID NO: 8393 - protein, 51 aa, Homo sapiens
  MISC_FEATURE (2): Xaa equals any of the naturally occurring L-amino acids
  MISC_FEATURE (3): Xaa equals any of the naturally occurring L-amino acids
  MISC_FEATURE (33): Xaa equals any of the naturally occurring L-amino acids
  MISC_FEATURE (35): Xaa equals any of the naturally occurring L-amino acids
  MISC_FEATURE (47): Xaa equals any of the naturally occurring L-amino acids
  MISC_FEATURE (49): Xaa equals any of the naturally occurring L-amino acids
GXXVRLQVPVRNSRVDPRVRKVALFLLDLAEGXAXGVGEIKKNLKWXKXEM

SEQ ID NO: 8394 - protein, 85 aa, Homo sapiens
  MISC_FEATURE (3): Xaa equals any of the naturally occurring L-amino acids
  MISC_FEATURE (43): Xaa equals any of the naturally occurring L-amino acids
  MISC_FEATURE (68): Xaa equals any of the naturally occurring L-amino acids
NLXSVFKESQDPIMPSFFSSLLSLFLTLPKKYLFLWFNKWSLXYGTMTKIPATCFLLYEYMRPTFIHXSSMKLSLHSKHRAETST

SEQ ID NO: 8395 - protein, 21 aa, Homo sapiens
  MISC_FEATURE (13): Xaa equals any of the naturally occurring L-amino acids
  MISC_FEATURE (17): Xaa equals any of the naturally occurring L-amino acids
  MISC_FEATURE (18): Xaa equals any of the naturally occurring L-amino acids
GSRSRVAALFFWXFFFXXIKR

SEQ ID NO: 8396 - protein, 18 aa, Homo sapiens
  MISC_FEATURE (12): Xaa equals any of the naturally occurring L-amino acids
  MISC_FEATURE (16): Xaa equals any of the naturally occurring L-amino acids
  MISC_FEATURE (17): Xaa equals any of the naturally occurring L-amino acids
AQGLLLPSPPPXGMFXXY

SEQ ID NO: 8397 - protein, 79 aa, Homo sapiens
  MISC_FEATURE (49): Xaa equals any of the naturally occurring L-amino acids
  MISC_FEATURE (73): Xaa equals any of the naturally occurring L-amino acids
  MISC_FEATURE (76): Xaa equals any of the naturally occurring L-amino acids
KRRADGIQLPKFVSKSCFMELRLHFVCMALKNRIQISAFEKGETLYQLXLLKNGISLHFEIVNSTLKYSATCXKFXSKL

SEQ ID NO: 8398 - protein, 46 aa, Homo sapiens
  MISC_FEATURE (16): Xaa equals any of the naturally occurring L-amino acids
  MISC_FEATURE (24): Xaa equals any of the naturally occurring L-amino acids
  MISC_FEATURE (30): Xaa equals any of the naturally occurring L-amino acids
  MISC_FEATURE (43): Xaa equals any of the naturally occurring L-amino acids
LKVSSFPPPPPPSGLXFLSYLDSXASCLPXSFLEARLLLWGRXGWL

SEQ ID NO: 8399 - protein, 54 aa, Homo sapiens
  MISC_FEATURE (1): Xaa equals any of the naturally occurring L-amino acids
  MISC_FEATURE (3): Xaa equals any of the naturally occurring L-amino acids
  MISC_FEATURE (7): Xaa equals any of the naturally occurring L-amino acids
  MISC_FEATURE (10): Xaa equals any of the naturally occurring L-amino acids
  MISC_FEATURE (28): Xaa equals any of the naturally occurring L-amino acids
XYXVVQXGQXLECFKISILDFSLAFIDXLGCGHCLKYMTVSSQKPYTLNFTKII

SEQ ID NO: 8400 - protein, 51 aa, Homo sapiens
  MISC_FEATURE (3): Xaa equals any of the naturally occurring L-amino acids
  MISC_FEATURE (8): Xaa equals any of the naturally occurring L-amino acids
  MISC_FEATURE (24): Xaa equals any of the naturally occurring L-amino acids
  MISC_FEATURE (31): Xaa equals any of the naturally occurring L-amino acids
  MISC_FEATURE (39): Xaa equals any of the naturally occurring L-amino acids
LVXVLSYXNFKGKHLKSKIVRIRXIEVEYHXRLNKALVXMKVVLFRRLRYL

SEQ ID NO: 8401 - protein, 22 aa, Homo sapiens
  MISC_FEATURE (15): Xaa equals any of the naturally occurring L-amino acids
  MISC_FEATURE (18): Xaa equals any of the naturally occurring L-amino acids
  MISC_FEATURE (21): Xaa equals any of the naturally occurring L-amino acids
  MISC_FEATURE (22): Xaa equals any of the naturally occurring L-amino acids
EKRKRKGINSILAEXIYXLIXX

SEQ ID NO: 8402 - protein, 70 aa, Homo sapiens
  MISC_FEATURE (6): Xaa equals any of the naturally occurring L-amino acids
  MISC_FEATURE (13): Xaa equals any of the naturally occurring L-amino acids
  MISC_FEATURE (24): Xaa equals any of the naturally occurring L-amino acids
  MISC_FEATURE (25): Xaa equals any of the naturally occurring L-amino acids
  MISC_FEATURE (29): Xaa equals any of the naturally occurring L-amino acids
  MISC_FEATURE (52): Xaa equals any of the naturally occurring L-amino acids
  MISC_FEATURE (56): Xaa equals any of the naturally occurring L-amino acids
  MISC_FEATURE (58): Xaa equals any of the naturally occurring L-amino acids
  MISC_FEATURE (64): Xaa equals any of the naturally occurring L-amino acids
AWGTGXEWPGRPXRTKKIIWVNKXXYKRXKNLRTRCHKYEIGKNKVTRKWVXKNLXGXVRSIQXWKGKNL

SEQ ID NO: 8403 - protein, 24 aa, Homo sapiens
  MISC_FEATURE (13): Xaa equals any of the naturally occurring L-amino acids
  MISC_FEATURE (18): Xaa equals any of the naturally occurring L-amino acids
FYTTSFPFLQVNXFTNHXGYLLNR

SEQ ID NO: 8404 - protein, 68 aa, Homo sapiens
  MISC_FEATURE (7): Xaa equals any of the naturally occurring L-amino acids
  MISC_FEATURE (15): Xaa equals any of the naturally occurring L-amino acids
  MISC_FEATURE (25): Xaa equals any of the naturally occurring L-amino acids
  MISC_FEATURE (32): Xaa equals any of the naturally occurring L-amino acids
  MISC_FEATURE (35): Xaa equals any of the naturally occurring L-amino acids
  MISC_FEATURE (36): Xaa equals any of the naturally occurring L-amino acids
  MISC_FEATURE (37): Xaa equals any of the naturally occurring L-amino acids
PFLTEDXHWKLMKGXNNGEHHFPAXDHTANIXHGXXXYLEAQRSPGVAKLGSPVLTKLLTASTPCQIL

SEQ ID NO: 8405 - protein, 23 aa, Homo sapiens
  MISC_FEATURE (18): Xaa equals any of the naturally occurring L-amino acids
  MISC_FEATURE (22): Xaa equals any of the naturally occurring L-amino acids
  MISC_FEATURE (23): Xaa equals any of the naturally occurring L-amino acids
ASTARNGRMRDGKKAAGXKGIXX

SEQ ID NO: 8406 - protein, 65 aa, Homo sapiens
  MISC_FEATURE (36): Xaa equals any of the naturally occurring L-amino acids
  MISC_FEATURE (40): Xaa equals any of the naturally occurring L-amino acids
  MISC_FEATURE (41): Xaa equals any of the naturally occurring L-amino acids
  MISC_FEATURE (43): Xaa equals any of the naturally occurring L-amino acids
RGAAGAVEPGTAERRGAGPRGGRLAAPRPRTSTPRXACAXXCXACGAGTRTRCWGWPGPCGPRDG

SEQ ID NO: 8407 - protein, 36 aa, Homo sapiens
  MISC_FEATURE (11): Xaa equals any of the naturally occurring L-amino acids
  MISC_FEATURE (23): Xaa equals any of the naturally occurring L-amino acids
GIVGGAPGGLXCPPPELGIAANXGSVPQLKTSSGMS

SEQ ID NO: 8408 - protein, 17 aa, Homo sapiens
  MISC_FEATURE (3): Xaa equals any of the naturally occurring L-amino acids
  MISC_FEATURE (12): Xaa equals any of the naturally occurring L-amino acids
  MISC_FEATURE (13): Xaa equals any of the naturally occurring L-amino acids
IPXSIHASAMSXXIVIN

SEQ ID NO: 8409 - protein, 17 aa, Homo sapiens
  MISC_FEATURE (6): Xaa equals any of the naturally occurring L-amino acids
  MISC_FEATURE (11): Xaa equals any of the naturally occurring L-amino acids
  MISC_FEATURE (12): Xaa equals any of the naturally occurring L-amino acids
KKNSCXISRFXXIRTLY

SEQ ID NO: 8410 - protein, 78 aa, Homo sapiens
  MISC_FEATURE (4): Xaa equals any of the naturally occurring L-amino acids
  MISC_FEATURE (16): Xaa equals any of the naturally occurring L-amino acids
  MISC_FEATURE (24): Xaa equals any of the naturally occurring L-amino acids
  MISC_FEATURE (57): Xaa equals any of the naturally occurring L-amino acids
PGRXRVRESSPCTVGXSQRRPGTXTHWGASHGAARGARLGGGPEHLLHLYSGWIFKXDLVVAVSLSYQEAHDIRLSLW

SEQ ID NO: 8411 - protein, 36 aa, Homo sapiens
  MISC_FEATURE (2): Xaa equals any of the naturally occurring L-amino acids
  MISC_FEATURE (8): Xaa equals any of the naturally occurring L-amino acids
  MISC_FEATURE (10): Xaa equals any of the naturally occurring L-amino acids
  MISC_FEATURE (15): Xaa equals any of the naturally occurring L-amino acids
PXAIRAFXSXSFLIXSMCMRLFIPKDMKEHNVTTRL

SEQ ID NO: 8412 - protein, 61 aa, Homo sapiens
  MISC_FEATURE (55): Xaa equals any of the naturally occurring L-amino acids
  MISC_FEATURE (60): Xaa equals any of the naturally occurring L-amino acids
IHKMTMKKIICYGILATVHIFHNQISSTGLNLMFFNFYSLRCFEAIRICVFTVLXGLIPXV

SEQ ID NO: 8413 - protein, 47 aa, Homo sapiens
  MISC_FEATURE (16): Xaa equals any of the naturally occurring L-amino acids
  MISC_FEATURE (21): Xaa equals any of the naturally occurring L-amino acids
  MISC_FEATURE (22): Xaa equals any of the naturally occurring L-amino acids
  MISC_FEATURE (36): Xaa equals any of the naturally occurring L-amino acids
  MISC_FEATURE (45): Xaa equals any of the naturally occurring L-amino acids
  MISC_FEATURE (47): Xaa equals any of the naturally occurring L-amino acids
RVSPGKISPGGFRTPXRPFPXXLGLGFKLKRFFFQXSWAKKKKKXFX

SEQ ID NO: 8414 - protein, 77 aa, Homo sapiens
  MISC_FEATURE (5): Xaa equals any of the naturally occurring L-amino acids
  MISC_FEATURE (30): Xaa equals any of the naturally occurring L-amino acids
  MISC_FEATURE (36): Xaa equals any of the naturally occurring L-amino acids
  MISC_FEATURE (41): Xaa equals any of the naturally occurring L-amino acids
  MISC_FEATURE (49): Xaa equals any of the naturally occurring L-amino acids
  MISC_FEATURE (62): Xaa equals any of the naturally occurring L-amino acids
  MISC_FEATURE (77): Xaa equals any of the naturally occurring L-amino acids
RQVSXRSTRPLPSGRARLQVPAALRHASSXGLSNKXADRRXLQRLIPWXLQTQPTPSGPRAXRLLPAVGGTRWPARX

SEQ ID NO: 8415 - protein, 49 aa, Homo sapiens
GCPGGCPQVGGSRGEKMVAIFTLFCIVFIDSGNKHKILNKMTWKLPKKK

SEQ ID NO: 8416 - protein, 50 aa, Homo sapiens
  MISC_FEATURE (8): Xaa equals any of the naturally occurring L-amino acids
  MISC_FEATURE (15): Xaa equals any of the naturally occurring L-amino acids
  MISC_FEATURE (17): Xaa equals any of the naturally occurring L-amino acids
  MISC_FEATURE (35): Xaa equals any of the naturally occurring L-amino acids
  MISC_FEATURE (44): Xaa equals any of the naturally occurring L-amino acids
  MISC_FEATURE (45): Xaa equals any of the naturally occurring L-amino acids
  MISC_FEATURE (46): Xaa equals any of the naturally occurring L-amino acids
  MISC_FEATURE (49): Xaa equals any of the naturally occurring L-amino acids
GPRGLTPXGSPRGKXFXPGGGSRETPPKGPGFPPXKTLFTFGGXXXKRXI

SEQ ID NO: 8417 - protein, 43 aa, Homo sapiens
  MISC_FEATURE (1): Xaa equals any of the naturally occurring L-amino acids
  MISC_FEATURE (2): Xaa equals any of the naturally occurring L-amino acids
  MISC_FEATURE (7): Xaa equals any of the naturally occurring L-amino acids
  MISC_FEATURE (29): Xaa equals any of the naturally occurring L-amino acids
  MISC_FEATURE (32): Xaa equals any of the naturally occurring L-amino acids
  MISC_FEATURE (38): Xaa equals any of the naturally occurring L-amino acids
  MISC_FEATURE (39): Xaa equals any of the naturally occurring L-amino acids
XXWKAGXPAGTGPEFPGRPTRSRVSNPAXMAXEEEDAXXYNLT

SEQ ID NO: 8418 - protein, 38 aa, Homo sapiens
  MISC_FEATURE (4): Xaa equals any of the naturally occurring L-amino acids
  MISC_FEATURE (28): Xaa equals any of the naturally occurring L-amino acids
LYTXKRFLTFILTLNGSTLGFRHVNFCXVLNLSRVACR

SEQ ID NO: 8419 - protein, 33 aa, Homo sapiens
  MISC_FEATURE (27): Xaa equals any of the naturally occurring L-amino acids
  MISC_FEATURE (31): Xaa equals any of the naturally occurring L-amino acids
IRRYSLKCINVSLFKSESLLMITILYXAINXIH

SEQ ID NO: 8420 - protein, 33 aa, Homo sapiens
QVNVVQISRSFYHLKKKFSFVVFLLSPRSLNCG

SEQ ID NO: 8421 - protein, 134 aa, Homo sapiens
  MISC_FEATURE (22): Xaa equals any of the naturally occurring L-amino acids
  MISC_FEATURE (23): Xaa equals any of the naturally occurring L-amino acids
  MISC_FEATURE (95): Xaa equals any of the naturally occurring L-amino acids
  MISC_FEATURE (107): Xaa equals any of the naturally occurring L-amino acids
  MISC_FEATURE (121): Xaa equals any of the naturally occurring L-amino acids
  MISC_FEATURE (122): Xaa equals any of the naturally occurring L-amino acids
  MISC_FEATURE (127): Xaa equals any of the naturally occurring L-amino acids
  MISC_FEATURE (133): Xaa equals any of the naturally occurring L-amino acids
PGWHCHSHSAPGPRRDSAWSLXXAQPICVCVCACDATSPPVPLQGPRIHTAMHAHTGPGPGPQSSCLSWTLCKHFCACWVGARLKGPAPSLQDRXPQAGQGGSPWIXHTNTTRARATHAFXXLILHXTPFPGXA

SEQ ID NO: 8422 - protein, 20 aa, Homo sapiens
  MISC_FEATURE (14): Xaa equals any of the naturally occurring L-amino acids
  MISC_FEATURE (17): Xaa equals any of the naturally occurring L-amino acids
  MISC_FEATURE (18): Xaa equals any of the naturally occurring L-amino acids
RTRGVCLKGLSFIXNWXXNL

SEQ ID NO: 8423 - protein, 43 aa, Homo sapiens
  MISC_FEATURE (23): Xaa equals any of the naturally occurring L-amino acids
  MISC_FEATURE (30): Xaa equals any of the naturally occurring L-amino acids
  MISC_FEATURE (37): Xaa equals any of the naturally occurring L-amino acids
  MISC_FEATURE (38): Xaa equals any of the naturally occurring L-amino acids
LVLDRERPLATSSRSRAAARDLXLAGAWVXPGFPDRXXLAYQL

SEQ ID NO: 8424 - protein, 136 aa, Homo sapiens
  MISC_FEATURE (3): Xaa equals any of the naturally occurring L-amino acids
  MISC_FEATURE (122): Xaa equals any of the naturally occurring L-amino acids
ELXAEAEKMRVSQQELLSVDESVYTPDSDVAAPQINRNLIQKAGYLNLRNWQMRAMCWRPTCKARGKQNRAGHHHLGEALFLHPRRESHVSAQGSRGWRFDPGPGQLLSDGRGLRRPALLLXDHHAQWKIGNNPPG

SEQ ID NO: 8425 - protein, 44 aa, Homo sapiens
  MISC_FEATURE (44): Xaa equals any of the naturally occurring L-amino acids
IVLIFVWCTFTYKREDKMFWGIITRGLARSKLVSPLLPSSNFGX

SEQ ID NO: 8426 - protein, 60 aa, Homo sapiens
  MISC_FEATURE (12): Xaa equals any of the naturally occurring L-amino acids
  MISC_FEATURE (34): Xaa equals any of the naturally occurring L-amino acids
  MISC_FEATURE (36): Xaa equals any of the naturally occurring L-amino acids
  MISC_FEATURE (42): Xaa equals any of the naturally occurring L-amino acids
  MISC_FEATURE (47): Xaa equals any of the naturally occurring L-amino acids
  MISC_FEATURE (55): Xaa equals any of the naturally occurring L-amino acids
GNCQGRERIFRXEEDDSLWSSTRLSHLNFLFTLXYXNDELKXQIHKXSYDSQLPXVAFNI

SEQ ID NO: 8427 - protein, 18 aa, Homo sapiens
  MISC_FEATURE (10): Xaa equals any of the naturally occurring L-amino acids
  MISC_FEATURE (13): Xaa equals any of the naturally occurring L-amino acids
  MISC_FEATURE (14): Xaa equals any of the naturally occurring L-amino acids
  MISC_FEATURE (18): Xaa equals any of the naturally occurring L-amino acids
EYVKKYKGSXAFXXLHYX

SEQ ID NO: 8428 - protein, 47 aa, Homo sapiens
  MISC_FEATURE (16): Xaa equals any of the naturally occurring L-amino acids
  MISC_FEATURE (38): Xaa equals any of the naturally occurring L-amino acids
  MISC_FEATURE (40): Xaa equals any of the naturally occurring L-amino acids
  MISC_FEATURE (45): Xaa equals any of the naturally occurring L-amino acids
LQICVTVISVYVLSLXMCRFVIGRYISYLLCFIHAACXTXLYMVXTE

SEQ ID NO: 8429 - protein, 31 aa, Homo sapiens
  MISC_FEATURE (2): Xaa equals any of the naturally occurring L-amino acids
  MISC_FEATURE (28): Xaa equals any of the naturally occurring L-amino acids
  MISC_FEATURE (30): Xaa equals any of the naturally occurring L-amino acids
  MISC_FEATURE (31): Xaa equals any of the naturally occurring L-amino acids
GXKVFNDEHIFPLSLKCLAFEWYLSLRXKXX

SEQ ID NO: 8430 - protein, 105 aa, Homo sapiens
  MISC_FEATURE (97): Xaa equals any of the naturally occurring L-amino acids
GKMQKHIYVLISLWALFKAVLRGRGYSFRREPASDKHNLLGTWERNQRAALQRLFKLLLKNTQFGVLGFFSFSLRHSTILIFVTAYLCEKGYFYLAXLCQPIRLP

SEQ ID NO: 8431 - protein, 46 aa, Homo sapiens
  MISC_FEATURE (21): Xaa equals any of the naturally occurring L-amino acids
  MISC_FEATURE (23): Xaa equals any of the naturally occurring L-amino acids
  MISC_FEATURE (35): Xaa equals any of the naturally occurring L-amino acids
  MISC_FEATURE (37): Xaa equals any of the naturally occurring L-amino acids
ITCILLLVIKLTAIIVNMCLXLXVKWKLLRSLTVXEXKCTGTDGNI

SEQ ID NO: 8432 - protein, 50 aa, Homo sapiens
  MISC_FEATURE (1): Xaa equals any of the naturally occurring L-amino acids
  MISC_FEATURE (6): Xaa equals any of the naturally occurring L-amino acids
  MISC_FEATURE (11): Xaa equals any of the naturally occurring L-amino acids
  MISC_FEATURE (17): Xaa equals any of the naturally occurring L-amino acids
  MISC_FEATURE (24): Xaa equals any of the naturally occurring L-amino acids
  MISC_FEATURE (35): Xaa equals any of the naturally occurring L-amino acids
  MISC_FEATURE (38): Xaa equals any of the naturally occurring L-amino acids
  MISC_FEATURE (45): Xaa equals any of the naturally occurring L-amino acids
XSMFNXNRREXRIWLVXEHQVVPXSNCMKCWRKLXHCXRELASLXSIAPG

SEQ ID NO: 8433 - protein, 61 aa, Homo sapiens
YSVEHNDESEHQCCVPDLKALGANNSGGDCYGFCIKVFYHVKKIRIFSLLVVFIIKYVDYL

SEQ ID NO: 8434 - protein, 67 aa, Homo sapiens
HAFHMSTFLPCSSCSPNLEGRLPLAKSSSGLENFLSVTSFIEPSLITPSLSYPSLPQPSMYKLLLDA

SEQ ID NO: 8435 - protein, 67 aa, Homo sapiens
  MISC_FEATURE (34): Xaa equals any of the naturally occurring L-amino acids
  MISC_FEATURE (41): Xaa equals any of the naturally occurring L-amino acids
  MISC_FEATURE (65): Xaa equals any of the naturally occurring L-amino acids
DFAYLPSGLSLENQDFSDLFLYPQVSLVLMSPSXSSSIPLXFFSPSPMGSHSTLCYPSDTYNICXNR

SEQ ID NO: 8436 - protein, 70 aa, Homo sapiens
TVCNCSFYFFGTYLTYHGVNIMNLLHIVQKEPGGFFCQHCDVYSFEDSNCRWKNLCYKARCFPKSDVLVK

SEQ ID NO: 8437 - protein, 160 aa, Homo sapiens
PILFWRKMETIILSVDCQTSNSIDNVLEKDPRPKRDTDITSESDYGNRKECNRKVPRRSKIPYDAKTIQTIKHHNKNYNSFVSCNRKMKPPYLKELYVSSSLANCPMLQESEKPKTEIIKVDQSHSEDNTYQSLVEQLDQEREKRWRAEQAENKLMDYID

SEQ ID NO: 8438 - protein, 44 aa, Homo sapiens
  MISC_FEATURE (43): Xaa equals any of the naturally occurring L-amino acids
YVDIPFRNITAVNYMRLASQMLFGLKKLLQSQVNGIFLNPTFXV

SEQ ID NO: 8439 - protein, 23 aa, Homo sapiens
  MISC_FEATURE (20): Xaa equals any of the naturally occurring L-amino acids
  MISC_FEATURE (21): Xaa equals any of the naturally occurring L-amino acids
  MISC_FEATURE (23): Xaa equals any of the naturally occurring L-amino acids
CFYKVEQIEFRHSGKATGGXXLX

SEQ ID NO: 8440 - protein, 47 aa, Homo sapiens
ILDATFNLAVIPTAFLFGILTIALHSEFLLRGHYHSRYYLANNKYRD

SEQ ID NO: 8441 - protein, 53 aa, Homo sapiens
KYVFFFVESFGLFKFRFCLRTVKPRLTDSGNSCLLVTHKCTVICSLFLNIHLL

SEQ ID NO: 8442 - protein, 45 aa, Homo sapiens
  MISC_FEATURE (6): Xaa equals any of the naturally occurring L-amino acids
  MISC_FEATURE (7): Xaa equals any of the naturally occurring L-amino acids
  MISC_FEATURE (16): Xaa equals any of the naturally occurring L-amino acids
  MISC_FEATURE (19): Xaa equals any of the naturally occurring L-amino acids
  MISC_FEATURE (29): Xaa equals any of the naturally occurring L-amino acids
  MISC_FEATURE (34): Xaa equals any of the naturally occurring L-amino acids
  MISC_FEATURE (35): Xaa equals any of the naturally occurring L-amino acids
  MISC_FEATURE (41): Xaa equals any of the naturally occurring L-amino acids
ALKKMXXKDFGTKVGXNLXEKTLEKKEGXNFNNXXRTESLXLAGG

SEQ ID NO: 8443 - protein, 54 aa, Homo sapiens
  MISC_FEATURE (12): Xaa equals any of the naturally occurring L-amino acids
  MISC_FEATURE (18): Xaa equals any of the naturally occurring L-amino acids
  MISC_FEATURE (20): Xaa equals any of the naturally occurring L-amino acids
  MISC_FEATURE (23): Xaa equals any of the naturally occurring L-amino acids
  MISC_FEATURE (43): Xaa equals any of the naturally occurring L-amino acids
  MISC_FEATURE (47): Xaa equals any of the naturally occurring L-amino acids
TKNIYYYLSSQXMPNFFXIXSDXQLKCHVALQVHCYNDSISRXACSXIVCVALI

SEQ ID NO: 8444 - protein, 57 aa, Homo sapiens
LKFLHVRILQSKDYLYLYIFFSKHCFSFISQILTFCVLILIKFKLLSNSSFDFLIDT

SEQ ID NO: 8445 - protein, 57 aa, Homo sapiens
ALRGLVATLAALGRGQCPMWTKEARPGQTPHSPELTACPKSKHLGQVRLLDQDCHCG

SEQ ID NO: 8446 - protein, 35 aa, Homo sapiens
  MISC_FEATURE (4): Xaa equals any of the naturally occurring L-amino acids
  MISC_FEATURE (18): Xaa equals any of the naturally occurring L-amino acids
  MISC_FEATURE (29): Xaa equals any of the naturally occurring L-amino acids
  MISC_FEATURE (33): Xaa equals any of the naturally occurring L-amino acids
MANXTRPEDGALKHGRNXGWLQHRVTRYXTPYXLT

SEQ ID NO: 8447 - protein, 28 aa, Homo sapiens
  MISC_FEATURE (19): Xaa equals any of the naturally occurring L-amino acids
  MISC_FEATURE (21): Xaa equals any of the naturally occurring L-amino acids
  MISC_FEATURE (22): Xaa equals any of the naturally occurring L-amino acids
  MISC_FEATURE (24): Xaa equals any of the naturally occurring L-amino acids
  MISC_FEATURE (28): Xaa equals any of the naturally occurring L-amino acids
EKDQRILNSRSDRKRSISXEXXIXQKIX

SEQ ID NO: 8448 - protein, 76 aa, Homo sapiens
  MISC_FEATURE (27): Xaa equals any of the naturally occurring L-amino acids
  MISC_FEATURE (29): Xaa equals any of the naturally occurring L-amino acids
  MISC_FEATURE (40): Xaa equals any of the naturally occurring L-amino acids
  MISC_FEATURE (46): Xaa equals any of the naturally occurring L-amino acids
  MISC_FEATURE (54): Xaa equals any of the naturally occurring L-amino acids
  MISC_FEATURE (67): Xaa equals any of the naturally occurring L-amino acids
  MISC_FEATURE (73): Xaa equals any of the naturally occurring L-amino acids
  MISC_FEATURE (75): Xaa equals any of the naturally occurring L-amino acids
IVARLGGSFSPKAEEIVGFQGPAGISXRXCGESSSLPQPXEGYDRXSVDITSLXQRKLTFDTHALVXDLETHXIXQ

SEQ ID NO: 8449 - protein, 41 aa, Homo sapiens
  MISC_FEATURE (3): Xaa equals any of the naturally occurring L-amino acids
  MISC_FEATURE (4): Xaa equals any of the naturally occurring L-amino acids
  MISC_FEATURE (13): Xaa equals any of the naturally occurring L-amino acids
  MISC_FEATURE (14): Xaa equals any of the naturally occurring L-amino acids
  MISC_FEATURE (41): Xaa equals any of the naturally occurring L-amino acids
LRXXLIRLTIGKXXTPAVTGTKFPGRPTRPLNKYSHCQSPX

SEQ ID NO: 8450 - protein, 47 aa, Homo sapiens
  MISC_FEATURE (2): Xaa equals any of the naturally occurring L-amino acids
  MISC_FEATURE (3): Xaa equals any of the naturally occurring L-amino acids
  MISC_FEATURE (22): Xaa equals any of the naturally occurring L-amino acids
  MISC_FEATURE (23): Xaa equals any of the naturally occurring L-amino acids
  MISC_FEATURE (29): Xaa equals any of the naturally occurring L-amino acids
  MISC_FEATURE (43): Xaa equals any of the naturally occurring L-amino acids
AXXYRSGIPGSTHASGPQKRDXXGNVIVXKASAIRRTLLCRRXGSKA

SEQ ID NO: 8451 - protein, 76 aa, Homo sapiens
  MISC_FEATURE (4): Xaa equals any of the naturally occurring L-amino acids
  MISC_FEATURE (41): Xaa equals any of the naturally occurring L-amino acids
  MISC_FEATURE (45): Xaa equals any of the naturally occurring L-amino acids
  MISC_FEATURE (70): Xaa equals any of the naturally occurring L-amino acids
EFHXWSYYGSLQAWHSPVMQSALVPGCQPHSIPYLGVNGAXFLLXVCSPDSSLPPRICFRESQTTEHCPXALSITL

SEQ ID NO: 8452 - protein, 44 aa, Homo sapiens
  MISC_FEATURE (7): Xaa equals any of the naturally occurring L-amino acids
  MISC_FEATURE (8): Xaa equals any of the naturally occurring L-amino acids
  MISC_FEATURE (11): Xaa equals any of the naturally occurring L-amino acids
  MISC_FEATURE (16): Xaa equals any of the naturally occurring L-amino acids
  MISC_FEATURE (21): Xaa equals any of the naturally occurring L-amino acids
  MISC_FEATURE (36): Xaa equals any of the naturally occurring L-amino acids
  MISC_FEATURE (44): Xaa equals any of the naturally occurring L-amino acids
MTMITAXXNTXHYREXWYSVXVPVRNCRERPTRTIXMLLGMLMX

SEQ ID NO: 8453 - protein, 43 aa, Homo sapiens
  MISC_FEATURE (20): Xaa equals any of the naturally occurring L-amino acids
  MISC_FEATURE (23): Xaa equals any of the naturally occurring L-amino acids
  MISC_FEATURE (34): Xaa equals any of the naturally occurring L-amino acids
  MISC_FEATURE (39): Xaa equals any of the naturally occurring L-amino acids
GTPAGTGPEFPGRPTRSEEXCAXTSTHAKRKGDXSRCPXQYKH

SEQ ID NO: 8454 - protein, 39 aa, Homo sapiens
  MISC_FEATURE (1): Xaa equals any of the naturally occurring L-amino acids
  MISC_FEATURE (5): Xaa equals any of the naturally occurring L-amino acids
  MISC_FEATURE (9): Xaa equals any of the naturally occurring L-amino acids
  MISC_FEATURE (23): Xaa equals any of the naturally occurring L-amino acids
  MISC_FEATURE (31): Xaa equals any of the naturally occurring L-amino acids
  MISC_FEATURE (36): Xaa equals any of the naturally occurring L-amino acids
  MISC_FEATURE (39): Xaa equals any of the naturally occurring L-amino acids
XNTTXYREXWYACRYRSGISRVXPRVRGIFXCYFWXYFX

SEQ ID NO: 8455 - protein, 52 aa, Homo sapiens
  MISC_FEATURE (9): Xaa equals any of the naturally occurring L-amino acids
  MISC_FEATURE (17): Xaa equals any of the naturally occurring L-amino acids
  MISC_FEATURE (18): Xaa equals any of the naturally occurring L-amino acids
  MISC_FEATURE (21): Xaa equals any of the naturally occurring L-amino acids
  MISC_FEATURE (28): Xaa equals any of the naturally occurring L-amino acids
  MISC_FEATURE (47): Xaa equals any of the naturally occurring L-amino acids
HNNFTQENXYDHDYWQXXIRXTIGKGGXPAGTGPEFRGTTHASALNXSRRLK

SEQ ID NO: 8456 - protein, 50 aa, Homo sapiens
  MISC_FEATURE (8): Xaa equals any of the naturally occurring L-amino acids
  MISC_FEATURE (9): Xaa equals any of the naturally occurring L-amino acids
  MISC_FEATURE (12): Xaa equals any of the naturally occurring L-amino acids
  MISC_FEATURE (21): Xaa equals any of the naturally occurring L-amino acids
  MISC_FEATURE (23): Xaa equals any of the naturally occurring L-amino acids
  MISC_FEATURE (43): Xaa equals any of the naturally occurring L-amino acids
  MISC_FEATURE (44): Xaa equals any of the naturally occurring L-amino acids
  MISC_FEATURE (46): Xaa equals any of the naturally occurring L-amino acids
  MISC_FEATURE (48): Xaa equals any of the naturally occurring L-amino acids
YDHDYWQXXIRXTIGKGETPXGXGPEFPDTTPRVRESVLAQRXXAXQXQD

SEQ ID NO: 8457 - protein, 41 aa, Homo sapiens
  MISC_FEATURE (6): Xaa equals any of the naturally occurring L-amino acids
  MISC_FEATURE (9): Xaa equals any of the naturally occurring L-amino acids
  MISC_FEATURE (10): Xaa equals any of the naturally occurring L-amino acids
  MISC_FEATURE (14): Xaa equals any of the naturally occurring L-amino acids
  MISC_FEATURE (18): Xaa equals any of the naturally occurring L-amino acids
TGMTMXTAXXNTTXYREXWDACRNRSGIPGSTHATESVCSI

SEQ ID NO: 8458 - protein, 34 aa, Homo sapiens
  MISC_FEATURE (18): Xaa equals any of the naturally occurring L-amino acids
  MISC_FEATURE (25): Xaa equals any of the naturally occurring L-amino acids
  MISC_FEATURE (30): Xaa equals any of the naturally occurring L-amino acids
KPKESRSVKVRSGIPGSXHASGVSXFKKMXFFLK

SEQ ID NO: 8459 - protein, 64 aa, Homo sapiens
  MISC_FEATURE (6): Xaa equals any of the naturally occurring L-amino acids
  MISC_FEATURE (7): Xaa equals any of the naturally occurring L-amino acids
  MISC_FEATURE (8): Xaa equals any of the naturally occurring L-amino acids
  MISC_FEATURE (14): Xaa equals any of the naturally occurring L-amino acids
  MISC_FEATURE (24): Xaa equals any of the naturally occurring L-amino acids
  MISC_FEATURE (41): Xaa equals any of the naturally occurring L-amino acids
  MISC_FEATURE (49): Xaa equals any of the naturally occurring L-amino acids
  MISC_FEATURE (59): Xaa equals any of the naturally occurring L-amino acids
  MISC_FEATURE (60): Xaa equals any of the naturally occurring L-amino acids
TTLHRXXXMTMITXSSNTTHYREXWYACRYRAGIPGSTHAXVLFLLTNXNISKTKRVFXXLKHK

SEQ ID NO: 8460 - protein, 50 aa, Homo sapiens
  MISC_FEATURE (6): Xaa equals any of the naturally occurring L-amino acids
  MISC_FEATURE (12): Xaa equals any of the naturally occurring L-amino acids
  MISC_FEATURE (15): Xaa equals any of the naturally occurring L-amino acids
  MISC_FEATURE (27): Xaa equals any of the naturally occurring L-amino acids
  MISC_FEATURE (35): Xaa equals any of the naturally occurring L-amino acids
  MISC_FEATURE (49): Xaa equals any of the naturally occurring L-amino acids
  MISC_FEATURE (50): Xaa equals any of the naturally occurring L-amino acids
ALIRLXIVDCWXACXYRAGIPGSTHAXELLAAIYXKNAYMHSVRKTLYXX

SEQ ID NO: 8461 - protein, 61 aa, Homo sapiens
  MISC_FEATURE (3): Xaa equals any of the naturally occurring L-amino acids
  MISC_FEATURE (12): Xaa equals any of the naturally occurring L-amino acids
  MISC_FEATURE (19): Xaa equals any of the naturally occurring L-amino acids
  MISC_FEATURE (47): Xaa equals any of the naturally occurring L-amino acids
  MISC_FEATURE (55): Xaa equals any of the naturally occurring L-amino acids
TPXGTGPEFPFXPRVRPRXRIFIAYHLILCAREGMARINMPQYPHHXFYSHSCPXFLWHIF

SEQ ID NO: 8462 - protein, 43 aa, Homo sapiens
  MISC_FEATURE (3): Xaa equals any of the naturally occurring L-amino acids
  MISC_FEATURE (6): Xaa equals any of the naturally occurring L-amino acids
  MISC_FEATURE (15): Xaa equals any of the naturally occurring L-amino acids
  MISC_FEATURE (18): Xaa equals any of the naturally occurring L-amino acids
  MISC_FEATURE (37): Xaa equals any of the naturally occurring L-amino acids
  MISC_FEATURE (40): Xaa equals any of the naturally occurring L-amino acids
  MISC_FEATURE (41): Xaa equals any of the naturally occurring L-amino acids
ITXSSXTTQYSDCWXACXYRSGIPGSTHASARPRLSXLWXXWL

SEQ ID NO: 8463 - protein, 54 aa, Homo sapiens
  MISC_FEATURE (14): Xaa equals any of the naturally occurring L-amino acids
  MISC_FEATURE (34): Xaa equals any of the naturally occurring L-amino acids
  MISC_FEATURE (44): Xaa equals any of the naturally occurring L-amino acids
  MISC_FEATURE (48): Xaa equals any of the naturally occurring L-amino acids
  MISC_FEATURE (50): Xaa equals any of the naturally occurring L-amino acids
  MISC_FEATURE (54): Xaa equals any of the naturally occurring L-amino acids
LRQALIRLTIGIAXTPAGTGPEFPNRPTRPLTGXILKIPSTLSXKDFXNXLKCX

SEQ ID NO: 8464 - protein, 84 aa, Homo sapiens
  MISC_FEATURE (15): Xaa equals any of the naturally occurring L-amino acids
  MISC_FEATURE (26): Xaa equals any of the naturally occurring L-amino acids
  MISC_FEATURE (32): Xaa equals any of the naturally occurring L-amino acids
  MISC_FEATURE (36): Xaa equals any of the naturally occurring L-amino acids
  MISC_FEATURE (41): Xaa equals any of the naturally occurring L-amino acids
  MISC_FEATURE (60): Xaa equals any of the naturally occurring L-amino acids
  MISC_FEATURE (66): Xaa equals any of the naturally occurring L-amino acids
  MISC_FEATURE (69): Xaa equals any of the naturally occurring L-amino acids
  MISC_FEATURE (72): Xaa equals any of the naturally occurring L-amino acids
GHVPRPEFPGRPTRXRTRGALFRYPXYLSGYXTTLXLGPLXESPCVHATPPLSLPQNLTXEGTGNXGAXVSXIRELFNFSSCQG

SEQ ID NO: 8465 - protein, 38 aa, Homo sapiens
  MISC_FEATURE (9): Xaa equals any of the naturally occurring L-amino acids
  MISC_FEATURE (14): Xaa equals any of the naturally occurring L-amino acids
  MISC_FEATURE (29): Xaa equals any of the naturally occurring L-amino acids
  MISC_FEATURE (30): Xaa equals any of the naturally occurring L-amino acids
  MISC_FEATURE (35): Xaa equals any of the naturally occurring L-amino acids
SFTKGGFQXAEILXFFLCSQMKPGARTVXXWYIAXLAL

SEQ ID NO: 8466 - protein, 69 aa, Homo sapiens
  MISC_FEATURE (7): Xaa equals any of the naturally occurring L-amino acids
  MISC_FEATURE (23): Xaa equals any of the naturally occurring L-amino acids
  MISC_FEATURE (25): Xaa equals any of the naturally occurring L-amino acids
  MISC_FEATURE (31): Xaa equals any of the naturally occurring L-amino acids
  MISC_FEATURE (34): Xaa equals any of the naturally occurring L-amino acids
  MISC_FEATURE (36): Xaa equals any of the naturally occurring L-amino acids
  MISC_FEATURE (49): Xaa equals any of the naturally occurring L-amino acids
  MISC_FEATURE (50): Xaa equals any of the naturally occurring L-amino acids
  MISC_FEATURE (55): Xaa equals any of the naturally occurring L-amino acids
  MISC_FEATURE (59): Xaa equals any of the naturally occurring L-amino acids
  MISC_FEATURE (67): Xaa equals any of the naturally occurring L-amino acids
TKELDSXPGPGRLGTTLSGMQLXLXHRTSYXPSXEXRGRNPGWPHWQPXXFSSPXPQKXPFRHFLGXKS

SEQ ID NO: 8467 - protein, 41 aa, Homo sapiens
  MISC_FEATURE (1): Xaa equals any of the naturally occurring L-amino acids
  MISC_FEATURE (2): Xaa equals any of the naturally occurring L-amino acids
  MISC_FEATURE (21): Xaa equals any of the naturally occurring L-amino acids
  MISC_FEATURE (27): Xaa equals any of the naturally occurring L-amino acids
  MISC_FEATURE (38): Xaa equals any of the naturally occurring L-amino acids
XXDWVSLVELCPKTCMGYNLXSLPQLXYKACGHTQFQXAYQ

SEQ ID NO: 8468 - protein, 97 aa, Homo sapiens
  MISC_FEATURE (88): Xaa equals any of the naturally occurring L-amino acids
LLRTEALECLTVQPGSHRNIPIQRQKSVVCTMLSGQIRGSFLLTPCHCELPKQDPLSGKPLNGLQSSKWSQAQEELPRVIQNALWEAXVENQHTQRL

SEQ ID NO: 8469 - protein, 46 aa, Homo sapiens
  MISC_FEATURE (7): Xaa equals any of the naturally occurring L-amino acids
  MISC_FEATURE (10): Xaa equals any of the naturally occurring L-amino acids
  MISC_FEATURE (16): Xaa equals any of the naturally occurring L-amino acids
  MISC_FEATURE (22): Xaa equals any of the naturally occurring L-amino acids
  MISC_FEATURE (37): Xaa equals any of the naturally occurring L-amino acids
  MISC_FEATURE (39): Xaa equals any of the naturally occurring L-amino acids
GTRAGIXGSXHAFGVXSAGRRXIRKPIDRIIARHDLXQXPLSILLK

SEQ ID NO: 8470 - protein, 63 aa, Homo sapiens
DLKMISLSPLLRSFQGTTIRALHPNTLASFWSFCPGTEVQLGDPSHTGEGVAVEPQTPWSPQE

SEQ ID NO: 8471 - protein, 18 aa, Homo sapiens
  MISC_FEATURE (10): Xaa equals any of the naturally occurring L-amino acids
  MISC_FEATURE (13): Xaa equals any of the naturally occurring L-amino acids
  MISC_FEATURE (15): Xaa equals any of the naturally occurring L-amino acids
  MISC_FEATURE (17): Xaa equals any of the naturally occurring L-amino acids
VRSRIFSIGXKVXVXRXM

SEQ ID NO: 8472 - protein, 21 aa, Homo sapiens
  MISC_FEATURE (9): Xaa equals any of the naturally occurring L-amino acids
  MISC_FEATURE (16): Xaa equals any of the naturally occurring L-amino acids
  MISC_FEATURE (21): Xaa equals any of the naturally occurring L-amino acids
QLKSMGNPXIEIVFAXKVPFX

SEQ ID NO: 8473 - protein, 33 aa, Homo sapiens
  MISC_FEATURE (3): Xaa equals any of the naturally occurring L-amino acids
  MISC_FEATURE (9): Xaa equals any of the naturally occurring L-amino acids
  MISC_FEATURE (32): Xaa equals any of the naturally occurring L-amino acids
KCXHFLKSXTKALYFLFKKSLPHLVKIFSYLXS

SEQ ID NO: 8474 - protein, 36 aa, Homo sapiens
  MISC_FEATURE (23): Xaa equals any of the naturally occurring L-amino acids
  MISC_FEATURE (25): Xaa equals any of the naturally occurring L-amino acids
  MISC_FEATURE (30): Xaa equals any of the naturally occurring L-amino acids
  MISC_FEATURE (35): Xaa equals any of the naturally occurring L-amino acids
EFIVVYLFKYLTFKFLTIYFILXSXVAWIXHIHTXK

SEQ ID NO: 8475 - protein, 46 aa, Homo sapiens
  MISC_FEATURE (3): Xaa equals any of the naturally occurring L-amino acids
  MISC_FEATURE (11): Xaa equals any of the naturally occurring L-amino acids
  MISC_FEATURE (13): Xaa equals any of the naturally occurring L-amino acids
  MISC_FEATURE (26): Xaa equals any of the naturally occurring L-amino acids
  MISC_FEATURE (41): Xaa equals any of the naturally occurring L-amino acids
  MISC_FEATURE (43): Xaa equals any of the naturally occurring L-amino acids
  MISC_FEATURE (45): Xaa equals any of the naturally occurring L-amino acids
  MISC_FEATURE (46): Xaa equals any of the naturally occurring L-amino acids
RPXAAAWTGHXMXPLTAARSAMQDYXVSPIGDPWRTMLRFXLXGXX

SEQ ID NO: 8476 - protein, 22 aa, Homo sapiens
  MISC_FEATURE (19): Xaa equals any of the naturally occurring L-amino acids
TSSRSRAAALFFPFYIFLXVYD

SEQ ID NO: 8477 - protein, 54 aa, Homo sapiens
  MISC_FEATURE (39): Xaa equals any of the naturally occurring L-amino acids
PFQPAHAVEDKFTDLATDEFQTEGIRKTVSIVSLELHSXFKASAIRKDDFYLLG

SEQ ID NO: 8478 - protein, 24 aa, Homo sapiens
  MISC_FEATURE (2): Xaa equals any of the naturally occurring L-amino acids
  MISC_FEATURE (18): Xaa equals any of the naturally occurring L-amino acids
  MISC_FEATURE (24): Xaa equals any of the naturally occurring L-amino acids
PXVRPRVRFRRNTSKGDXTMIFTX

SEQ ID NO: 8479 - protein, 64 aa, Homo sapiens
  MISC_FEATURE (8): Xaa equals any of the naturally occurring L-amino acids
  MISC_FEATURE (10): Xaa equals any of the naturally occurring L-amino acids
  MISC_FEATURE (11): Xaa equals any of the naturally occurring L-amino acids
  MISC_FEATURE (14): Xaa equals any of the naturally occurring L-amino acids
  MISC_FEATURE (34): Xaa equals any of the naturally occurring L-amino acids
  MISC_FEATURE (46): Xaa equals any of the naturally occurring L-amino acids
  MISC_FEATURE (52): Xaa equals any of the naturally occurring L-amino acids
QPIHTRAXLXXYTXAHYSLQLHMLYLDHSEANSXHYIIVSINISNXLKYTIXIQASPIVPQMFG

SEQ ID NO: 8480 - protein, 52 aa, Homo sapiens
  MISC_FEATURE (44): Xaa equals any of the naturally occurring L-amino acids
  MISC_FEATURE (48): Xaa equals any of the naturally occurring L-amino acids
RYCIILRKCGYLDVYHTVSLCLHTNLCKKCILVCVPQPAVCFLXVLVXFKYK

SEQ ID NO: 8481 - protein, 66 aa, Homo sapiens
  MISC_FEATURE (20): Xaa equals any of the naturally occurring L-amino acids
  MISC_FEATURE (33): Xaa equals any of the naturally occurring L-amino acids
  MISC_FEATURE (51): Xaa equals any of the naturally occurring L-amino acids
  MISC_FEATURE (54): Xaa equals any of the naturally occurring L-amino acids
  MISC_FEATURE (60): Xaa equals any of the naturally occurring L-amino acids
  MISC_FEATURE (63): Xaa equals any of the naturally occurring L-amino acids
VGRRFLILTRTSSYVVPSWXSPGGPQKSLIAGXVCSSVSVHSFGVARRCHXLCXMMAGAXATXPPQ

SEQ ID NO: 8482 - protein, 36 aa, Homo sapiens
  MISC_FEATURE (1): Xaa equals any of the naturally occurring L-amino acids
  MISC_FEATURE (3): Xaa equals any of the naturally occurring L-amino acids
  MISC_FEATURE (34): Xaa equals any of the naturally occurring L-amino acids
  MISC_FEATURE (35): Xaa equals any of the naturally occurring L-amino acids
XTXAGTGPEFPGRPMRPVISVIKKITEPLKGIHXXW

SEQ ID NO: 8483 - protein, 77 aa, Homo sapiens
HVERSCPPGRQEAMPTAPGQASSQKALSAGLAAIPVLGGPRARLPEVRWPESWDSVLGLLAAEQAAHLTSVVASFSR

SEQ ID NO: 8484 - protein, 69 aa, Homo sapiens
  MISC_FEATURE (9): Xaa equals any of the naturally occurring L-amino acids
  MISC_FEATURE (11): Xaa equals any of the naturally occurring L-amino acids
  MISC_FEATURE (17): Xaa equals any of the naturally occurring L-amino acids
  MISC_FEATURE (27): Xaa equals any of the naturally occurring L-amino acids
  MISC_FEATURE (28): Xaa equals any of the naturally occurring L-amino acids
  MISC_FEATURE (44): Xaa equals any of the naturally occurring L-amino acids
  MISC_FEATURE (47): Xaa equals any of the naturally occurring L-amino acids
  MISC_FEATURE (55): Xaa equals any of the naturally occurring L-amino acids
  MISC_FEATURE (67): Xaa equals any of the naturally occurring L-amino acids
QTPAVVSVXPXSGLWPXLLVLVTPSLXXPPPWYVYSLQVLHKSXCLXCGEGRLLXLGSVDRKEHTCXCI

SEQ ID NO: 8485 - protein, 19 aa, Homo sapiens
  MISC_FEATURE (19): Xaa equals any of the naturally occurring L-amino acids
REGGKVWGGGCENLGLILX

SEQ ID NO: 8486 - protein, 46 aa, Homo sapiens
  MISC_FEATURE (2): Xaa equals any of the naturally occurring L-amino acids
  MISC_FEATURE (5): Xaa equals any of the naturally occurring L-amino acids
WXLPXMRGIRWLEDEVDGRLYIIFTPLCPFNFKLRDVTCSKSRDKI

SEQ ID NO: 8487 - protein, 12 aa, Homo sapiens
  MISC_FEATURE (2): Xaa equals any of the naturally occurring L-amino acids
AXNKRLKYCNKT

SEQ ID NO: 8488 - protein, 52 aa, Homo sapiens
  MISC_FEATURE (2): Xaa equals any of the naturally occurring L-amino acids
  MISC_FEATURE (11): Xaa equals any of the naturally occurring L-amino acids
  MISC_FEATURE (21): Xaa equals any of the naturally occurring L-amino acids
  MISC_FEATURE (38): Xaa equals any of the naturally occurring L-amino acids
  MISC_FEATURE (50): Xaa equals any of the naturally occurring L-amino acids
TXHFPRLREHXDLHRVLCLHXMPSGTIWFILVGRIFAXEKKIYMYLILIXLH

SEQ ID NO: 8489 - protein, 16 aa, Homo sapiens
  MISC_FEATURE (2): Xaa equals any of the naturally occurring L-amino acids
  MISC_FEATURE (5): Xaa equals any of the naturally occurring L-amino acids
  MISC_FEATURE (14): Xaa equals any of the naturally occurring L-amino acids
VXRVXVPARAGVVXAE

SEQ ID NO: 8490 - protein, 74 aa, Homo sapiens
  MISC_FEATURE (29): Xaa equals any of the naturally occurring L-amino acids
  MISC_FEATURE (30): Xaa equals any of the naturally occurring L-amino acids
  MISC_FEATURE (58): Xaa equals any of the naturally occurring L-amino acids
  MISC_FEATURE (63): Xaa equals any of the naturally occurring L-amino acids
  MISC_FEATURE (69): Xaa equals any of the naturally occurring L-amino acids
  MISC_FEATURE (71): Xaa equals any of the naturally occurring L-amino acids
  MISC_FEATURE (74): Xaa equals any of the naturally occurring L-amino acids
CGSWHNRHYLAKDPSFLFLYFAQRPGRLXXKAKSPGFPCHLAFKCAQPMTGWKEIDSXGKRGXICVQEXFXFPX

SEQ ID NO: 8491 - protein, 30 aa, Homo sapiens
  MISC_FEATURE (2): Xaa equals any of the naturally occurring L-amino acids
  MISC_FEATURE (9): Xaa equals any of the naturally occurring L-amino acids
  MISC_FEATURE (24): Xaa equals any of the naturally occurring L-amino acids
  MISC_FEATURE (25): Xaa equals any of the naturally occurring L-amino acids
  MISC_FEATURE (28): Xaa equals any of the naturally occurring L-amino acids
NXADMEVLXWTHREGAVWKLFGSXXMMXVA

SEQ ID NO: 8492 - protein, 42 aa, Homo sapiens
SRIALSKWLPSAEDRFFSPICLYVEKWYRIGTVFEDLMYIYK

SEQ ID NO: 8493 - protein, 70 aa, Homo sapiens
  MISC_FEATURE (2): Xaa equals any of the naturally occurring L-amino acids
  MISC_FEATURE (6): Xaa equals any of the naturally occurring L-amino acids
  MISC_FEATURE (19): Xaa equals any of the naturally occurring L-amino acids
  MISC_FEATURE (23): Xaa equals any of the naturally occurring L-amino acids
  MISC_FEATURE (31): Xaa equals any of the naturally occurring L-amino acids
  MISC_FEATURE (32): Xaa equals any of the naturally occurring L-amino acids
  MISC_FEATURE (33): Xaa equals any of the naturally occurring L-amino acids
  MISC_FEATURE (41): Xaa equals any of the naturally occurring L-amino acids
  MISC_FEATURE (49): Xaa equals any of the naturally occurring L-amino acids
  MISC_FEATURE (52): Xaa equals any of the naturally occurring L-amino acids
  MISC_FEATURE (66): Xaa equals any of the naturally occurring L-amino acids
  MISC_FEATURE (67): Xaa equals any of the naturally occurring L-amino acids
  MISC_FEATURE (68): Xaa equals any of the naturally occurring L-amino acids
  MISC_FEATURE (69): Xaa equals any of the naturally occurring L-amino acids
GXLVRXQVPVRNSRVDPRXRTNXGTVKDSQXXXSRQENFVXLLCVDRLXSVXPMEMPTGLDAWRLXXXXR

SEQ ID NO: 8494 - protein, 67 aa, Homo sapiens
  MISC_FEATURE (36): Xaa equals any of the naturally occurring L-amino acids
  MISC_FEATURE (51): Xaa equals any of the naturally occurring L-amino acids
  MISC_FEATURE (53): Xaa equals any of the naturally occurring L-amino acids
  MISC_FEATURE (55): Xaa equals any of the naturally occurring L-amino acids
  MISC_FEATURE (56): Xaa equals any of the naturally occurring L-amino acids
WILFLSWSHFVTCFCPREPQGSESCAPGQGLHLPSXVPPWAPGASGAVPGXSXTXXVTAEPLPHPSL

SEQ ID NO: 8495 - protein, 46 aa, Homo sapiens
  MISC_FEATURE (11): Xaa equals any of the naturally occurring L-amino acids
  MISC_FEATURE (28): Xaa equals any of the naturally occurring L-amino acids
  MISC_FEATURE (32): Xaa equals any of the naturally occurring L-amino acids
  MISC_FEATURE (39): Xaa equals any of the naturally occurring L-amino acids
  MISC_FEATURE (40): Xaa equals any of the naturally occurring L-amino acids
ILMETPDYRVXWNAPQVPVRNSRVDPRXRTVXGTTLRWXXMKTRRT

SEQ ID NO: 8496 - protein, 84 aa, Homo sapiens
  MISC_FEATURE (2): Xaa equals any of the naturally occurring L-amino acids
  MISC_FEATURE (4): Xaa equals any of the naturally occurring L-amino acids
  MISC_FEATURE (5): Xaa equals any of the naturally occurring L-amino acids
  MISC_FEATURE (29): Xaa equals any of the naturally occurring L-amino acids
  MISC_FEATURE (48): Xaa equals any of the naturally occurring L-amino acids
  MISC_FEATURE (65): Xaa equals any of the naturally occurring L-amino acids
  MISC_FEATURE (70): Xaa equals any of the naturally occurring L-amino acids
  MISC_FEATURE (75): Xaa equals any of the naturally occurring L-amino acids
  MISC_FEATURE (79): Xaa equals any of the naturally occurring L-amino acids
MXLXXGGCGGPLREQKPCMSDRVCQPYPXMELLPATSHRGIIVAGLLXCITELWRCVCGGEDSIXRGVHXAEAVXCQGXMALTA

SEQ ID NO: 8497 - protein, 38 aa, Homo sapiens
  MISC_FEATURE (4): Xaa equals any of the naturally occurring L-amino acids
  MISC_FEATURE (9): Xaa equals any of the naturally occurring L-amino acids
  MISC_FEATURE (10): Xaa equals any of the naturally occurring L-amino acids
  MISC_FEATURE (29): Xaa equals any of the naturally occurring L-amino acids
  MISC_FEATURE (34): Xaa equals any of the naturally occurring L-amino acids
MYKXSYILXXRQNIMVEPNLICSLSNIEXFKRYXIMMN

SEQ ID NO: 8498 - protein, 71 aa, Homo sapiens
  MISC_FEATURE (5): Xaa equals any of the naturally occurring L-amino acids
  MISC_FEATURE (13): Xaa equals any of the naturally occurring L-amino acids
  MISC_FEATURE (15): Xaa equals any of the naturally occurring L-amino acids
  MISC_FEATURE (30): Xaa equals any of the naturally occurring L-amino acids
  MISC_FEATURE (32): Xaa equals any of the naturally occurring L-amino acids
  MISC_FEATURE (36): Xaa equals any of the naturally occurring L-amino acids
  MISC_FEATURE (55): Xaa equals any of the naturally occurring L-amino acids
  MISC_FEATURE (56): Xaa equals any of the naturally occurring L-amino acids
  MISC_FEATURE (61): Xaa equals any of the naturally occurring L-amino acids
  MISC_FEATURE (70): Xaa equals any of the naturally occurring L-amino acids
  MISC_FEATURE (71): Xaa equals any of the naturally occurring L-amino acids
LIHYXKKRMGEKXKXALRPPTTAMHASSIXHXSSLXRYNACWKPCVPTNRLTHPXXVGNEXAAVAFHSGXX

SEQ ID NO: 8499 - protein, 34 aa, Homo sapiens
  MISC_FEATURE (6): Xaa equals any of the naturally occurring L-amino acids
  MISC_FEATURE (10): Xaa equals any of the naturally occurring L-amino acids
  MISC_FEATURE (23): Xaa equals any of the naturally occurring L-amino acids
  MISC_FEATURE (28): Xaa equals any of the naturally occurring L-amino acids
VVRNLXAWTXSNRCSYSSWCACXLPILXPTFLLL

SEQ ID NO: 8500 - protein, 53 aa, Homo sapiens
  MISC_FEATURE (1): Xaa equals any of the naturally occurring L-amino acids
  MISC_FEATURE (3): Xaa equals any of the naturally occurring L-amino acids
  MISC_FEATURE (15): Xaa equals any of the naturally occurring L-amino acids
  MISC_FEATURE (21): Xaa equals any of the naturally occurring L-amino acids
  MISC_FEATURE (26): Xaa equals any of the naturally occurring L-amino acids
  MISC_FEATURE (36): Xaa equals any of the naturally occurring L-amino acids
  MISC_FEATURE (51): Xaa equals any of the naturally occurring L-amino acids
XYXSLVELIMICPRXGFLELXSSPNXPDPKVRLSAXRPDRHTGRQQSTKTXDI

SEQ ID NO: 8501 - protein, 41 aa, Homo sapiens
  MISC_FEATURE (7): Xaa equals any of the naturally occurring L-amino acids
  MISC_FEATURE (11): Xaa equals any of the naturally occurring L-amino acids
  MISC_FEATURE (16): Xaa equals any of the naturally occurring L-amino acids
  MISC_FEATURE (34): Xaa equals any of the naturally occurring L-amino acids
SFFSIAXSPSXEQVEXANASHARMHEAVTTTHAXSLSCPGK

SEQ ID NO: 8502 - protein, 32 aa, Homo sapiens
  MISC_FEATURE (8): Xaa equals any of the naturally occurring L-amino acids
  MISC_FEATURE (10): Xaa equals any of the naturally occurring L-amino acids
  MISC_FEATURE (23): Xaa equals any of the naturally occurring L-amino acids
  MISC_FEATURE (24): Xaa equals any of the naturally occurring L-amino acids
FVVDLYLXLXNVTKISYRYMKLXXSKSTITLN

SEQ ID NO: 8503 - protein, 62 aa, Homo sapiens
  MISC_FEATURE (9): Xaa equals any of the naturally occurring L-amino acids
  MISC_FEATURE (19): Xaa equals any of the naturally occurring L-amino acids
  MISC_FEATURE (23): Xaa equals any of the naturally occurring L-amino acids
  MISC_FEATURE (31): Xaa equals any of the naturally occurring L-amino acids
  MISC_FEATURE (36): Xaa equals any of the naturally occurring L-amino acids
  MISC_FEATURE (38): Xaa equals any of the naturally occurring L-amino acids
  MISC_FEATURE (41): Xaa equals any of the naturally occurring L-amino acids
  MISC_FEATURE (44): Xaa equals any of the naturally occurring L-amino acids
  MISC_FEATURE (51): Xaa equals any of the naturally occurring L-amino acids
  MISC_FEATURE (52): Xaa equals any of the naturally occurring L-amino acids
  MISC_FEATURE (59): Xaa equals any of the naturally occurring L-amino acids
TVSSINQQXCTLGITPNDXKAKXLKGCLLIXRTSPXKXLFXDCXTDKLWSXXRNVKQTXVNI

SEQ ID NO: 8504 - protein, 42 aa, Homo sapiens
  MISC_FEATURE (1): Xaa equals any of the naturally occurring L-amino acids
  MISC_FEATURE (9): Xaa equals any of the naturally occurring L-amino acids
  MISC_FEATURE (23): Xaa equals any of the naturally occurring L-amino acids
  MISC_FEATURE (27): Xaa equals any of the naturally occurring L-amino acids
  MISC_FEATURE (37): Xaa equals any of the naturally occurring L-amino acids
  MISC_FEATURE (42): Xaa equals any of the naturally occurring L-amino acids
XPEERHVRXWFGGIREAAQVVGXRCRXRLFGTERARXRLGGX

SEQ ID NO: 8505 - protein, 70 aa, Homo sapiens
  MISC_FEATURE (1): Xaa equals any of the naturally occurring L-amino acids
  MISC_FEATURE (4): Xaa equals any of the naturally occurring L-amino acids
  MISC_FEATURE (8): Xaa equals any of the naturally occurring L-amino acids
  MISC_FEATURE (18): Xaa equals any of the naturally occurring L-amino acids
  MISC_FEATURE (46): Xaa equals any of the naturally occurring L-amino acids
  MISC_FEATURE (60): Xaa equals any of the naturally occurring L-amino acids
XSSXRRCXPVADLTTCGXESPGGRLTTQPETALGSQLIRSWGSVSXCEPLHADTLQARAXRPLLLQLHLR

SEQ ID NO: 8506 - protein, 45 aa, Homo sapiens
  MISC_FEATURE (7): Xaa equals any of the naturally occurring L-amino acids
  MISC_FEATURE (8): Xaa equals any of the naturally occurring L-amino acids
  MISC_FEATURE (25): Xaa equals any of the naturally occurring L-amino acids
  MISC_FEATURE (32): Xaa equals any of the naturally occurring L-amino acids
  MISC_FEATURE (37): Xaa equals any of the naturally occurring L-amino acids
  MISC_FEATURE (38): Xaa equals any of the naturally occurring L-amino acids
ICWFVLXXLFPTPLNKVHEKYRPTXHCLLCSXKTRGXXSFGLLTV

SEQ ID NO: 8507 - protein, 70 aa, Homo sapiens
  MISC_FEATURE (8): Xaa equals any of the naturally occurring L-amino acids
  MISC_FEATURE (11): Xaa equals any of the naturally occurring L-amino acids
  MISC_FEATURE (14): Xaa equals any of the naturally occurring L-amino acids
  MISC_FEATURE (16): Xaa equals any of the naturally occurring L-amino acids
  MISC_FEATURE (35): Xaa equals any of the naturally occurring L-amino acids
  MISC_FEATURE (52): Xaa equals any of the naturally occurring L-amino acids
  MISC_FEATURE (70): Xaa equals any of the naturally occurring L-amino acids
RLSPGAFXYVXYCXEXYTDPLLRRSGPLREPSPTXPNPKGQLSGPSRRTPGXKEAALTTSPQEMAQSVKX

SEQ ID NO: 8508 - protein, 67 aa, Homo sapiens
  MISC_FEATURE (13): Xaa equals any of the naturally occurring L-amino acids
  MISC_FEATURE (17): Xaa equals any of the naturally occurring L-amino acids
  MISC_FEATURE (23): Xaa equals any of the naturally occurring L-amino acids
  MISC_FEATURE (45): Xaa equals any of the naturally occurring L-amino acids
  MISC_FEATURE (49): Xaa equals any of the naturally occurring L-amino acids
  MISC_FEATURE (51): Xaa equals any of the naturally occurring L-amino acids
KGNLKLKSQEGEXIDRXLPCREXQDPDLHDSERHDKRRLTVNQGXKKRXEXLALSNQWWYKNGGPGW

SEQ ID NO: 8509 - protein, 43 aa, Homo sapiens
  MISC_FEATURE (2): Xaa equals any of the naturally occurring L-amino acids
  MISC_FEATURE (15): Xaa equals any of the naturally occurring L-amino acids
  MISC_FEATURE (24): Xaa equals any of the naturally occurring L-amino acids
  MISC_FEATURE (27): Xaa equals any of the naturally occurring L-amino acids
  MISC_FEATURE (36): Xaa equals any of the naturally occurring L-amino acids
  MISC_FEATURE (43): Xaa equals any of the naturally occurring L-amino acids
LXKETRLRPTRIKAXTKTHSGRWXRGXGWKTMHEGXHLFSLAX

SEQ ID NO: 8510 - protein, 31 aa, Homo sapiens
  MISC_FEATURE (3): Xaa equals any of the naturally occurring L-amino acids
  MISC_FEATURE (6): Xaa equals any of the naturally occurring L-amino acids
  MISC_FEATURE (8): Xaa equals any of the naturally occurring L-amino acids
  MISC_FEATURE (10): Xaa equals any of the naturally occurring L-amino acids
  MISC_FEATURE (23): Xaa equals any of the naturally occurring L-amino acids
DYXRTXYXFXMTSDKDHYNCPTXSTVYNIAG

SEQ ID NO: 8511 - protein, 66 aa, Homo sapiens
  MISC_FEATURE (4): Xaa equals any of the naturally occurring L-amino acids
  MISC_FEATURE (6): Xaa equals any of the naturally occurring L-amino acids
  MISC_FEATURE (13): Xaa equals any of the naturally occurring L-amino acids
  MISC_FEATURE (21): Xaa equals any of the naturally occurring L-amino acids
  MISC_FEATURE (44): Xaa equals any of the naturally occurring L-amino acids
  MISC_FEATURE (53): Xaa equals any of the naturally occurring L-amino acids
  MISC_FEATURE (58): Xaa equals any of the naturally occurring L-amino acids
  MISC_FEATURE (59): Xaa equals any of the naturally occurring L-amino acids
  MISC_FEATURE (63): Xaa equals any of the naturally occurring L-amino acids
LYVXKXLILNEGXKLVYCVLXRGITLCGIVTGISEEENGKMRSXIRRWVDHRXQCITXXEDIXKGK

SEQ ID NO: 8512 - protein, 34 aa, Homo sapiens
  MISC_FEATURE (11): Xaa equals any of the naturally occurring L-amino acids
  MISC_FEATURE (19): Xaa equals any of the naturally occurring L-amino acids
  MISC_FEATURE (29): Xaa equals any of the naturally occurring L-amino acids
  MISC_FEATURE (33): Xaa equals any of the naturally occurring L-amino acids
NSLPSELLTFXLGSTIPRXGDNGTDTHTXPHRXH

SEQ ID NO: 8513 - protein, 43 aa, Homo sapiens
  MISC_FEATURE (14): Xaa equals any of the naturally occurring L-amino acids
  MISC_FEATURE (27): Xaa equals any of the naturally occurring L-amino acids
  MISC_FEATURE (33): Xaa equals any of the naturally occurring L-amino acids
EWGRGGLKILWGGXSPNIVPPSHPRTXLHIDAXHRGGSKLPLS

SEQ ID NO: 8514 - protein, 46 aa, Homo sapiens
  MISC_FEATURE (6): Xaa equals any of the naturally occurring L-amino acids
  MISC_FEATURE (18): Xaa equals any of the naturally occurring L-amino acids
  MISC_FEATURE (23): Xaa equals any of the naturally occurring L-amino acids
  MISC_FEATURE (28): Xaa equals any of the naturally occurring L-amino acids
  MISC_FEATURE (33): Xaa equals any of the naturally occurring L-amino acids
IVFKAXRGDLGTLGESTXRFGMXNPRYXIIEQXYDRNLFIQQSWDV

SEQ ID NO: 8515 - protein, 70 aa, Homo sapiens
  MISC_FEATURE (1): Xaa equals any of the naturally occurring L-amino acids
  MISC_FEATURE (4): Xaa equals any of the naturally occurring L-amino acids
  MISC_FEATURE (11): Xaa equals any of the naturally occurring L-amino acids
  MISC_FEATURE (16): Xaa equals any of the naturally occurring L-amino acids
  MISC_FEATURE (37): Xaa equals any of the naturally occurring L-amino acids
  MISC_FEATURE (41): Xaa equals any of the naturally occurring L-amino acids
  MISC_FEATURE (62): Xaa equals any of the naturally occurring L-amino acids
  MISC_FEATURE (64): Xaa equals any of the naturally occurring L-amino acids
  MISC_FEATURE (67): Xaa equals any of the naturally occurring L-amino acids
  MISC_FEATURE (69): Xaa equals any of the naturally occurring L-amino acids
XAQXRDGSHLXPDYIXFDTFTHKVDKRVTKFVQNSHXPRAXTDSAGTQLLFPKPRTPHESPXPXVHXRXG

SEQ ID NO: 8516 - protein, 35 aa, Homo sapiens
  MISC_FEATURE (16): Xaa equals any of the naturally occurring L-amino acids
  MISC_FEATURE (20): Xaa equals any of the naturally occurring L-amino acids
  MISC_FEATURE (30): Xaa equals any of the naturally occurring L-amino acids
  MISC_FEATURE (31): Xaa equals any of the naturally occurring L-amino acids
NELGMERLASMLGMPXEAPXDEDTINLLWXXDQTT

SEQ ID NO: 8517 - protein, 56 aa, Homo sapiens
  MISC_FEATURE (1): Xaa equals any of the naturally occurring L-amino acids
  MISC_FEATURE (4): Xaa equals any of the naturally occurring L-amino acids
  MISC_FEATURE (6): Xaa equals any of the naturally occurring L-amino acids
  MISC_FEATURE (26): Xaa equals any of the naturally occurring L-amino acids
XTAXMXGLKRDLGTKEIRNCMKEMEXRCAHCTRLNKAAGQRNKDVHTESVCRLPET

SEQ ID NO: 8518 - protein, 31 aa, Homo sapiens
  MISC_FEATURE (9): Xaa equals any of the naturally occurring L-amino acids
  MISC_FEATURE (10): Xaa equals any of the naturally occurring L-amino acids
  MISC_FEATURE (17): Xaa equals any of the naturally occurring L-amino acids
MRRSVPSWXXEPALPRXTLGYPLLLPCCVGR

SEQ ID NO: 8519 - protein, 84 aa, Homo sapiens
  MISC_FEATURE (3): Xaa equals any of the naturally occurring L-amino acids
  MISC_FEATURE (4): Xaa equals any of the naturally occurring L-amino acids
  MISC_FEATURE (10): Xaa equals any of the naturally occurring L-amino acids
  MISC_FEATURE (16): Xaa equals any of the naturally occurring L-amino acids
  MISC_FEATURE (57): Xaa equals any of the naturally occurring L-amino acids
  MISC_FEATURE (68): Xaa equals any of the naturally occurring L-amino acids
  MISC_FEATURE (69): Xaa equals any of the naturally occurring L-amino acids
SPXXQGVRQXRKCCVXCHRPSTTCGRTQLLPPKPKAPYDLRTLRHVRGGDVTTKTRXPVQPGPWTAWXXHNARQATEEQSTARP

SEQ ID NO: 8520 - protein, 34 aa, Homo sapiens
  MISC_FEATURE (20): Xaa equals any of the naturally occurring L-amino acids
  MISC_FEATURE (23): Xaa equals any of the naturally occurring L-amino acids
EVHRLTCVEFCDLVCRETGXLKXTLLRYQLLMIS

SEQ ID NO: 8521 - protein, 31 aa, Homo sapiens
  MISC_FEATURE (4): Xaa equals any of the naturally occurring L-amino acids
  MISC_FEATURE (16): Xaa equals any of the naturally occurring L-amino acids
  MISC_FEATURE (29): Xaa equals any of the naturally occurring L-amino acids
LKSXLETSYISLFNIXKETNCQGLCRQHXIS

SEQ ID NO: 8522 - protein, 64 aa, Homo sapiens
  MISC_FEATURE (3): Xaa equals any of the naturally occurring L-amino acids
  MISC_FEATURE (6): Xaa equals any of the naturally occurring L-amino acids
  MISC_FEATURE (15): Xaa equals any of the naturally occurring L-amino acids
  MISC_FEATURE (22): Xaa equals any of the naturally occurring L-amino acids
  MISC_FEATURE (23): Xaa equals any of the naturally occurring L-amino acids
  MISC_FEATURE (47): Xaa equals any of the naturally occurring L-amino acids
  MISC_FEATURE (48): Xaa equals any of the naturally occurring L-amino acids
  MISC_FEATURE (52): Xaa equals any of the naturally occurring L-amino acids
  MISC_FEATURE (55): Xaa equals any of the naturally occurring L-amino acids
  MISC_FEATURE (62): Xaa equals any of the naturally occurring L-amino acids
LIXTTXSEKPLPRIXLKRTWTXXLFTDWLSSQERTKSTTGSSRKSGXXLEIXREXQCSEGEXTS

SEQ ID NO: 8523 - protein, 33 aa, Homo sapiens
  MISC_FEATURE (10): Xaa equals any of the naturally occurring L-amino acids
  MISC_FEATURE (17): Xaa equals any of the naturally occurring L-amino acids
  MISC_FEATURE (24): Xaa equals any of the naturally occurring L-amino acids
  MISC_FEATURE (25): Xaa equals any of the naturally occurring L-amino acids
YTCIVRKCDXARVSNNXPYKPQQXXHLIFRKKR

SEQ ID NO: 8524 - protein, 76 aa, Homo sapiens
  MISC_FEATURE (9): Xaa equals any of the naturally occurring L-amino acids
  MISC_FEATURE (18): Xaa equals any of the naturally occurring L-amino acids
  MISC_FEATURE (35): Xaa equals any of the naturally occurring L-amino acids
  MISC_FEATURE (41): Xaa equals any of the naturally occurring L-amino acids
  MISC_FEATURE (50): Xaa equals any of the naturally occurring L-amino acids
  MISC_FEATURE (53): Xaa equals any of the naturally occurring L-amino acids
  MISC_FEATURE (55): Xaa equals any of the naturally occurring L-amino acids
  MISC_FEATURE (67): Xaa equals any of the naturally occurring L-amino acids
  MISC_FEATURE (76): Xaa equals any of the naturally occurring L-amino acids
AETLLECVXCHLWRFGLXRCKWTAPSAALLWRLWXEELVTXVTKWWLCAXLPXLXHGPSVVRHLQRXRPALHDRLX

SEQ ID NO: 8525 - protein, 40 aa, Homo sapiens
  MISC_FEATURE (28): Xaa equals any of the naturally occurring L-amino acids
YGETRLTFGKAATPAGTGPEFPGLPTLXLKSCCFFHKKKK

SEQ ID NO: 8526 - protein, 64 aa, Homo sapiens
  MISC_FEATURE (3): Xaa equals any of the naturally occurring L-amino acids
  MISC_FEATURE (12): Xaa equals any of the naturally occurring L-amino acids
  MISC_FEATURE (33): Xaa equals any of the naturally occurring L-amino acids
RRXWERTTEKWXDVDGVPLVSALVLLWGNVLYXFKGLCGQESLGNTVPNVCKPHDPIQLHDSFY

SEQ ID NO: 8527 - protein, 80 aa, Homo sapiens
  MISC_FEATURE (6): Xaa equals any of the naturally occurring L-amino acids
  MISC_FEATURE (55): Xaa equals any of the naturally occurring L-amino acids
HGGAAXAPRRGRASRAGSAPALSRGGGAEDAPAAGASALSEAGRAADAPGQGREXWRRRRMALTGAVSEPLRSPGEAWPS

SEQ ID NO: 8528 - protein, 43 aa, Homo sapiens
  MISC_FEATURE (4): Xaa equals any of the naturally occurring L-amino acids
  MISC_FEATURE (7): Xaa equals any of the naturally occurring L-amino acids
  MISC_FEATURE (22): Xaa equals any of the naturally occurring L-amino acids
  MISC_FEATURE (23): Xaa equals any of the naturally occurring L-amino acids
  MISC_FEATURE (33): Xaa equals any of the naturally occurring L-amino acids
  MISC_FEATURE (42): Xaa equals any of the naturally occurring L-amino acids
VRDXFGXAPGPVLPGRPTRAKXXIHVFEHLMVXTVLNVMLGXK

SEQ ID NO: 8529 - protein, 48 aa, Homo sapiens
  MISC_FEATURE (1): Xaa equals any of the naturally occurring L-amino acids
  MISC_FEATURE (29): Xaa equals any of the naturally occurring L-amino acids
  MISC_FEATURE (30): Xaa equals any of the naturally occurring L-amino acids
  MISC_FEATURE (44): Xaa equals any of the naturally occurring L-amino acids
  MISC_FEATURE (47): Xaa equals any of the naturally occurring L-amino acids
XGNAPYRVRWNARRYRSGISGSTHASGVXXGLGTTVLMEGEATXRKXD

SEQ ID NO: 8530 - protein, 100 aa, Homo sapiens
  MISC_FEATURE (1): Xaa equals any of the naturally occurring L-amino acids
  MISC_FEATURE (2): Xaa equals any of the naturally occurring L-amino acids
  MISC_FEATURE (17): Xaa equals any of the naturally occurring L-amino acids
  MISC_FEATURE (26): Xaa equals any of the naturally occurring L-amino acids
  MISC_FEATURE (37): Xaa equals any of the naturally occurring L-amino acids
  MISC_FEATURE (96): Xaa equals any of the naturally occurring L-amino acids
  MISC_FEATURE (98): Xaa equals any of the naturally occurring L-amino acids
  MISC_FEATURE (99): Xaa equals any of the naturally occurring L-amino acids
  MISC_FEATURE (100): Xaa equals any of the naturally occurring L-amino acids
XXYRVRWNARRYRSGIXGSTHASGAXRDQIREPVSLXHGLRRPRVGAAPPQPAAHAHLLERLLQLRPVHRLPGAHAAGPALSDAQLAAPDLLGLLXAXXX

SEQ ID NO: 8531 - protein, 56 aa, Homo sapiens
  MISC_FEATURE (22): Xaa equals any of the naturally occurring L-amino acids
  MISC_FEATURE (41): Xaa equals any of the naturally occurring L-amino acids
  MISC_FEATURE (50): Xaa equals any of the naturally occurring L-amino acids
  MISC_FEATURE (51): Xaa equals any of the naturally occurring L-amino acids
  MISC_FEATURE (52): Xaa equals any of the naturally occurring L-amino acids
  MISC_FEATURE (54): Xaa equals any of the naturally occurring L-amino acids
GHPSARGNCLTGVCLCPFEPLXFYLAQAPRFMFSRSKLCMXSLRRLGEEXXXQXWD

SEQ ID NO: 8532 - protein, 40 aa, Homo sapiens
  MISC_FEATURE (9): Xaa equals any of the naturally occurring L-amino acids
  MISC_FEATURE (11): Xaa equals any of the naturally occurring L-amino acids
  MISC_FEATURE (15): Xaa equals any of the naturally occurring L-amino acids
  MISC_FEATURE (18): Xaa equals any of the naturally occurring L-amino acids
  MISC_FEATURE (20): Xaa equals any of the naturally occurring L-amino acids
  MISC_FEATURE (24): Xaa equals any of the naturally occurring L-amino acids
  MISC_FEATURE (27): Xaa equals any of the naturally occurring L-amino acids
  MISC_FEATURE (38): Xaa equals any of the naturally occurring L-amino acids
  MISC_FEATURE (39): Xaa equals any of the naturally occurring L-amino acids
REKCPHLLXSXSLTXSHXLXSDPXFTXDLPLLRSSSSXXT

SEQ ID NO: 8533 - protein, 32 aa, Homo sapiens
  MISC_FEATURE (1): Xaa equals any of the naturally occurring L-amino acids
  MISC_FEATURE (2): Xaa equals any of the naturally occurring L-amino acids
  MISC_FEATURE (17): Xaa equals any of the naturally occurring L-amino acids
  MISC_FEATURE (18): Xaa equals any of the naturally occurring L-amino acids
  MISC_FEATURE (25): Xaa equals any of the naturally occurring L-amino acids
XXKAPVRIWRVDPRCPXXFLLGNAXNHVLDEC

SEQ ID NO: 8534 - protein, 35 aa, Homo sapiens
  MISC_FEATURE (9): Xaa equals any of the naturally occurring L-amino acids
  MISC_FEATURE (12): Xaa equals any of the naturally occurring L-amino acids
  MISC_FEATURE (18): Xaa equals any of the naturally occurring L-amino acids
  MISC_FEATURE (22): Xaa equals any of the naturally occurring L-amino acids
  MISC_FEATURE (30): Xaa equals any of the naturally occurring L-amino acids
GWNARRYRXGIXGSTHAXGHNXGSPGLKQXGWNPQ

SEQ ID NO: 8535 - protein, 54 aa, Homo sapiens
  MISC_FEATURE (4): Xaa equals any of the naturally occurring L-amino acids
  MISC_FEATURE (8): Xaa equals any of the naturally occurring L-amino acids
  MISC_FEATURE (14): Xaa equals any of the naturally occurring L-amino acids
  MISC_FEATURE (44): Xaa equals any of the naturally occurring L-amino acids
  MISC_FEATURE (46): Xaa equals any of the naturally occurring L-amino acids
  MISC_FEATURE (54): Xaa equals any of the naturally occurring L-amino acids
TTDXSETXHYRVRXNARRYRSGIPGSTHASGTLLKFLCKLGLCXSXSCVSRTVX

SEQ ID NO: 8536 - protein, 64 aa, Homo sapiens
  MISC_FEATURE (3): Xaa equals any of the naturally occurring L-amino acids
  MISC_FEATURE (4): Xaa equals any of the naturally occurring L-amino acids
  MISC_FEATURE (7): Xaa equals any of the naturally occurring L-amino acids
  MISC_FEATURE (11): Xaa equals any of the naturally occurring L-amino acids
  MISC_FEATURE (37): Xaa equals any of the naturally occurring L-amino acids
  MISC_FEATURE (44): Xaa equals any of the naturally occurring L-amino acids
  MISC_FEATURE (48): Xaa equals any of the naturally occurring L-amino acids
  MISC_FEATURE (54): Xaa equals any of the naturally occurring L-amino acids
TLXXSPXESAXHASNWPTACLSADELRICKTVQLQQXSLSRTSXATHXHRISLXIVLCSANGML

SEQ ID NO: 8537 - protein, 47 aa, Homo sapiens
  MISC_FEATURE (2): Xaa equals any of the naturally occurring L-amino acids
  MISC_FEATURE (3): Xaa equals any of the naturally occurring L-amino acids
  MISC_FEATURE (26): Xaa equals any of the naturally occurring L-amino acids
  MISC_FEATURE (32): Xaa equals any of the naturally occurring L-amino acids
  MISC_FEATURE (36): Xaa equals any of the naturally occurring L-amino acids
YXXDDLFPPCAGKRHRRPGIAKLSLXKDDLDXSRAXASSRRGRFVKP

SEQ ID NO: 8538 - protein, 36 aa, Homo sapiens
  MISC_FEATURE (21): Xaa equals any of the naturally occurring L-amino acids
  MISC_FEATURE (24): Xaa equals any of the naturally occurring L-amino acids
  MISC_FEATURE (26): Xaa equals any of the naturally occurring L-amino acids
  MISC_FEATURE (31): Xaa equals any of the naturally occurring L-amino acids
YADDIRLFSKHPPSSTECDVXPQXLXGLRWXHSSLE

SEQ ID NO: 8539 - protein, 27 aa, Homo sapiens
  MISC_FEATURE (5): Xaa equals any of the naturally occurring L-amino acids
  MISC_FEATURE (7): Xaa equals any of the naturally occurring L-amino acids
  MISC_FEATURE (21): Xaa equals any of the naturally occurring L-amino acids
  MISC_FEATURE (22): Xaa equals any of the naturally occurring L-amino acids
  MISC_FEATURE (27): Xaa equals any of the naturally occurring L-amino acids
LPVYXGXLGTTRNLNSKWPSXXTLCIX

SEQ ID NO: 8540 - protein, 38 aa, Homo sapiens
  MISC_FEATURE (1): Xaa equals any of the naturally occurring L-amino acids
  MISC_FEATURE (3): Xaa equals any of the naturally occurring L-amino acids
  MISC_FEATURE (14): Xaa equals any of the naturally occurring L-amino acids
  MISC_FEATURE (27): Xaa equals any of the naturally occurring L-amino acids
  MISC_FEATURE (28): Xaa equals any of the naturally occurring L-amino acids
  MISC_FEATURE (34): Xaa equals any of the naturally occurring L-amino acids
XTXPKQASRNSGRXQGCSVQATCVARXXLYLLFXTNAA

SEQ ID NO: 8541 - protein, 34 aa, Homo sapiens
  MISC_FEATURE (8): Xaa equals any of the naturally occurring L-amino acids
  MISC_FEATURE (13): Xaa equals any of the naturally occurring L-amino acids
  MISC_FEATURE (16): Xaa equals any of the naturally occurring L-amino acids
  MISC_FEATURE (28): Xaa equals any of the naturally occurring L-amino acids
IGGSMWIXCLISXASXHLLRAVIEPSSXATGEHM

SEQ ID NO: 8542 - protein, 47 aa, Homo sapiens
  MISC_FEATURE (3): Xaa equals any of the naturally occurring L-amino acids
  MISC_FEATURE (4): Xaa equals any of the naturally occurring L-amino acids
  MISC_FEATURE (7): Xaa equals any of the naturally occurring L-amino acids
  MISC_FEATURE (16): Xaa equals any of the naturally occurring L-amino acids
WTXXRPXGVVPNSSLXCRQDLNTNEILQPLTENRAHRSSVTKGETLT

SEQ ID NO: 8543 - protein, 44 aa, Homo sapiens
  MISC_FEATURE (1): Xaa equals any of the naturally occurring L-amino acids
  MISC_FEATURE (8): Xaa equals any of the naturally occurring L-amino acids
  MISC_FEATURE (12): Xaa equals any of the naturally occurring L-amino acids
  MISC_FEATURE (26): Xaa equals any of the naturally occurring L-amino acids
  MISC_FEATURE (29): Xaa equals any of the naturally occurring L-amino acids
  MISC_FEATURE (39): Xaa equals any of the naturally occurring L-amino acids
XVDRSVSXAEPXLPTLHPRVHFSALXLRXHTTDSTTTCXGRRLS

SEQ ID NO: 8544 - protein, 56 aa, Homo sapiens
  MISC_FEATURE (11): Xaa equals any of the naturally occurring L-amino acids
  MISC_FEATURE (20): Xaa equals any of the naturally occurring L-amino acids
  MISC_FEATURE (22): Xaa equals any of the naturally occurring L-amino acids
  MISC_FEATURE (27): Xaa equals any of the naturally occurring L-amino acids
  MISC_FEATURE (47): Xaa equals any of the naturally occurring L-amino acids
NPLTTRRAPVXWAVCLGLWXSXNGRLXSAPIRTLESGSSLMSSRPPXRMEQLLDGT
